United States Patent Application Publication US 2023/0026259 A1 - sequence listing, part 16

SEQ ID NO: 72623 - protein, 167 aa, Homo sapiens
  Payload ID: 14376
  Gene Symbol: RFC4
  Gene Name: replication factor C (activator 1) 4, 37kDa
  ENSP ID: ENSP00000413065
MQAFLKGTSISTKPPLTKDRGVAASAGSSGENKKAKPVPWVEKYRPKCVDEVAFQEEVVAVLKKSLEGADLPNLLFYGPPGTGKTSTILAAARELFGPELFRLRVLELNASDERGIQVVREKVKNFAQLTVSGSRSDGKPCPPFKIVILDEADSMTSAAQAALRRTM

SEQ ID NO: 72624 - protein, 95 aa, Homo sapiens
  Payload ID: 14376
  Gene Symbol: RFC4
  Gene Name: replication factor C (activator 1) 4, 37kDa
  ENSP ID: ENSP00000415099
MQAFLKGTSISTKPPLTKDRGVAASAGSSGENKKAKPVPWVEKYRPKCVDEVAFQEEVVAVLKKSLEGADLPNLLFYGPPGTGKTSTILAAAREL

SEQ ID NO: 72625 - protein, 319 aa, Homo sapiens
  Payload ID: 14377
  Gene Symbol: RFC5
  Gene Name: replication factor C (activator 1) 5, 36.5kDa
  Uniprot ID: P40937
  ENSP ID: ENSP00000376325
MVEKYRPQTLNDLISHQDILSTIQKFINEDRLPHLLLYGPPGTGKTSTILACAKQLYKDKEFGSMVLELNASDDRGIDIIRGPILSFASTRTIFKKGFKLVILDEADAMTQDAQNALRRVIEKFTENTRFCLICNYLSKIIPALQSRCTRFRFGPLTPELMVPRLEHVVEEEKVDISEDGMKALVTLSSGDMRRALNILQSTNMAFGKVTEETVYTCTGHPLKSDIANILDWMLNQDFTTAYRNITELKTLKGLALHDILTEIHLFVHRVDFPSSVRIHLLTKMADIEYRLSVGTNEKIQLSSLIAAFQVTRDLIVAEA

SEQ ID NO: 72626 - protein, 104 aa, Homo sapiens
  Payload ID: 14377
  Gene Symbol: RFC5
  Gene Name: replication factor C (activator 1) 5, 36.5kDa
  ENSP ID: ENSP00000390340
MVEKYRPQTLNDLISHQDILSTIQKFINEDRLPHLLLYGPPGTGKTSTILACAKQLYKDKEFGSMVLELNASDDRGIDIIRGPILSFASTRTIFKKGFKLVILD

SEQ ID NO: 72627 - protein, 99 aa, Homo sapiens
  Payload ID: 14377
  Gene Symbol: RFC5
  Gene Name: replication factor C (activator 1) 5, 36.5kDa
  ENSP ID: ENSP00000393636
MVLELNASDDRGIDIIRGPILSFASTRTIFKKGFKLVILDEADAMTQDAQNALRRVIEKFTENTRFCLICNYLSKIIPALQSRCTRFRFGPLTPELMVP

SEQ ID NO: 72628 - protein, 340 aa, Homo sapiens
  Payload ID: 14377
  Gene Symbol: RFC5
  Gene Name: replication factor C (activator 1) 5, 36.5kDa
  Uniprot ID: P40937
  ENSP ID: ENSP00000408295
METSALKQQEQPAATKIRNLPWVEKYRPQTLNDLISHQDILSTIQKFINEDRLPHLLLYGPPGTGKTSTILACAKQLYKDKEFGSMVLELNASDDRGIDIIRGPILSFASTRTIFKKGFKLVILDEADAMTQDAQNALRRVIEKFTENTRFCLICNYLSKIIPALQSRCTRFRFGPLTPELMVPRLEHVVEEEKVDISEDGMKALVTLSSGDMRRALNILQSTNMAFGKVTEETVYTCTGHPLKSDIANILDWMLNQDFTTAYRNITELKTLKGLALHDILTEIHLFVHRVDFPSSVRIHLLTKMADIEYRLSVGTNEKIQLSSLIAAFQVTRDLIVAEA

SEQ ID NO: 72629 - protein, 63 aa, Homo sapiens
  Payload ID: 14377
  Gene Symbol: RFC5
  Gene Name: replication factor C (activator 1) 5, 36.5kDa
  ENSP ID: ENSP00000438252
MVEKYRPQTLNDLISHQDILSTIQKFINEDRLPHLLLYGPPGTGKTSTILACAKQLYKDKEFG

SEQ ID NO: 72630 - protein, 104 aa, Homo sapiens
  Payload ID: 14377
  Gene Symbol: RFC5
  Gene Name: replication factor C (activator 1) 5, 36.5kDa
  ENSP ID: ENSP00000443187
MVLELNASDDRGIDIIRGPILSFASTRTIFKKGFKLVILDEADAMTQDAQNALRRVIEKFTENTRFCLICNYLSKIIPALQSRCTRFRFGPLTPELMVPRLEHV

SEQ ID NO: 72631 - protein, 139 aa, Homo sapiens
  Payload ID: 14377
  Gene Symbol: RFC5
  Gene Name: replication factor C (activator 1) 5, 36.5kDa
  ENSP ID: ENSP00000445917
MLERSGVITAQCNLKHWGSSHSPASASEELGLLEPLATTNLLSIYGFAYSGHFMVEKYRPQTLNDLISHQDILSTIQKFINEDRLPHLLLYGPPGTGKTSTILACAKQLYKDKEFGSMVLELNASDDRGIDIIRGPILS

SEQ ID NO: 72632 - protein, 567 aa, Homo sapiens
  Payload ID: 14378
  Gene Symbol: REPIN1
  Gene Name: replication initiator 1
  Uniprot ID: Q9BWE0
  ENSP ID: ENSP00000380451
MLERRCRGPLAMGLAQPRLLSGPSQESPQTLGKESRGLRQQGTSVAQSGAQAPGRAHRCAHCRRHFPGWVALWLHTRRCQARLPLPCPECGRRFRHAPFLALHRQVHAAATPDLGFACHLCGQSFRGWVALVLHLRAHSAAKRPIACPKCERRFWRRKQLRAHLRRCHPPAPEARPFICGNCGRSFAQWDQLVAHKRVHVAEALEEAAAKALGPRPRGRPAVTAPRPGGDAVDRPFQCACCGKRFRHKPNLIAHRRVHTGERPHQCPECGKRFTNKPYLTSHRRIHTGEKPYPCKECGRRFRHKPNLLSHSKIHKRSEGSAQAAPGPGSPQLPAGPQESAAEPTPAVPLKPAQEPPPGAPPEHPQDPIEAPPSLYSCDDCGRSFRLERFLRAHQRQHTGERPFTCAECGKNFGKKTHLVAHSRVHSGERPFACEECGRRFSQGSHLAAHRRDHAPDRPFVCPDCGKAFRHKPYLAAHRRIHTGEKPYVCPDCGKAFSQKSNLVSHRRIHTGERPYACPDCDRSFSQKSNLITHRKSHIRDGAFCCAICGQTFDDEERLLAHQKKHDV

SEQ ID NO: 72633 - protein, 567 aa, Homo sapiens; identical to SEQ ID NO: 72632
  Payload ID: 14378
  Gene Symbol: REPIN1
  Gene Name: replication initiator 1
  Uniprot ID: Q9BWE0
  ENSP ID: ENSP00000388287

SEQ ID NO: 72634 - protein, 567 aa, Homo sapiens; identical to SEQ ID NO: 72632
  Payload ID: 14378
  Gene Symbol: REPIN1
  Gene Name: replication initiator 1
  Uniprot ID: Q9BWE0
  ENSP ID: ENSP00000407714

SEQ ID NO: 72635 - protein, 624 aa, Homo sapiens
  Payload ID: 14378
  Gene Symbol: REPIN1
  Gene Name: replication initiator 1
  Uniprot ID: Q9BWE0
  ENSP ID: ENSP00000417291
MGIGVSLLLQFSLTPGGYRSVGRSRRCSRGSIPRNIPKRSWKKPHPQLCSLQAEEEPMLERRCRGPLAMGLAQPRLLSGPSQESPQTLGKESRGLRQQGTSVAQSGAQAPGRAHRCAHCRRHFPGWVALWLHTRRCQARLPLPCPECGRRFRHAPFLALHRQVHAAATPDLGFACHLCGQSFRGWVALVLHLRAHSAAKRPIACPKCERRFWRRKQLRAHLRRCHPPAPEARPFICGNCGRSFAQWDQLVAHKRVHVAEALEEAAAKALGPRPRGRPAVTAPRPGGDAVDRPFQCACCGKRFRHKPNLIAHRRVHTGERPHQCPECGKRFTNKPYLTSHRRIHTGEKPYPCKECGRRFRHKPNLLSHSKIHKRSEGSAQAAPGPGSPQLPAGPQESAAEPTPAVPLKPAQEPPPGAPPEHPQDPIEAPPSLYSCDDCGRSFRLERFLRAHQRQHTGERPFTCAECGKNFGKKTHLVAHSRVHSGERPFACEECGRRFSQGSHLAAHRRDHAPDRPFVCPDCGKAFRHKPYLAAHRRIHTGEKPYVCPDCGKAFSQKSNLVSHRRIHTGERPYACPDCDRSFSQKSNLITHRKSHIRDGAFCCAICGQTFDDEERLLAHQKKHDV

SEQ ID NO: 72636 - protein, 87 aa, Homo sapiens
  Payload ID: 14378
  Gene Symbol: REPIN1
  Gene Name: replication initiator 1
  ENSP ID: ENSP00000417786
MGIGVSLLLQFSLTPGGYRSVGRSRRCSRGSIPRNIPKRSWKKPHPQLCSLQGLVIFDVSQLLHLLNRELSVCLSSFSELLCSSDVA

SEQ ID NO: 72637 - protein, 136 aa, Homo sapiens
  Payload ID: 14378
  Gene Symbol: REPIN1
  Gene Name: replication initiator 1
  ENSP ID: ENSP00000417982
MGIGVSLLLQFSLTPGGYRSVGRSRRCSRGSIPRNIPKRSWKKPHPQLCSLQGSSVSVCPASQSCCAARMWHRKQQTQGEGSIRHCREQWPHFLQRKNRCWNVVAGAPWPWAWPSPDSFLGPPRSHPRPWGRSPAG

SEQ ID NO: 72638 - protein, 47 aa, Homo sapiens
  Payload ID: 14378
  Gene Symbol: REPIN1
  Gene Name: replication initiator 1
  ENSP ID: ENSP00000418279
MDGRRVPAQPAAEVRPGQGRGATAGPRGAAPPAGRVTVRLASLQSEV

SEQ ID NO: 72639 - protein, 55 aa, Homo sapiens
  Payload ID: 14378
  Gene Symbol: REPIN1
  Gene Name: replication initiator 1
  ENSP ID: ENSP00000418507
MDGRRVPAQPAAEQRKNRCWNVVAGAPWPWAWPSPDSFLGPPRSHPRPWGRSPAG

SEQ ID NO: 72640 - protein, 366 aa, Homo sapiens
  Payload ID: 14378
  Gene Symbol: REPIN1
  Gene Name: replication initiator 1
  ENSP ID: ENSP00000419789
MDGRRVPAQPAAEFSLTPGGYRSVGRSRRCSRGSIPRNIPKRSWKKPHPQLCSLQEEEPMLERRCRGPLAMGLAQPRLLSGPSQESPQTLGKESRGLRQQGTSVAQSGAQAPGRAHRCAHCRRHFPGWVALWLHTRRCQARLPLPCPECGRRFRHAPFLALHRQVHAAATPDLGFACHLCGQSFRGWVALVLHLRAHSAAKRPIACPKCERRFWRRKQLRAHLRRCHPPAPEARPFICGNCGRSFAQWDQLVAHKRVHVAEALEEAAAKALGPRPRGRPAVTAPRPGGDAVDRPFQCACCGKRFRHKPNLIAHRRVHTGERPHQCPECGKRFTNKPYLTSHRRIHTGEKPYPCKECGRRFRHKPNL

SEQ ID NO: 72641 - protein, 393 aa, Homo sapiens
  Payload ID: 14378
  Gene Symbol: REPIN1
  Gene Name: replication initiator 1
  ENSP ID: ENSP00000419872
MDGRRVPAQPAAEFSLTPGGYRSVGRSRRCSRGSIPRNIPKRSWKKPHPQLCSLQAEEEPMLERRCRGPLAMGLAQPRLLSGPSQESPQTLGKESRGLRQQGTSVAQSGAQAPGRAHRCAHCRRHFPGWVALWLHTRRCQARLPLPCPECGRRFRHAPFLALHRQVHAAATPDLGFACHLCGQSFRGWVALVLHLRAHSAAKRPIACPKCERRFWRRKQLRAHLRRCHPPAPEARPFICGNCGRSFAQWDQLVAHKRVHVAEALEEAAAKALGPRPRGRPAVTAPRPGGDAVDRPFQCACCGKRFRHKPNLIAHRRVHTGERPHQCPECGKRFTNKPYLTSHRRIHTGEKPYPCKECGRRFRHKPNLLSHSKIHKRSEGSAQAAPGPGSPQLP

SEQ ID NO: 72642 - protein, 136 aa, Homo sapiens; identical to SEQ ID NO: 72637
  Payload ID: 14378
  Gene Symbol: REPIN1
  Gene Name: replication initiator 1
  ENSP ID: ENSP00000420578

SEQ ID NO: 72643 - protein, 47 aa, Homo sapiens; identical to SEQ ID NO: 72638
  Payload ID: 14378
  Gene Symbol: REPIN1
  Gene Name: replication initiator 1
  ENSP ID: ENSP00000427721

SEQ ID NO: 72644 - protein, 136 aa, Homo sapiens
  Payload ID: 14378
  Gene Symbol: REPIN1
  Gene Name: replication initiator 1
  ENSP ID: ENSP00000428129
MDGRRVPAQPAAEVRPGQGRGATAGPRGAAPPAGRVTVSVRDRVRGRTDAGTSLQGPPGHGPGPAPTPFWALPGVTPDPGEGVPRAEATRHVSGPVWCPSPRQGPSLCPLSKALPWLGGSVASHPPVPGPAALALP

SEQ ID NO: 72645 - protein, 146 aa, Homo sapiens
  Payload ID: 14378
  Gene Symbol: REPIN1
  Gene Name: replication initiator 1
  ENSP ID: ENSP00000428562
MLERRCRGPLAMGLAQPRLLSGPSQESPQTLGKESRGLRQQGTSVAQSGAQAPGRAHRCAHCRRHFPGWVALWLHTRRCQARLPLPCPECGRRFRHAPFLALHRQVHAAATPDLGFACHLCGQSFRGWVALVLHLRAHSAAKRPIA

SEQ ID NO: 72646 - protein, 616 aa, Homo sapiens
  Payload ID: 14379
  Gene Symbol: RPA1
  Gene Name: replication protein A1, 70kDa
  Uniprot ID: P27694
  ENSP ID: ENSP00000254719
MVGQLSEGAIAAIMQKGDTNIKPILQVINIRPITTGNSPPRYRLLMSDGLNTLSSFMLATQLNPLVEEEQLSSNCVCQIHRFIVNTLKDGRRVVILMELEVLKSAEAVGVKIGNPVPYNEGLGQPQVAPPAPAASPAASSRPQPQNGSSGMGSTVSKAYGASKTFGKAAGPSLSHTSGGTQSKVVPIASLTPYQSKWTICARVTNKSQIRTWSNSRGEGKLFSLELVDESGEIRATAFNEQVDKFFPLIEVNKVYYFSKGTLKIANKQFTAVKNDYEMTFNNETSVMPCEDDHHLPTVQFDFTGIDDLENKSKDSLVDIIGICKSYEDATKITVRSNNREVAKRNIYLMDTSGKVVTATLWGEDADKFDGSRQPVLAIKGARVSDFGGRSLSVLSSSTIIANPDIPEAYKLRGWFDAEGQALDGVSISDLKSGGVGGSNTNWKTLYEVKSENLGQGDKPDYFSSVATVVYLRKENCMYQACPTQDCNKKVIDQQNGLYRCEKCDTEFPNFKYRMILSVNIADFQENQWVTCFQESAEAILGQNAAYLGELKDKNEQAFEEVFQNANFRSFIFRVRVKVETYNDESRIKATVMDVKPVDYREYGRRLVMSIRRSALM

SEQ ID NO: 72647 - protein, 153 aa, Homo sapiens
  Payload ID: 14379
  Gene Symbol: RPA1
  Gene Name: replication protein A1, 70kDa
  ENSP ID: ENSP00000459788
MQKGDTNIKPILQVINIRPITTGNSPPRYRLLMSDGLNTLSSFMLATQLNPLVEEEQLSSNCVCQIHRFIVNTLKDGRRVVILMELEVLKSAEAVGVKIGNPVPYNEGLGQPQVAPPAPAASPAASSRPQPQNGSSGMGSTVSKAYGASKTFG

SEQ ID NO: 72648 - protein, 313 aa, Homo sapiens
  Payload ID: 14379
  Gene Symbol: RPA1
  Gene Name: replication protein A1, 70kDa
  ENSP ID: ENSP00000461466
FFPLIEVNKVYYFSKGTLKIANKQFTAVKNDYEMTFNNETSVMPCEDDHHLPTVQFDFTGIDDLENKSKDSLVDIIGICKSYEDATKITVRSNNREVAKRNIYLMDTSGKVVTATLWGEDADKFDGSRQPVLAIKGARVSDFGGRSLSVLSSSTIIANPDIPEAYKLRGWFDAEGQALDGVSISDLKSGGVGGSNTNWKTLYEVKSENLGQGDKVNIADFQENQWVTCFQESAEAILGQNAAYLGELKDKNEQAFEEVFQNANFRSFIFRVRVKVETYNDESRIKATVMDVKPVDYREYGRRLVMSIRRSALM

SEQ ID NO: 72649 - protein, 124 aa, Homo sapiens
  Payload ID: 14379
  Gene Symbol: RPA1
  Gene Name: replication protein A1, 70kDa
  ENSP ID: ENSP00000461733
MQKGDTNIKPILQVINIRPITTGNSPPRYRLLMSDGLNTLSSFMLATQLNPLVEEEQLSSNCVCQIHRFIVNTLKDGRRVVILMELEVLKSAEAVGVKIGNPVPYNEGLGQPQVAPPAPAASPA

SEQ ID NO: 72650 - protein, 358 aa, Homo sapiens
  Payload ID: 14380
  Gene Symbol: RPA2
  Gene Name: replication protein A2, 32kDa
  Uniprot ID: P15927
  ENSP ID: ENSP00000363015
MWNSNDGGAGWRRKRIAGGFSKRASLGSERRVVAGEEGRERSWGVWGSPAGRRRGRLGRLGQCLKGRSLREPAGFSEAWDVAQALILLFKTGGFESYGSSSYGGAGGYTQSPGGFGSPAPSQAEKKSRARAQHIVPCTISQLLSATLVDEVFRIGNVEISQVTIVGIIRHAEKAPTNIVYKIDDMTAAPMDVRQWVDTDDTSSENTVVPPETYVKVAGHLRSFQNKKSLVAFKIMPLEDMNEFTTHILEVINAHMVLSKANSQPSAGRAPISNPGMSEAGNFGGNSFMPANGLTVAQNQVLNLIKACPRPEGLNFQDLKNQLKHMSVSSIKQAVDFLSNEGHIYSTVDDDHFKSTDAE

SEQ ID NO: 72651 - protein, 278 aa, Homo sapiens
  Payload ID: 14380
  Gene Symbol: RPA2
  Gene Name: replication protein A2, 32kDa
  Uniprot ID: P15927
  ENSP ID: ENSP00000363017
MGRGDRNKRSIRGFESYGSSSYGGAGGYTQSPGGFGSPAPSQAEKKSRARAQHIVPCTISQLLSATLVDEVFRIGNVEISQVTIVGIIRHAEKAPTNIVYKIDDMTAAPMDVRQWVDTDDTSSENTVVPPETYVKVAGHLRSFQNKKSLVAFKIMPLEDMNEFTTHILEVINAHMVLSKANSQPSAGRAPISNPGMSEAGNFGGNSFMPANGLTVAQNQVLNLIKACPRPEGLNFQDLKNQLKHMSVSSIKQAVDFLSNEGHIYSTVDDDHFKSTDAE

SEQ ID NO: 72652 - protein, 270 aa, Homo sapiens
  Payload ID: 14380
  Gene Symbol: RPA2
  Gene Name: replication protein A2, 32kDa
  Uniprot ID: P15927
  ENSP ID: ENSP00000363021
MWNSGFESYGSSSYGGAGGYTQSPGGFGSPAPSQAEKKSRARAQHIVPCTISQLLSATLVDEVFRIGNVEISQVTIVGIIRHAEKAPTNIVYKIDDMTAAPMDVRQWVDTDDTSSENTVVPPETYVKVAGHLRSFQNKKSLVAFKIMPLEDMNEFTTHILEVINAHMVLSKANSQPSAGRAPISNPGMSEAGNFGGNSFMPANGLTVAQNQVLNLIKACPRPEGLNFQDLKNQLKHMSVSSIKQAVDFLSNEGHIYSTVDDDHFKSTDAE

SEQ ID NO: 72653 - protein, 179 aa, Homo sapiens
  Payload ID: 14380
  Gene Symbol: RPA2
  Gene Name: replication protein A2, 32kDa
  ENSP ID: ENSP00000387649
MWNSNDGGGFESYGSSSYGGAGGYTQSPGGFGSPAPSQAEKKSRARAQHIVPCTISQLLSATLVDEVFRIGNVEISQVTIVGIIRHAEKAPTNIVYKIDDMTAAPMDVRQWVDTDDTSSENTVVPPETYVKVAGHLRSFQNKKSLVAFKIMPLEDMNEFTTHILEVINAHMVLSKANSQ

SEQ ID NO: 72654 - protein, 122 aa, Homo sapiens
  Payload ID: 14380
  Gene Symbol: RPA2
  Gene Name: replication protein A2, 32kDa
  ENSP ID: ENSP00000413541
LEDMNEFTTHILEVINAHMVLSKANSQPSAGRAPISNPGMSEAGNFGGNSFMPANGLTVAQNQVLNLIKACPRPEGLNFQDLKNQLKHMSVSSIKQAVDFLSNEGHIYSTVDDDHFKSTDAE

SEQ ID NO: 72655 - protein, 121 aa, Homo sapiens
  Payload ID: 14381
  Gene Symbol: RPA3
  Gene Name: replication protein A3, 14kDa
  Uniprot ID: P35244
  ENSP ID: ENSP00000223129
MVDMMDLPRSRINAGMLAQFIDKPVCFVGRLEKIHPTGKMFILSDGEGKNGTIELMEPLDEEISGIVEVVGRVTAKATILCTSYVQFKEDSHPFDLGLYNEAVKIIHDFPQFYPLGIVQHD

SEQ ID NO: 72656 - protein, 121 aa, Homo sapiens; identical to SEQ ID NO: 72655
  Payload ID: 14381
  Gene Symbol: RPA3
  Gene Name: replication protein A3, 14kDa
  Uniprot ID: P35244
  ENSP ID: ENSP00000379914

SEQ ID NO: 72657 - protein, 82 aa, Homo sapiens
  Payload ID: 14381
  Gene Symbol: RPA3
  Gene Name: replication protein A3, 14kDa
  ENSP ID: ENSP00000384652
MFILSDGEGKNGTIELMEPLDEEISGIVEVVGRVTAKATILCTSYVQFKEDSHPFDLGLYNEAVKIIHDFPQFYPLGIVQHD

SEQ ID NO: 72658 - protein, 82 aa, Homo sapiens; identical to SEQ ID NO: 72657
  Payload ID: 14381
  Gene Symbol: RPA3
  Gene Name: replication protein A3, 14kDa
  ENSP ID: ENSP00000385383

SEQ ID NO: 72659 - protein, 261 aa, Homo sapiens
  Payload ID: 14382
  Gene Symbol: RPA4
  Gene Name: replication protein A4, 30kDa
  Uniprot ID: Q13156
  ENSP ID: ENSP00000362131
MSKSGFGSYGSISAADGASGGSDQLCERDATPAIKTQRPKVRIQDVVPCNVNQLLSSTVFDPVFKVRGIIVSQVSIVGVIRGAEKASNHICYKIDDMTAKPIEARQWFGREKVKQVTPLSVGVYVKVFGILKCPTGTKSLEVLKIHVLEDMNEFTVHILETVNAHMMLDKARRDTTVESVPVSPSEVNDAGDNDESHRNFIQDEVLRLIHECPHQEGKSIHELRAQLCDLSVKAIKEAIDYLTVEGHIYPTVDREHFKSAD

SEQ ID NO: 72660 - protein, 336 aa, Homo sapiens
  Payload ID: 14383
  Gene Symbol: RTFDC1
  Gene Name: replication termination factor 2 domain containing 1
  ENSP ID: ENSP00000023939
MGCDGGTIPKRHELVKGPKKVEKIWHLKNGKEWCSLHSEGKNKNGKEWDMEYDVDKDAELVAQWNYCTLSQEILRRPIVACELGRLYNKDAVIEFLLDKSAEKALGKAASHIKSIKNVTELKLSDNPAWEGDKGNTKGDKHDDLQRARFICPVVGLEMNGRHRFCFLRCCGCVFSERALKEIKAEVCHTCGAAFQEDDVIMLNGTKEDVDVLKTRMEERRLRAKLEKKTKKPKAAESVSKPDVSEEAPGPSKVKTGKPEEASLDSREKKTNLAPKSTAMNESSSGKAGKPPCGATKRSIADSEESEAYKSLFTTHSSAKRSKEESAHWVTHTSYCF

SEQ ID NO: 72661 - protein, 306 aa, Homo sapiens
  Payload ID: 14383
  Gene Symbol: RTFDC1
  Gene Name: replication termination factor 2 domain containing 1
  Uniprot ID: Q9BY42
  ENSP ID: ENSP00000349906
MGCDGGTIPKRHELVKGPKKVEKVDKDAELVAQWNYCTLSQEILRRPIVACELGRLYNKDAVIEFLLDKSAEKALGKAASHIKSIKNVTELKLSDNPAWEGDKGNTKGDKHDDLQRARFICPVVGLEMNGRHRFCFLRCCGCVFSERALKEIKAEVCHTCGAAFQEDDVIMLNGTKEDVDVLKTRMEERRLRAKLEKKTKKPKAAESVSKPDVSEEAPGPSKVKTGKPEEASLDSREKKTNLAPKSTAMNESSSGKAGKPPCGATKRSIADSEESEAYKSLFTTHSSAKRSKEESAHWVTHTSYCF

SEQ ID NO: 72662 - protein, 230 aa, Homo sapiens
  Payload ID: 14383
  Gene Symbol: RTFDC1
  Gene Name: replication termination factor 2 domain containing 1
  ENSP ID: ENSP00000379220
MGCDGGTIPKRHELVKGPKKVEKVDKDAELVAQWNYCTLSQEILRRPIVACELGRLYNKDAVIEFLLDKSAEKALGKAASHIKSIKNVTELKLSDNPAWEGDKGNTKGDKHDDLQRARFICPVVGLEMNGRHRFCFLRCCGCVFSERALKEIKAEVCHTCGAAFQEDDVIMLNGTKEDVDVLKTRMEERRLRAKLEKKPQGHQKLRQGSLKKPALILERRKPTWLPKAQQ

SEQ ID NO: 72663 - protein, 277 aa, Homo sapiens
  Payload ID: 14383
  Gene Symbol: RTFDC1
  Gene Name: replication termination factor 2 domain containing 1
  ENSP ID: ENSP00000400322
MGCDGGTIPKRHELVKGPKKVEKIWHLKNGKEWCSLHSEGKNKNGKEWDMEYDVDKDAELVAQWNYCTLSQEILRRPIVACELGRLYNKDAVIEFLLDKSAEKALGKAASHIKSIKNVTELKLSDNPAWEGDKGNTKGDKHDDLQRARFICPVVGLEMNGRHRFCFLRCCGCVFSERALKEIKAEVCHTCGAAFQEDDVIMLNGTKEDVDVLKTRMEERRLRAKLEKKTKKPKAAESVSKPDVSEEAPGPSKVKTGKPEEASLDSREKKTNLAPKST

SEQ ID NO: 72664 - protein, 2472 aa, Homo sapiens
  Payload ID: 14384
  Gene Symbol: RIF1
  Gene Name: replication timing regulatory factor 1
  Uniprot ID: Q5UIP0
  ENSP ID: ENSP00000243326
MTARGQSPLAPLLETLEDPSASHGGQTDAYLTLTSRMTGEEGKEVITEIEKKLPRLYKVLKTHISSQNSELSSAALQALGFCLYNPKITSELSEANALELLSKLNDTIKNSDKNVRTRALWVISKQTFPSEVVGKMVSSIIDSLEILFNKGETHSAVVDFEALNVIVRLIEQAPIQMGEEAVRWAKLVIPLVVHSAQKVHLRGATALEMGMPLLLQKQQEIASITEQLMTTKLISELQKLFMSKNETYVLKLWPLFVKLLGRTLHRSGSFINSLLQLEELGFRSGAPMIKKIAFIAWKSLIDNFALNPDILCSAKRLKLLMQPLSSIHVRTETLALTKLEVWWYLLMRLGPHLPANFEQVCVPLIQSTISIDSNASPQGNSCHVATSPGLNPMTPVHKGASSPYGAPGTPRMNLSSNLGGMATIPSIQLLGLEMLLHFLLGPEALSFAKQNKLVLSLEPLEHPLISSPSFFSKHANTLITAVHDSFVAVGKDAPDVVVSAIWKELISLVKSVTESGNKKEKPGSEVLTLLLKSLESIVKSEVFPVSKTLVLMEITIKGLPQKVLGSPAYQVANMDILNGTPALFLIQLIFNNFLECGVSDERFFLSLESLVGCVLSGPTSPLAFSDSVLNVINQNAKQLENKEHLWKMWSVIVTPLTELINQTNEVNQGDALEHNFSAIYGALTLPVNHIFSEQRFPVATMKTLLRTWSELYRAFARCAALVATAEENLCCEELSSKIMSSLEDEGFSNLLFVDRIIYIITVMVDCIDFSPYNIKYQPKVKSPQRPSDWSKKKNEPLGKLTSLFKLIVKVIYSFHTLSFKEAHSDTLFTIGNSITGIISSVLGHISLPSMIRKIFATLTRPLALFYENSKLDEVPKVYSCLNNKLEKLLGEIIACLQFSYTGTYDSELLEQLSPLLCIIFLHKNKQIRKQSAQFWNATFAKVMMLVYPEELKPVLTQAKQKFLLLLPGLETVEMMEESSGPYSDGTENSQLNVKISGMERKSNGKRDSFLAQTKNKKENMKPAAKLKLESSSLKVKGEILLEEEKSTDFVFIPPEGKDAKERILTDHQKEVLKTKRCDIPAMYNNLDVSQDTLFTQYSQEEPMEIPTLTRKPKEDSKMMITEEQMDSDIVIPQDVTEDCGMAEHLEKSSLSNNECGSLDKTSPEMSNSNNDERKKALISSRKTSTECASSTENSFVVSSSSVSNTTVAGTPPYPTSRRQTFITLEKFDGSENRPFSPSPLNNISSTVTVKNNQETMIKTDFLPKAKQREGTFSKSDSEKIVNGTKRSSRRAGKAEQTGNKRSKPLMRSEPEKNTEESVEGIVVLENNPPGLLNQTECVSDNQVHLSESTMEHDNTKLKAATVENAVLLETNTVEEKNVEINLESKENTPPVVISADQMVNEDSQVQITPNQKTLRRSSRRRSEVVESTTESQDKENSHQKKERRKEEEKPLQKSPLHIKDDVLPKQKLIAEQTLQENLIEKGSNLHEKTLGETSANAETEQNKKKADPENIKSEGDGTQDIVDKSSEKLVRGRTRYQTRRASQGLLSSIENSESDSSEAKEEGSRKKRSGKWKNKSNESVDIQDQEEKVVKQECIKAENQSHDYKATSEEDVSIKSPICEKQDESNTVICQDSTVTSDLLQVPDDLPNVCEEKNETSKYAEYSFTSLPVPESNLRTRNAIKRLHKRDSFDNCSLGESSKIGISDISSLSEKTFQTLECQHKRSRRVRRSKGCDCCGEKSQPQEKSLIGLKNTENNDVEISETKKADVQAPVSPSETSQANPYSEGQFLDEHHSVNFHLGLKEDNDTINDSLIVSETKSKENTMQESLPSGIVNFREEICDMDSSEAMSLESQESPNENFKTVGPCLGDSKNVSQESLETKEEKPEETPKMELSLENVTVEGNACKVTESNLEKAKTMELNVGNEASFHGQERTKTGISEEAAIEENKRNDDSEADTAKLNAKEVATEEFNSDISLSDNTTPVKLNAQTEISEQTAAGELDGGNDVSDLHSSEETNTKMKNNEEMMIGEAMAETGHDGETENEGITTKTSKPDEAETNMLTAEMDNFVCDTVEMSTEEGIIDANKTETNTEYSKSEEKLDNNQMVMESDILQEDHHTSQKVEEPSQCLASGTAISELIIEDNNASPQKLRELDPSLVSANDSPSGMQTRCVWSPLASPSTSILKRGLKRSQEDEISSPVNKVRRVSFADPIYQAGLADDIDRRCSIVRSHSSNSSPIGKSVKTSPTTQSKHNTTSAKGFLSPGSRSPKFKSSKKCLISEMAKESIPCPTESVYPPLVNCVAPVDIILPQITSNMWARGLGQLIRAKNIKTIGDLSTLTASEIKTLPIRSPKVSNVKKALRIYHEQQVKTRGLEEIPVFDISEKTVNGIENKSLSPDEERLVSDIIDPVALEIPLSKNLLAQISALALQLDSEDLHNYSGSQLFEMHEKLSCMANSVIKNLQSRWRSPSHENSI

SEQ ID NO: 72665 - protein, 2472 aa, Homo sapiens; identical to SEQ ID NO: 72664
  Payload ID: 14384
  Gene Symbol: RIF1
  Gene Name: replication timing regulatory factor 1
  Uniprot ID: Q5UIP0
  ENSP ID: ENSP00000390181

SEQ ID NO: 72666 - protein, 845 aa, Homo sapiens
  Payload ID: 14384
  Gene Symbol: RIF1
  Gene Name: replication timing regulatory factor 1
  ENSP ID: ENSP00000390486
  MOD_RES (1)..(1): Any amino acid
XAGKVELWQRLGAEGQRRREPCPDLPSRMTGEEGKEVITEIEKKLPRLYKVLKTHISSQNSELSSAALQALGFCLYNPKITSELSEANALELLSKLNDTIKNSDKNVRTRALWVISKQTFPSEVVGKMVSSIIDSLEILFNKGETHSAVVDFEALNVIVRLIEQAPIQMGEEAVRWAKLVIPLVVHSAQKVHLRGATALEMGMPLLLQKQQEIASITEQLMTTKLISELQKLFMSKNETYVLKLWPLFVKLLGRTLHRSGSFINSLLQLEELGFRSGAPMIKKIAFIAWKSLIDNFALNPDILCSAKRLKLLMQPLSSIHVRTETLALTKLEVWWYLLMRLGPHLPANFEQVCVPLIQSTISIDSNASPQGNSCHVATSPGLNPMTPVHKGASSPYGAPGTPRMNLSSNLGGMATIPSIQLLGLEMLLHFLLGPEALSFAKQNKLVLSLEPLEHPLISSPSFFSKHANTLITAVHDSFVAVGKDAPDVVVSAIWKELISLVKSVTESGNKKEKPGSEVLTLLLKSLESIVKSEVFPVSKTLVLMEITIKGLPQKVLGSPAYQVANMDILNGTPALFLIQLIFNNFLECGVSDERFFLSLESLVGCVLSGPTSPLAFSDSVLNVINQNAKQLENKEHLWKMWSVIVTPLTELINQTNEVNQGDALEHNFSAIYGALTLPVNHIFSEQRFPVATMKTLLRTWSELYRAFARCAALVATAEENLCCEELSSKIMSSLEDEGFSNLLFVDRIIYIITVMVDCIDFSPYNIKYQPKVKSPQRPSDWSKKKNEPLGKLTSLFKLIVKVIYSFHTLSFKEAHSDTLFTIGNSITGIISSVLGHISLPSMIRK

SEQ ID NO: 72667 - protein, 746 aa, Homo sapiens
  Payload ID: 14384
  Gene Symbol: RIF1
  Gene Name: replication timing regulatory factor 1
  ENSP ID: ENSP00000404882
  MOD_RES (1)..(1): Any amino acid
XRSKGCDCCGEKSQPQEKSLIGLKNTENNDVEISETKKADVQAPVSPSETSQANPYSEGQFLDEHHSVNFHLGLKEDNDTINDSLIVSETKSKENTMQESLPSGIVNFREEICDMDSSEAMSLESQESPNENFKTVGPCLGDSKNVSQESLETKEEKPEETPKMELSLENVTVEGNACKVTESNLEKAKTMELNVGNEASFHGQERTKTGISEEAAIEENKRNDDSEADTAKLNAKEVATEEFNSDISLSDNTTPVKLNAQTEISEQTAAGELDGGNDVSDLHSSEETNTKMKNNEEMMIGEAMAETGHDGETENEGITTKTSKPDEAETNMLTAEMDNFVCDTVEMSTEEGIIDANKTETNTEYSKSEEKLDNNQMVMESDILQEDHHTSQKVEEPSQCLASGTAISELIIEDNNASPQKLRELDPSLVSANDSPSGMQTRCVWSPLASPSTSILKRGLKRSQEDEISSPVNKVRRVSFADPIYQAGLADDIDRRCSIVRSHSSNSSPIGKSVKTSPTTQSKHNTTSAKGFLSPGSRSPKFKSSKKCLISEMAKESIPCPTESVYPPLVNCVAPVDIILPQITSNMWARGLGQLIRAKNIKTIGDLSTLTASEIKTLPIRSPKVSNVKKALRIYHEQQVKTRGLEEIPVFDISEKTVNGIENKSLSPDEERLVSDIIDPVALEIPLSKNLLAQISALALQLDSEDLHNYSGSQLFEMHEKLSCMANSVIKNLQSRWRSPSHENSI

SEQ ID NO: 72668 - protein, 2446 aa, Homo sapiens
  Payload ID: 14384
  Gene Symbol: RIF1
  Gene Name: replication timing regulatory factor 1
  Uniprot ID: Q5UIP0
  ENSP ID: ENSP00000414615
MTARGQSPLAPLLETLEDPSASHGGQTDAYLTLTSRMTGEEGKEVITEIEKKLPRLYKVLKTHISSQNSELSSAALQALGFCLYNPKITSELSEANALELLSKLNDTIKNSDKNVRTRALWVISKQTFPSEVVGKMVSSIIDSLEILFNKGETHSAVVDFEALNVIVRLIEQAPIQMGEEAVRWAKLVIPLVVHSAQKVHLRGATALEMGMPLLLQKQQEIASITEQLMTTKLISELQKLFMSKNETYVLKLWPLFVKLLGRTLHRSGSFINSLLQLEELGFRSGAPMIKKIAFIAWKSLIDNFALNPDILCSAKRLKLLMQPLSSIHVRTETLALTKLEVWWYLLMRLGPHLPANFEQVCVPLIQSTISIDSNASPQGNSCHVATSPGLNPMTPVHKGASSPYGAPGTPRMNLSSNLGGMATIPSIQLLGLEMLLHFLLGPEALSFAKQNKLVLSLEPLEHPLISSPSFFSKHANTLITAVHDSFVAVGKDAPDVVVSAIWKELISLVKSVTESGNKKEKPGSEVLTLLLKSLESIVKSEVFPVSKTLVLMEITIKGLPQKVLGSPAYQVANMDILNGTPALFLIQLIFNNFLECGVSDERFFLSLESLVGCVLSGPTSPLAFSDSVLNVINQNAKQLENKEHLWKMWSVIVTPLTELINQTNEVNQGDALEHNFSAIYGALTLPVNHIFSEQRFPVATMKTLLRTWSELYRAFARCAALVATAEENLCCEELSSKIMSSLEDEGFSNLLFVDRIIYIITVMVDCIDFSPYNIKYQPKVKSPQRPSDWSKKKNEPLGKLTSLFKLIVKVIYSFHTLSFKEAHSDTLFTIGNSITGIISSVLGHISLPSMIRKIFATLTRPLALFYENSKLDEVPKVYSCLNNKLEKLLGEIIACLQFSYTGTYDSELLEQLSPLLCIIFLHKNKQIRKQSAQFWNATFAKVMMLVYPEELKPVLTQAKQKFLLLLPGLETVEMMEESSGPYSDGTENSQLNVKISGMERKSNGKRDSFLAQTKNKKENMKPAAKLKLESSSLKVKGEILLEEEKSTDFVFIPPEGKDAKERILTDHQKEVLKTKRCDIPAMYNNLDVSQDTLFTQYSQEEPMEIPTLTRKPKEDSKMMITEEQMDSDIVIPQDVTEDCGMAEHLEKSSLSNNECGSLDKTSPEMSNSNNDERKKALISSRKTSTECASSTENSFVVSSSSVSNTTVAGTPPYPTSRRQTFITLEKFDGSENRPFSPSPLNNISSTVTVKNNQETMIKTDFLPKAKQREGTFSKSDSEKIVNGTKRSSRRAGKAEQTGNKRSKPLMRSEPEKNTEESVEGIVVLENNPPGLLNQTECVSDNQVHLSESTMEHDNTKLKAATVENAVLLETNTVEEKNVEINLESKENTPPVVISADQMVNEDSQVQITPNQKTLRRSSRRRSEVVESTTESQDKENSHQKKERRKEEEKPLQKSPLHIKDDVLPKQKLIAEQTLQENLIEKGSNLHEKTLGETSANAETEQNKKKADPENIKSEGDGTQDIVDKSSEKLVRGRTRYQTRRASQGLLSSIENSESDSSEAKEEGSRKKRSGKWKNKSNESVDIQDQEEKVVKQECIKAENQSHDYKATSEEDVSIKSPICEKQDESNTVICQDSTVTSDLLQVPDDLPNVCEEKNETSKYAEYSFTSLPVPESNLRTRNAIKRLHKRDSFDNCSLGESSKIGISDISSLSEKTFQTLECQHKRSRRVRRSKGCDCCGEKSQPQEKSLIGLKNTENNDVEISETKKADVQAPVSPSETSQANPYSEGQFLDEHHSVNFHLGLKEDNDTINDSLIVSETKSKENTMQESLPSGIVNFREEICDMDSSEAMSLESQESPNENFKTVGPCLGDSKNVSQESLETKEEKPEETPKMELSLENVTVEGNACKVTESNLEKAKTMELNVGNEASFHGQERTKTGISEEAAIEENKRNDDSEADTAKLNAKEVATEEFNSDISLSDNTTPVKLNAQTEISEQTAAGELDGGNDVSDLHSSEETNTKMKNNEEMMIGEAMAETGHDGETENEGITTKTSKPDEAETNMLTAEMDNFVCDTVEMSTEEGIIDANKTETNTEYSKSEEKLDNNQMVMESDILQEDHHTSQKVEEPSQCLASGTAISELIIEDNNASPQKLRELDPSLVSANDSPSGMQTRCVWSPLASPSTSILKRGLKRSQEDEISSPVNKVRRVSFADPIYQAGLADDIDRRCSIVRSHSSNSSPIGKSVKTSPTTQSKISEMAKESIPCPTESVYPPLVNCVAPVDIILPQITSNMWARGLGQLIRAKNIKTIGDLSTLTASEIKTLPIRSPKVSNVKKALRIYHEQQVKTRGLEEIPVFDISEKTVNGIENKSLSPDEERLVSDIIDPVALEIPLSKNLLAQISALALQLDSEDLHNYSGSQLFEMHEKLSCMANSVIKNLQSRWRSPSHENSI

SEQ ID NO: 72669 - protein, 2446 aa, Homo sapiens; identical to SEQ ID NO: 72668
  Payload ID: 14384
  Gene Symbol: RIF1
  Gene Name: replication timing regulatory factor 1
  Uniprot ID: Q5UIP0
  ENSP ID: ENSP00000415691

SEQ ID NO: 72670 - protein, 2446 aa, Homo sapiens; identical to SEQ ID NO: 72668
  Payload ID: 14384
  Gene Symbol: RIF1
  Gene Name: replication timing regulatory factor 1
  Uniprot ID: Q5UIP0
  ENSP ID: ENSP00000416123

SEQ ID NO: 72671 - protein, 109 aa, Homo sapiens
  Payload ID: 14385
  Gene Symbol: RPRM
  Gene Name: reprimo, TP53 dependent G2 arrest mediator candidate
  Uniprot ID: Q9NS64
  ENSP ID: ENSP00000314946
MNPALGNQTDVAGLFLANSSEALERAVRCCTQASVVTDDGFAEGGPDERSLYIMRVVQIAVMCVLSLTVVFGIFFLGCNLLIKSEGMINFLVKDRRPSKEVEAVVVGPY

SEQ ID NO: 72672 - protein, 120 aa, Homo sapiens
  Payload ID: 14386
  Gene Symbol: RPRML
  Gene Name: reprimo-like
  Uniprot ID: Q8N4K4
  ENSP ID: ENSP00000318032
MNATFLNHSGLEEVDGVGGGAGAALGNRTHGLGTWLGCCPGGAPLAASDGVPAGLAPDERSLWVSRVAQIAVLCVLSLTVVFGVFFLGCNLLIKSESMINFLVQERRPSKDVGAAILGLY

SEQ ID NO: 72673 - protein, 450 aa, Homo sapiens
  Payload ID: 14387
  Gene Symbol: RGMA
  Gene Name: repulsive guidance molecule family member a
  Uniprot ID: Q96B86
  ENSP ID: ENSP00000330005
MQPPRERLVVTGRAGWMGMGRGAGRSALGFWPTLAFLLCSFPAATSPCKILKCNSEFWSATSGSHAPASDDTPEFCAALRSYALCTRRTARTCRGDLAYHSAVHGIEDLMSQHNCSKDGPTSQPRLRTLPPAGDSQERSDSPEICHYEKSFHKHSATPNYTHCGLFGDPHLRTFTDRFQTCKVQGAWPLIDNNYLNVQVTNTPVLPGSAATATSKLTIIFKNFQECVDQKVYQAEMDELPAAFVDGSKNGGDKHGANSLKITEKVSGQHVEIQAKYIGTTIVVRQVGRYLTFAVRMPEEVVNAVEDWDSQGLYLCLRGCPLNQQIDFQAFHTNAEGTGARRLAAASPAPTAPETFPYETAVAKCKEKLPVEDLYYQACVFDLLTTGDVNFTLAAYYALEDVKMLHSNKDKLHLYERTRDLPGRAAAGLPLAPRPLLGALVPLLALLPVFC

SEQ ID NO: 72674 - protein, 434 aa, Homo sapiens
  Payload ID: 14387
  Gene Symbol: RGMA
  Gene Name: repulsive guidance molecule family member a
  Uniprot ID: Q96B86
  ENSP ID: ENSP00000404442
MGMGRGAGRSALGFWPTLAFLLCSFPAATSPCKILKCNSEFWSATSGSHAPASDDTPEFCAALRSYALCTRRTARTCRGDLAYHSAVHGIEDLMSQHNCSKDGPTSQPRLRTLPPAGDSQERSDSPEICHYEKSFHKHSATPNYTHCGLFGDPHLRTFTDRFQTCKVQGAWPLIDNNYLNVQVTNTPVLPGSAATATSKLTIIFKNFQECVDQKVYQAEMDELPAAFVDGSKNGGDKHGANSLKITEKVSGQHVEIQAKYIGTTIVVRQVGRYLTFAVRMPEEVVNAVEDWDSQGLYLCLRGCPLNQQIDFQAFHTNAEGTGARRLAAASPAPTAPETFPYETAVAKCKEKLPVEDLYYQACVFDLLTTGDVNFTLAAYYALEDVKMLHSNKDKLHLYERTRDLPGRAAAGLPLAPRPLLGALVPLLALLPVFC

SEQ ID NO: 72675 - protein, 434 aa, Homo sapiens; identical to SEQ ID NO: 72674
  Payload ID: 14387
  Gene Symbol: RGMA
  Gene Name: repulsive guidance molecule family member a
  Uniprot ID: Q96B86
  ENSP ID: ENSP00000440025

SEQ ID NO: 72676 - protein, 434 aa, Homo sapiens; identical to SEQ ID NO: 72674
  Payload ID: 14387
  Gene Symbol: RGMA
  Gene Name: repulsive guidance molecule family member a
  Uniprot ID: Q96B86
  ENSP ID: ENSP00000442498

SEQ ID NO: 72677 - protein, 61 aa, Homo sapiens
  Payload ID: 14387
  Gene Symbol: RGMA
  Gene Name: repulsive guidance molecule family member a
  ENSP ID: ENSP00000451505
MGMGRGAGRSALGFWPTLAFLLCSFPAAIKRSPGSFCAALEMRRLWNLMSWKERRVQKPLM

SEQ ID NO: 72678 - protein, 90 aa, Homo sapiens
  Payload ID: 14387
  Gene Symbol: RGMA
  Gene Name: repulsive guidance molecule family member a
  ENSP ID: ENSP00000451709
MGMGRGAGRSALGFWPTLAFLLCSFPAATSPCKILKCNSEFWSATSGSHAPASDDTPEFCAALRSYALCTRRTARTCRGDLAYHSAVHGI

SEQ ID NO: 72679 - protein, 458 aa, Homo sapiens
  Payload ID: 14387
  Gene Symbol: RGMA
  Gene Name: repulsive guidance molecule family member a
  ENSP ID: ENSP00000452126
MGGLGPRRAGTSRERLVVTGRAGWMGMGRGAGRSALGFWPTLAFLLCSFPAATSPCKILKCNSEFWSATSGSHAPASDDTPEFCAALRSYALCTRRTARTCRGDLAYHSAVHGIEDLMSQHNCSKDGPTSQPRLRTLPPAGDSQERSDSPEICHYEKSFHKHSATPNYTHCGLFGDPHLRTFTDRFQTCKVQGAWPLIDNNYLNVQVTNTPVLPGSAATATSKLTIIFKNFQECVDQKVYQAEMDELPAAFVDGSKNGGDKHGANSLKITEKVSGQHVEIQAKYIGTTIVVRQVGRYLTFAVRMPEEVVNAVEDWDSQGLYLCLRGCPLNQQIDFQAFHTNAEGTGARRLAAASPAPTAPETFPYETAVAKCKEKLPVEDLYYQACVFDLLTTGDVNFTLAAYYALEDVKMLHSNKDKLHLYERTRDLPGRAAAGLPLAPRPLLGALVPLLALLPVFC

SEQ ID NO: 72680 - protein, 46 aa, Homo sapiens
  Payload ID: 14387
  Gene Symbol: RGMA
  Gene Name: repulsive guidance molecule family member a
  ENSP ID: ENSP00000452170
MGMGRGAGRSALGFWPTLAFLLCSFPAAHHHLQELPGVCGPEGVPG

SEQ ID NO: 72681 - protein, 10 aa, Homo sapiens
  Payload ID: 14387
  Gene Symbol: RGMA
  Gene Name: repulsive guidance molecule family member a
  ENSP ID: ENSP00000452350
MGMGRGAGRS

SEQ ID NO: 72682 - protein, 341 aa, Homo sapiens
  Payload ID: 14387
  Gene Symbol: RGMA
  Gene Name: repulsive guidance molecule family member a
  ENSP ID: ENSP00000456290
MSQHNCSKDGPTSQPRLRTLPPAGDSQERSDSPEICHYEKSFHKHSATPNYTHCGLFGDPHLRTFTDRFQTCKVQGAWPLIDNNYLNVQVTNTPVLPGSAATATSKLTIIFKNFQECVDQKVYQAEMDELPAAFVDGSKNGGDKHGANSLKITEKVSGQHVEIQAKYIGTTIVVRQVGRYLTFAVRMPEEVVNAVEDWDSQGLYLCLRGCPLNQQIDFQAFHTNAEGTGARRLAAASPAPTAPETFPYETAVAKCKEKLPVEDLYYQACVFDLLTTGDVNFTLAAYYALEDVKMLHSNKDKLHLYERTRDLPGRAAAGLPLAPRPLLGALVPLLALLPVFC

SEQ ID NO: 72683 - protein, 478 aa, Homo sapiens
  Payload ID: 14388
  Gene Symbol: RGMB
  Gene Name: repulsive guidance molecule family member b
  ENSP ID: ENSP00000308219
MIRKKRKRSAPPGPCRSHGPRPATAPAPPPSPEPTRPAWTGMGLRAAPSSAAAAAAEVEQRRSPGLCPPPLELLLLLLFSLGLLHAGDCQQPAQCRIQKCTTDFVSLTSHLNSAVDGFDSEFCKALRAYAGCTQRTSKACRGNLVYHSAVLGISDLMSQRNCSKDGPTSSTNPEVTHDPCNYHSHAGAREHRRGDQNPPSYLFCGLFGDPHLRTFKDNFQTCKVEGAWPLIDNNYLSVQVTNVPVVPGSSATATNKITIIFKAHHECTDQKVYQAVTDDLPAAFVDGTTSGGDSDAKSLRIVERESGHYVEMHARYIGTTVFVRQVGRYLTLAIRMPEDLAMSYEESQDLQLCVNGCPLSERIDDGQGQVSAILGHSLPRTSLVQAWPGYTLETANTQCHEKMPVKDIYFQSCVFDLLTTGDANFTAAAHSALEDVEALHPRKERWHIFPSSGNGTPRGGSDLSVSLGLTCLILIVFL

SEQ ID NO: 72684 - protein, 437 aa, Homo sapiens
  Payload ID: 14388
  Gene Symbol: RGMB
  Gene Name: repulsive guidance molecule family member b
  Uniprot ID: Q6NW40
  ENSP ID: ENSP00000423256
MGLRAAPSSAAAAAAEVEQRRSPGLCPPPLELLLLLLFSLGLLHAGDCQQPAQCRIQKCTTDFVSLTSHLNSAVDGFDSEFCKALRAYAGCTQRTSKACRGNLVYHSAVLGISDLMSQRNCSKDGPTSSTNPEVTHDPCNYHSHAGAREHRRGDQNPPSYLFCGLFGDPHLRTFKDNFQTCKVEGAWPLIDNNYLSVQVTNVPVVPGSSATATNKITIIFKAHHECTDQKVYQAVTDDLPAAFVDGTTSGGDSDAKSLRIVERESGHYVEMHARYIGTTVFVRQVGRYLTLAIRMPEDLAMSYEESQDLQLCVNGCPLSERIDDGQGQVSAILGHSLPRTSLVQAWPGYTLETANTQCHEKMPVKDIYFQSCVFDLLTTGDANFTAAAHSALEDVEALHPRKERWHIFPSSGNGTPRGGSDLSVSLGLTCLILIVFL

SEQ ID NO: 72685 - protein, 238 aa, Homo sapiens
  Payload ID: 14389
  Gene Symbol: RMND1
  Gene Name: required for meiotic nuclear division 1 homolog
  Uniprot ID: Q9NWS8
  ENSP ID: ENSP00000336683
MGVENSAKEGDPGTIFFFREGAAVFWNVKDKTMKHVMKVLEKHEIQPYEIALVHWENEELNYIKIEGQSKLHRGEIKLNSELDLDDAILEKFAFSNALCLSVKLAIWEASLDKFIESIQSIPEALKAGKKVKLSHEEVMQKIGELFALRHRINLSSDFLITPDFYWDRENLEGLYDKTCQFLSIGRRVKVMNEKLQHCMELTDLMRNHLNEKRALRLEWMIVILITIEVMFELGRVFF

SEQ ID NO: 72686 - protein, 449 aa, Homo sapiens
  Payload ID: 14389
  Gene Symbol: RMND1
  Gene Name: required for meiotic nuclear division 1 homolog
  Uniprot ID: Q9NWS8
  ENSP ID: ENSP00000356272
MPATLLRAVARSHHILSKAHQCRRIGHLMLKPLKEFENTTCSTLTIRQSLDLFLPDKTASGLNKSQILEMNQKKSDTSMLSPLNAARCQDEKAHLPTMKSFGTHRRVTHKPNLLGSKWFIKILKRHFSSVSTETFVPKQDFPQVKRPLKASRTRQPSRTNLPVLSVNEDLMHCTAFATADEYHLGNLSQDLASHGYVEVTSLPRDAANILVMGVENSAKEGDPGTIFFFREGAAVFWNVKDKTMKHVMKVLEKHEIQPYEIALVHWENEELNYIKIEGQSKLHRGEIKLNSELDLDDAILEKFAFSNALCLSVKLAIWEASLDKFIESIQSIPEALKAGKKVKLSHEEVMQKIGELFALRHRINLSSDFLITPDFYWDRENLEGLYDKTCQFLSIGRRVKVMNEKLQHCMELTDLMRNHLNEKRALRLEWMIVILITIEVMFELGRVFF

SEQ ID NO: 72687 - protein, 211 aa, Homo sapiens
  Payload ID: 14389
  Gene Symbol: RMND1
  Gene Name: required for meiotic nuclear division 1 homolog
  ENSP ID: ENSP00000412708
MHCTAFATADEYHLGNLSQDLASHGYVEVTSLPRDAANILVMGVENSAKEGDPGTIFFFREGAAVFWNVKDKTMKHVMKVLEKHEIQPYEIALVHWENEELNYIKIEGQSKLHRGEIKLNSELDLDDAILEKFAFSNALCLSVKLAIWEASLDKFIESIQSIPEALKAGKKVKLSHEEVMQKIGELFALRHRINLSSDFLITPDFYWDREN

SEQ ID NO: 72688 - protein, 279 aa, Homo sapiens
  Payload ID: 14389
  Gene Symbol: RMND1
  Gene Name: required for meiotic nuclear division 1 homolog
  ENSP ID: ENSP00000481280
MHCTAFATADEYHLGNLSQDLASHGYVEVTSLPRDAANILVMGVENSAKEGDPGTIFFFREGAAVFWNVKDKTMKHVMKVLEKHEIQPYEIALVHWENEELNYIKIEGQSKLHRGEIKLNSELDLDDAILEKFAFSNALCLSVKLAIWEASLDKFIESIQSIPEALKAGKKVKLSHEEVMQKIGELFALRHRINLSSDFLITPDFYWDRENLEGLYDKTCQFLSIGRRVKVMNEKLQHCMELTDLMRNHLNEKRALRLEWMIVILITIEVMFELGRVFF

SEQ ID NO: 72689 - protein, 391 aa, Homo sapiens
  Payload ID: 14390
  Gene Symbol: RMND5A
  Gene Name: required for meiotic nuclear division 5 homolog A
  Uniprot ID: Q9H871
  ENSP ID: ENSP00000283632
MDQCVTVERELEKVLHKFSGYGQLCERGLEELIDYTGGLKHEILQSHGQDAELSGTLSLVLTQCCKRIKDTVQKLASDHKDIHSSVSRVGKAIDKNFDSDISSVGIDGCWQADSQRLLNEVMVEHFFRQGMLDVAEELCQESGLSVDPSQKEPFVELNRILEALKVRVLRPALEWAVSNREMLIAQNSSLEFKLHRLYFISLLMGGTTNQREALQYAKNFQPFALNHQKDIQVLMGSLVYLRQGIENSPYVHLLDANQWADICDIFTRDACALLGLSVESPLSVSFSAGCVALPALINIKAVIEQRQCTGVWNQKDELPIEVDLGKKCWYHSIFACPILRQQTTDNNPPMKLVCGHIISRDALNKMFNGSKLKCPYCPMEQSPGDAKQIFF

SEQ ID NO: 72690 - protein, 393 aa, Homo sapiens
  Payload ID: 14391
  Gene Symbol: RMND5B
  Gene Name: required for meiotic nuclear division 5 homolog B
  Uniprot ID: Q96G75
  ENSP ID: ENSP00000320623
MEQCACVERELDKVLQKFLTYGQHCERSLEELLHYVGQLRAELASAALQGTPLSATLSLVMSQCCRKIKDTVQKLASDHKDIHSSVSRVGKAIDRNFDSEICGVVSDAVWDAREQQQQILQMAIVEHLYQQGMLSVAEELCQESTLNVDLDFKQPFLELNRILEALHEQDLGPALEWAVSHRQRLLELNSSLEFKLHRLHFIRLLAGGPAKQLEALSYARHFQPFARLHQREIQVMMGSLVYLRLGLEKSPYCHLLDSSHWAEICETFTRDACSLLGLSVESPLSVSFASGCVALPVLMNIKAVIEQRQCTGVWNHKDELPIEIELGMKCWYHSVFACPILRQQTSDSNPPIKLICGHVISRDALNKLINGGKLKCPYCPMEQNPADGKRIIF

SEQ ID NO: 72691 - protein, 393 aa, Homo sapiens; identical to SEQ ID NO: 72690
  Payload ID: 14391
  Gene Symbol: RMND5B
  Gene Name: required for meiotic nuclear division 5 homolog B
  Uniprot ID: Q96G75
  ENSP ID: ENSP00000420875

SEQ ID NO: 72692 - protein, 77 aa, Homo sapiens
  Payload ID: 14391
  Gene Symbol: RMND5B
  Gene Name: required for meiotic nuclear division 5 homolog B
  ENSP ID: ENSP00000421553
MEQCACVERELDKVLQKFLTYGQHCERSLEELLHYVGQLRAELASAGGWPPLQVPCDSLPEDMGDPKLLSDRVPEGR

SEQ ID NO: 72693 - protein, 62 aa, Homo sapiens
  Payload ID: 14391
  Gene Symbol: RMND5B
  Gene Name: required for meiotic nuclear division 5 homolog B
  ENSP ID: ENSP00000423251
MEQCACVERELDKVLQKFLTYGQHCERSLEELLHYVGQLRAELASAVLPEDQRYGAETGFGP

SEQ ID NO: 72694 - protein, 114 aa, Homo sapiens
  Payload ID: 14391
  Gene Symbol: RMND5B
  Gene Name: required for meiotic nuclear division 5 homolog B
  ENSP ID: ENSP00000424928
MEQCACVERELDKVLQKFLTYGQHCERSLEELLHYVGQLRAELASAALQGTPLSATLSLVMSQCCRKIKDTVQKLASDHKDIHSSVSRVGKAIDRNFDSEICGVVSDAVWDARE

SEQ ID NO: 72695 - protein, 148 aa, Homo sapiens
  Payload ID: 14391
  Gene Symbol: RMND5B
  Gene Name: required for meiotic nuclear division 5 homolog B
  ENSP ID: ENSP00000425920
MEQCACVERELDKVLQKFLTYGQHCERSLEELLHYVGQLRAELASAALQGTPLSATLSLVMSQCCRKIKDTVQKLASDHKDIHSSVSRVGKAIDRNFDSEICGVVSDAVWDAREQQQQILQMAIVEHLYQQGMLSVAEELCQESTLNV

SEQ ID NO: 72696 - protein, 56 aa, Homo sapiens
  Payload ID: 14391
  Gene Symbol: RMND5B
  Gene Name: required for meiotic nuclear division 5 homolog B
  ENSP ID: ENSP00000426588
MEQCACVERELDKVLQKFLTYGQHCERSLEELLHYVGQLRAELASAALQGTPLSAT

SEQ ID NO: 72697 - protein, 380 aa, Homo sapiens
  Payload ID: 14391
  Gene Symbol: RMND5B
  Gene Name: required for meiotic nuclear division 5 homolog B
  ENSP ID: ENSP00000437630
MADCSLDLPGSSSPPSHLSLLRSWDHRRVPPCPALQGTPLSATLSLVMSQCCRKIKDTVQKLASDHKDIHSSVSRVGKAIDRNFDSEICGVVSDAVWDAREQQQQILQMAIVEHLYQQGMLSVAEELCQESTLNVDLDFKQPFLELNRILEALHEQDLGPALEWAVSHRQRLLELNSSLEFKLHRLHFIRLLAGGPAKQLEALSYARHFQPFARLHQREIQVMMGSLVYLRLGLEKSPYCHLLDSSHWAEICETFTRDACSLLGLSVESPLSVSFASGCVALPVLMNIKAVIEQRQCTGVWNHKDELPIEIELGMKCWYHSVFACPILRQQTSDSNPPIKLICGHVISRDALNKLINGGKLKCPYCPMEQNPADGKRIIF

SEQ ID NO: 72698 - protein, 205 aa, Homo sapiens
  Payload ID: 14392
  Gene Symbol: RERGL
  Gene Name: RERG/RAS-like
  Uniprot ID: Q9H628
  ENSP ID: ENSP00000229002
MSNFLHLKYNEKSVSVTKALTVRFLTKRFIGEYASNFESIYKKHLCLERKQLNLEIYDPCSQTQKAKFSLTSELHWADGFVIVYDISDRSSFAFAKALIYRIREPQTSHCKRAVESAVFLVGNKRDLCHVREVGWEEGQKLALENRCQFCELSAAEQSLEVEMMFIRIIKDILINFKLKEKRRPSGSKSMAKLINNVFGKRRKSV

SEQ ID NO: 72699 - protein, 62 aa, Homo sapiens
  Payload ID: 14392
  Gene Symbol: RERGL
  Gene Name: RERG/RAS-like
  ENSP ID: ENSP00000437490
MNDVKLAVLGGEGTGKSALTVRFLTKRFIGEYASNFESIYKKHLCLERKQLNLEIYDPCSQR

SEQ ID NO: 72700 - protein, 204 aa, Homo sapiens
  Payload ID: 14392
  Gene Symbol: RERGL
  Gene Name: RERG/RAS-like
  ENSP ID: ENSP00000437814
MNDVKLAVLGGEGTGKSALTVRFLTKRFIGEYASNFESIYKKHLCLERKQLNLEIYDPCSQTQKAKFSLTSELHWADGFVIVYDISDRSSFAFAKALIYRIREPQTSHCKRAVESAVFLVGNKRDLCHVREVGWEEGQKLALENRCQFCELSAAEQSLEVEMMFIRIIKDILINFKLKEKRRPSGSKSMAKLINNVFGKRRKSV

SEQ ID NO: 72701 - protein, 108 aa, Homo sapiens
  Payload ID: 14393
  Gene Symbol: RETN
  Gene Name: resistin
  Uniprot ID: Q9HD89
  ENSP ID: ENSP00000221515
MKALCLLLLPVLGLLVSSKTLCSMEEAINERIQEVAGSLIFRAISSIGLECQSVTSRGDLATCPRGFAVTGCTCGSACGSWDVRAETTCHCQCAGMDWTGARCCRVQP

SEQ ID NO: 72702 - protein, 82 aa, Homo sapiens
  Payload ID: 14393
  Gene Symbol: RETN
  Gene Name: resistin
  Uniprot ID: Q9HD89
  ENSP ID: ENSP00000370725
MKALCLLLLPVLGLLVSSKTLCSMEEAINERIQEVAGSLSFAVTGCTCGSACGSWDVRAETTCHCQCAGMDWTGARCCRVQP

SEQ ID NO: 72703 - protein, 82 aa, Homo sapiens; identical to SEQ ID NO: 72702
  Payload ID: 14393
  Gene Symbol: RETN
  Gene Name: resistin
  Uniprot ID: Q9HD89
  ENSP ID: ENSP00000485998

SEQ ID NO: 72704 - protein, 111 aa, Homo sapiens
  Payload ID: 14394
  Gene Symbol: RETNLB
  Gene Name: resistin like beta
  Uniprot ID: Q9BQ08
  ENSP ID: ENSP00000295755
MGPSSCLLLILIPLLQLINPGSTQCSLDSVMDKKIKDVLNSLEYSPSPISKKLSCASVKSQGRPSSCPAGMAVTGCACGYGCGSWDVQLETTCHCQCSVVDWTTARCCHLT

SEQ ID NO: 72705 - protein, 485 aa, Homo sapiens
  Payload ID: 14395
  Gene Symbol: RCOR1
  Gene Name: REST corepressor 1
  ENSP ID: ENSP00000262241
MPAMVEKGPEVSGKRRGRNNAAASASAAAASAAASAACASPAATAASGAAASSASAAAASAAAAPNNGQNKSLAAAAPNGNSSSNSWEEGSSGSSSDEEHGGGGMRVGPQYQAVVPDFDPAKLARRSQERDNLGMLVWSPNQNLSEAKLDEYIAIAKEKHGYNMEQALGMLFWHKHNIEKSLADLPNFTPFPDEWTVEDKVLFEQAFSFHGKTFHRIQQMLPDKSIASLVKFYYSWKKTRTKTSVMDRHARKQKREREESEDELEEANGNNPIDIEVDQNKESKKEVPPTETVPQVKKEKHSTQAKNRAKRKPPKGMFLSQEDVEAVSANATAATTVLRQLDMELVSVKRQIQNIKQTNSALKEKLDGGIEPYRLPEVIQKCNARWTTEEQLLAVQAIRKYGRDFQAISDVIGNKSVVQVKNFFVNYRRRFNIDEVLQEWEAEHGKEETNGPSNQKPVKSPDNSIKMPEEEDEAPVLDVRYASAS

SEQ ID NO: 72706 - protein, 35 aa, Homo sapiens
  Payload ID: 14395
  Gene Symbol: RCOR1
  Gene Name: REST corepressor 1
  ENSP ID: ENSP00000454204
QTNSALKEKLDGGIEPYRLPEPSGNMAEIFRQSQT

SEQ ID NO: 72707 - protein, 523 aa, Homo sapiens
  Payload ID: 14396
  Gene Symbol: RCOR2
  Gene Name: REST corepressor 2
  Uniprot ID: Q8IZ40
  ENSP ID: ENSP00000301459
MPSVMEKPSAGSGILSRSRAKTVPNGGQPHSEDDSSEEEHSHDSMIRVGTNYQAVIPECKPESPARYSNKELKGMLVWSPNHCVSDAKLDKYIAMAKEKHGYNIEQALGMLLWHKHDVEKSLADLANFTPFPDEWTVEDKVLFEQAFGFHGKCFQRIQQMLPDKLIPSLVKYYYSWKKTRSRTSVMDRQARRLGGRKDKEDSDELEEGRGGVSEGEPDPADPKREPLPSRPLNARPGPGKKEVQVSQYRHHPLRTRRRPPKGMYLSPEGLTAVSGSPDLANLTLRGLDSQLISLKRQVQSMKQTNSSLRQALEGGIDPLRPPEANTKFNSRWTTDEQLLAVQAIRRYGKDFGAIAEVIGNKTLTQVKTFFVSYRRRFNLEEVLQEWEAEQDGAPGAPVPMEEARRGAPLPAPALEEDDEVQITSVSTSVPRSVPPAPPPPPPPTSLSQPPPLLRPPLPTAPTLLRQPPPLQQGRFLQPRLAPNQPPPPLIRPALAAPRHSARPGPQPPPTLIGTPLEPPAPSL

SEQ ID NO: 72708 - protein, 495 aa, Homo sapiens
  Payload ID: 14397
  Gene Symbol: RCOR3
  Gene Name: REST corepressor 3
  Uniprot ID: Q9P2K3
  ENSP ID: ENSP00000355972
MRVGAEYQARIPEFDPGATKYTDKDNGGMLVWSPYHSIPDAKLDEYIAIAKEKHGYNVEQALGMLFWHKHNIEKSLADLPNFTPFPDEWTVEDKVLFEQAFSFHGKSFHRIQQMLPDKTIASLVKYYYSWKKTRSRTSLMDRQARKLANRHNQGDSDDDVEETHPMDGNDSDYDPKKEAKKEGNTEQPVQTSKIGLGRREYQSLQHRHHSQRSKCRPPKGMYLTQEDVVAVSCSPNAANTILRQLDMELISLKRQVQNAKQVNSALKQKMEGGIEEFKPPESNQKINARWTTEEQLLAVQGVRKYGKDFQAIADVIGNKTVGQVKNFFVNYRRRFNLEEVLQEWEAEQGTQASNGDASTLGEETKSASNVPSGKSTDEEEEAQTPQAPRTLGPSPPAPSSTPTPTAPIATLNQPPPLLRPTLPAAPALHRQPPPLQQQARFIQPRPTLNQPPPPLIRPANSMPPRLNPRPVLSTVGGQQPPSLIGIQTDSQSSLH

SEQ ID NO: 72709 - protein, 436 aa, Homo sapiens
  Payload ID: 14397
  Gene Symbol: RCOR3
  Gene Name: REST corepressor 3
  Uniprot ID: Q9P2K3
  ENSP ID: ENSP00000355973
MPGMMEKGPELLGKNRSANGSAKSPAGGGGSGASSTNGGLHYSEPESGCSSDDEHDVGMRVGAEYQARIPEFDPGATKYTDKDNGGMLVWSPYHSIPDAKLDEYIAIAKEKHGYNVEQALGMLFWHKHNIEKSLADLPNFTPFPDEWTVEDKVLFEQAFSFHGKSFHRIQQMLPDKTIASLVKYYYSWKKTRSRTSLMDRQARKLANRHNQGDSDDDVEETHPMDGNDSDYDPKKEAKKEGNTEQPVQTSKIGLGRREYQSLQHRHHSQRSKCRPPKGMYLTQEDVVAVSCSPNAANTILRQLDMELISLKRQVQNAKQVNSALKQKMEGGIEEFKPPESNQKINARWTTEEQLLAVQGTDPTGSSDTGSITSCPIIHSNTNSPYCHSEPASTTSSSNTACCPGSSPAASSTPAAGSVHPAPANFKSASTTSYSPC

SEQ ID NO: 72710 - protein, 449 aa, Homo sapiens
  Payload ID: 14397
  Gene Symbol: RCOR3
  Gene Name: REST corepressor 3
  Uniprot ID: Q9P2K3
  ENSP ID: ENSP00000398558
MPGMMEKGPELLGKNRSANGSAKSPAGGGGSGASSTNGGLHYSEPESGCSSDDEHDVGMRVGAEYQARIPEFDPGATKYTDKDNGGMLVWSPYHSIPDAKLDEYIAIAKEKHGYNVEQALGMLFWHKHNIEKSLADLPNFTPFPDEWTVEDKVLFEQAFSFHGKSFHRIQQMLPDKTIASLVKYYYSWKKTRSRTSLMDRQARKLANRHNQGDSDDDVEETHPMDGNDSDYDPKKEAKKEGNTEQPVQTSKIGLGRREYQSLQHRHHSQRSKCRPPKGMYLTQEDVVAVSCSPNAANTILRQLDMELISLKRQVQNAKQVNSALKQKMEGGIEEFKPPESNQKINARWTTEEQLLAVQGVRKYGKDFQAIADVIGNKTVGQVKNFFVNYRRRFNLEEVLQEWEAEQGTQASNGDASTLGEETKSASNVPSGKSTDEEEEVCLCMEFELI

SEQ ID NO: 72711 - protein, 553 aa, Homo sapiens
  Payload ID: 14397
  Gene Symbol: RCOR3
  Gene Name: REST corepressor 3
  Uniprot ID: Q9P2K3
  ENSP ID: ENSP00000413929
MPGMMEKGPELLGKNRSANGSAKSPAGGGGSGASSTNGGLHYSEPESGCSSDDEHDVGMRVGAEYQARIPEFDPGATKYTDKDNGGMLVWSPYHSIPDAKLDEYIAIAKEKHGYNVEQALGMLFWHKHNIEKSLADLPNFTPFPDEWTVEDKVLFEQAFSFHGKSFHRIQQMLPDKTIASLVKYYYSWKKTRSRTSLMDRQARKLANRHNQGDSDDDVEETHPMDGNDSDYDPKKEAKKEGNTEQPVQTSKIGLGRREYQSLQHRHHSQRSKCRPPKGMYLTQEDVVAVSCSPNAANTILRQLDMELISLKRQVQNAKQVNSALKQKMEGGIEEFKPPESNQKINARWTTEEQLLAVQGVRKYGKDFQAIADVIGNKTVGQVKNFFVNYRRRFNLEEVLQEWEAEQGTQASNGDASTLGEETKSASNVPSGKSTDEEEEAQTPQAPRTLGPSPPAPSSTPTPTAPIATLNQPPPLLRPTLPAAPALHRQPPPLQQQARFIQPRPTLNQPPPPLIRPANSMPPRLNPRPVLSTVGGQQPPSLIGIQTDSQSSLH

SEQ ID NO: 72712 - protein, 374 aa, Homo sapiens
  Payload ID: 14397
  Gene Symbol: RCOR3
  Gene Name: REST corepressor 3
  ENSP ID: ENSP00000432779
MPGMMEKGPELLGKNRSANGSAKSPAGGGGSGASSTNGGLHYSEPESGCSSDDEHDVGMRVGAEYQARIPEFDPVETRSCYVSQAGLKLRGSSHPPSLASQSAGIIGATKYTDKDNGGMLVWSPYHSIPDAKLDEYIAIAKEKHGYNVEQALGMLFWHKHNIEKSLADLPNFTPFPDEWTVEDKVLFEQAFSFHGKSFHRIQQMLPDKTIASLVKYYYSWKKTRSRTSLMDRQARKLANRHNQGDSDDDVEETHPMDGNDSDYDPKKEAKKEGNTEQPVQTSKIGLGRREYQSLQHRHHSQRSKCRPPKGMYLTQEDVVAVSCSPNAANTILRQLDMELISLKRQFQASTGSFGLYPLRIWEDYYILLTKCSEC

SEQ ID NO: 72713 - protein, 143 aa, Homo sapiens
  Payload ID: 14397
  Gene Symbol: RCOR3
  Gene Name: REST corepressor 3
  ENSP ID: ENSP00000433441
  MOD_RES (1)..(1): Any amino acid
XDDDVEETHPMDGNDSDYDPKKEAKKEGNTEQPVQTSKIGLGRREYQSLQHRHHSQRSKCRPPKGMYLTQEDVVAVSCSPNAANTILRQLDMELISLKRQVQNAKQVNSALKQKMEGGIEEFKPPEAQTPQAPRTLGPSPPAP

SEQ ID NO: 72714 - protein, 74 aa, Homo sapiens
  Payload ID: 14397
  Gene Symbol: RCOR3
  Gene Name: REST corepressor 3
  ENSP ID: ENSP00000434181
  MOD_RES (1)..(1): Any amino acid
XPNAANTILRQLDMELISLKRQVQNAKQVNSALKQKMEGGIEEFKPPESNQKINARWTTEEQLLAVQGDWLLGK

SEQ ID NO: 72715 - protein, 44 aa, Homo sapiens
  Payload ID: 14397
  Gene Symbol: RCOR3
  Gene Name: REST corepressor 3
  ENSP ID: ENSP00000434605
MRVGAEYQARIPEFDPGATKYTDKDNGGMLVWSPYHSIPDAKCP

SEQ ID NO: 72716 - protein, 86 aa, Homo sapiens
  Payload ID: 14397
  Gene Symbol: RCOR3
  Gene Name: REST corepressor 3
  ENSP ID: ENSP00000436057
MRVGAEYQARIPEFDPGATKYTDKDNGGMLVWSPYHSIPDAKLDEYIAIAKEKHGYNVEQALGMLFWHKHNIEKSLADLPNFTPFP

SEQ ID NO: 72717 - protein, 149 aa, Homo sapiens
  Payload ID: 14397
  Gene Symbol: RCOR3
  Gene Name: REST corepressor 3
  ENSP ID: ENSP00000436838
MRVGAEYQARIPEFDPGATKYTDKDNGGMLVWSPYHSIPDAKLDEYIAIAKEKHGYNVEQALGMLFWHKHNIEKSLADLPNFTPFPDEWTVEDKVLFEQAFSFHGKSFHRIQQMLPDKTIASLVKYYYSWKKTRSRTSLMDRQARKLAN

SEQ ID NO: 72718 - protein, 240 aa, Homo sapiens
  Payload ID: 14397
  Gene Symbol: RCOR3
  Gene Name: REST corepressor 3
  ENSP ID: ENSP00000437048
GNTEQPVQTSKIGLGRREYQSLQHRHHSQRSKCRPPKGMYLTQEDVVAVSCSPNAANTILRQLDMELISLKRQVQNAKQVNSALKQKMEGGIEEFKPPESNQKINARWTTEEQLLAVQGVRKYGKDFQAIADVIGNKTVGQVKNFFVNYRRRFNLEEAQTPQAPRTLGPSPPAPSSTPTPTAPIATLNQPPPLLRPTLPAAPALHRQPPPLQQQARFIQPRPTLNQPPPPLIRPANSMPP

SEQ ID NO: 72719 - protein, 317 aa, Homo sapiens
  Payload ID: 14398
  Gene Symbol: RFPL1
  Gene Name: ret finger protein-like 1
  Uniprot ID: O75677
  ENSP ID: ENSP00000346342
MKRLSLVTTNRLSPHGNFLPLCTFPLAVDMAALFQEASSCPVCSDYLEKPMSLECGCAVCFKCINSLQKEPHGEDLLCCCCSMVSQKNKIRPSWQLERLASHIKELEPKLKKILQMNPRMRKFQVDMTLDADTANNFLLISDDLRSVRSGCITQNRQDLAERFDVSICILGSPRFTCGRHYWEVDVGTSTEWDLGVCRESVHRKGRIHLTTERGFWTVSLRDGSRLSASTVPLTFLFVDRKLQRVGIFLDMGMQNVSFFDAEGGSHVYTFRSVSAEEPLHLFFAPPSPPNGDKSVLSICPVINPGTTDAPVHPGEAK

SEQ ID NO: 72720 - protein, 317 aa, Homo sapiens
  Payload ID: 14399
  Gene Symbol: RFPL2
  Gene Name: ret finger protein-like 2
  Uniprot ID: O75678
  ENSP ID: ENSP00000248980
MKRLSLVTTNRLSPHGNFFTLCTFPLAVDMAALFQEASSCPVCSDYLEKPMSLECGCAVCLKCINSLQKEPHGEDLLCCCSSMVSRKNKIRRNRQLERLASHIKELEPKLKKILQMNPRMRKFQVDMTLDANTANNFLLISDDLRSVRSGRIRQNRQDLAERFDVSVCILGSPRFTCGRHCWEVDVGTSTEWDLGVCRESVHRKGRIQLTTELGFWTVSLRDGGRLSATTVPLTFLFVDRKLQRVGIFLDMGMQNVSFFDAESGSHVYTFRSVSAEEPLRPFLAPSVPPNGDQGVLSICPLMNSGTTDAPVRPGEAK

SEQ ID NO: 72721 - protein, 378 aa, Homo sapiens
  Payload ID: 14399
  Gene Symbol: RFPL2
  Gene Name: ret finger protein-like 2
  Uniprot ID: O75678
  ENSP ID: ENSP00000248983
MEVAELGFPETAVSQSRICLCAVLCGHWDFADMMVIRSLSLIRLEGVEGRDPVGGGNLTNKRPSCAPSPQDLSAQWKQLEDRGASSRRVDMAALFQEASSCPVCSDYLEKPMSLECGCAVCLKCINSLQKEPHGEDLLCCCSSMVSRKNKIRRNRQLERLASHIKELEPKLKKILQMNPRMRKFQVDMTLDANTANNFLLISDDLRSVRSGRIRQNRQDLAERFDVSVCILGSPRFTCGRHCWEVDVGTSTEWDLGVCRESVHRKGRIQLTTELGFWTVSLRDGGRLSATTVPLTFLFVDRKLQRVGIFLDMGMQNVSFFDAESGSHVYTFRSVSAEEPLRPFLAPSVPPNGDQGVLSICPLMNSGTTDAPVRPGEAK

SEQ ID NO: 72722 - protein, 378 aa, Homo sapiens; identical to SEQ ID NO: 72721
  Payload ID: 14399
  Gene Symbol: RFPL2
  Gene Name: ret finger protein-like 2
  Uniprot ID: O75678
  ENSP ID: ENSP00000383096

SEQ ID NO: 72723 - protein, 76 aa, Homo sapiens
  Payload ID: 14399
  Gene Symbol: RFPL2
  Gene Name: ret finger protein-like 2
  ENSP ID: ENSP00000486618
MEVAELGFPETAVSQSRICLCAVLCGHWDFADMMVIRSLSGHGCTLPRSKQLSRLLRLSGKTNVPGVWMRRLPQVH

SEQ ID NO: 72724 - protein, 94 aa, Homo sapiens
  Payload ID: 14399
  Gene Symbol: RFPL2
  Gene Name: ret finger protein-like 2
  ENSP ID: ENSP00000487290
MEVAELGFPETAVSQSRICLCAVLCGHWDFADMMVIRSLRPERPVEAAGGQRSFQQKSGHGCTLPRSKQLSRLLRLSGKTNVPGVWMRRLPQVH

SEQ ID NO: 72725 - protein, 317 aa, Homo sapiens
  Payload ID: 14400
  Gene Symbol: RFPL3
  Gene Name: ret finger protein-like 3
  Uniprot ID: O75679
  ENSP ID: ENSP00000249007
MKRLSLVTTNRLSPQGNFLPLCTFPLAVDMAALFQEASSCPVCSDYLEKPMSLECGCTVCLKCINSLQKEPHGEDLLCCCCSMVSQRNKIRPNRQLERLVSHIKELEPKLKKILQMNPRMRKFQVDMTLDADTANNFLLISDDLRSVRSGLITQNRQDLAERFDVSVCILGSPRFTCGRHYWEVDVGTSTEWDLGVCRESVHCKGKIQLTTELGFWTVSLRDGSRLSASTVPLTFLLVDRKLQRVGIFLDMGMQNVSFFDAESGSHVYTFRSVSAEEPLRPFLAPSIPPNGDQGVLSICPLMNSGTTDAPVRPGEAK

SEQ ID NO: 72726 - protein, 288 aa, Homo sapiens
  Payload ID: 14400
  Gene Symbol: RFPL3
  Gene Name: ret finger protein-like 3
  Uniprot ID: O75679
  ENSP ID: ENSP00000380609
MAALFQEASSCPVCSDYLEKPMSLECGCTVCLKCINSLQKEPHGEDLLCCCCSMVSQRNKIRPNRQLERLVSHIKELEPKLKKILQMNPRMRKFQVDMTLDADTANNFLLISDDLRSVRSGLITQNRQDLAERFDVSVCILGSPRFTCGRHYWEVDVGTSTEWDLGVCRESVHCKGKIQLTTELGFWTVSLRDGSRLSASTVPLTFLLVDRKLQRVGIFLDMGMQNVSFFDAESGSHVYTFRSVSAEEPLRPFLAPSIPPNGDQGVLSICPLMNSGTTDAPVRPGEAK

SEQ ID NO: 72727 - protein, 287 aa, Homo sapiens
  Payload ID: 14401
  Gene Symbol: RFPL4A
  Gene Name: ret finger protein-like 4A
  Uniprot ID: A6NLU0
  ENSP ID: ENSP00000392936
MAEHFKQIIRCPVCLKDLEEAVQLKCGYACCLQCLNSLQKEPDGEGLLCRFCSVVSQKDDIKPKYKLRALVSIIKELEPKLKSVLTMNPRMRKFQVDMTFDVDTANNYLIISEDLRSFRSGDLSQNRKEQAERFDTALCVLGTPRFTSGRHYWEVDVGTSQVWDVGVCKESVNRQGKIVLSSEHGFLTVGCREGKVFAASTVPMTPLWVSPQLHRVGIFLDVGMRSIAFYNVSDGCHIYTFIEIPVCEPWRPFFAHKRGSQDDQSILSICSVINPSAASAPVSSEGK

SEQ ID NO: 72728 - protein, 287 aa, Homo sapiens
  Payload ID: 14402
  Gene Symbol: RFPL4AL1
  Gene Name: ret finger protein-like 4A-like 1
  Uniprot ID: F8VTS6
  ENSP ID: ENSP00000345151
MAEHFKQIIRCPVCLKDLEEAVQLKCGYACCLQCLNSLQKEPDGEGLLCRFCSVVSQKDDIKPKYKLRALVSIIKELEPKLKSVLTMNPRMRKFQVDMTFDVDTANNYLIISEDLRSFRSGDLSQNRKEQAERFDTALCVLGTPRFTSGRHYWEVDVGTSQVWDVGVCKESVNRQGKIELSSEHGFLTVGCREGKVFAASTVPMTPLWVSPQLHRVGIFLDVGMRSIAFYNVSDGCHINTFIEIPVCEPWRPFFAHKRGSQDDQSILSICSVINPSTASAPVSSEGK

SEQ ID NO: 72729 - protein, 263 aa, Homo sapiens
  Payload ID: 14403
  Gene Symbol: RFPL4B
  Gene Name: ret finger protein-like 4B
  Uniprot ID: Q6ZWI9
  ENSP ID: ENSP00000423391
MAKRLQAELSCPVCLDFFSCSISLSCTHVFCFDCIQRYILENHDFRAMCPLCRDVVKVPALEEWQVSVLTLMTKQHNSRLEQSLHVREELRHFREDVTLDAATASSLLVFSNDLRSAQCKKIHHDLTKDPRLACVLGTPCFSSGQHYWEVEVGEVKSWSLGVCKEPADRKSNDLFPEHGFWISMKAGAIHANTHLERIPASPRLRRVGIFLDADLEEIQFFDVDNNVLIYTHDGFFSLELLCPFFCLELLGEGESGNVLTICP

SEQ ID NO: 72730 - protein, 1072 aa, Homo sapiens
  Payload ID: 14404
  Gene Symbol: RET
  Gene Name: ret proto-oncogene
  Uniprot ID: P07949
  ENSP ID: ENSP00000344798
MAKATSGAAGLRLLLLLLLPLLGKVALGLYFSRDAYWEKLYVDQAAGTPLLYVHALRDAPEEVPSFRLGQHLYGTYRTRLHENNWICIQEDTGLLYLNRSLDHSSWEKLSVRNRGFPLLTVYLKVFLSPTSLREGECQWPGCARVYFSFFNTSFPACSSLKPRELCFPETRPSFRIRENRPPGTFHQFRLLPVQFLCPNISVAYRLLEGEGLPFRCAPDSLEVSTRWALDREQREKYELVAVCTVHAGAREEVVMVPFPVTVYDEDDSAPTFPAGVDTASAVVEFKRKEDTVVATLRVFDADVVPASGELVRRYTSTLLPGDTWAQQTFRVEHWPNETSVQANGSFVRATVHDYRLVLNRNLSISENRTMQLAVLVNDSDFQGPGAGVLLLHFNVSVLPVSLHLPSTYSLSVSRRARRFAQIGKVCVENCQAFSGINVQYKLHSSGANCSTLGVVTSAEDTSGILFVNDTKALRRPKCAELHYMVVATDQQTSRQAQAQLLVTVEGSYVAEEAGCPLSCAVSKRRLECEECGGLGSPTGRCEWRQGDGKGITRNFSTCSPSTKTCPDGHCDVVETQDINICPQDCLRGSIVGGHEPGEPRGIKAGYGTCNCFPEEEKCFCEPEDIQDPLCDELCRTVIAAAVLFSFIVSVLLSAFCIHCYHKFAHKPPISSAEMTFRRPAQAFPVSYSSSGARRPSLDSMENQVSVDAFKILEDPKWEFPRKNLVLGKTLGEGEFGKVVKATAFHLKGRAGYTTVAVKMLKENASPSELRDLLSEFNVLKQVNHPHVIKLYGACSQDGPLLLIVEYAKYGSLRGFLRESRKVGPGYLGSGGSRNSSSLDHPDERALTMGDLISFAWQISQGMQYLAEMKLVHRDLAARNILVAEGRKMKISDFGLSRDVYEEDSYVKRSQGRIPVKWMAIESLFDHIYTTQSDVWSFGVLLWEIVTLGGNPYPGIPPERLFNLLKTGHRMERPDNCSEEMYRLMLQCWKQEPDKRPVFADISKDLEKMMVKRRDYLDLAASTPSDSLIYDDGLSEEETPLVDCNNAPLPRALPSTWIENKLYGRISHAFTRF

SEQ ID NO: 72731 - protein, 1114 aa, Homo sapiens
  Payload ID: 14404
  Gene Symbol: RET
  Gene Name: ret proto-oncogene
  Uniprot ID: P07949
  ENSP ID: ENSP00000347942
MAKATSGAAGLRLLLLLLLPLLGKVALGLYFSRDAYWEKLYVDQAAGTPLLYVHALRDAPEEVPSFRLGQHLYGTYRTRLHENNWICIQEDTGLLYLNRSLDHSSWEKLSVRNRGFPLLTVYLKVFLSPTSLREGECQWPGCARVYFSFFNTSFPACSSLKPRELCFPETRPSFRIRENRPPGTFHQFRLLPVQFLCPNISVAYRLLEGEGLPFRCAPDSLEVSTRWALDREQREKYELVAVCTVHAGAREEVVMVPFPVTVYDEDDSAPTFPAGVDTASAVVEFKRKEDTVVATLRVFDADVVPASGELVRRYTSTLLPGDTWAQQTFRVEHWPNETSVQANGSFVRATVHDYRLVLNRNLSISENRTMQLAVLVNDSDFQGPGAGVLLLHFNVSVLPVSLHLPSTYSLSVSRRARRFAQIGKVCVENCQAFSGINVQYKLHSSGANCSTLGVVTSAEDTSGILFVNDTKALRRPKCAELHYMVVATDQQTSRQAQAQLLVTVEGSYVAEEAGCPLSCAVSKRRLECEECGGLGSPTGRCEWRQGDGKGITRNFSTCSPSTKTCPDGHCDVVETQDINICPQDCLRGSIVGGHEPGEPRGIKAGYGTCNCFPEEEKCFCEPEDIQDPLCDELCRTVIAAAVLFSFIVSVLLSAFCIHCYHKFAHKPPISSAEMTFRRPAQAFPVSYSSSGARRPSLDSMENQVSVDAFKILEDPKWEFPRKNLVLGKTLGEGEFGKVVKATAFHLKGRAGYTTVAVKMLKENASPSELRDLLSEFNVLKQVNHPHVIKLYGACSQDGPLLLIVEYAKYGSLRGFLRESRKVGPGYLGSGGSRNSSSLDHPDERALTMGDLISFAWQISQGMQYLAEMKLVHRDLAARNILVAEGRKMKISDFGLSRDVYEEDSYVKRSQGRIPVKWMAIESLFDHIYTTQSDVWSFGVLLWEIVTLGGNPYPGIPPERLFNLLKTGHRMERPDNCSEEMYRLMLQCWKQEPDKRPVFADISKDLEKMMVKRRDYLDLAASTPSDSLIYDDGLSEEETPLVDCNNAPLPRALPSTWIENKLYGMSDPNWPGESPVPLTRADGTNTGFPRYPNDSVYANWMLSPSAAKLMDTFDS

SEQ ID NO: 72732 - protein, 181 aa, Homo sapiens
  Payload ID: 14404
  Gene Symbol: RET
  Gene Name: ret proto-oncogene
  ENSP ID: ENSP00000419080
MAKATSGAAGLRLLLLLLLPLLGKDVAEEAGCPLSCAVSKRRLECEECGGLGSPTGRCEWRQGDGKGITRNFSTCSPSTKTCPDGHCDVVETQDINICPQDCLRGSIVGGHEPGEPRGIKAGYGTCNCFPEEEKCFCEPEDIQDPLCDELCRTVIAAAVLFSFIVSVLLSAFCIHCYHKFA

SEQ ID NO: 72733 - protein, 458 aa, Homo sapiens
  Payload ID: 14404
  Gene Symbol: RET
  Gene Name: ret proto-oncogene
  ENSP ID: ENSP00000480088
MAKATSGAAGLRLLLLLLLPLLGKVALGLYFSRDAYWEKLYVDQAAGTPLLYVHALRDAPEEVPSFRLGQHLYGTYRTRLHENNWICIQEDTGLLYLNRSLDHSSWEKLSVRNRGFPLLTVYLKVFLSPTSLREGECQWPGCARVYFSFFNTSFPACSSLKPRELCFPETRPSFRIRENRPPGTFHQFRLLPVQFLCPNISVAYRLLEGEGLPFRCAPDSLEVSTRWALDREQREKYELVAVCTVHAGAREEVVMVPFPVTVYDEDDSAPTFPAGVDTASAVVEFKRKEDTVVATLRVFDADVVPASGELVRRYTSTLLPGDTWAQQTFRVEHWPNETSVQANGSFVRATVHDYRLVLNRNLSISENRTMQLAVLVNDSDFQGPGAGVLLLHFNVSVLPVSLHLPSTYSLSVSRRARRFAQIGKVCVENCLADLTGDAVSGRDEARSSGLGSQKHPGS

SEQ ID NO: 72734 - protein, 261 aa, Homo sapiens
  Payload ID: 14405
  Gene Symbol: RTBDN
  Gene Name: retbindin
  Uniprot ID: Q9BSG5
  ENSP ID: ENSP00000326253
MDEALETQLKTSRGRFSATESLPTLELLSQVDMDCRVHMRPIGLTWVLQLTLAWILLEACGGSRPLQARSQQHHGLAADLGKGKLHLAGPCCPSEMDTTETSGPGNHPERCGVPSPECESFLEHLQRALRSRFRLRLLGVRQAQPLCEELCQAWFANCEDDITCGPTWLPLSEKRGCEPSCLTYGQTFADGTDLCRSALGHALPVAAPGARHCFNISISAVPRPRPGRRGREAPSRRSRSPRTSILDAAGSGSGSGSGSGP

SEQ ID NO: 72735 - protein, 229 aa, Homo sapiens
  Payload ID: 14405
  Gene Symbol: RTBDN
  Gene Name: retbindin
  Uniprot ID: Q9BSG5
  ENSP ID: ENSP00000376925
MDCRVHMRPIGLTWVLQLTLAWILLEACGGSRPLQARSQQHHGLAADLGKGKLHLAGPCCPSEMDTTETSGPGNHPERCGVPSPECESFLEHLQRALRSRFRLRLLGVRQAQPLCEELCQAWFANCEDDITCGPTWLPLSEKRGCEPSCLTYGQTFADGTDLCRSALGHALPVAAPGARHCFNISISAVPRPRPGRRGREAPSRRSRSPRTSILDAAGSGSGSGSGSGP

SEQ ID NO: 72736 - protein, 229 aa, Homo sapiens; identical to SEQ ID NO: 72735
  Payload ID: 14405
  Gene Symbol: RTBDN
  Gene Name: retbindin
  Uniprot ID: Q9BSG5
  ENSP ID: ENSP00000416375

SEQ ID NO: 72737 - protein, 214 aa, Homo sapiens
  Payload ID: 14405
  Gene Symbol: RTBDN
  Gene Name: retbindin
  ENSP ID: ENSP00000464869
MDCRVHMRPIGLTWVLQLTLAWILLEACGGSRPLQARSQQHHGLAADLGKGKLHLAGPCCPSEMDTTETSGPGNHPERCGVPSPECESFLEHLQRALRSRFRLRLLGVRQAQPLCEELCQAWFANCEDDITCGPTWLPLSEKRGCEPSCLTYGQTFADGTDLCRSALGHALPVAAPGARHCFNISISAVPRPRPGRRGREAPSRRSRSPRTSIL

SEQ ID NO: 72738 - protein, 186 aa, Homo sapiens
  Payload ID: 14405
  Gene Symbol: RTBDN
  Gene Name: retbindin
  ENSP ID: ENSP00000465796
MDCRVHMRPIGLTWVLQLTLAWILLEACGGSRPLQARSQQHHGLAADLGKGKLHLAGPCCPSEMDTTETSGPGNHPERCGVPSPECESFLEHLQRALRSRFRLRLLGVRQAQPLCEELCQAWFANCEDDITCGPTWLPLSEKRGCEPSCLTYGQTFADGTDLCRSALGHALPVAAPGARHCFNISI

SEQ ID NO: 72739 - protein, 193 aa, Homo sapiens
  Payload ID: 14405
  Gene Symbol: RTBDN
  Gene Name: retbindin
  ENSP ID: ENSP00000466382
MDCRVHMRPIGLTWVLQLTLAWILLEACGGSRPLQARSQQHHGLAADLGKGKLHLAEMDTTETSGPGNHPERCGVPSPECESFLEHLQRALRSRFRLRLLGVRQAQPLCEELCQAWFANCEDDITCGPTWLPLSEKRGCEPSCLTYGQTFADGTDLCRSALGHALPVAAPGARHCFNISISAVPRPRPGRRGR

SEQ ID NO: 72740 - protein, 239 aa, Homo sapiens
  Payload ID: 14405
  Gene Symbol: RTBDN
  Gene Name: retbindin
  Uniprot ID: Q9BSG5
  ENSP ID: ENSP00000466765
MARQLLSQVDMDCRVHMRPIGLTWVLQLTLAWILLEACGGSRPLQARSQQHHGLAADLGKGKLHLAGPCCPSEMDTTETSGPGNHPERCGVPSPECESFLEHLQRALRSRFRLRLLGVRQAQPLCEELCQAWFANCEDDITCGPTWLPLSEKRGCEPSCLTYGQTFADGTDLCRSALGHALPVAAPGARHCFNISISAVPRPRPGRRGREAPSRRSRSPRTSILDAAGSGSGSGSGSGP

SEQ ID NO: 72741 - protein, 130 aa, Homo sapiens
  Payload ID: 14405
  Gene Symbol: RTBDN
  Gene Name: retbindin
  ENSP ID: ENSP00000466805
MDCRVHMRPIGLTWVLQLTLAWILLEACGGSRPLQARSQQHHGLAADLGKGKLHLAGPCCPSEMDTTETSGPGNHPERCGVPSPECESFLEHLQRALRSRFRLRLLGVRQAQPLCEELCQAWFANCEDDI

SEQ ID NO: 72742 - protein, 174 aa, Homo sapiens
  Payload ID: 14405
  Gene Symbol: RTBDN
  Gene Name: retbindin
  ENSP ID: ENSP00000466855
MDCRVHMRPIGLTWVLQLTLAWILLEACGGSRPLQARSQQHHGLAADLGKGKLHLAGDPQASVPKPYLNIQDPSSQGSPLPGPCCPSEMDTTETSGPGNHPERCGVPSPECESFLEHLQRALRSRFRLRLLGVRQAQPLCEELCQAWFANCEDDITCGPTWLPLSEKRGCEPSC

SEQ ID NO: 72743 - protein, 190 aa, Homo sapiens
  Payload ID: 14405
  Gene Symbol: RTBDN
  Gene Name: retbindin
  ENSP ID: ENSP00000467888
MARQVDMDCRVHMRPIGLTWVLQLTLAWILLEACGGSRPLQARSQQHHGLAADLGKGKLHLAGPCCPSEMDTTETSGPGNHPERCGVPSPECESFLEHLQRALRSRFRLRLLGVRQAQPLCEELCQAWFANCEDDITCGPTWLPLSEKRGCEPSCLTYGQTFADGTDLCRSALGHALPVAAPGARHCFNI

SEQ ID NO: 72744 - protein, 70 aa, Homo sapiens
  Payload ID: 14405
  Gene Symbol: RTBDN
  Gene Name: retbindin
  ENSP ID: ENSP00000468552
MDCRVHMRPIGLTWVLQLTLAWILLEACGGSRPLQARSQQHHGLAADLGKGKLHLAEMDTTETSGPGNHP

SEQ ID NO: 72745 - protein, 205 aa, Homo sapiens
  Payload ID: 14405
  Gene Symbol: RTBDN
  Gene Name: retbindin
  ENSP ID: ENSP00000468697
MDEALETQLKTSRGRFSATESLPTLELLSQVDMDCRVHMRPIGLTWVLQLTLAWILLEACGGSRPLQARSQQHHGLAADLGKGKLHLAGPCCPSEMDTTETSGPGNHPERCGVPSPECESFLEHLQRALRSRFRLRLLGVRQAQPLCEELCQAWFANCEDDITCGPTWLPLSEKRGCEPSCLTYGQAGVQWRDLSSMQPPPPGFK

SEQ ID NO: 72746 - protein, 113 aa, Homo sapiens
  Payload ID: 14405
  Gene Symbol: RTBDN
  Gene Name: retbindin
  ENSP ID: ENSP00000468769
MDEALETQLKTSRGRFSATESLPTLELLSQVDMDCRVHMRPIGLTWVLQLTLAWILLEACGGSRPLQARSQQHHGLAADLGKGKLHLAGDPQASVPKPYLNIQDPSSQGSPLP

SEQ ID NO: 72747 - protein, 177 aa, Homo sapiens
  Payload ID: 14406
  Gene Symbol: RER1
  Gene Name: retention in endoplasmic reticulum sorting receptor 1
  ENSP ID: ENSP00000302088
MSEGDSVGESVHGKPSVVYRFFTRLGQIYQSWLDKSTPYTAVRWVVTLGLSFVYMIRVYLLQGWYIVTYALGIYHLNLFIAFLSPKVDPSLMEDSDDGPSLPTKQNEEFRPFIRRLPEFKFWHAATKGILVAMVCTFFDAFNVPVFWPILVMYFIMLFCITMKRQIKHMIKYRYIPF

SEQ ID NO: 72748 - protein, 187 aa, Homo sapiens
  Payload ID: 14406
  Gene Symbol: RER1
  Gene Name: retention in endoplasmic reticulum sorting receptor 1
  ENSP ID: ENSP00000367773
MSEGDSVGESVHGKPSVVYRFFTRLGQIYQSWLDKSTPYTAVRWVVTLGLSFVYMIRVYLLQGWYIVTYALGIYHLNLFIAFLSPKVDPSLMEDSDDGPSLPTKQNEEFRPFIRRLPEFKFWDASVCGDGRCSCKAGGGRQVPGAGCRCGANLLSPLEGMRLPRASLWLWSVLSSTLSTSRCSGRFW

SEQ ID NO: 72749 - protein, 117 aa, Homo sapiens
  Payload ID: 14406
  Gene Symbol: RER1
  Gene Name: retention in endoplasmic reticulum sorting receptor 1
  ENSP ID: ENSP00000367774
MSEGDSVGESVHGKPSVVYRFFTRLGQIYQSWLDKSTPYTAVRWVVTLGLSFVYMIRVYLLQMTVLRYPPNRTRNSAPSFEGSQSLNFGMRLPRASLWLWSVLSSTLSTSRCSGRFW

SEQ ID NO: 72750 - protein, 117 aa, Homo sapiens; identical to SEQ ID NO: 72749
  Payload ID: 14406
  Gene Symbol: RER1
  Gene Name: retention in endoplasmic reticulum sorting receptor 1
  ENSP ID: ENSP00000367779

SEQ ID NO: 72751 - protein, 158 aa, Homo sapiens
  Payload ID: 14406
  Gene Symbol: RER1
  Gene Name: retention in endoplasmic reticulum sorting receptor 1
  ENSP ID: ENSP00000417000
MSEGDSVGESVHGKPSVVYRFFTRLGQIYQSWLDKSTPYTAVRWVVTLGLSFVYMIRVYLLQGWYIVTYALGIYHLNLFIAFLSPKVDPSLMEDSDDGPSLPTKQNEEFRPFIRRLPEFKFWHAATKGILVAMVCTFFDAFNVPVFWPILVMYFIMLF

SEQ ID NO: 72752 - protein, 196 aa, Homo sapiens
  Payload ID: 14406
  Gene Symbol: RER1
  Gene Name: retention in endoplasmic reticulum sorting receptor 1
  Uniprot ID: O15258
  ENSP ID: ENSP00000464222
MSEGDSVGESVHGKPSVVYRFFTRLGQIYQSWLDKSTPYTAVRWVVTLGLSFVYMIRVYLLQGWYIVTYALGIYHLNLFIAFLSPKVDPSLMEDSDDGPSLPTKQNEEFRPFIRRLPEFKFWHAATKGILVAMVCTFFDAFNVPVFWPILVMYFIMLFCITMKRQIKHMIKYRYIPFTHGKRRYRGKEDAGKAFAS

SEQ ID NO: 72753 - protein, 196 aa, Homo sapiens; identical to SEQ ID NO: 72752
  Payload ID: 14406
  Gene Symbol: RER1
  Gene Name: retention in endoplasmic reticulum sorting receptor 1
  Uniprot ID: O15258
  ENSP ID: ENSP00000475168

SEQ ID NO: 72754 - protein, 214 aa, Homo sapiens
  Payload ID: 14406
  Gene Symbol: RER1
  Gene Name: retention in endoplasmic reticulum sorting receptor 1
  ENSP ID: ENSP00000487501
MSEGDSVGESVHGKPSVVYRFFTRLGQIYQSWLDKSTPYTAVRWVVTLGLSFVYMIRVYLLQGWYIVTYALGIYHLNLFIAFLSPKVDPSLMEDSDDGPSLPTKQNEEFRPFIRRLPEFKFWHAATKGILVAMVCTFFDAFNVPVFWPILVMYFIMLFCITMKRQIKHMIKYRYIPFTHGKRRYRGKEDAGKPSPARSGTEAASRVARTVLSHC

SEQ ID NO: 72755 - protein, 331 aa, Homo sapiens
  Payload ID: 14407
  Gene Symbol: RCN1
  Gene Name: reticulocalbin 1, EF-hand calcium binding domain
  Uniprot ID: Q15293
  ENSP ID: ENSP00000054950
MARGGRGRRLGLALGLLLALVLAPRVLRAKPTVRKERVVRPDSELGERPPEDNQSFQYDHEAFLGKEDSKTFDQLTPDESKERLGKIVDRIDNDGDGFVTTEELKTWIKRVQKRYIFDNVAKVWKDYDRDKDDKISWEEYKQATYGYYLGNPAEFHDSSDHHTFKKMLPRDERRFKAADLNGDLTATREEFTAFLHPEEFEHMKEIVVLETLEDIDKNGDGFVDQDEYIADMFSHEENGPEPDWVLSEREQFNEFRDLNKDGKLDKDEIRHWILPQDYDHAQAEARHLVYESDKNKDEKLTKEEILENWNMFVGSQATNYGEDLTKNHDEL

SEQ ID NO: 72756 - protein, 28 aa, Homo sapiens
  Payload ID: 14407
  Gene Symbol: RCN1
  Gene Name: reticulocalbin 1, EF-hand calcium binding domain
  ENSP ID: ENSP00000433237
EILENWNMFVGSQATNYGEDLTKNHDEL

SEQ ID NO: 72757 - protein, 19 aa, Homo sapiens
  Payload ID: 14407
  Gene Symbol: RCN1
  Gene Name: reticulocalbin 1, EF-hand calcium binding domain
  ENSP ID: ENSP00000433249
MLPRDERRFKAADLNGDLT

SEQ ID NO: 72758 - protein, 280 aa, Homo sapiens
  Payload ID: 14407
  Gene Symbol: RCN1
  Gene Name: reticulocalbin 1, EF-hand calcium binding domain
  Uniprot ID: Q15293
  ENSP ID: ENSP00000436422
MTGGEGPLPTAKQATCSPPSSRERNPRRRGSRPRKIVDRIDNDGDGFVTTEELKTWIKRVQKRYIFDNVAKVWKDYDRDKDDKISWEEYKQATYGYYLGNPAEFHDSSDHHTFKKMLPRDERRFKAADLNGDLTATREEFTAFLHPEEFEHMKEIVVLETLEDIDKNGDGFVDQDEYIADMFSHEENGPEPDWVLSEREQFNEFRDLNKDGKLDKDEIRHWILPQDYDHAQAEARHLVYESDKNKDEKLTKEEILENWNMFVGSQATNYGEDLTKNHDEL

SEQ ID NO: 72759 - protein, 57 aa, Homo sapiens
  Payload ID: 14407
  Gene Symbol: RCN1
  Gene Name: reticulocalbin 1, EF-hand calcium binding domain
  ENSP ID: ENSP00000436427
  MOD_RES (1)..(1): Any amino acid
XETLEDIDKNGDGFVDQDEYIDKETSGSVTELSQKPGFIFWLLNSVLSTPPHGLHHE

SEQ ID NO: 72760 - protein, 58 aa, Homo sapiens
  Payload ID: 14407
  Gene Symbol: RCN1
  Gene Name: reticulocalbin 1, EF-hand calcium binding domain
  ENSP ID: ENSP00000436482
MLPRDERRFKAADLNGDLTATREEFTAFLHPEEFEHMKEIVVLETLEDIDKNGDGFVD

SEQ ID NO: 72761 - protein, 335 aa, Homo sapiens
  Payload ID: 14408
  Gene Symbol: RCN2
  Gene Name: reticulocalbin 2, EF-hand calcium binding domain
  Uniprot ID: Q14257
  ENSP ID: ENSP00000319739
MRLGPRTAALGLLLLCAAAAGAGKAEELHYPLGERRSDYDREALLGVQEDVDEYVKLGHEEQQKRLQAIIKKIDLDSDGFLTESELSSWIQMSFKHYAMQEAKQQFVEYDKNSDDTVTWDEYNIQMYDRVIDFDENTALDDAEEESFRKEFAICKKQSFCFWLLRFNLHLKDKKRFEKANQDSGPGLSLEEFIAFEHPEEVDYMTEFVIQEALEEHDKNGDGFVSLEEFLGDYRWDPTANEDPEWILVEKDRFVNDYDKDNDGRLDPQELLPWVVPNNQGIAQEEALHLIDEMDLNGDKKLSEEEILENPDLFLTSEATDYGRQLHDDYFYHDEL

SEQ ID NO: 72762 - protein, 216 aa, Homo sapiens
  Payload ID: 14408
  Gene Symbol: RCN2
  Gene Name: reticulocalbin 2, EF-hand calcium binding domain
  ENSP ID: ENSP00000378347
MRLGPRTAALGLLLLCAAAAGAGKAEELHYPLGERRSDYDREALLGVQLHLKDKKRFEKANQDSGPGLSLEEFIAFEHPEEVDYMTEFVIQEALEEHDKNGDGFVSLEEFLGDYRWDPTANEDPEWILVEKDRFVNDYDKDNDGRLDPQELLPWVVPNNQGIAQEEALHLIDEMDLNGDKKLSEEEILENPDLFLTSEATDYGRQLHDDYFYHDEL

SEQ ID NO: 72763 - protein, 317 aa, Homo sapiens
  Payload ID: 14408
  Gene Symbol: RCN2
  Gene Name: reticulocalbin 2, EF-hand calcium binding domain
  Uniprot ID: Q14257
  ENSP ID: ENSP00000378349
MRLGPRTAALGLLLLCAAAAGAGKAEELHYPLGERRSDYDREALLGVQEDVDEYVKLGHEEQQKRLQAIIKKIDLDSDGFLTESELSSWIQMSFKHYAMQEAKQQFVEYDKNSDDTVTWDEYNIQMYDRVIDFDENTALDDAEEESFRKLHLKDKKRFEKANQDSGPGLSLEEFIAFEHPEEVDYMTEFVIQEALEEHDKNGDGFVSLEEFLGDYRWDPTANEDPEWILVEKDRFVNDYDKDNDGRLDPQELLPWVVPNNQGIAQEEALHLIDEMDLNGDKKLSEEEILENPDLFLTSEATDYGRQLHDDYFYHDEL

SEQ ID NO: 72764 - protein, 155 aa, Homo sapiens
  Payload ID: 14408
  Gene Symbol: RCN2
  Gene Name: reticulocalbin 2, EF-hand calcium binding domain
  ENSP ID: ENSP00000453052
  MOD_RES (1)..(1): Any amino acid
XGLLLLCAAAAGAGKAEELHYPLGERRSDYDREALLGVQEDVDEYVKLGHEEQQKRLQAIIKKIDLDSDGFLTESELSSWIQMSFKHYAMQEAKQQFVEYDKNSDDTVTWDEYNIQMYDRVIDFDENTALDDAEEESFRKHQCGGLGLHPQSQSA

SEQ ID NO: 72765 - protein, 328 aa, Homo sapiens
  Payload ID: 14409
  Gene Symbol: RCN3
  Gene Name: reticulocalbin 3, EF-hand calcium binding domain
  Uniprot ID: Q96D15
  ENSP ID: ENSP00000270645
MMWRPSVLLLLLLLRHGAQGKPSPDAGPHGQGRVHQAAPLSDAPHDDAHGNFQYDHEAFLGREVAKEFDQLTPEESQARLGRIVDRMDRAGDGDGWVSLAELRAWIAHTQQRHIRDSVSAAWDTYDTDRDGRVGWEELRNATYGHYAPGEEFHDVEDAETYKKMLARDERRFRVADQDGDSMATREELTAFLHPEEFPHMRDIVIAETLEDLDRNKDGYVQVEEYIADLYSAEPGEEEPAWVQTERQQFRDFRDLNKDGHLDGSEVGHWVLPPAQDQPLVEANHLLHESDTDKDGRLSKAEILGNWNMFVGSQATNYGEDLTRHHDEL

SEQ ID NO: 72766 - protein, 150 aa, Homo sapiens
  Payload ID: 14409
  Gene Symbol: RCN3
  Gene Name: reticulocalbin 3, EF-hand calcium binding domain
  ENSP ID: ENSP00000469727
MMWRPSVLLLLLLLRHGAQGKPSPDAGPHGQGRVHQAAPLSDAPHDDAHGNFQYDHEAFLGREVAKEFDQLTPEESQARLGRIVDRMDRAGDGDGWVSLAELRAWIAHTQQRHIRDSVKNFMTWRMQRPTKRCWLGTSGVSGWPTRMGTR

SEQ ID NO: 72767 - protein, 169 aa, Homo sapiens
  Payload ID: 14409
  Gene Symbol: RCN3
  Gene Name: reticulocalbin 3, EF-hand calcium binding domain
  ENSP ID: ENSP00000470540
FQYDHEAFLGREVAKEFDQLTPEESQARLGRIVDRMDRAGDGDGWVSLAELRAWIAHTQQRHIRDSVSAAWDTYDTDRDGRVGWEELRNATYGHYAPGEEFHDVEDAETYKKMLARDERRFRVADQDGDSMATREELTAFLHPEEFPHMRDIVIALFFSRIYLLTFLLL

SEQ ID NO: 72768 - protein, 58 aa, Homo sapiens
  Payload ID: 14409
  Gene Symbol: RCN3
  Gene Name: reticulocalbin 3, EF-hand calcium binding domain
  ENSP ID: ENSP00000470771
  MOD_RES (1)..(1): Any amino acid
XTERQQFRDFRDLNKDGHLDGSEDGRLSKAEILGNWNMFVGSQATNYGEDLTRHHDEL

SEQ ID NO: 72769 - protein, 776 aa, Homo sapiens
  Payload ID: 14410
  Gene Symbol: RTN1
  Gene Name: reticulon 1
  Uniprot ID: Q16799
  ENSP ID: ENSP00000267484
MAAPGDPQDELLPLAGPGSQWLRHRGEGENEAVTPKGATPAPQAGEPSPGLGARAREAASREAGSGPARQSPVAMETASTGVAGVSSAMDHTFSTTSKDGEGSCYTSLISDICYPPQEDSTYFTGILQKENGHVTISESPEELGTPGPSLPDVPGIESRGLFSSDSGIEMTPAESTEVNKILADPLDQMKAEAYKYIDITRPEEVKHQEQHHPELEDKDLDFKNKDTDISIKPEGVREPDKPAPVEGKIIKDHLLEESTFAPYIDDLSEEQRRAPQITTPVKITLTEIEPSVETTTQEKTPEKQDICLKPSPDTVPTVTVSEPEDDSPGSITPPSSGTEPSAAESQGKGSISEDELITAIKEAKGLSYETAENPRPVGQLADRPEVKARSGPPTIPSPLDHEASSAESGDSEIELVSEDPMAAEDALPSGYVSFGHVGGPPPSPASPSIQYSILREEREAELDSELIIESCDASSASEESPKREQDSPPMKPSALDAIREETGVRAEERAPSRRGLAEPGSFLDYPSTEPQPGPELPPGDGALEPETPMLPRKPEEDSSSNQSPAATKGPGPLGPGAPPPLLFLNKQKAIDLLYWRDIKQTGIVFGSFLLLLFSLTQFSVVSVVAYLALAALSATISFRIYKSVLQAVQKTDEGHPFKAYLELEITLSQEQIQKYTDCLQFYVNSTLKELRRLFLVQDLVDSLKFAVLMWLLTYVGALFNGLTLLLMAVVSMFTLPVVYVKHQAQIDQYLGLVRTHINAVVAKIQAKIPGAKRHAE

SEQ ID NO: 72770 - protein, 208 aa, Homo sapiens
  Payload ID: 14410
  Gene Symbol: RTN1
  Gene Name: reticulon 1
  Uniprot ID: Q16799
  ENSP ID: ENSP00000340716
MQATADSTKMDCVWSNWKSQAIDLLYWRDIKQTGIVFGSFLLLLFSLTQFSVVSVVAYLALAALSATISFRIYKSVLQAVQKTDEGHPFKAYLELEITLSQEQIQKYTDCLQFYVNSTLKELRRLFLVQDLVDSLKFAVLMWLLTYVGALFNGLTLLLMAVVSMFTLPVVYVKHQAQIDQYLGLVRTHINAVVAKIQAKIPGAKRHAE

SEQ ID NO: 72771 - protein, 193 aa, Homo sapiens
  Payload ID: 14410
  Gene Symbol: RTN1
  Gene Name: reticulon 1
  ENSP ID: ENSP00000378525
MPFLPAIDLLYWRDIKQTGIVFGSFLLLLFSLTQFSVVSVVAYLALAALSATISFRIYKSVLQAVQKTDEGHPFKAYLELEITLSQEQIQKYTDCLQFYVNSTLKELRRLFLVQDLVDSLKFAVLMWLLTYVGALFNGLTLLLMAVVSMFTLPVVYVKHQAQIDQYLGLVRTHINAVVAKIQAKIPGAKRHAE

SEQ ID NO: 72772 - protein, 702 aa, Homo sapiens
  Payload ID: 14410
  Gene Symbol: RTN1
  Gene Name: reticulon 1
  ENSP ID: ENSP00000483039
METASTGVAGVSSAMDHTFSTTSKDGEGSCYTSLISDICYPPQEDSTYFTGILQKENGHVTISESPEELGTPGPSLPDVPGIESRGLFSSDSGIEMTPAESTEVNKILADPLDQMKAEAYKYIDITRPEEVKHQEQHHPELEDKDLDFKNKDTDISIKPEGVREPDKPAPVEGKIIKDHLLEESTFAPYIDDLSEEQRRAPQITTPVKITLTEIEPSVETTTQEKTPEKQDICLKPSPDTVPTVTVSEPEDDSPGSITPPSSGTEPSAAESQGKGSISEDELITAIKEAKGLSYETAENPRPVGQLADRPEVKARSGPPTIPSPLDHEASSAESGDSEIELVSEDPMAAEDALPSGYVSFGHVGGPPPSPASPSIQYSILREEREAELDSELIIESCDASSASEESPKREQDSPPMKPSALDAIREETGVRAEERAPSRRGLAEPGSFLDYPSTEPQPGPELPPGDGALEPETPMLPRKPEEDSSSNQSPAATKGPGPLGPGAPPPLLFLNKQKAIDLLYWRDIKQTGIVFGSFLLLLFSLTQFSVVSVVAYLALAALSATISFRIYKSVLQAVQKTDEGHPFKAYLELEITLSQEQIQKYTDCLQFYVNSTLKELRRLFLVQDLVDSLKFAVLMWLLTYVGALFNGLTLLLMAVVSMFTLPVVYVKHQAQIDQYLGLVRTHINAVVAKIQAKIPGAKRHAE

SEQ ID NO: 72773 - protein, 545 aa, Homo sapiens
  Payload ID: 14411
  Gene Symbol: RTN2
  Gene Name: reticulon 2
  Uniprot ID: O75298
  ENSP ID: ENSP00000245923
MGQVLPVFAHCKEAPSTASSTPDSTEGGNDDSDFRELHTAREFSEEDEEETTSQDWGTPRELTFSYIAFDGVVGSGGRRDSTARRPRPQGRSVSEPRDQHPQPSLGDSLESIPSLSQSPEPGRRGDPDTAPPSERPLEDLRLRLDHLGWVARGTGSGEDSSTSSSTPLEDEEPQEPNRLETGEAGEELDLRLRLAQPSSPEVLTPQLSPGSGTPQAGTPSPSRSRDSNSGPEEPLLEEEEKQWGPLEREPVRGQCLDSTDQLEFTVEPRLLGTAMEWLKTSLLLAVYKTVPILELSPPLWTAIGWVQRGPTPPTPVLRVLLKWAKSPRSSGVPSLSLGADMGSKVADLLYWKDTRTSGVVFTGLMVSLLCLLHFSIVSVAAHLALLLLCGTISLRVYRKVLQAVHRGDGANPFQAYLDVDLTLTREQTERLSHQITSRVVSAATQLRHFFLVEDLVDSLKLALLFYILTFVGAIFNGLTLLILGVIGLFTIPLLYRQHQAQIDQYVGLVTNQLSHIKAKIRAKIPGTGALASAAAAVSGSKAKAE

SEQ ID NO: 72774 - protein, 472 aa, Homo sapiens
  Payload ID: 14411
  Gene Symbol: RTN2
  Gene Name: reticulon 2
  Uniprot ID: O75298
  ENSP ID: ENSP00000345127
MGQVLPVFAHCKEAPSTASSTPDSTEGGNDDSDFRELHTAREFSEEDEEETTSQDWGTPRELTFSYIAFDGVVGSGGRRDSTARRPRPQGRSVSEPRDQHPQPSLGDSLESIPSLSQSPEPGRRGDPDTAPPSERPLEDLRLRLDHLGWVARGTGSGEDSSTSSSTPLEDEEPQEPNRLETGEAGEELDLRLRLAQPSSPEVLTPQLSPGSGTPQAGTPSPSRSRDSNSGPEEPLLEEEEKQWGPLEREPVRGQCLDSTDQLEFTVEPRLLVADLLYWKDTRTSGVVFTGLMVSLLCLLHFSIVSVAAHLALLLLCGTISLRVYRKVLQAVHRGDGANPFQAYLDVDLTLTREQTERLSHQITSRVVSAATQLRHFFLVEDLVDSLKLALLFYILTFVGAIFNGLTLLILGVIGLFTIPLLYRQHQAQIDQYVGLVTNQLSHIKAKIRAKIPGTGALASAAAAVSGSKAKAE

SEQ ID NO: 72775 - protein, 205 aa, Homo sapiens
  Payload ID: 14411
  Gene Symbol: RTN2
  Gene Name: reticulon 2
  Uniprot ID: O75298
  ENSP ID: ENSP00000398178
MGSKVADLLYWKDTRTSGVVFTGLMVSLLCLLHFSIVSVAAHLALLLLCGTISLRVYRKVLQAVHRGDGANPFQAYLDVDLTLTREQTERLSHQITSRVVSAATQLRHFFLVEDLVDSLKLALLFYILTFVGAIFNGLTLLILGVIGLFTIPLLYRQHQAQIDQYVGLVTNQLSHIKAKIRAKIPGTGALASAAAAVSGSKAKAE

SEQ ID NO: 72776 - protein, 271 aa, Homo sapiens
  Payload ID: 14411
  Gene Symbol: RTN2
  Gene Name: reticulon 2
  ENSP ID: ENSP00000466619
MEWLKTSLLLAVYKTVPILELSPPLWTAIGWVQRGPTPPTPVLRVLLKWAKSPRSSGVPSLSLGADMGSKVADLLYWKDTRTSGVVFTGLMVSLLCLLHFSIVSVAAHLALLLLCGTISLRVYRKVLQAVHRGDGANPFQAYLDVDLTLTREQTERLSHQITSRVVSAATQLRHFFLVEDLVDSLKLALLFYILTFVGAIFNGLTLLILGVIGLFTIPLLYRQHQAQIDQYVGLVTNQLSHIKAKIRAKIPGTGALASAAAAVSGSKAKAE

SEQ ID NO: 72777 - protein, 276 aa, Homo sapiens
  Payload ID: 14411
  Gene Symbol: RTN2
  Gene Name: reticulon 2
  ENSP ID: ENSP00000467863
MGQVLPVFAHCKEAPSTASSTPDSTEGGNDDSDFRELHTAREFSEEDEEETTSQDWGTPRELTFSYIAFDGVVGSGGRRDSTARRPRPQGRSVSEPRDQHPQPSLGDSLESIPSLSQSPEPGRRGDPDTAPPSERPLEDLRLRLDHLGWVARGTGSGEDSSTSSSTPLEDEEPQEPNRLETGEAGEELDLRLRLAQPSSPEVLTPQLSPGSGTPQAGTPSPSRSRDSNSGPEEPLLEEEEKQWGPLEREPVRGQCLDSTDQLEFTVEPRLLGKQRV

SEQ ID NO: 72778 - protein, 461 aa, Homo sapiens
  Payload ID: 14411
  Gene Symbol: RTN2
  Gene Name: reticulon 2
  ENSP ID: ENSP00000468144
MGQVLPVFAHCKEAPSTASSTPDSTEGGNDDSDFRELHTAREFSEEDEEETTSQDWGTPRELTFSYIAFDGVVGSGGRRDSTARRPRPQGRSVSEPRDQHPQPSLGDSLESIPSLSQSPEPGRRGDPDTAPPSERPLEDLRLRLDHLGWVARGTGSGEDSSTSSSTPLEDEEPQEPNRLETGEAGEELDLRLRLAQPSSPEVLTPQLSPGSGTPQAGTPSPSRSRDSNSGPEEPLLEEEEKQWGPLEREPVRGQCLDSTDQLEFTVEPRLLGTAMEWLKTSLLLAVYKTVPILELSPPLWTAIGWVQRGPTPPTPVLRVLLKWAKSPRSSGVPSLSLGADMGSKVADLLYWKDTRTSGVVFTGLMVSLLCLLHFSIVSVAAHLALLLLCGTISLRVYRKVLQAVHRGDGANPFQAYLDVDLTLTREQTERLSHQITSRVVSAATQLRHFFLVEDLVDSLKE

SEQ ID NO: 72779 - protein, 241 aa, Homo sapiens
  Payload ID: 14412
  Gene Symbol: RTN3
  Gene Name: reticulon 3
  Uniprot ID: O95197
  ENSP ID: ENSP00000340903
MAEPSAATQSHSISSSSFGAEPSAPGGGGSPGACPALGTKSCSSSCAVHDLIFWRDVKKTGFVFGTTLIMLLSLAAFSVISVVSYLILALLSVTISFRIYKSVIQAVQKSEEGHPFKAYLDVDITLSSEAFHNYMNAAMVHINRALKLIIRLFLVEDLVDSLKLAVFMWLMTYVGAVFNGITLLILAELLIFSVPIVYEKYKDPSKTPWNRQKKGRISTWKPEMQQLLKHHLIVITSLLVL

SEQ ID NO: 72780 - protein, 1013 aa, Homo sapiens
  Payload ID: 14412
  Gene Symbol: RTN3
  Gene Name: reticulon 3
  Uniprot ID: O95197
  ENSP ID: ENSP00000344106
MAEPSAATQSHSISSSSFGAEPSAPGGGGSPGACPALGTKSCSSSCAEGLSSLCSDEPSSEIMTSSFLSSSEIHNTGLTILHGEKSHVLGSQPILAKEGKDHLDLLDMKKMEKPQGTSNNVSDSSVSLAAGVHCDRPSIPASFPEHPAFLSKKIGQVEEQIDKETKNPNGVSSREAKTALDADDRFTLLTAQKPPTEYSKVEGIYTYSLSPSKVSGDDVIEKDSPESPFEVIIDKAAFDKEFKDSYKESTDDFGSWSVHTDKESSEDISETNDKLFPLRNKEAGRYPMSALLSRQFSHTNAALEEVSRCVNDMHNFTNEILTWDLVPQVKQQTDKSSDCITKTTGLDMSEYNSEIPVVNLKTSTHQKTPVCSIDGSTPITKSTGDWAEASLQQENAITGKPVPDSLNSTKEFSIKGVQGNMQKQDDTLAELPGSPPEKCDSLGSGVATVKVVLPDDHLKDEMDWQSSALGEITEADSSGESDDTVIEDITADTSFENNKIQAEKPVSIPSAVVKTGEREIKEIPSCEREEKTSKNFEELVSDSELHQDQPDILGRSPASEAACSKVPDTNVSLEDVSEVAPEKPITTENPKLPSTVSPNVFNETEFSLNVTTSAYLESLHGKNVKHIDDSSPEDLIAAFTETRDKGIVDSERNAFKAISEKMTDFKTTPPVEVLHENESGGSEIKDIGSKYSEQSKETNGSEPLGVFPTQGTPVASLDLEQEQLTIKALKELGERQVEKSTSAQRDAELPSEEVLKQTFTFAPESWPQRSYDILERNVKNGSDLGISQKPITIRETTRVDAVSSLSKTELVKKHVLARLLTDFSVHDLIFWRDVKKTGFVFGTTLIMLLSLAAFSVISVVSYLILALLSVTISFRIYKSVIQAVQKSEEGHPFKAYLDVDITLSSEAFHNYMNAAMVHINRALKLIIRLFLVEDLVDSLKLAVFMWLMTYVGAVFNGITLLILAELLIFSVPIVYEKYKTQIDHYVGIARDQTKSIVEKIQAKLPGIAKKKAE

SEQ ID NO: 72781 - protein, 214 aa, Homo sapiens
  Payload ID: 14412
  Gene Symbol: RTN3
  Gene Name: reticulon 3
  Uniprot ID: O95197
  ENSP ID: ENSP00000346492
MAEPSAATQSHSISSSSFGAEPSAPGGGGSPGACPALGTKSCSSSCAVHDLIFWRDVKKTGFVFGTTLIMLLSLAAFSVISVVSYLILALLSVTISFRIYKSVIQAVQKSEEGHPFKPRLITMLASPEIRPSQLLKRSKQNSLESPKKRQNKYMETRNATVTKTPFNSYNVVTCTMKENTQCQLEPAFQAFFLIWCFLPSFPFNPQYQAQKLMD

SEQ ID NO: 72782 - protein, 255 aa, Homo sapiens
  Payload ID: 14412
  Gene Symbol: RTN3
  Gene Name: reticulon 3
  Uniprot ID: O95197
  ENSP ID: ENSP00000348279
MAEPSAATQSHSISSSSFGAEPSAPGGGGSPGACPALGTKSCSSSCADSFVSSSSSQPVSLFSTSQVHDLIFWRDVKKTGFVFGTTLIMLLSLAAFSVISVVSYLILALLSVTISFRIYKSVIQAVQKSEEGHPFKAYLDVDITLSSEAFHNYMNAAMVHINRALKLIIRLFLVEDLVDSLKLAVFMWLMTYVGAVFNGITLLILAELLIFSVPIVYEKYKTQIDHYVGIARDQTKSIVEKIQAKLPGIAKKKAE

SEQ ID NO: 72783 - protein, 1032 aa, Homo sapiens
  Payload ID: 14412
  Gene Symbol: RTN3
  Gene Name: reticulon 3
  Uniprot ID: O95197
  ENSP ID: ENSP00000367050
MAEPSAATQSHSISSSSFGAEPSAPGGGGSPGACPALGTKSCSSSCADSFVSSSSSQPVSLFSTSQEGLSSLCSDEPSSEIMTSSFLSSSEIHNTGLTILHGEKSHVLGSQPILAKEGKDHLDLLDMKKMEKPQGTSNNVSDSSVSLAAGVHCDRPSIPASFPEHPAFLSKKIGQVEEQIDKETKNPNGVSSREAKTALDADDRFTLLTAQKPPTEYSKVEGIYTYSLSPSKVSGDDVIEKDSPESPFEVIIDKAAFDKEFKDSYKESTDDFGSWSVHTDKESSEDISETNDKLFPLRNKEAGRYPMSALLSRQFSHTNAALEEVSRCVNDMHNFTNEILTWDLVPQVKQQTDKSSDCITKTTGLDMSEYNSEIPVVNLKTSTHQKTPVCSIDGSTPITKSTGDWAEASLQQENAITGKPVPDSLNSTKEFSIKGVQGNMQKQDDTLAELPGSPPEKCDSLGSGVATVKVVLPDDHLKDEMDWQSSALGEITEADSSGESDDTVIEDITADTSFENNKIQAEKPVSIPSAVVKTGEREIKEIPSCEREEKTSKNFEELVSDSELHQDQPDILGRSPASEAACSKVPDTNVSLEDVSEVAPEKPITTENPKLPSTVSPNVFNETEFSLNVTTSAYLESLHGKNVKHIDDSSPEDLIAAFTETRDKGIVDSERNAFKAISEKMTDFKTTPPVEVLHENESGGSEIKDIGSKYSEQSKETNGSEPLGVFPTQGTPVASLDLEQEQLTIKALKELGERQVEKSTSAQRDAELPSEEVLKQTFTFAPESWPQRSYDILERNVKNGSDLGISQKPITIRETTRVDAVSSLSKTELVKKHVLARLLTDFSVHDLIFWRDVKKTGFVFGTTLIMLLSLAAFSVISVVSYLILALLSVTISFRIYKSVIQAVQKSEEGHPFKAYLDVDITLSSEAFHNYMNAAMVHINRALKLIIRLFLVEDLVDSLKLAVFMWLMTYVGAVFNGITLLILAELLIFSVPIVYEKYKTQIDHYVGIARDQTKSIVEKIQAKLPGIAKKKAE

SEQ ID NO: 72784 - protein, 185 aa, Homo sapiens
  Payload ID: 14412
  Gene Symbol: RTN3
  Gene Name: reticulon 3
  ENSP ID: ENSP00000437971
MAEPSAATQSHSISSSSFGAEPSAPGGGGSPGACPALGTKSCSSSCAESSLGSHFVPHPVSLLSFNLRIKIKRMHDLIFWRDVKKTGFVFGTTLIMLLSLAAFSVISVVSYLILALLSVTISFRIYKSVIQAVQKSEEGHPFKAYLDVDITLSSEAFHNYMNAAMVHINRALKLIIRLFLVEDLV

SEQ ID NO: 72785 - protein, 236 aa, Homo sapiens
  Payload ID: 14412
  Gene Symbol: RTN3
  Gene Name: reticulon 3
  Uniprot ID: O95197
  ENSP ID: ENSP00000440874
MAEPSAATQSHSISSSSFGAEPSAPGGGGSPGACPALGTKSCSSSCAVHDLIFWRDVKKTGFVFGTTLIMLLSLAAFSVISVVSYLILALLSVTISFRIYKSVIQAVQKSEEGHPFKAYLDVDITLSSEAFHNYMNAAMVHINRALKLIIRLFLVEDLVDSLKLAVFMWLMTYVGAVFNGITLLILAELLIFSVPIVYEKYKTQIDHYVGIARDQTKSIVEKIQAKLPGIAKKKAE

SEQ ID NO: 72786 - protein, 123 aa, Homo sapiens
  Payload ID: 14412
  Gene Symbol: RTN3
  Gene Name: reticulon 3
  ENSP ID: ENSP00000440960
MAEPSAATQSHSISSSSFGAEPSAPGGGGSPGACPALGTKSCSSSCAVHDLIFWRDVKKTGFVFGTTLIMLLSLAAFSVISVVSYLILALLSVTISFRIYKSVIQAVQKSEEGHPFNWLSSCG

SEQ ID NO: 72787 - protein, 136 aa, Homo sapiens
  Payload ID: 14412
  Gene Symbol: RTN3
  Gene Name: reticulon 3
  ENSP ID: ENSP00000441614
MAEPSAATQSHSISSSSFGAEPSAPGGGGSPGACPALGTKSCSSSCADSFVSSSSSQPVSLFSTSQASFPEHPAFLSKKIGQVEEQIDKETKNPNGVSSREAKTALDADDRFTLLTAQKPPTEYSKVEGIYTYSLS

SEQ ID NO: 72788 - protein, 130 aa, Homo sapiens
  Payload ID: 14412
  Gene Symbol: RTN3
  Gene Name: reticulon 3
  ENSP ID: ENSP00000442080
MAEPSAATQSHSISSSSFGAEPSAPGGGGSPGACPALGTKSCSSSCAAGVHCDRPSIPASFPEHPAFLSKKIGQVEEQIDKETKNPNGVSSREAKTALDADDRFTLLTAQKPPTEYSKVEGIYTYSLSPS

SEQ ID NO: 72789 - protein, 920 aa, Homo sapiens
  Payload ID: 14412
  Gene Symbol: RTN3
  Gene Name: reticulon 3
  Uniprot ID: O95197
  ENSP ID: ENSP00000442733
MAEPSAATQSHSISSSSFGAEPSAPGGGGSPGACPALGTKSCSSSCAASFPEHPAFLSKKIGQVEEQIDKETKNPNGVSSREAKTALDADDRFTLLTAQKPPTEYSKVEGIYTYSLSPSKVSGDDVIEKDSPESPFEVIIDKAAFDKEFKDSYKESTDDFGSWSVHTDKESSEDISETNDKLFPLRNKEAGRYPMSALLSRQFSHTNAALEEVSRCVNDMHNFTNEILTWDLVPQVKQQTDKSSDCITKTTGLDMSEYNSEIPVVNLKTSTHQKTPVCSIDGSTPITKSTGDWAEASLQQENAITGKPVPDSLNSTKEFSIKGVQGNMQKQDDTLAELPGSPPEKCDSLGSGVATVKVVLPDDHLKDEMDWQSSALGEITEADSSGESDDTVIEDITADTSFENNKIQAEKPVSIPSAVVKTGEREIKEIPSCEREEKTSKNFEELVSDSELHQDQPDILGRSPASEAACSKVPDTNVSLEDVSEVAPEKPITTENPKLPSTVSPNVFNETEFSLNVTTSAYLESLHGKNVKHIDDSSPEDLIAAFTETRDKGIVDSERNAFKAISEKMTDFKTTPPVEVLHENESGGSEIKDIGSKYSEQSKETNGSEPLGVFPTQGTPVASLDLEQEQLTIKALKELGERQVEKSTSAQRDAELPSEEVLKQTFTFAPESWPQRSYDILERNVKNGSDLGISQKPITIRETTRVDAVSSLSKTELVKKHVLARLLTDFSVHDLIFWRDVKKTGFVFGTTLIMLLSLAAFSVISVVSYLILALLSVTISFRIYKSVIQAVQKSEEGHPFKAYLDVDITLSSEAFHNYMNAAMVHINRALKLIIRLFLVEDLVDSLKLAVFMWLMTYVGAVFNGITLLILAELLIFSVPIVYEKYKTQIDHYVGIARDQTKSIVEKIQAKLPGIAKKKAE

SEQ ID NO: 72790 - protein, 373 aa, Homo sapiens
  Payload ID: 14413
  Gene Symbol: RTN4
  Gene Name: reticulon 4
  Uniprot ID: Q9NQC3
  ENSP ID: ENSP00000322147
MEDLDQSPLVSSSDSPPRPQPAFKYQFVREPEDEEEEEEEEEEDEDEDLEELEVLERKPAAGLSAAPVPTAPAAGAPLMDFGNDFVPPAPRGPLPAAPPVAPERQPSWDPSPVSSTVPAPSPLSAAAVSPSKLPEDDEPPARPPPPPPASVSPQAEPVWTPPAPAPAAPPSTPAAPKRRGSSGSVVVDLLYWRDIKKTGVVFGASLFLLLSLTVFSIVSVTAYIALALLSVTISFRIYKGVIQAIQKSDEGHPFRAYLESEVAISEELVQKYSNSALGHVNCTIKELRRLFLVDDLVDSLKFAVLMWVFTYVGALFNGLTLLILALISLFSVPVIYERHQAQIDHYLGLANKNVKDAMAKIQAKIPGLKRKAE

SEQ ID NO: 72791 - protein, 1192 aa, Homo sapiens
  Payload ID: 14413
  Gene Symbol: RTN4
  Gene Name: reticulon 4
  Uniprot ID: Q9NQC3
  ENSP ID: ENSP00000337838
MEDLDQSPLVSSSDSPPRPQPAFKYQFVREPEDEEEEEEEEEEDEDEDLEELEVLERKPAAGLSAAPVPTAPAAGAPLMDFGNDFVPPAPRGPLPAAPPVAPERQPSWDPSPVSSTVPAPSPLSAAAVSPSKLPEDDEPPARPPPPPPASVSPQAEPVWTPPAPAPAAPPSTPAAPKRRGSSGSVDETLFALPAASEPVIRSSAENMDLKEQPGNTISAGQEDFPSVLLETAASLPSLSPLSAASFKEHEYLGNLSTVLPTEGTLQENVSEASKEVSEKAKTLLIDRDLTEFSELEYSEMGSSFSVSPKAESAVIVANPREEIIVKNKDEEEKLVSNNILHNQQELPTALTKLVKEDEVVSSEKAKDSFNEKRVAVEAPMREEYADFKPFERVWEVKDSKEDSDMLAAGGKIESNLESKVDKKCFADSLEQTNHEKDSESSNDDTSFPSTPEGIKDRSGAYITCAPFNPAATESIATNIFPLLGDPTSENKTDEKKIEEKKAQIVTEKNTSTKTSNPFLVAAQDSETDYVTTDNLTKVTEEVVANMPEGLTPDLVQEACESELNEVTGTKIAYETKMDLVQTSEVMQESLYPAAQLCPSFEESEATPSPVLPDIVMEAPLNSAVPSAGASVIQPSSSPLEASSVNYESIKHEPENPPPYEEAMSVSLKKVSGIKEEIKEPENINAALQETEAPYISIACDLIKETKLSAEPAPDFSDYSEMAKVEQPVPDHSELVEDSSPDSEPVDLFSDDSIPDVPQKQDETVMLVKESLTETSFESMIEYENKEKLSALPPEGGKPYLESFKLSLDNTKDTLLPDEVSTLSKKEKIPLQMEELSTAVYSNDDLFISKEAQIRETETFSDSSPIEIIDEFPTLISSKTDSFSKLAREYTDLEVSHKSEIANAPDGAGSLPCTELPHDLSLKNIQPKVEEKISFSDDFSKNGSATSKVLLLPPDVSALATQAEIESIVKPKVLVKEAEKKLPSDTEKEDRSPSAIFSAELSKTSVVDLLYWRDIKKTGVVFGASLFLLLSLTVFSIVSVTAYIALALLSVTISFRIYKGVIQAIQKSDEGHPFRAYLESEVAISEELVQKYSNSALGHVNCTIKELRRLFLVDDLVDSLKFAVLMWVFTYVGALFNGLTLLILALISLFSVPVIYERHQAQIDHYLGLANKNVKDAMAKIQAKIPGLKRKAE

SEQ ID NO: 72792 - protein, 986 aa, Homo sapiens
  Payload ID: 14413
  Gene Symbol: RTN4
  Gene Name: reticulon 4
  Uniprot ID: Q9NQC3
  ENSP ID: ENSP00000349944
MDLKEQPGNTISAGQEDFPSVLLETAASLPSLSPLSAASFKEHEYLGNLSTVLPTEGTLQENVSEASKEVSEKAKTLLIDRDLTEFSELEYSEMGSSFSVSPKAESAVIVANPREEIIVKNKDEEEKLVSNNILHNQQELPTALTKLVKEDEVVSSEKAKDSFNEKRVAVEAPMREEYADFKPFERVWEVKDSKEDSDMLAAGGKIESNLESKVDKKCFADSLEQTNHEKDSESSNDDTSFPSTPEGIKDRSGAYITCAPFNPAATESIATNIFPLLGDPTSENKTDEKKIEEKKAQIVTEKNTSTKTSNPFLVAAQDSETDYVTTDNLTKVTEEVVANMPEGLTPDLVQEACESELNEVTGTKIAYETKMDLVQTSEVMQESLYPAAQLCPSFEESEATPSPVLPDIVMEAPLNSAVPSAGASVIQPSSSPLEASSVNYESIKHEPENPPPYEEAMSVSLKKVSGIKEEIKEPENINAALQETEAPYISIACDLIKETKLSAEPAPDFSDYSEMAKVEQPVPDHSELVEDSSPDSEPVDLFSDDSIPDVPQKQDETVMLVKESLTETSFESMIEYENKEKLSALPPEGGKPYLESFKLSLDNTKDTLLPDEVSTLSKKEKIPLQMEELSTAVYSNDDLFISKEAQIRETETFSDSSPIEIIDEFPTLISSKTDSFSKLAREYTDLEVSHKSEIANAPDGAGSLPCTELPHDLSLKNIQPKVEEKISFSDDFSKNGSATSKVLLLPPDVSALATQAEIESIVKPKVLVKEAEKKLPSDTEKEDRSPSAIFSAELSKTSVVDLLYWRDIKKTGVVFGASLFLLLSLTVFSIVSVTAYIALALLSVTISFRIYKGVIQAIQKSDEGHPFRAYLESEVAISEELVQKYSNSALGHVNCTIKELRRLFLVDDLVDSLKFAVLMWVFTYVGALFNGLTLLILALISLFSVPVIYERHQAQIDHYLGLANKNVKDAMAKIQAKIPGLKRKAE

SEQ ID NO: 72793 - protein, 392 aa, Homo sapiens
  Payload ID: 14413
  Gene Symbol: RTN4
  Gene Name: reticulon 4
  Uniprot ID: Q9NQC3
  ENSP ID: ENSP00000350365
MEDLDQSPLVSSSDSPPRPQPAFKYQFVREPEDEEEEEEEEEEDEDEDLEELEVLERKPAAGLSAAPVPTAPAAGAPLMDFGNDFVPPAPRGPLPAAPPVAPERQPSWDPSPVSSTVPAPSPLSAAAVSPSKLPEDDEPPARPPPPPPASVSPQAEPVWTPPAPAPAAPPSTPAAPKRRGSSGSVDETLFALPAASEPVIRSSAVVDLLYWRDIKKTGVVFGASLFLLLSLTVFSIVSVTAYIALALLSVTISFRIYKGVIQAIQKSDEGHPFRAYLESEVAISEELVQKYSNSALGHVNCTIKELRRLFLVDDLVDSLKFAVLMWVFTYVGALFNGLTLLILALISLFSVPVIYERHQAQIDHYLGLANKNVKDAMAKIQAKIPGLKRKAE

SEQ ID NO: 72794 - protein, 199 aa, Homo sapiens
  Payload ID: 14413
  Gene Symbol: RTN4
  Gene Name: reticulon 4
  Uniprot ID: Q9NQC3
  ENSP ID: ENSP00000378107
MDGQKKNWKDKVVDLLYWRDIKKTGVVFGASLFLLLSLTVFSIVSVTAYIALALLSVTISFRIYKGVIQAIQKSDEGHPFRAYLESEVAISEELVQKYSNSALGHVNCTIKELRRLFLVDDLVDSLKFAVLMWVFTYVGALFNGLTLLILALISLFSVPVIYERHQAQIDHYLGLANKNVKDAMAKIQAKIPGLKRKAE

SEQ ID NO: 72795 - protein, 986 aa, Homo sapiens; identical to SEQ ID NO: 72792
  Payload ID: 14413
  Gene Symbol: RTN4
  Gene Name: reticulon 4
  Uniprot ID: Q9NQC3
  ENSP ID: ENSP00000378109

SEQ ID NO: 72796 - protein, 986 aa, Homo sapiens; identical to SEQ ID NO: 72792
  Payload ID: 14413
  Gene Symbol: RTN4
  Gene Name: reticulon 4
  Uniprot ID: Q9NQC3
  ENSP ID: ENSP00000384471

SEQ ID NO: 72797 - protein, 345 aa, Homo sapiens [sequence omitted]

SEQ ID NO: 72798 - protein, 986 aa, Homo sapiens; identical to SEQ ID NO: 72792
  Payload ID: 14413
  Gene Symbol: RTN4
  Gene Name: reticulon 4
  Uniprot ID: Q9NQC3
  ENSP ID: ENSP00000385650

SEQ ID NO: 72799 - protein, 203 aa, Homo sapiens
  Payload ID: 14413
  Gene Symbol: RTN4
  Gene Name: reticulon 4
  ENSP ID: ENSP00000397808
  MOD_RES (1)..(1): Any amino acid
XLCLRTSGRWRPVWLEARGEGWGGPWSPVVDLLYWRDIKKTGVVFGASLFLLLSLTVFSIVSVTAYIALALLSVTISFRIYKGVIQAIQKSDEGHPFRAYLESEVAISEELVQKYSNSALGHVNCTIKELRRLFLVDDLVDSLKFAVLMWVFTYVGALFNGLTLLILALISLFSVPVIYERHQAQIDHYLGLANKNVKDAMAK

SEQ ID NO: 72800 - protein, 91 aa, Homo sapiens
  Payload ID: 14413
  Gene Symbol: RTN4
  Gene Name: reticulon 4
  ENSP ID: ENSP00000411628
MDLKEQPGNTISAGQEDFPSVLLETAASLPSLSPLSAASFKEHEYLGNLSTVLPTEGTLQENVSEASKEVSEKAKTLLIDRDLTEFSELEY

SEQ ID NO: 72801 - protein, 127 aa, Homo sapiens
  Payload ID: 14413
  Gene Symbol: RTN4
  Gene Name: reticulon 4
  ENSP ID: ENSP00000489133
LLLSLTVFSIVSVTAYIALALLSVTISFRIYKGVIQAIQKSDEGHPFRAYLESEVAISEELVQKYSNSALGHVNCTIKELRRLFLVDDLVDSLKAQIDHYLGLANKNVKDAMAKIQAKIPGLKRKAE

SEQ ID NO: 72802 - protein, 396 aa, Homo sapiens
  Payload ID: 14414
  Gene Symbol: RTN4IP1
  Gene Name: reticulon 4 interacting protein 1
  Uniprot ID: Q8WWV3
  ENSP ID: ENSP00000358059
MEFLKTCVLRRNACTAVCFWRSKVVQKPSVRRISTTSPRSTVMPAWVIDKYGKNEVLRFTQNMMMPIIHYPNEVIVKVHAASVNPIDVNMRSGYGATALNMKRDPLHVKIKGEEFPLTLGRDVSGVVMECGLDVKYFKPGDEVWAAVPPWKQGTLSEFVVVSGNEVSHKPKSLTHTQAASLPYVALTAWSAINKVGGLNDKNCTGKRVLILGASGGVGTFAIQVMKAWDAHVTAVCSQDASELVRKLGADDVIDYKSGSVEEQLKSLKPFDFILDNVGGSTETWAPDFLKKWSGATYVTLVTPFLLNMDRLGIADGMLQTGVTVGSKALKHFWKGVHYRWAFFMASGPCLDDIAELVDAGKIRPVIEQTFPFSKVPEAFLKVERGHARGKTVINVV

SEQ ID NO: 72803 - protein, 226 aa, Homo sapiens
  Payload ID: 14414
  Gene Symbol: RTN4IP1
  Gene Name: reticulon 4 interacting protein 1
  ENSP ID: ENSP00000444261
MEFLKTCVLRRNACTAVCFWRSKVVQKPSVRRISTTSPRSTVMPAWVIDKYGKNEVLRFTQNMMMPIIHYPNEVIVKVHAASVNPIDVNMRSGYGATALNMKRDPLHVKIKGEEFPLTLGRDVSGVVMECGLDVKYFKPGDEVWAAVPPWKQGTLSEFVVVSGNEVSHKPKSLTHTQAASLPYVALTAWSAINKVGGLNDKNCTGKRISGKESIIAGHFSWPVAHV

SEQ ID NO: 72804 - protein, 473 aa, Homo sapiens
  Payload ID: 14415
  Gene Symbol: RTN4R
  Gene Name: reticulon 4 receptor
  Uniprot ID: Q9BZR6
  ENSP ID: ENSP00000043402
MKRASAGGSRLLAWVLWLQAWQVAAPCPGACVCYNEPKVTTSCPQQGLQAVPVGIPAASQRIFLHGNRISHVPAASFRACRNLTILWLHSNVLARIDAAAFTGLALLEQLDLSDNAQLRSVDPATFHGLGRLHTLHLDRCGLQELGPGLFRGLAALQYLYLQDNALQALPDDTFRDLGNLTHLFLHGNRISSVPERAFRGLHSLDRLLLHQNRVAHVHPHAFRDLGRLMTLYLFANNLSALPTEALAPLRALQYLRLNDNPWVCDCRARPLWAWLQKFRGSSSEVPCSLPQRLAGRDLKRLAANDLQGCAVATGPYHPIWTGRATDEEPLGLPKCCQPDAADKASVLEPGRPASAGNALKGRVPPGDSPPGNGSGPRHINDSPFGTLPGSAEPPLTAVRPEGSEPPGFPTSGPRRRPGCSRKNRTRSHCRLGQAGSGGGGTGDSEGSGALPSLTCSLTPLGLALVLWTVLGPC

SEQ ID NO: 72805 - protein, 493 aa, Homo sapiens
  Payload ID: 14415
  Gene Symbol: RTN4R
  Gene Name: reticulon 4 receptor
  ENSP ID: ENSP00000396872
  MOD_RES (1)..(1): Any amino acid
XYRGWVGVSGRLHPSLTVWAQNLPFLRGSRLLAWVLWLQAWQVAAPCPGACVCYNEPKVTTSCPQQGLQAVPVGIPAASQRIFLHGNRISHVPAASFRACRNLTILWLHSNVLARIDAAAFTGLALLEQLDLSDNAQLRSVDPATFHGLGRLHTLHLDRCGLQELGPGLFRGLAALQYLYLQDNALQALPDDTFRDLGNLTHLFLHGNRISSVPERAFRGLHSLDRLLLHQNRVAHVHPHAFRDLGRLMTLYLFANNLSALPTEALAPLRALQYLRLNDNPWVCDCRARPLWAWLQKFRGSSSEVPCSLPQRLAGRDLKRLAANDLQGCAVATGPYHPIWTGRATDEEPLGLPKCCQPDAADKASVLEPGRPASAGNALKGRVPPGDSPPGNGSGPRHINDSPFGTLPGSAEPPLTAVRPEGSEPPGFPTSGPRRRPGCSRKNRTRSHCRLGQAGSGGGGTGDSEGSGALPSLTCSLTPLGLALVLWTVLGPC

SEQ ID NO: 72806 - protein, 559 aa, Homo sapiens
  Payload ID: 14415
  Gene Symbol: RTN4R
  Gene Name: reticulon 4 receptor
  ENSP ID: ENSP00000403535
  MOD_RES (1)..(1): Any amino acid
XVEEGAGCLGGCGTRLLLSPGHTCPPPPPSGIQAPVFEIDVPRGTPAPLQCFLGPVGGTPTGTPRGLLQCGLCVHWSPEEVPAVTSVHSRRPSRSRLLAWVLWLQAWQVAAPCPGACVCYNEPKVTTSCPQQGLQAVPVGIPAASQRIFLHGNRISHVPAASFRACRNLTILWLHSNVLARIDAAAFTGLALLEQLDLSDNAQLRSVDPATFHGLGRLHTLHLDRCGLQELGPGLFRGLAALQYLYLQDNALQALPDDTFRDLGNLTHLFLHGNRISSVPERAFRGLHSLDRLLLHQNRVAHVHPHAFRDLGRLMTLYLFANNLSALPTEALAPLRALQYLRLNDNPWVCDCRARPLWAWLQKFRGSSSEVPCSLPQRLAGRDLKRLAANDLQGCAVATGPYHPIWTGRATDEEPLGLPKCCQPDAADKASVLEPGRPASAGNALKGRVPPGDSPPGNGSGPRHINDSPFGTLPGSAEPPLTAVRPEGSEPPGFPTSGPRRRPGCSRKNRTRSHCRLGQAGSGGGGTGDSEGSGALPSLTCSLTPLGLALVLWTVLGPC

SEQ ID NO: 72807 - protein, 441 aa, Homo sapiens
  Payload ID: 14416
  Gene Symbol: RTN4RL1
  Gene Name: reticulon 4 receptor-like 1
  Uniprot ID: Q86UN2
  ENSP ID: ENSP00000330631
MLRKGCCVELLLLLVAAELPLGGGCPRDCVCYPAPMTVSCQAHNFAAIPEGIPVDSERVFLQNNRIGLLQPGHFSPAMVTLWIYSNNITYIHPSTFEGFVHLEELDLGDNRQLRTLAPETFQGLVKLHALYLYKCGLSALPAGVFGGLHSLQYLYLQDNHIEYLQDDIFVDLVNLSHLFLHGNKLWSLGPGTFRGLVNLDRLLLHENQLQWVHHKAFHDLRRLTTLFLFNNSLSELQGECLAPLGALEFLRLNGNPWDCGCRARSLWEWLQRFRGSSSAVPCVSPGLRHGQDLKLLRAEDFRNCTGPASPHQIKSHTLTTTDRAARKEHHSPHGPTRSKGHPHGPRPGHRKPGKNCTNPRNRNQISKAGAGKQAPELPDYAPDYQHKFSFDIMPTARPKRKGKCARRTPIRAPSGVQQASSASSLGASLLAWTLGLAVTLR

SEQ ID NO: 72808 - protein, 420 aa, Homo sapiens
  Payload ID: 14417
  Gene Symbol: RTN4RL2
  Gene Name: reticulon 4 receptor-like 2
  Uniprot ID: Q86UN3
  ENSP ID: ENSP00000335397
MLPGLRRLLQAPASACLLLMLLALPLAAPSCPMLCTCYSSPPTVSCQANNFSSVPLSLPPSTQRLFLQNNLIRTLRPGTFGSNLLTLWLFSNNLSTIYPGTFRHLQALEELDLGDNRHLRSLEPDTFQGLERLQSLHLYRCQLSSLPGNIFRGLVSLQYLYLQENSLLHLQDDLFADLANLSHLFLHGNRLRLLTEHVFRGLGSLDRLLLHGNRLQGVHRAAFRGLSRLTILYLFNNSLASLPGEALADLPSLEFLRLNANPWACDCRARPLWAWFQRARVSSSDVTCATPPERQGRDLRALREADFQACPPAAPTRPGSRARGNSSSNHLYGVAEAGAPPADPSTLYRDLPAEDSRGRQGGDAPTEDDYWGGYGGEDQRGEQMCPGAACQAPPDSRGPALSAGLPSPLLCLLLLVPHHL

SEQ ID NO: 72809 - protein, 193 aa, Homo sapiens
  Payload ID: 14417
  Gene Symbol: RTN4RL2
  Gene Name: reticulon 4 receptor-like 2
  Uniprot ID: Q86UN3
  ENSP ID: ENSP00000378552
MLPGLRRLLQAPASACLLLMLLALPLAAPSCPMLCTCYSSPPTVSCQANNFSSVPLSLPPSTQRLFLQNNLIRTLRPGTFGSNLLTLWLFSNNLSTIYPGTFRHLQALEELDLGDNRHLRSLEPDTFQGLERLQSLHLYRCQLSSLPGNIFRGLVSLQYLYLQENSLLHLQGPLPKGLCSCFSHPPSSLPTSR

SEQ ID NO: 72810 - protein, 204 aa, Homo sapiens
  Payload ID: 14417
  Gene Symbol: RTN4RL2
  Gene Name: reticulon 4 receptor-like 2
  ENSP ID: ENSP00000435606
MLPGLRRLLQAPASACLLLMLLALPLAAPSCPMLCTCYSSPPTVSCQANNFSSVPLSLPPSTQRLFLQNNLIRTLRPGTFGSNLLTLWLFSNNLSTIYPGTFRHLQALEELDLGDNRHLRSLEPDTFQGLERLQSLHLYRCQLSSLPGNIFRGLVSLQYLYLQENSLLHLQGKKEKGKSLLCSWRMDALKMEGIPVIVIHCYYY

SEQ ID NO: 72811 - protein, 104 aa, Homo sapiens
  Payload ID: 14418
  Gene Symbol: RAX
  Gene Name: retina and anterior neural fold homeobox
  Uniprot ID: Q9Y2V3
  ENSP ID: ENSP00000256852
MHLPGCAPAMADGSFSLAGHLLRSPGGSTSRLHSIEAILGFTKDDGILGTFPAERGARGAKERDRRLGARPACPKAPEEGSEPSPPPAPAPAPEYEGVVPEPTG

SEQ ID NO: 72812 - protein, 346 aa, Homo sapiens
  Payload ID: 14418
  Gene Symbol: RAX
  Gene Name: retina and anterior neural fold homeobox
  Uniprot ID: Q9Y2V3
  ENSP ID: ENSP00000334813
MHLPGCAPAMADGSFSLAGHLLRSPGGSTSRLHSIEAILGFTKDDGILGTFPAERGARGAKERDRRLGARPACPKAPEEGSEPSPPPAPAPAPEYEAPRPYCPKEPGEARPSPGLPVGPATGEAKLSEEEQPKKKHRRNRTTFTTYQLHELERAFEKSHYPDVYSREELAGKVNLPEVRVQVWFQNRRAKWRRQEKLEVSSMKLQDSPLLSFSRSPPSATLSPLGAGPGSGGGPAGGALPLESWLGPPLPGGGATALQSLPGFGPPAQSLPASYTPPPPPPPFLNSPPLGPGLQPLAPPPPSYPCGPGFGDKFPLDEADPRNSSIAALRLKAKEHIQAIGKPWQAL

SEQ ID NO: 72813 - protein, 74 aa, Homo sapiens
  Payload ID: 14418
  Gene Symbol: RAX
  Gene Name: retina and anterior neural fold homeobox
  ENSP ID: ENSP00000450583
MHLPGCAPAMADGSFSLAGHLLRSPGGSTSRLHSIEAILGFTKDDGILGTFPAERGARGAKERDRRLGARPACP

SEQ ID NO: 72814 - protein, 184 aa, Homo sapiens
  Payload ID: 14419
  Gene Symbol: RAX2
  Gene Name: retina and anterior neural fold homeobox 2
  Uniprot ID: Q96IS3
  ENSP ID: ENSP00000450456
MFLSPGEGPATEGGGLGPGEEAPKKKHRRNRTTFTTYQLHQLERAFEASHYPDVYSREELAAKVHLPEVRVQVWFQNRRAKWRRQERLESGSGAVAAPRLPEAPALPFARPPAMSLPLEPWLGPGPPAVPGLPRLLGPGPGLQASFGPHAFAPTFADGFALEEASLRLLAKEHAQALDRAWPPA

SEQ ID NO: 72815 - protein, 184 aa, Homo sapiens; identical to SEQ ID NO: 72814
  Payload ID: 14419
  Gene Symbol: RAX2
  Gene Name: retina and anterior neural fold homeobox 2
  Uniprot ID: Q96IS3
  ENSP ID: ENSP00000450687

SEQ ID NO: 72816 - protein, 195 aa, Homo sapiens
  Payload ID: 14420
  Gene Symbol: RD3
  Gene Name: retinal degeneration 3
  Uniprot ID: Q7Z3Z2
  ENSP ID: ENSP00000355969
MSLISWLRWNEAPSRLSTRSPAEMVLETLMMELTGQMREAERQQRERSNAVRKVCTGVDYSWLASTPRSTYDLSPIERLQLEDVCVKIHPSYCGPAILRFRQLLAEQEPEVQEVSQLFRSVLQEVLERMKQEEEAHKLTRQWSLRPRGSLATFKTRARISPFASDIRTISEDVERDTPPPLRSWSMPEFRAPKAD

SEQ ID NO: 72817 - protein, 198 aa, Homo sapiens
  Payload ID: 14421
  Gene Symbol: RD3L
  Gene Name: retinal degeneration 3-like
  Uniprot ID: P0DJH9
  ENSP ID: ENSP00000455434
MPLFGWMKWPKNDSYKPTHYPGSDIVTKTLLRELKWHLKERERLIQEIENEQKVKKTGVDYNWLRNYQNPHTTIPVTEQRQLEVLCSQVQPCQTGTILSRFREVLAENDVLPWEIVYIFKQVLKDFLSSSDRGSEQEDLEDSGSMDCSAPSVIQGDSSKRADKDEIPTISSYVDKNTKDRFPVFSHRIWNLPYYHPSS

SEQ ID NO: 72818 - protein, 253 aa, Homo sapiens
  Payload ID: 14422
  Gene Symbol: RGR
  Gene Name: retinal G protein coupled receptor
  Uniprot ID: P47804
  ENSP ID: ENSP00000350823
MAETSALPTGFGELEVLAVGMVLLVEALSGLSLNTLTIFSFCKTPELRTPCHLLVLSLALADSGISLNALVAATSSLLRRWPYGSDGCQAHGFQGFVTALASICSSAAIAWGRYHHYCTRSQLAWNSAVSLVLFVWLSSAFWAALPLLGWGHYDYEPLGTCCTLDYSKGDRNFTSFLFTMSFFNFAMPLFITITSYSLMEQKLGKSGHLQVPALIAKMVPTINAINYALGNEMVCRGIWQCLSPQKREKDRTK

SEQ ID NO: 72819 - protein, 295 aa, Homo sapiens
  Payload ID: 14422
  Gene Symbol: RGR
  Gene Name: retinal G protein coupled receptor
  Uniprot ID: P47804
  ENSP ID: ENSP00000352427
MAETSALPTGFGELEVLAVGMVLLVEALSGLSLNTLTIFSFCKTPELRTPCHLLVLSLALADSGISLNALVAATSSLLRVSHRRWPYGSDGCQAHGFQGFVTALASICSSAAIAWGRYHHYCTRSQLAWNSAVSLVLFVWLSSAFWAALPLLGWGHYDYEPLGTCCTLDYSKGDRNFTSFLFTMSFFNFAMPLFITITSYSLMEQKLGKSGHLQVNTTLPARTLLLGWGPYAILYLYAVIADVTSISPKLQMVPALIAKMVPTINAINYALGNEMVCRGIWQCLSPQKREKDRTK

SEQ ID NO: 72820 - protein, 120 aa, Homo sapiens
  Payload ID: 14422
  Gene Symbol: RGR
  Gene Name: retinal G protein coupled receptor
  ENSP ID: ENSP00000361164
MAETSALPTGFGELEVLAVGMVLLVEDPGAADSLPPTGAELGSCGQWDQPECPRCSHIQPSPCLPQALALRLGRLPGSRLPGLCDSVGQHLQQCSHRMGALSPLLHPPKCCHRSHHFEWR

SEQ ID NO: 72821 - protein, 351 aa, Homo sapiens
  Payload ID: 14423
  Gene Symbol: ROM1
  Gene Name: retinal outer segment membrane protein 1
  Uniprot ID: Q03395
  ENSP ID: ENSP00000278833
MAPVLPLVLPLQPRIRLAQGLWLLSWLLALAGGVILLCSGHLLVQLRHLGTFLAPSCQFPVLPQAALAAGAVALGTGLVGVGASRASLNAALYPPWRGVLGPLLVAGTAGGGGLLVVGLGLALALPGSLDEALEEGLVTALAHYKDTEVPGHCQAKRLVDELQLRYHCCGRHGYKDWFGVQWVSSRYLDPGDRDVADRIQSNVEGLYLTDGVPFSCCNPHSPRPCLQNRLSDSYAHPLFDPRQPNQNLWAQGCHEVLLEHLQDLAGTLGSMLAVTFLLQALVLLGLRYLQTALEGLGGVIDAGGETQGYLFPSGLKDMLKTAWLQGGVACRPAPEEAPPGEAPPKEDLSEA

SEQ ID NO: 72822 - protein, 105 aa, Homo sapiens
  Payload ID: 14423
  Gene Symbol: ROM1
  Gene Name: retinal outer segment membrane protein 1
  ENSP ID: ENSP00000432151
MGSLSPVATPTHPGLACKTVFQTPTPTPCSIPDNPTKTSGPKGAMRCCWSTCRTWQAHWVACWLSPSYCRLWCSLACGTCKQHWRGLEGSLMREERPRAISFPVG

SEQ ID NO: 72823 - protein, 100 aa, Homo sapiens
  Payload ID: 14423
  Gene Symbol: ROM1
  Gene Name: retinal outer segment membrane protein 1
  ENSP ID: ENSP00000432983
MGSLSPVATPTHPGLACKTVFQTPTPTPCSIPDNPTKTSGPKGAMRCCWSTCRTWQAHWVACWLSPSYCRLWCSLACGTCKQHWRGLEGSLMREERPRAI

SEQ ID NO: 72824 - protein, 58 aa, Homo sapiens
  Payload ID: 14423
  Gene Symbol: ROM1
  Gene Name: retinal outer segment membrane protein 1
  ENSP ID: ENSP00000433566
MGSLSPVATPTHPGLACKTVFQTPTPTPCSIPDNPTKTSGPKGAMRCCWSTCRTWQAH

SEQ ID NO: 72825 - protein, 337 aa, Homo sapiens
  Payload ID: 14424
  Gene Symbol: RRH
  Gene Name: retinal pigment epithelium-derived rhodopsin homolog
  Uniprot ID: O14718
  ENSP ID: ENSP00000314992
MLRNNLGNSSDSKNEDGSVFSQTEHNIVATYLIMAGMISIISNIIVLGIFIKYKELRTPTNAIIINLAVTDIGVSSIGYPMSAASDLYGSWKFGYAGCQVYAGLNIFFGMASIGLLTVVAVDRYLTICLPDVGRRMTTNTYIGLILGAWINGLFWALMPIIGWASYAPDPTGATCTINWRKNDRSFVSYTMTVIAINFIVPLTVMFYCYYHVTLSIKHHTTSDCTESLNRDWSDQIDVTKMSVIMICMFLVAWSPYSIVCLWASFGDPKKIPPPMAIIAPLFAKSSTFYNPCIYVVANKKFRRAMLAMFKCQTHQTMPVTSILPMDVSQNPLASGRI

SEQ ID NO: 72826 - protein, 533 aa, Homo sapiens
  Payload ID: 14425
  Gene Symbol: RPE65
  Gene Name: retinal pigment epithelium-specific protein 65kDa
  Uniprot ID: Q16518
  ENSP ID: ENSP00000262340
MSIQVEHPAGGYKKLFETVEELSSPLTAHVTGRIPLWLTGSLLRCGPGLFEVGSEPFYHLFDGQALLHKFDFKEGHVTYHRRFIRTDAYVRAMTEKRIVITEFGTCAFPDPCKNIFSRFFSYFRGVEVTDNALVNVYPVGEDYYACTETNFITKINPETLETIKQVDLCNYVSVNGATAHPHIENDGTVYNIGNCFGKNFSIAYNIVKIPPLQADKEDPISKSEIVVQFPCSDRFKPSYVHSFGLTPNYIVFVETPVKINLFKFLSSWSLWGANYMDCFESNETMGVWLHIADKKRKKYLNNKYRTSPFNLFHHINTYEDNGFLIVDLCCWKGFEFVYNYLYLANLRENWEEVKKNARKAPQPEVRRYVLPLNIDKADTGKNLVTLPNTTATAILCSDETIWLEPEVLFSGPRQAFEFPQINYQKYCGKPYTYAYGLGLNHFVPDRLCKLNVKTKETWVWQEPDSYPSEPIFVSHPDALEEDDGVVLSVVVSPGAGQKPAYLLILNAKDLSEVARAEVEINIPVTFHGLFKKS

SEQ ID NO: 72827 - protein, 317 aa, Homo sapiens
  Payload ID: 14426
  Gene Symbol: RLBP1
  Gene Name: retinaldehyde binding protein 1
  Uniprot ID: P12271
  ENSP ID: ENSP00000268125
MSEGVGTFRMVPEEEQELRAQLEQLTTKDHGPVFGPCSQLPRHTLQKAKDELNEREETREEAVRELQEMVQAQAASGEELAVAVAERVQEKDSGFFLRFIRARKFNVGRAYELLRGYVNFRLQYPELFDSLSPEAVRCTIEAGYPGVLSSRDKYGRVVMLFNIENWQSQEITFDEILQAYCFILEKLLENEETQINGFCIIENFKGFTMQQAASLRTSDLRKMVDMLQDSFPARFKAIHFIHQPWYFTTTYNVVKPFLKSKLLERVFVHGDDLSGFYQEIDENILPSDFGGTLPKYDGKAVAEQLFGPQAQAENTAF

SEQ ID NO: 72828 - protein, 108 aa, Homo sapiens
  Payload ID: 14426
  Gene Symbol: RLBP1
  Gene Name: retinaldehyde binding protein 1
  ENSP ID: ENSP00000454740
  MOD_RES (1)..(1): Any amino acid
XNGFCIIENFKGFTMQQAASLRTSDLRKMVDMLQPWYFTTTYNVVKPFLKSKLLERVFVHGDDLSGFYQEIDENILPSDFGGTLPKYDGKAVAEQLFGPQAQAENTAF

SEQ ID NO: 72829 - protein, 71 aa, Homo sapiens
  Payload ID: 14426
  Gene Symbol: RLBP1
  Gene Name: retinaldehyde binding protein 1
  ENSP ID: ENSP00000457251
MSEGVGTFRMVPEEEQELRAQLEQLTTKDHGPVFGPCSQLPRHTLQKAKDELNEREETREEPVPRGCPLHH

SEQ ID NO: 72830 - protein, 2156 aa, Homo sapiens
  Payload ID: 14427
  Gene Symbol: RP1
  Gene Name: retinitis pigmentosa 1 (autosomal dominant)
  Uniprot ID: P56715
  ENSP ID: ENSP00000220676
MSDTPSTGFSIIHPTSSEGQVPPPRHLSLTHPVVAKRISFYKSGDPQFGGVRVVVNPRSFKSFDALLDNLSRKVPLPFGVRNISTPRGRHSITRLEELEDGESYLCSHGRKVQPVDLDKARRRPRPWLSSRAISAHSPPHPVAVAAPGMPRPPRSLVVFRNGDPKTRRAVLLSRRVTQSFEAFLQHLTEVMQRPVVKLYATDGRRVPSLQAVILSSGAVVAAGREPFKPGNYDIQKYLLPARLPGISQRVYPKGNAKSESRKISTHMSSSSRSQIYSVSSEKTHNNDCYLDYSFVPEKYLALEKNDSQNLPIYPSEDDIEKSIIFNQDGTMTVEMKVRFRIKEEETIKWTTTVSKTGPSNNDEKSEMSFPGRTESRSSGLKLAACSFSADVSPMERSSNQEGSLAEEINIQMTDQVAETCSSASWENATVDTDIIQGTQDQAKHRFYRPPTPGLRRVRQKKSVIGSVTLVSETEVQEKMIGQFSYSEERESGENKSEYHMFTHSCSKMSSVSNKPVLVQINNNDQMEESSLERKKENSLLKSSAISAGVIEITSQKMLEMSHNNGLPSTISNNSIVEEDVVDCVVLDNKTGIKNFKTYGNTNDRFSPISADATHFSSNNSGTDKNISEAPASEASSTVTARIDRLINEFAQCGLTKLPKNEKKILSSVASKKKKKSRQQAINSRYQDGQLATKGILNKNERINTKGRITKEMIVQDSDSPLKGGILCEEDLQKSDTVIESNTFCSKSNLNSTISKNFHRNKLNTTQNSKVQGLLTKRKSRSLNKISLGAPKKREIGQRDKVFPHNESKYCKSTFENKSLFHVFNILEQKPKDFYAPQSQAEVASGYLRGMAKKSLVSKVTDSHITLKSQKKRKGDKVKASAILSKQHATTRANSLASLKKPDFPEAIAHHSIQNYIQSWLQNINPYPTLKPIKSAPVCRNETSVVNCSNNSFSGNDPHTNSGKISNFVMESNKHITKIAGLTGDNLCKEGDKSFIANDTGEEDLHETQVGSLNDAYLVPLHEHCTLSQSAINDHNTKSHIAAEKSGPEKKLVYQEINLARKRQSVEAAIQVDPIEEETPKDLLPVLMLHQLQASVPGIHKTQNGVVQMPGSLAGVPFHSAICNSSTNLLLAWLLVLNLKGSMNSFCQVDAHKATNKSSETLALLEILKHIAITEEADDLKAAVANLVESTTSHFGLSEKEQDMVPIDLSANCSTVNIQSVPKCSENERTQGISSLDGGCSASEACAPEVCVLEVTCSPCEMCTVNKAYSPKETCNPSDTFFPSDGYGVDQTSMNKACFLGEVCSLTDTVFSDKACAQKENHTYEGACPIDETYVPVNVCNTIDFLNSKENTYTDNLDSTEELERGDDIQKDLNILTDPEYKNGFNTLVSHQNVSNLSSCGLCLSEKEAELDKKHSSLDDFENCSLRKFQDENAYTSFDMEEPRTSEEPGSITNSMTSSERNISELESFEELENHDTDIFNTVVNGGEQATEELIQEEVEASKTLELIDISSKNIMEEKRMNGIIYEIISKRLATPPSLDFCYDSKQNSEKETNEGETKMVKMMVKTMETGSYSESSPDLKKCIKSPVTSDWSDYRPDSDSEQPYKTSSDDPNDSGELTQEKEYNIGFVKRAIEKLYGKADIIKPSFFPGSTRKSQVCPYNSVEFQCSRKASLYDSEGQSFGSSEQVSSSSSMLQEFQEERQDKCDVSAVRDNYCRGDIVEPGTKQNDDSRILTDIEEGVLIDKGKWLLKENHLLRMSSENPGMCGNADTTSVDTLLDNNSSEVPYSHFGNLAPGPTMDELSSSELEELTQPLELKCNYFNMPHGSDSEPFHEDLLDVRNETCAKERIANHHTEEKGSHQSERVCTSVTHSFISAGNKVYPVSDDAIKNQPLPGSNMIHGTLQEADSLDKLYALCGQHCPILTVIIQPMNEEDRGFAYRKESDIENFLGFYLWMKIHPYLLQTDKNVFREENNKASMRQNLIDNAIGDIFDQFYFSNTFDLMGKRRKQKRINFLGLEEEGNLKKFQPDLKERFCMNFLHTSLLVVGNVDSNTQDLSGQTNEIFKAVDENNNLLNNRFQGSRTNLNQVVRENINCHYFFEMLGQACLLDICQVETSLNISNRNILELCMFEGENLFIWEEEDILNLTDLESSREQEDL

SEQ ID NO: 72831 - protein, 2400 aa, Homo sapiens
  Payload ID: 14428
  Gene Symbol: RP1L1
  Gene Name: retinitis pigmentosa 1-like 1
  ENSP ID: ENSP00000371923
MNSTPRNAQAPSHRECFLPSVARTPSVTKVTPAKKITFLKRGDPRFAGVRLAVHQRAFKTFSALMDELSQRVPLSFGVRSVTTPRGLHSLSALEQLEDGGCYLCSDKKPPKTPSGPGRPQERNPTAQQLRDVEGQREAPGTSSSRKSLKTPRRILLIKNMDPRLQQTVVLSHRNTRNLAAFLGKASDLLRFPVKQLYTTSGKKVDSLQALLHSPSVLVCAGHEAFRTPAMKNARRSEAETLSGLTSRNKNGSWGPKTKPSVIHSRSPPGSTPRLPERPGPSNPPVGPAPGRHPQDTPAQSGPLVAGDDMKKKVRMNEDGSLSVEMKVRFHLVGEDTLLWSRRMGRASALTAASGEDPVLGEVDPLCCVWEGYPWGFSEPGVWGPRPCRVGCREVFGRGGQPGPKYEIWTNPLHASQGERVAARKRWGLAQHVRCSGLWGHGTAGRERCSQDSASPASSTGLPEGSEPESSCCPRTPEDGVDSASPSAQIGAERKAGGSLGEDPGLCIDGAGLGGPEQGGRLTPRARSEEGASSDSSASTGSHEGSSEWGGRPQGCPGKARAETSQQEASEGGDPASPALSLSSLRSDDLQAETQGQGTEQATGAAVTREPLVLGLSCSWDSEGASSTPSTCTSSQQGQRRHRSRASAMSSPSSPGLGRVAPRGHPRHSHYRKDTHSPLDSSVTKQVPRPPERRRACQDGSVPRYSGSSSSTRTQASGNLRPPSSGSLPSQDLLGTSSATVTPAVHSDFVSGVSPHNAPSAGWAGDAGSRTCSPAPIPPHTSDSCSKSGAASLGEEARDTPQPSSPLVLQVGRPEQGAVGPHRSHCCSQPGTQPAQEAQRGPSPEASWLCGRYCPTPPRGRPCPQRRSSSCGSTGSSHQSTARGPGGSPQEGTRQPGPTPSPGPNSGASRRSSASQGAGSRGLSEEKTLRSGGGPQGQEEASGVSPSSLPRSSPEAVVREWLDNIPEEPILMTYELADETTGAAGGGLRGPEVDPGDDHSLEGLGEPAQAGQQSLEGDPGQDPEPEGALLGSSDTGPQSGEGVPQGAAPEGVSEAPAEAGADREAPAGCRVSLRALPGRVSASTQIMRALMGSKQGRPSSVPEVSRPMARRLSCSAGALITCLASLQLFEEDLGSPASKVRFKDSPRYQELLSISKDLWPGCDVGEDQLDSGLWELTWSQALPDLGSHAMTENFTPTSSSGVDISSGSGGSGESSVPCAMDGTLVTQGTELPLKTSNQRPDSRTYESPGDLENQQQCCFPTFLNARACACATNEDEAERDSEEQRASSNLEQLAENTVQEEVQLEETKEGTEGEGLQEEAVQLEETKTEEGLQEEGVQLEETKETEGEGQQEEEAQLEEIEETGGEGLQEEGVQLEEVKEGPEGGLQGEALEEGLKEEGLPEEGSVHGQELSEASSPDGKGSQEDDPVQEEEAGRASASAEPCPAEGTEEPTEPPSHLSETDPSASERQSGSQLEPGLEKPPGATMMGQEHTQAQPTQGAAERSSSVACSAALDCDPIWVSVLLKKTEKAFLAHLASAVAELRARWGLQDNDLLDQMAAELQQDVAQRLQDSTKRELQKLQGRAGRMVLEPPREALTGELLLQTQQRRHRLRGLRNLSAFSERTLGLGPLSFTLEDEPALSTALGSQLGEEAEGEEFCPCEACVRKKVSPMSPKATMGATRGPIKEAFDLQQILQRKRGEHTDGEAAEVAPGKTHTDPTSTRTVQGAEGGLGPGLSQGPGVDEGEDGEGSQRLNRDKDPKLGEAEGDAMAQEREGKTHNSETSAGSELGEAEQEGEGISERGETGGQGSGHEDNLQGEAAAGGDQDPGQSDGAEGIEAPEAEGEAQPESEGVEAPEAEGDAQEAEGEAQPESEDVEAPEAEGEAQPESEDVETPEAEWEVQPESEGAEAPEAEKEAQPETESVEALETEGEDEPESEGAEAQEAEEAAQEAEGQTQPESEVIESQEAEEEAQPESEDVEALEVEVETQEAEGEAQPESEDVEAPEAEGEMQEAEEEAQPESDGVEAQPKSEGEEAQEVEGETQKTEGDAQPESDGVEAPEAEEEAQEAEGEVQEAEGEAHPESEDVDAQEAEGEAQPESEGVEAPEAEGEAQKAEGIEAPETEGEAQPESEGIEAPEAEGEAQPESEGVEAQDAEGEAQPESEGIEAQEAEEEAQPELEGVEAPEAEGEAQPESEGIEAPEAEGEAQPELEGVEAPEAEEEAQPEPEGVETPEAEGEAQPESEGETQGEKKGSPQVSLGDGQSEEASESSSPVPEDRPTPPPSPGGDTPHQRPGSQTGPSSSRASSWGNCWQKDSENDHVLGDTRSPDAKSTGTPHAERKATRMYPESSTSEQEEAPLGSRTPEQGASEGYDLQEDQALGSLAPTEAVGRADGFGQDDLDF

SEQ ID NO: 72832 - protein, 350 aa, Homo sapiens
  Payload ID: 14429
  Gene Symbol: RP2
  Gene Name: retinitis pigmentosa 2 (X-linked recessive)
  Uniprot ID: O75695
  ENSP ID: ENSP00000218340
MGCFFSKRRKADKESRPENEEERPKQYSWDQREKVDPKDYMFSGLKDETVGRLPGTVAGQQFLIQDCENCNIYIFDHSATVTIDDCTNCIIFLGPVKGSVFFRNCRDCKCTLACQQFRVRDCRKLEVFLCCATQPIIESSSNIKFGCFQWYYPELAFQFKDAGLSIFNNTWSNIHDFTPVSGELNWSLLPEDAVVQDYVPIPTTEELKAVRVSTEANRSIVPISRGQRQKSSDESCLVVLFAGDYTIANARKLIDEMVGKGFFLVQTKEVSMKAEDAQRVFREKAPDFLPLLNKGPVIALEFNGDGAVEVCQLIVNEIFNGTKMFVSESKETASGDVDSFYNFADIQMGI

SEQ ID NO: 72833 - protein, 221 aa, Homo sapiens
  Payload ID: 14430
  Gene Symbol: RP9
  Gene Name: retinitis pigmentosa 9 (autosomal dominant)
  Uniprot ID: Q8TA86
  ENSP ID: ENSP00000297157
MSSRPGREDVGAAGARRPREPPEQELQRRREQKRRRHDAQQLQQLKHLESFYEKPPPGLIKEDETKPEDCIPDVPGNEHAREFLAHAPTKGLWMPLGKEVKVMQCWRCKRYGHRTGDKECPFFIKGNQKLEQFRVAHEDPMYDIIRDNKRHEKDVRIQQLKQLLEDSTSDEDRSSSSSSEGKEKHKKKKKKEKHKKRKKEKKKKKKRKHKSSKSNEGSDSE

SEQ ID NO: 72834 - protein, 166 aa, Homo sapiens
  Payload ID: 14430
  Gene Symbol: RP9
  Gene Name: retinitis pigmentosa 9 (autosomal dominant)
  ENSP ID: ENSP00000411577
MAGAAQHREEKHSALLSYEKPPPGLIKEDETKPEDCIPDVPGNEHAREFLAHAPTKGLWMPLGKEVKVMQCWRCKRYGHRTGDKECPFFIKGNQKLEQFRVAHEDPMYDIIRDNKRHEKDVRIQQLKQLLEDSTSDEDRSSSSSSEGKEKHKKKKKKEKHKKRKKE

SEQ ID NO: 72835 - protein, 815 aa, Homo sapiens
  Payload ID: 14431
  Gene Symbol: RPGR
  Gene Name: retinitis pigmentosa GTPase regulator
  Uniprot ID: Q92834
  ENSP ID: ENSP00000322219
MREPEELMPDSGAVFTFGKSKFAENNPGKFWFKNDVPVHLSCGDEHSAVVTGNNKLYMFGSNNWGQLGLGSKSAISKPTCVKALKPEKVKLAACGRNHTLVSTEGGNVYATGGNNEGQLGLGDTEERNTFHVISFFTSEHKIKQLSAGSNTSAALTEDGRLFMWGDNSEGQIGLKNVSNVCVPQQVTIGKPVSWISCGYYHSAFVTTDGELYVFGEPENGKLGLPNQLLGNHRTPQLVSEIPEKVIQVACGGEHTVVLTENAVYTFGLGQFGQLGLGTFLFETSEPKVIENIRDQTISYISCGENHTALITDIGLMYTFGDGRHGKLGLGLENFTNHFIPTLCSNFLRFIVKLVACGGCHMVVFAAPHRGVAKEIEFDEINDTCLSVATFLPYSSLTSGNVLQRTLSARMRRRERERSPDSFSMRRTLPPIEGTLGLSACFLPNSVFPRCSERNLQESVLSEQDLMQPEEPDYLLDEMTKEAEIDNSSTVESLGETTDILNMTHIMSLNSNEKSLKLSPVQKQKKQQTIGELTQDTALTENDDSDEYEEMSEMKEGKACKQHVSQGIFMTQPATTIEAFSDEEVEIPEEKEGAEDSKGNGIEEQEVEANEENVKVHGGRKEKTEILSDDLTDKAEDHEFSKTEELKLEDVDEEINAENVESKKKTVGDDESVPTGYHSKTEGAERTNDDSSAETIEKKEKANLEERAICEYNENPKGYMLDDADSSSLEILENSETTPSKDMKKTKKIFLFKRVPSINQKIVKNNNEPLPEIKSIGDQIILKSDNKDADQNHMSQNHQNIPPTNTERRSKSCTIL

SEQ ID NO: 72836 - protein, 1020 aa, Homo sapiens
  Payload ID: 14431
  Gene Symbol: RPGR
  Gene Name: retinitis pigmentosa GTPase regulator
  Uniprot ID: Q92834
  ENSP ID: ENSP00000343671
MREPEELMPDSGAVFTFGKSKFAENNPGKFWFKNDVPVHLSCGDEHSAVVTGNNKLYMFGSNNWGQLGLGSKSAISKPTCVKALKPEKVKLAACGRNHTLVSTEGGNVYATGGNNEGQLGLGDTEERNTFHVISFFTSEHKIKQLSAGSNTSAALTEDGRLFMWGDNSEGQIGLKNVSNVCVPQQVTIGKPVSWISCGYYHSAFVTTDGELYVFGEPENGKLGLPNQLLGNHRTPQLVSEIPEKVIQVACGGEHTVVLTENAVYTFGLGQFGQLGLGTFLFETSEPKVIENIRDQTISYISCGENHTALITDIGLMYTFGDGRHGKLGLGLENFTNHFIPTLCSNFLRFIVKLVACGGCHMVVFAAPHRGVAKEIEFDEINDTCLSVATFLPYSSLTSGNVLQRTLSARMRRRERERSPDSFSMRRTLPPIEGTLGLSACFLPNSVFPRCSERNLQESVLSEQDLMQPEEPDYLLDEMTKEAEIDNSSTVESLGETTDILNMTHIMSLNSNEKSLKLSPVQKQKKQQTIGELTQDTALTENDDSDEYEEMSEMKEGKACKQHVSQGIFMTQPATTIEAFSDEEVGNDTGQVGPQADTDGEGLQKEVYRHENNNGVDQLDAKEIEKESDGGHSQKESEAEEIDSEKETKLAEIAGMKDLREREKSTKKMSPFFGNLPDRGMNTESEENKDFVKKRESCKQDVIFDSERESVEKPDSYMEGASESQQGIADGFQQPEAIEFSSGEKEDDEVETDQNIRYGRKLIEQGNEKETKPIISKSMAKYDFKCDRLSEIPEEKEGAEDSKGNGIEEQEVEANEENVKVHGGRKEKTEILSDDLTDKAEDHEFSKTEELKLEDVDEEINAENVESKKKTVGDDESVPTGYHSKTEGAERTNDDSSAETIEKKEKANLEERAICEYNENPKGYMLDDADSSSLEILENSETTPSKDMKKTKKIFLFKRVPSINQKIVKNNNEPLPEIKSIGDQIILKSDNKDADQNHMSQNHQNIPPTNTERRSKSCTIL

SEQ ID NO: 72837 - protein, 1152 aa, Homo sapiens
  Payload ID: 14431
  Gene Symbol: RPGR
  Gene Name: retinitis pigmentosa GTPase regulator
  Uniprot ID: Q92834
  ENSP ID: ENSP00000367766
MREPEELMPDSGAVFTFGKSKFAENNPGKFWFKNDVPVHLSCGDEHSAVVTGNNKLYMFGSNNWGQLGLGSKSAISKPTCVKALKPEKVKLAACGRNHTLVSTEGGNVYATGGNNEGQLGLGDTEERNTFHVISFFTSEHKIKQLSAGSNTSAALTEDGRLFMWGDNSEGQIGLKNVSNVCVPQQVTIGKPVSWISCGYYHSAFVTTDGELYVFGEPENGKLGLPNQLLGNHRTPQLVSEIPEKVIQVACGGEHTVVLTENAVYTFGLGQFGQLGLGTFLFETSEPKVIENIRDQTISYISCGENHTALITDIGLMYTFGDGRHGKLGLGLENFTNHFIPTLCSNFLRFIVKLVACGGCHMVVFAAPHRGVAKEIEFDEINDTCLSVATFLPYSSLTSGNVLQRTLSARMRRRERERSPDSFSMRRTLPPIEGTLGLSACFLPNSVFPRCSERNLQESVLSEQDLMQPEEPDYLLDEMTKEAEIDNSSTVESLGETTDILNMTHIMSLNSNEKSLKLSPVQKQKKQQTIGELTQDTALTENDDSDEYEEMSEMKEGKACKQHVSQGIFMTQPATTIEAFSDEEVEIPEEKEGAEDSKGNGIEEQEVEANEENVKVHGGRKEKTEILSDDLTDKAEVSEGKAKSVGEAEDGPEGRGDGTCEEGSSGAEHWQDEEREKGEKDKGRGEMERPGEGEKELAEKEEWKKRDGEEQEQKEREQGHQKERNQEMEEGGEEEHGEGEEEEGDREEEEEKEGEGKEEGEGEEVEGEREKEEGERKKEERAGKEEKGEEEGDQGEGEEEETEGRGEEKEEGGEVEGGEVEEGKGEREEEEEEGEGEEEEGEGEEEEGEGEEEEGEGKGEEEGEEGEGEEEGEEGEGEGEEEEGEGEGEEEGEGEGEEEEGEGEGEEEGEGEGEEEEGEGKGEEEGEEGEGEGEEEEGEGEGEDGEGEGEEEEGEWEGEEEEGEGEGEEEGEGEGEEGEGEGEEEEGEGEGEEEEGEEEGEEEGEGEEEGEGEGEEEEEGEVEGEVEGEEGEGEGEEEEGEEEGEEREKEGEGEENRRNREEEEEEEGKYQETGEEENERQDGEEYKKVSKIKGSVKYGKHKTYQKKSVTNTQGNGKEQRSKMPVQSKRLLKNGPSGSKKFWNNVLPHYLELK

SEQ ID NO: 72838 - protein, 142 aa, Homo sapiens
  Payload ID: 14431
  Gene Symbol: RPGR
  Gene Name: retinitis pigmentosa GTPase regulator
  ENSP ID: ENSP00000417336
  MOD_RES (1)..(1): Any amino acid
XTKEAEIDNSSTVESLGETTDILNMTHIMSLNSNEKSLKLSPVQKQKDHEFSKTEELKLEDVDEEINAENVESKKKTVGDDESVPTGYHSKTEGAERTNDDSSAETIEKKEKANLEERAICEYNENPKGYMLDDADSSSLEI

SEQ ID NO: 72839 - protein, 129 aa, Homo sapiens
  Payload ID: 14431
  Gene Symbol: RPGR
  Gene Name: retinitis pigmentosa GTPase regulator
  ENSP ID: ENSP00000417574
  MOD_RES (1)..(1): Any amino acid
XIGLMYTFGDGRHGKLGLGLENFTNHFIPTLCSNFLRFIVKLVACGGCHMVVFAAPHRGVAKEIEFDEINDTCLSVATFLPYSSLTSGNVLQRTLSARMRRRERLSLMSSGSLYTINNEMGKQRNKDFN

SEQ ID NO: 72840 - protein, 480 aa, Homo sapiens
  Payload ID: 14431
  Gene Symbol: RPGR
  Gene Name: retinitis pigmentosa GTPase regulator
  Uniprot ID: Q92834
  ENSP ID: ENSP00000418926
MREPEELMPDSGAVFTFGKSKFAENNPGKFWFKNDVPVHLSCGDEHSAVVTGNNKLYMFGSNNWGQLGLGSKSAISKPTCVKALKPEKVKLAACGRNHTLVSTEGGNVYATGGNNEGQLGLGDTEERNTFHVISFFTSEHKIKQLSAGSNTSAALTEDGRLFMWGDNSEGQIGLKNVSNVCVPQQVTIGKPVSWISCGYYHSAFVTTDGELYVFGEPENGKLGLPNQLLGNHRTPQLVSEIPEKVIQVACGGEHTVVLTENAVYTFGLGQFGQLGLGTFLFETSEPKVIENIRDQTISYISCGENHTALITDIGLMYTFGDGRHGKLGLGLENFTNHFIPTLCSNFLRFIVKLVACGGCHMVVFAAPHRGVAKEIEFDEINDTCLSVATFLPYSSLTSGNVLQRTLSARMRRRERERSPDSFSMRRTLPPIEGTLGLSACFLPNSVFPRCSERNLQESVLSEQDLMQPEEPDTHHEPEFQ

SEQ ID NO: 72841 - protein, 646 aa, Homo sapiens
  Payload ID: 14431
  Gene Symbol: RPGR
  Gene Name: retinitis pigmentosa GTPase regulator
  Uniprot ID: Q92834
  ENSP ID: ENSP00000419276
MREPEELMPDSGAVFTFGKSKFAENNPGKFWFKNDVPVHLSCGDEHSAVVTGNNKLYMFGSNNWGQLGLGSKSAISKPTCVKALKPEKVKLAACGRNHTLVSTEGGNVYATGGNNEGQLGLGDTEERNTFHVISFFTSEHKIKQLSAGSNTSAALTEDGRLFMWGDNSEGQIGLKNVSNVCVPQQVTIGKPVSWISCGYYHSAFVTTDGELYVFGEPENGKLGLPNQLLGNHRTPQLVSEIPEKVIQVACGGEHTVVLTENAVYTFGLGQFGQLGLGTFLFETSEPKVIENIRDQTISYISCGENHTALITDIGLMYTFGDGRHGKLGLGLENFTNHFIPTLCSNFLRFIVKLVACGGCHMVVFAAPHRGVAKEIEFDEINDTCLSVATFLPYSSLTSGNVLQRTLSARMRRRERERSPDSFSMRRTLPPIEGTLGLSACFLPNSVFPRCSERNLQESVLSEQDLMQPEEPDYLLDEMTKEAEIDNSSTVESLGETTDILNMTHIMSLNSNEKSLKLSPVQKQKKQQTIGELTQDTALTENDDSDEYEEMSEMKEGKACKQHVSQGIFMTQPATTIEAFSDEEVEIPEEKEGAEDSKGNGIEEQEVEANEENVKVHGGRKEKTEILSDDLTDKAEYSASHSQIVSV

SEQ ID NO: 72842 - protein, 612 aa, Homo sapiens
  Payload ID: 14432
  Gene Symbol: RPGRIP1
  Gene Name: retinitis pigmentosa GTPase regulator interacting protein 1
  Uniprot ID: Q96KN7
  ENSP ID: ENSP00000372391
MLKLDNKDVISHPLGYPSESLLSIASMLDSSDSSSQPHWSNELIAEQLQQQVSQLQDQLDAELEDKRKVLLELSREKAQNEDLKLEVTNILQKHKQEVELLQNAATISQPPDRQSEPATHPAVLQENTQIEPSEPKNQEEKKLSQVLNELQVSHAETTLELEKTRDMLILQRKINVCYQEELEAMMTKADNDNRDHKEKLERLTRLLDLKNNRIKQLEGILRSHDLPTSGDFNLTDPAEKPNGSIQVQLDWKFPYIPPESFLKPEAQTKGKDTKDSSKISSEEEKASFPSQDQMASPEVPIEAGQYRSKRKPPHGGERKEKEHQVVSYSRRKHGKRIGVQGKNRMEYLSLNILNGNTPEQVNYTEWKFSETNSFIGDGFKNQHEEEEMTLSHSALKQKEPLHPVNDKESSEQGSEVSEAQTTDSDDVIVPPMSQKYPKADSEKMCIEIVSLAFYPEAEVMSDENIKQVYVEYKFYDLPLSETETPVSLRKPRAGEEIHFHFSKVIDLDPQEQQGRRRFLFDMLNGQDPDQGHLKFTVVSDPLDEEKKECEEVGYAYLQLWQILESGRDILEQELDIVSPEDLATPIGRLKVSLQAAAVLHAIYKEMTEDLFS

SEQ ID NO: 72843 - protein, 1286 aa, Homo sapiens
  Payload ID: 14432
  Gene Symbol: RPGRIP1
  Gene Name: retinitis pigmentosa GTPase regulator interacting protein 1
  Uniprot ID: Q96KN7
  ENSP ID: ENSP00000382895
MSHLVDPTSGDLPVRDIDAIPLVLPASKGKNMKTQPPLSRMNREELEDSFFRLREDHMLVKELSWKQQDEIKRLRTTLLRLTAAGRDLRVAEEAAPLSETARRGQKAGWRQRLSMHQRPQMHRLQGHFHCVGPASPRRAQPRVQVGHRQLHTAGAPVPEKPKRGPRDRLSYTAPPSFKEHATNENRGEVASKPSELVSGSNSIISFSSVISMAKPIGLCMPNSAHIMASNTMQVEEPPKSPEKMWPKDENFEQRSSLECAQKAAELRASIKEKVELIRLKKLLHERNASLVMTKAQLTEVQEAYETLLQKNQGILSAAHEALLKQVNELRAELKEESKKAVSLKSQLEDVSILQMTLKEFQERVEDLEKERKLLNDNYDKLLESMLDSSDSSSQPHWSNELIAEQLQQQVSQLQDQLDAELEDKRKVLLELSREKAQNEDLKLEVTNILQKHKQEVELLQNAATISQPPDRQSEPATHPAVLQENTQIEPSEPKNQEEKKLSQVLNELQVSHAETTLELEKTRDMLILQRKINVCYQEELEAMMTKADNDNRDHKEKLERLTRLLDLKNNRIKQLEGILRSHDLPTSEQLKDVAYGTRPLSLCLETLPAHGDEDKVDISLLHQGENLFELHIHQAFLTSAALAQAGDTQPTTFCTYSFYDFETHCTPLSVGPQPLYDFTSQYVMETDSLFLHYLQEASARLDIHQAMASEHSTLAAGWICFDRVLETVEKVHGLATLIGAGGEEFGVLEYWMRLRFPIKPSLQACNKRKKAQVYLSTDVLGGRKAQEEEFRSESWEPQNELWIEITKCCGLRSRWLGTQPSPYAVYRFFTFSDHDTAIIPASNNPYFRDQARFPVLVTSDLDHYLRREALSIHVFDDEDLEPGSYLGRARVPLLPLAKNESIKGDFNLTDPAEKPNGSIQVQLDWKFPYIPPESFLKPEAQTKGKDTKDSSKISSEEEKASFPSQDQMASPEVPIEAGQYRSKRKPPHGGERKEKEHQVVSYSRRKHGKRIGVQGKNRMEYLSLNILNGNTPEQVNYTEWKFSETNSFIGDGFKNQHEEEEMTLSHSALKQKEPLHPVNDKESSEQGSEVSEAQTTDSDDVIVPPMSQKYPKADSEKMCIEIVSLAFYPEAEVMSDENIKQVYVEYKFYDLPLSETETPVSLRKPRAGEEIHFHFSKVIDLDPQEQQGRRRFLFDMLNGQDPDQGHLKFTVVSDPLDEEKKECEEVGYAYLQLWQILESGRDILEQELDIVSPEDLATPIGRLKVSLQAAAVLHAIYKEMTEDLFS

SEQ ID NO: 72844 - protein, 143 aa, Homo sapiens
  Payload ID: 14432
  Gene Symbol: RPGRIP1
  Gene Name: retinitis pigmentosa GTPase regulator interacting protein 1
  ENSP ID: ENSP00000450426
LQRKINVCYQEELEAMMTKADNDNRDHKEKLERLTRLLDLKNNRIKQLEEQLKDVAYGTRPLSLCLETLPAHGDEDKVDISLLHQGENLFELHIHQAFLTSAALAQAGDTQPTTFCTYSFYDFETHCTPLSVGPQPLYDFTSQ

SEQ ID NO: 72845 - protein, 943 aa, Homo sapiens
  Payload ID: 14432
  Gene Symbol: RPGRIP1
  Gene Name: retinitis pigmentosa GTPase regulator interacting protein 1
  ENSP ID: ENSP00000450445
MSHLVDPTSGDLPVRDIDAIPLVLPASKGKNMKTQPPLSRMNREELEDSFFRLREDHMLVKELSWKQQDEIKRLRTTLLRLTAAGRDLRVAEEAAPLSETARRGQKAGWRQRLSMHQRPQMHRLQGHFHCVGPASPRRAQPRVQVGHRQLHTAGAPVPEKPKRGPRDRLSYTAPPSFKEHATNENRGEVASKPSELAHIMASNTMQVEEPPKSPEKMWPKDENFEQRSSLECAQKAAELRASIKEKVELIRLKKLLHERNASLVMTKAQLTEVQEAYETLLQKNQGILSAAHEALLKQVNELRAELKEESKKAVSLKSQLEDVSILQMTLKEFQERVEDLEKERKLLNDNYDKLLESMLDSSDSSSQPHWSNELIAEQLQQQVSQLQDQLDAELEDKRKVLLELSREKAQNEDLKLEVTNILQKHKQEVELLQNAATISQPPDRQSEPATHPAVLQENTQIEPSEPKNQEEKKLSQVLNELQVSHAETTLELEKTRDMLILQRKINVCYQEELEAMMTKADNDNRDHKEKLERLTRLLDLKNNRIKQLEGILRSHDLPTSGDFNLTDPAEKPNGSIQVQLDWKFPYIPPESFLKPEAQTKGKDTKDSSKISSEEEKASFPSQDQMASPEVPIEAGQYRSKRKPPHGGERKEKEHQVVSYSRRKHGKRIGVQGKNRMEYLSLNILNGNTPEQVNYTEWKFSETNSFIGDGFKNQHEEEEMTLSHSALKQKEPLHPVNDKESSEQGSEVSEAQTTDSDDVIVPPMSQKYPKADSEKMCIEIVSLAFYPEAEVMSDENIKQVYVEYKFYDLPLSETETPVSLRKPRAGEEIHFHFSKVIDLDPQEQQGRRRFLFDMLNGQDPDQGHLKFTVVSDPLDEEKKECEEVGYAYLQLWQILESGRDILEQELDIVSPEDLATPIGRLKVSLQAAAVLHAIYKEMTEDLFS

SEQ ID NO: 72846 - protein, 26 aa, Homo sapiens
  Payload ID: 14432
  Gene Symbol: RPGRIP1
  Gene Name: retinitis pigmentosa GTPase regulator interacting protein 1
  ENSP ID: ENSP00000450662
  MOD_RES (1)..(1): Any amino acid
XDMLILQRKINVCYQVQGKMVQEGDG

SEQ ID NO: 72847 - protein, 59 aa, Homo sapiens
  Payload ID: 14432
  Gene Symbol: RPGRIP1
  Gene Name: retinitis pigmentosa GTPase regulator interacting protein 1
  ENSP ID: ENSP00000451044
ERLTRLLDLKNNRIKQLEERAPYPLTDRQLSFPSRTAQRCCLWHPTVVVMFGNTASPWR

SEQ ID NO: 72848 - protein, 1248 aa, Homo sapiens
  Payload ID: 14432
  Gene Symbol: RPGRIP1
  Gene Name: retinitis pigmentosa GTPase regulator interacting protein 1
  ENSP ID: ENSP00000451219
MSHLVDPTSGDLPVRDIDAIPLVLPASKGKNMKTQPPLSRMNREELEDSFFRLREDHMLVKELSWKQQDEIKRLRTTLLRLTAAGRDLRVAEEAAPLSETARRGQKAGWRQRLSMHQRPQMHRLQGHFHCVGPASPRRAQPRVQVGHRQLHTAGAPVPEKPKRGPRDRLSYTAPPSFKEHATNENRGEVASKPSELAHIMASNTMQVEEPPKSPEKMWPKDENFEQRSSLECAQKAAELRASIKEKVELIRLKKLLHERNASLVMTKAQLTEVQEAYETLLQKNQGILSAAHEALLKQVNELRAELKEESKKAVSLKSQLEDVSILQMTLKEFQERVEDLEKERKLLNDNYDKLLESMLDSSDSSSQPHWSNELIAEQLQQQVSQLQDQLDAELEDKRKVLLELSREKAQNEDLKLEVTNILQKHKQEVELLQNAATISQPPDRQSEPATHPAVLQENTQIEPSEPKNQEEKKLSQVLNELQVSHAETTLELEKTRDMLILQRKINVCYQEELEAMMTKADNDNRDHKEKLERLTRLLDLKNNRIKQLEEQLKDVAYGTRPLSLCLETLPAHGDEDKVDISLLHQGENLFELHIHQAFLTSAALAQAGDTQPTTFCTYSFYDFETHCTPLSVGPQPLYDFTSQYVMETDSLFLHYLQEASARLDIHQAMASEHSTLAAGWICFDRVLETVEKVHGLATLIGAGGEEFGVLEYWMRLRFPIKPSLQACNKRKKAQVYLSTDVLGGRKAQEEEFRSESWEPQNELWIEITKCCGLRSRWLGTQPSPYAVYRFFTFSDHDTAIIPASNNPYFRDQARFPVLVTSDLDHYLRREALSIHVFDDEDLEPGSYLGRARVPLLPLAKNESIKGDFNLTDPAEKPNGSIQVQLDWKFPYIPPESFLKPEAQTKGKDTKDSSKISSEEEKASFPSQDQMASPEVPIEAGQYRSKRKPPHGGERKEKEHQVVSYSRRKHGKRIGVQGKNRMEYLSLNILNGNTPEQVNYTEWKFSETNSFIGDGFKNQHEEEEMTLSHSALKQKEPLHPVNDKESSEQGSEVSEAQTTDSDDVIVPPMSQKYPKADSEKMCIEIVSLAFYPEAEVMSDENIKQVYVEYKFYDLPLSETETPVSLRKPRAGEEIHFHFSKVIDLDPQEQQGRRRFLFDMLNGQDPDQGHLKFTVVSDPLDEEKKECEEVGYAYLQLWQILESGRDILEQELDIVSPEDLATPIGRLKVSLQAAAVLHAIYKEMTEDLFS

SEQ ID NO: 72849 - protein, 761 aa, Homo sapiens
  Payload ID: 14432
  Gene Symbol: RPGRIP1
  Gene Name: retinitis pigmentosa GTPase regulator interacting protein 1
  ENSP ID: ENSP00000451262
MLILQRKINVCYQELEAMMTKADNDNRDHKEKLERLTRLLDLKNNRIKQLEGILRSHDLPTSEQLKDVAYGTRPLSLCLETLPAHGDEDKVDISLLHQGENLFELHIHQAFLTSAALAQAGDTQPTTFCTYSFYDFETHCTPLSVGPQPLYDFTSQYVMETDSLFLHYLQEASARLDIHQAMASEHSTLAAGWICFDRVLETVEKVHGLATLIGAGGEEFGVLEYWMRLRFPIKPSLQACNKRKKAQVYLSTDVLGGRKAQEEEFRSESWEPQNELWIEITKCCGLRSRWLGTQPSPYAVYRFFTFSDHDTAIIPASNNPYFRDQARFPVLVTSDLDHYLRREALSIHVFDDEDLEPGSYLGRARVPLLPLAKNESIKGDFNLTDPAEKPNGSIQVQLDWKFPYIPPESFLKPEAQTKGKDTKDSSKISSEEEKASFPSQDQMASPEVPIEAGQYRSKRKPPHGGERKEKEHQVVSYSRRKHGKRIGVQGKNRMEYLSLNILNGNTPEQVNYTEWKFSETNSFIGDGFKNQHEEEEMTLSHSALKQKEPLHPVNDKESSEQGSEVSEAQTTDSDDVIVPPMSQKYPKADSEKMCIEIVSLAFYPEAEVMSDENIKQVYVEYKFYDLPLSETETPVSLRKPRAGEEIHFHFSKVIDLDPQEQQGRRRFLFDMLNGQDPDQGHLKFTVVSDPLDEEKKECEEVGYAYLQLWQILESGRDILEQELDIVSPEDLATPIGRLKVSLQAAAVLHAIYKEMTEDLFS

SEQ ID NO: 72850 - protein, 134 aa, Homo sapiens
  Payload ID: 14432
  Gene Symbol: RPGRIP1
  Gene Name: retinitis pigmentosa GTPase regulator interacting protein 1
  ENSP ID: ENSP00000451719
  MOD_RES (1)..(1): Any amino acid
XNILNGNTPEQVNYTEWKFSETNSFIGDGFKNQHEEEEMTLSHSALKQKEPLHPVNADKESSEQGSEVSEAQTTDSDDVIVPPMSQKYPKADSEKMCIEIVSLAFYPEAEVMSDENIKQVYVEYKFYDLPLSET

SEQ ID NO: 72851 - protein, 166 aa, Homo sapiens
  Payload ID: 14432
  Gene Symbol: RPGRIP1
  Gene Name: retinitis pigmentosa GTPase regulator interacting protein 1
  ENSP ID: ENSP00000452215
MLKLDNKDVISHPLGYPSESLLSIASMLDSSDSSSQPHWSNELIAEQLQQQVSQLQDQLDAELEDKRKVLLELSREKGGVSLLLLRLECNGTISAHCNLHLPAQNEDLKLEVTNILQKHKQEVELLQNAATISQPPDRQSEPATHPAVLQENTQIEPSEPKNQEEK

SEQ ID NO: 72852 - protein, 928 aa, Homo sapiens
  Payload ID: 14433
  Gene Symbol: RB1
  Gene Name: retinoblastoma 1
  Uniprot ID: P06400
  ENSP ID: ENSP00000267163
MPPKTPRKTAATAAAAAAEPPAPPPPPPPEEDPEQDSGPEDLPLVRLEFEETEEPDFTALCQKLKIPDHVRERAWLTWEKVSSVDGVLGGYIQKKKELWGICIFIAAVDLDEMSFTFTELQKNIEISVHKFFNLLKEIDTSTKVDNAMSRLLKKYDVLFALFSKLERTCELIYLTQPSSSISTEINSALVLKVSWITFLLAKGEVLQMEDDLVISFQLMLCVLDYFIKLSPPMLLKEPYKTAVIPINGSPRTPRRGQNRSARIAKQLENDTRIIEVLCKEHECNIDEVKNVYFKNFIPFMNSLGLVTSNGLPEVENLSKRYEEIYLKNKDLDARLFLDHDKTLQTDSIDSFETQRTPRKSNLDEEVNVIPPHTPVRTVMNTIQQLMMILNSASDQPSENLISYFNNCTVNPKESILKRVKDIGYIFKEKFAKAVGQGCVEIGSQRYKLGVRLYYRVMESMLKSEEERLSIQNFSKLLNDNIFHMSLLACALEVVMATYSRSTSQNLDSGTDLSFPWILNVLNLKAFDFYKVIESFIKAEGNLTREMIKHLERCEHRIMESLAWLSDSPLFDLIKQSKDREGPTDHLESACPLNLPLQNNHTAADMYLSPVRSPKKKGSTTRVNSTANAETQATSAFQTQKPLKSTSLSLFYKKVYRLAYLRLNTLCERLLSEHPELEHIIWTLFQHTLQNEYELMRDRHLDQIMMCSMYGICKVKNIDLKFKIIVTAYKDLPHAVQETFKRVLIKEEEYDSIIVFYNSVFMQRLKTNILQYASTRPPTLSPIPHIPRSPYKFPSSPLRIPGGNIYISPLKSPYKISEGLPTPTKMTPRSRILVSIGESFGTSEKFQKINQMVCNSDRVLKRSAEGSNPPKPLKKLRFDIEGSDEADGSKHLPGESKFQQKLAEMTSTRTRMQKQKMNDSMDTSNKEEK

SEQ ID NO: 72853 - protein, 53 aa, Homo sapiens
  Payload ID: 14433
  Gene Symbol: RB1
  Gene Name: retinoblastoma 1
  ENSP ID: ENSP00000434702
MPPKTPRKTAATAAAAAAEPPAPPPPPPPEEDPEQDSGPEDLPLVRGSITNGR

SEQ ID NO: 72854 - protein, 410 aa, Homo sapiens
  Payload ID: 14434
  Gene Symbol: RBBP4
  Gene Name: retinoblastoma binding protein 4
  Uniprot ID: Q09028
  ENSP ID: ENSP00000362584
MADKEAAFDDAVEERVINEEYKIWKKNTPFLYDLVMTHALEWPSLTAQWLPDVTRPEGKDFSIHRLVLGTHTSDEQNHLVIASVQLPNDDAQFDASHYDSEKGEFGGFGSVSGKIEIEIKINHEGEVNRARYMPQNPCIIATKTPSSDVLVFDYTKHPSKPDPSGECNPDLRLRGHQKEGYGLSWNPNLSGHLLSASDDHTICLWDISAVPKEGKVVDAKTIFTGHTAVVEDVSWHLLHESLFGSVADDQKLMIWDTRSNNTSKPSHSVDAHTAEVNCLSFNPYSEFILATGSADKTVALWDLRNLKLKLHSFESHKDEIFQVQWSPHNETILASSGTDRRLNVWDLSKIGEEQSPEDAEDGPPELLFIHGGHTAKISDFSWNPNEPWVICSVSEDNIMQVWQMELVLDH

SEQ ID NO: 72855 - protein, 425 aa, Homo sapiens
  Payload ID: 14434
  Gene Symbol: RBBP4
  Gene Name: retinoblastoma binding protein 4
  Uniprot ID: Q09028
  ENSP ID: ENSP00000362592
MADKEAAFDDAVEERVINEEYKIWKKNTPFLYDLVMTHALEWPSLTAQWLPDVTRPEGKDFSIHRLVLGTHTSDEQNHLVIASVQLPNDDAQFDASHYDSEKGEFGGFGSVSGKIEIEIKINHEGEVNRARYMPQNPCIIATKTPSSDVLVFDYTKHPSKPDPSGECNPDLRLRGHQKEGYGLSWNPNLSGHLLSASDDHTICLWDISAVPKEGKVVDAKTIFTGHTAVVEDVSWHLLHESLFGSVADDQKLMIWDTRSNNTSKPSHSVDAHTAEVNCLSFNPYSEFILATGSADKTVALWDLRNLKLKLHSFESHKDEIFQVQWSPHNETILASSGTDRRLNVWDLSKIGEEQSPEDAEDGPPELLFIHGGHTAKISDFSWNPNEPWVICSVSEDNIMQVWQMAENIYNDEDPEGSVDPEGQGS

SEQ ID NO: 72856 - protein, 87 aa, Homo sapiens
  Payload ID: 14434
  Gene Symbol: RBBP4
  Gene Name: retinoblastoma binding protein 4
  ENSP ID: ENSP00000389437
MTHALEWPSLTAQWLPDVTRPEGKDFSIHRLVLGTHTSDEQNHLVIASVQLPNDDAQFDASHYDSEKGEFGGFGSVSGKIEIEIKIN

SEQ ID NO: 72857 - protein, 390 aa, Homo sapiens
  Payload ID: 14434
  Gene Symbol: RBBP4
  Gene Name: retinoblastoma binding protein 4
  Uniprot ID: Q09028
  ENSP ID: ENSP00000396057
MTHALEWPSLTAQWLPDVTRPEGKDFSIHRLVLGTHTSDEQNHLVIASVQLPNDDAQFDASHYDSEKGEFGGFGSVSGKIEIEIKINHEGEVNRARYMPQNPCIIATKTPSSDVLVFDYTKHPSKPDPSGECNPDLRLRGHQKEGYGLSWNPNLSGHLLSASDDHTICLWDISAVPKEGKVVDAKTIFTGHTAVVEDVSWHLLHESLFGSVADDQKLMIWDTRSNNTSKPSHSVDAHTAEVNCLSFNPYSEFILATGSADKTVALWDLRNLKLKLHSFESHKDEIFQVQWSPHNETILASSGTDRRLNVWDLSKIGEEQSPEDAEDGPPELLFIHGGHTAKISDFSWNPNEPWVICSVSEDNIMQVWQMAENIYNDEDPEGSVDPEGQGS

SEQ ID NO: 72858 - protein, 424 aa, Homo sapiens
  Payload ID: 14434
  Gene Symbol: RBBP4
  Gene Name: retinoblastoma binding protein 4
  Uniprot ID: Q09028
  ENSP ID: ENSP00000398242
MADKEAFDDAVEERVINEEYKIWKKNTPFLYDLVMTHALEWPSLTAQWLPDVTRPEGKDFSIHRLVLGTHTSDEQNHLVIASVQLPNDDAQFDASHYDSEKGEFGGFGSVSGKIEIEIKINHEGEVNRARYMPQNPCIIATKTPSSDVLVFDYTKHPSKPDPSGECNPDLRLRGHQKEGYGLSWNPNLSGHLLSASDDHTICLWDISAVPKEGKVVDAKTIFTGHTAVVEDVSWHLLHESLFGSVADDQKLMIWDTRSNNTSKPSHSVDAHTAEVNCLSFNPYSEFILATGSADKTVALWDLRNLKLKLHSFESHKDEIFQVQWSPHNETILASSGTDRRLNVWDLSKIGEEQSPEDAEDGPPELLFIHGGHTAKISDFSWNPNEPWVICSVSEDNIMQVWQMAENIYNDEDPEGSVDPEGQGS

SEQ ID NO: 72859 - protein, 180 aa, Homo sapiens
  Payload ID: 14434
  Gene Symbol: RBBP4
  Gene Name: retinoblastoma binding protein 4
  ENSP ID: ENSP00000432298
VADDQKLMIWDTRSNNTSKPSHSVDAHTAEVNCLSFNPYSEFILATGSADKTVALWDLRNLKLKLHSFESHKDEIFQVQWSPHNETILASSGTDRRLNVWDLSKIGEEQSPEDAEDGPPELLFIHGGHTAKISDFSWNPNEPWVICSVSEDNIMQVWQMAENIYNDEDPEGSVDPEGQGS

SEQ ID NO: 72860 - protein, 104 aa, Homo sapiens
  Payload ID: 14434
  Gene Symbol: RBBP4
  Gene Name: retinoblastoma binding protein 4
  ENSP ID: ENSP00000432774
MADKEAAFDDAVEERVINEEYKIWKKNTPFLYDLVMTHALEWPSLTAQWLPDVTRPEGKDFSIHRLVLGTHTSDEQNHLVIASVQLPNDDAQFDASHYDSEKGG

SEQ ID NO: 72861 - protein, 62 aa, Homo sapiens
  Payload ID: 14434
  Gene Symbol: RBBP4
  Gene Name: retinoblastoma binding protein 4
  ENSP ID: ENSP00000432780
MADKEAAFDDAVEERVINEEYKIWKKNTPFLYDLVMTHALEWPSLTAQWLPDVTRIWRFWFS

SEQ ID NO: 72862 - protein, 262 aa, Homo sapiens
  Payload ID: 14434
  Gene Symbol: RBBP4
  Gene Name: retinoblastoma binding protein 4
  ENSP ID: ENSP00000433805
  MOD_RES (1)..(1): Any amino acid
XLFGSVADDQKLMIWDTRSNNTSKPSHSVDAHTAEVNCLSFNPYSEFILATGSADKTVALWDLRNLKLKLHSFESHKDEIFQVQWSPHNETILASSGTDRRLNVWDLSKIGEEQSPEDAEDGPPELLFIHGGHTAKISDFSWNPNEPWVICSVSEDNIMQVWQMMVSHFFTQAGVQWCNLGSLQLPPPRFDRFSCLSLLSSWDYRQRTFIMMKTLKEAWIQKDKGPRYVFTCCDFRLPFFLLNPESDLTLVLRQTLFSYPSI

SEQ ID NO: 72863 - protein, 87 aa, Homo sapiens
  Payload ID: 14434
  Gene Symbol: RBBP4
  Gene Name: retinoblastoma binding protein 4
  ENSP ID: ENSP00000434925
MADKEAAFDDAVEERVINEEYKIWKKNTPFLYDLVMTHALEWPSLTAQWLPDVTRSFWRVQPRLASPWTSEGRLWAFLEPKSQWALT

SEQ ID NO: 72864 - protein, 167 aa, Homo sapiens
  Payload ID: 14434
  Gene Symbol: RBBP4
  Gene Name: retinoblastoma binding protein 4
  ENSP ID: ENSP00000436565
SKPSHSVDAHTAEVNCLSFNPYSEFILATGSADKTVALWDLRNLKLKLHSFESHKDEIFQVQWSPHNETILASSGTDRRLNVWDLSKIGEEQSPEDAEDGPPELLFIHGGHTAKISDFSWNPNEPWVICSVSEDNIMQVWQMGRQRTFIMMKTLKEAWIQKDKGVSP

SEQ ID NO: 72865 - protein, 87 aa, Homo sapiens; identical to SEQ ID NO: 72863
  Payload ID: 14434
  Gene Symbol: RBBP4
  Gene Name: retinoblastoma binding protein 4
  ENSP ID: ENSP00000436663

SEQ ID NO: 72866 - protein, 207 aa, Homo sapiens
  Payload ID: 14434
  Gene Symbol: RBBP4
  Gene Name: retinoblastoma binding protein 4
  ENSP ID: ENSP00000436986
  MOD_RES (1)..(1): Any amino acid
XNPCIIATKTPSSDVLVFDYTKHPSKPGHTAVVEDVSWHLLHESLFGSVADDQKLMIWDTRSNNTSKPSHSVDAHTAEVNCLSFNPYSEFILATGSADKTVALWDLRNLKLKLHSFESHKDEIFQVQWSPHNETILASSGTDRRLNVWDLSKIGEEQSPEDAEDGPPELLFIHGGHTAKISDFSWNPNEPWVICSVSEDNIMQVWQM

SEQ ID NO: 72867 - protein, 68 aa, Homo sapiens
  Payload ID: 14434
  Gene Symbol: RBBP4
  Gene Name: retinoblastoma binding protein 4
  ENSP ID: ENSP00000437210
MTHALEWPSLTAQWLPDVTRPEGKDFSIHRLVLGTHTSDEQNHLVIASVQLPNDDAQFDASHYDSEKG

SEQ ID NO: 72868 - protein, 538 aa, Homo sapiens
  Payload ID: 14435
  Gene Symbol: RBBP5
  Gene Name: retinoblastoma binding protein 5
  Uniprot ID: Q15291
  ENSP ID: ENSP00000264515
MNLELLESFGQNYPEEADGTLDCISMALTCTFNRWGTLLAVGCNDGRIVIWDFLTRGIAKIISAHIHPVCSLCWSRDGHKLVSASTDNIVSQWDVLSGDCDQRFRFPSPILKVQYHPRDQNKVLVCPMKSAPVMLTLSDSKHVVLPVDDDSDLNVVASFDRRGEYIYTGNAKGKILVLKTDSQDLVASFRVTTGTSNTTAIKSIEFARKGSCFLINTADRIIRVYDGREILTCGRDGEPEPMQKLQDLVNRTPWKKCCFSGDGEYIVAGSARQHALYIWEKSIGNLVKILHGTRGELLLDVAWHPVRPIIASISSGVVSIWAQNQVENWSAFAPDFKELDENVEYEERESEFDIEDEDKSEPEQTGADAAEDEEVDVTSVDPIAAFCSSDEELEDSKALLYLPIAPEVEDPEENPYGPPPDAVQTSLMDEGASSEKKRQSSADGSQPPKKKPKTTNIELQGVPNDEVHPLLGVKGDGKSKKKQAGRPKGSKGKEKDSPFKPKLYKGDRGLPLEGSAKGKVQAELSQPLTAGGAISELL

SEQ ID NO: 72869 - protein, 500 aa, Homo sapiens
  Payload ID: 14435
  Gene Symbol: RBBP5
  Gene Name: retinoblastoma binding protein 5
  Uniprot ID: Q15291
  ENSP ID: ENSP00000356132
MNLELLESFGQNYPEEADGTLDCISMALTCTFNRWGTLLAVGCNDGRIVIWDFLTRGIAKIISAHIHPVCSLCWSRDGHKLVSASTDNIVSQWDVLSGDCDQRFRFPSPILKVQYHPRDQNKVLVCPMKSAPVMLTLSDSKHVVLPVDDDSDLNVVASFDRRGEYIYTGNAKGKILVLKTDSQDLVASFRVTTGTSNTTAIKSIEFARKGSCFLINTADRIIRVYDGREILTCGRDGEPEPMQKLQDLVNRTPWKKCCFSGDGEYIVAGSARQHALYIWEKSIGNLVKILHGTRGELLLDVAWHPVRPIIASISSGVVSIWAQNQVENWSAFAPDFKELDENVEYEERESEFDIEDEDKSEPEQTGADAAEDEEVDVTSVDPIAAFCSSDEELEDSKALLYLPIAPEVEDPEENPYGPPPDAVQTSLMDEGASSEKKRQSSADGSQPPKKKPKTTNIELQGVPNDEVHPLLGVKGDGKSKKKQAGRPKGSKAGGAISELL

SEQ ID NO: 72870 - protein, 1758 aa, Homo sapiens
  Payload ID: 14436
  Gene Symbol: RBBP6
  Gene Name: retinoblastoma binding protein 6
  Uniprot ID: Q7Z6E9
  ENSP ID: ENSP00000316291
MSCVHYKFSSKLNYDTVTFDGLHISLCDLKKQIMGREKLKAADCDLQITNAQTKEEYTDDNALIPKNSSVIVRRIPIGGVKSTSKTYVISRTEPAMATTKAIDDSSASISLAQLTKTANLAEANASEEDKIKAMMSQSGHEYDPINYMKKPLGPPPPSYTCFRCGKPGHYIKNCPTNGDKNFESGPRIKKSTGIPRSFMMEVKDPNMKGAMLTNTGKYAIPTIDAEAYAIGKKEKPPFLPEEPSSSSEEDDPIPDELLCLICKDIMTDAVVIPCCGNSYCDECIRTALLESDEHTCPTCHQNDVSPDALIANKFLRQAVNNFKNETGYTKRLRKQLPPPPPPIPPPRPLIQRNLQPLMRSPISRQQDPLMIPVTSSSTHPAPSISSLTSNQSSLAPPVSGNPSSAPAPVPDITATVSISVHSEKSDGPFRDSDNKILPAAALASEHSKGTSSIAITALMEEKGYQVPVLGTPSLLGQSLLHGQLIPTTGPVRINTARPGGGRPGWEHSNKLGYLVSPPQQIRRGERSCYRSINRGRHHSERSQRTQGPSLPATPVFVPVPPPPLYPPPPHTLPLPPGVPPPQFSPQFPPGQPPPAGYSVPPPGFPPAPANLSTPWVSSGVQTAHSNTIPTTQAPPLSREEFYREQRRLKEESKSPYSGSSYSRSSYTYSKSRSGSTRSRSYSRSFSRSHSRSYSRSPPYPRRGRGKSRNYRSRSRSHGYHRSRSRSPPYRRYHSRSRSPQAFRGQSPNKRNVPQGETEREYFNRYREVPPPYDMKAYYGRSVDFRDPFEKERYREWERKYREWYEKYYKGYAAGAQPRPSANRENFSPERFLPLNIRNSPFTRGRREDYVGGQSHRSRNIGSNYPEKLSARDGHNQKDNTKSKEKESENAPGDGKGNKHKKHRKRRKGEESEGFLNPELLETSRKSREPTGVEENKTDSLFVLPSRDDATPVRDEPMDAESITFKSVSEKDKRERDKPKAKGDKTKRKNDGSAVSKKENIVKPAKGPQEKVDGERERSPRSEPPIKKAKEETPKTDNTKSSSSSQKDEKITGTPRKAHSKSAKEHQETKPVKEEKVKKDYSKDVKSEKLTTKEEKAKKPNEKNKPLDNKGEKRKRKTEEKGVDKDFESSSMKISKLEVTEIVKPSPKRKMEPDTEKMDRTPEKDKISLSAPAKKIKLNRETGKKIGSTENISNTKEPSEKLESTSSKVKQEKVKGKVRRKVTGTEGSSSTLVDYTSTSSTGGSPVRKSEEKTDTKRTVIKTMEEYNNDNTAPAEDVIIMIQVPQSKWDKDDFESEEEDVKSTQPISSVGKPASVIKNVSTKPSNIVKYPEKESEPSEKIQKFTKDVSHEIIQHEVKSSKNSASSEKGKTKDRDYSVLEKENPEKRKNSTQPEKESNLDRLNEQGNFKSLSQSSKEARTSDKHDSTRASSNKDFTPNRDKKTDYDTREYSSSKRRDEKNELTRRKDSPSRNKDSASGQKNKPREERDLPKKGTGDSKKSNSSPSRDRKPHDHKATYDTKRPNEETKSVDKNPCKDREKHVLEARNNKESSGNKLLYILNPPETQVEKEQITGQIDKSTVKPKPQLSHSSRLSSDLTRETDEAAFEPDYNESDSESNVSVKEEESSGNISKDLKDKIVEKAKESLDTAAVVQVGISRNQSHSSPSVSPSRSHSPSGSQTRSHSSSASSAESQDSKKKKKKKEKKKHKKHKKHKKHKKHAGTEVELEKSQKHKHKKKKSKKNKDKEKEKEKDDQKVKSVTV

SEQ ID NO: 72871 - protein, 1792 aa, Homo sapiens
  Payload ID: 14436
  Gene Symbol: RBBP6
  Gene Name: retinoblastoma binding protein 6
  Uniprot ID: Q7Z6E9
  ENSP ID: ENSP00000317872
MSCVHYKFSSKLNYDTVTFDGLHISLCDLKKQIMGREKLKAADCDLQITNAQTKEEYTDDNALIPKNSSVIVRRIPIGGVKSTSKTYVISRTEPAMATTKAIDDSSASISLAQLTKTANLAEANASEEDKIKAMMSQSGHEYDPINYMKKPLGPPPPSYTCFRCGKPGHYIKNCPTNGDKNFESGPRIKKSTGIPRSFMMEVKDPNMKGAMLTNTGKYAIPTIDAEAYAIGKKEKPPFLPEEPSSSSEEDDPIPDELLCLICKDIMTDAVVIPCCGNSYCDECIRTALLESDEHTCPTCHQNDVSPDALIANKFLRQAVNNFKNETGYTKRLRKQLPPPPPPIPPPRPLIQRNLQPLMRSPISRQQDPLMIPVTSSSTHPAPSISSLTSNQSSLAPPVSGNPSSAPAPVPDITATVSISVHSEKSDGPFRDSDNKILPAAALASEHSKGTSSIAITALMEEKGYQVPVLGTPSLLGQSLLHGQLIPTTGPVRINTARPGGGRPGWEHSNKLGYLVSPPQQIRRGERSCYRSINRGRHHSERSQRTQGPSLPATPVFVPVPPPPLYPPPPHTLPLPPGVPPPQFSPQFPPGQPPPAGYSVPPPGFPPAPANLSTPWVSSGVQTAHSNTIPTTQAPPLSREEFYREQRRLKEEEKKKSKLDEFTNDFAKELMEYKKIQKERRRSFSRSKSPYSGSSYSRSSYTYSKSRSGSTRSRSYSRSFSRSHSRSYSRSPPYPRRGRGKSRNYRSRSRSHGYHRSRSRSPPYRRYHSRSRSPQAFRGQSPNKRNVPQGETEREYFNRYREVPPPYDMKAYYGRSVDFRDPFEKERYREWERKYREWYEKYYKGYAAGAQPRPSANRENFSPERFLPLNIRNSPFTRGRREDYVGGQSHRSRNIGSNYPEKLSARDGHNQKDNTKSKEKESENAPGDGKGNKHKKHRKRRKGEESEGFLNPELLETSRKSREPTGVEENKTDSLFVLPSRDDATPVRDEPMDAESITFKSVSEKDKRERDKPKAKGDKTKRKNDGSAVSKKENIVKPAKGPQEKVDGERERSPRSEPPIKKAKEETPKTDNTKSSSSSQKDEKITGTPRKAHSKSAKEHQETKPVKEEKVKKDYSKDVKSEKLTTKEEKAKKPNEKNKPLDNKGEKRKRKTEEKGVDKDFESSSMKISKLEVTEIVKPSPKRKMEPDTEKMDRTPEKDKISLSAPAKKIKLNRETGKKIGSTENISNTKEPSEKLESTSSKVKQEKVKGKVRRKVTGTEGSSSTLVDYTSTSSTGGSPVRKSEEKTDTKRTVIKTMEEYNNDNTAPAEDVIIMIQVPQSKWDKDDFESEEEDVKSTQPISSVGKPASVIKNVSTKPSNIVKYPEKESEPSEKIQKFTKDVSHEIIQHEVKSSKNSASSEKGKTKDRDYSVLEKENPEKRKNSTQPEKESNLDRLNEQGNFKSLSQSSKEARTSDKHDSTRASSNKDFTPNRDKKTDYDTREYSSSKRRDEKNELTRRKDSPSRNKDSASGQKNKPREERDLPKKGTGDSKKSNSSPSRDRKPHDHKATYDTKRPNEETKSVDKNPCKDREKHVLEARNNKESSGNKLLYILNPPETQVEKEQITGQIDKSTVKPKPQLSHSSRLSSDLTRETDEAAFEPDYNESDSESNVSVKEEESSGNISKDLKDKIVEKAKESLDTAAVVQVGISRNQSHSSPSVSPSRSHSPSGSQTRSHSSSASSAESQDSKKKKKKKEKKKHKKHKKHKKHKKHAGTEVELEKSQKHKHKKKKSKKNKDKEKEKEKDDQKVKSVTV

SEQ ID NO: 72872 - protein, 952 aa, Homo sapiens
  Payload ID: 14436
  Gene Symbol: RBBP6
  Gene Name: retinoblastoma binding protein 6
  Uniprot ID: Q7Z6E9
  ENSP ID: ENSP00000370427
MSCVHYKFSSKLNYDTVTFDGLHISLCDLKKQIMGREKLKAADCDLQITNAQTKEEYTDDNALIPKNSSVIVRRIPIGGVKSTSKTYVISRTEPAMATTKAIDDSSASISLAQLTKTANLAEANASEEDKIKAMMSQSGHEYDPINYMKKPLGPPPPSYTCFRCGKPGHYIKNCPTNGDKNFESGPRIKKSTGIPRSFMMEVKDPNMKGAMLTNTGKYAIPTIDAEAYAIGKKEKPPFLPEEPSSSSEEDDPIPDELLCLICKDIMTDAVVIPCCGNSYCDECIRTALLESDEHTCPTCHQNDVSPDALIANKFLRQAVNNFKNETGYTKRLRKQLPPPPPPIPPPRPLIQRNLQPLMRSPISRQQDPLMIPVTSSSTHPAPSISSLTSNQSSLAPPVSGNPSSAPAPVPDITATVSISVHSEKSDGPFRTSSTGGSPVRKSEEKTDTKRTVIKTMEEYNNDNTAPAEDVIIMIQVPQSKWDKDDFESEEEDVKSTQPISSVGKPASVIKNVSTKPSNIVKYPEKESEPSEKIQKFTKDVSHEIIQHEVKSSKNSASSEKGKTKDRDYSVLEKENPEKRKNSTQPEKESNLDRLNEQGNFKSLSQSSKEARTSDKHDSTRASSNKDFTPNRDKKTDYDTREYSSSKRRDEKNELTRRKDSPSRNKDSASGQKNKPREERDLPKKGTGDSKKSNSSPSRDRKPHDHKATYDTKRPNEETKSVDKNPCKDREKHVLEARNNKESSGNKLLYILNPPETQVEKEQITGQIDKSTVKPKPQLSHSSRLSSDLTRETDEAAFEPDYNESDSESNVSVKEEESSGNISKDLKDKIVEKAKESLDTAAVVQVGISRNQSHSSPSVSPSRSHSPSGSQTRSHSSSASSAESQDSKKKKKKKEKKKHKKHKKHKKHKKHAGTEVELEKSQKHKHKKKKSKKNKDKEKEKEKDDQKVKSVTV

SEQ ID NO: 72873 - protein, 118 aa, Homo sapiens
  Payload ID: 14436
  Gene Symbol: RBBP6
  Gene Name: retinoblastoma binding protein 6
  Uniprot ID: Q7Z6E9
  ENSP ID: ENSP00000390537
MSCVHYKFSSKLNYDTVTFDGLHISLCDLKKQIMGREKLKAADCDLQITNAQTKEEYTDDNALIPKNSSVIVRRIPIGGVKSTSKTYVISRTEPAMATTKAVCKNTISHFFYTLLLPL

SEQ ID NO: 72874 - protein, 1008 aa, Homo sapiens
  Payload ID: 14436
  Gene Symbol: RBBP6
  Gene Name: retinoblastoma binding protein 6
  ENSP ID: ENSP00000456750
MMSQSGHEYDPINYMKKPLGPPPPSYTCFRCGKPGHYIKNCPTNGDKNFESGPRIKKSTGIPRSFMMEVKDPNMKGAMLTNTGKYAIPTIDAEAYAIGKKEKPPFLPEEPSSSSEEDDPIPDELLCLICKDIMTDAVVIPCCGNSYCDECIRTALLESDEHTCPTCHQNDVSPDALIANKFLRQAVNNFKNETGYTKRLRKQLPPPPPPIPPPRPLIQRNLQPLMRSPISRQQDPLMIPVTSSSTHPAPSISSLTSNQSSLAPPVSGNPSSAPAPVPDITATVSISVHSEKSDGPFRDSDNKILPAAALASEHSKGTSSIAITALMEEKGYQVPVLGTPSLLGQSLLHGQLIPTTGPVRINTARPGGGRPGWEHSNKLGYLVSPPQQIRRGERSCYRSINRGRHHSERSQRTQGPSLPATPVFVPVPPPPLYPPPPHTLPLPPGVPPPQFSPQFPPGQPPPAGYSVPPPGFPPAPANLSTPWVSSGVQTAHSNTIPTTQAPPLSREEFYREQRRLKEEEKKKSKLDEFTNDFAKELMEYKKIQKERRRSFSRSKSPYSGSSYSRSSYTYSKSRSGSTRSRSYSRSFSRSHSRSYSRSPPYPRRGRGKSRNYRSRSRSHGYHRSRSRSPPYRRYHSRSRSPQAFRGQSPNKRNVPQGETEREYFNRYREVPPPYDMKAYYGRSVDFRDPFEKERYREWERKYREWYEKYYKGYAAGAQPRPSANRENFSPERFLPLNIRNSPFTRGRREDYVGGQSHRSRNIGSNYPEKLSARDGHNQKDNTKSKEKESENAPGDGKGNKHKKHRKRRKGEESEGFLNPELLETSRKSREPTGVEENKTDSLFVLPSRDDATPVRDEPMDAESITFKSVSEKDKRERDKPKAKGDKTKRKNDGSAVSKKENIVKPAKGPQEKVDGERERSPRSEPPIKKAKEETPKTDNTKSSSSSQKDEKITGTPRKAHSKSAKEHQETKPVKEEKVKKDYSKDVKSEKLTTKEEKAKKPNEKNKPLD

SEQ ID NO: 72875 - protein, 300 aa, Homo sapiens
  Payload ID: 14436
  Gene Symbol: RBBP6
  Gene Name: retinoblastoma binding protein 6
  ENSP ID: ENSP00000457716
MSCVHYKFSSKLNYDTVTFDGLHISLCDLKKQIMGREKLKAADCDLQITNAQTKEEYTDDNALIPKNSSVIVRRIPIGGVKSTSKTYVISRTEPAMATTKAIDDSSASISLAQLTKTANLAEANASEEDKIKAMMSQSGHEYDPINYMKKPLGPPPPSYTCFRCGKPGHYIKNCPTNGDKNFESGPRIKKSTGIPRSFMMEVKDPNMKGAMLTNTGKYAIPTIDAEAYAIGKKEKPPFLPEEPSSSSEEDDPIPDELLCLICKDIMTDAVVIPCCGNSYCDECIRTALLESDEHTCPTCH

SEQ ID NO: 72876 - protein, 158 aa, Homo sapiens
  Payload ID: 14436
  Gene Symbol: RBBP6
  Gene Name: retinoblastoma binding protein 6
  ENSP ID: ENSP00000460821
MSCVHYKFSSKLNYDTVTFDGLHISLCDLKKQIMGREKLKAADCDLQITNAQTKEEYTDDNALIPKNSSVIVRRIPIGGVKSTSKTYVISRTEPAMATTKAIDDSSASISLAQLTKTANLAEANASEEDKIKAMMSQSGHEYDPINYMKKPLGPPPPS

SEQ ID NO: 72877 - protein, 138 aa, Homo sapiens
  Payload ID: 14436
  Gene Symbol: RBBP6
  Gene Name: retinoblastoma binding protein 6
  ENSP ID: ENSP00000481477
  MOD_RES (1)..(1): Any amino acid
XKPLGPPPPSYTCFRCGKPGHYIKNCPTNGDKNFESGPRIKKSTGIPRSFMMEVKDPNMKGAMLTNTGKYAIPTIDAEAYAIGKKEKPPFLPEEPSSSSEEDDPIPDELLCLICKDIMTDAVVIPCCGNSYCDECKKC

SEQ ID NO: 72878 - protein, 469 aa, Homo sapiens
  Payload ID: 14437
  Gene Symbol: RBBP7
  Gene Name: retinoblastoma binding protein 7
  Uniprot ID: Q16576
  ENSP ID: ENSP00000369424
MAAEAGVVGAGASPDGDWRDQACGLLLHVHLSSRLGRAAPVRTGRHLRTVFEDTVEERVINEEYKIWKKNTPFLYDLVMTHALQWPSLTVQWLPEVTKPEGKDYALHWLVLGTHTSDEQNHLVVARVHIPNDDAQFDASHCDSDKGEFGGFGSVTGKIECEIKINHEGEVNRARYMPQNPHIIATKTPSSDVLVFDYTKHPAKPDPSGECNPDLRLRGHQKEGYGLSWNSNLSGHLLSASDDHTVCLWDINAGPKEGKIVDAKAIFTGHSAVVEDVAWHLLHESLFGSVADDQKLMIWDTRSNTTSKPSHLVDAHTAEVNCLSFNPYSEFILATGSADKTVALWDLRNLKLKLHTFESHKDEIFQVHWSPHNETILASSGTDRRLNVWDLSKIGEEQSAEDAEDGPPELLFIHGGHTAKISDFSWNPNEPWVICSVSEDNIMQIWQMAENIYNDEESDVTTSELEGQGS

SEQ ID NO: 72879 - protein, 425 aa, Homo sapiens
  Payload ID: 14437
  Gene Symbol: RBBP7
  Gene Name: retinoblastoma binding protein 7
  Uniprot ID: Q16576
  ENSP ID: ENSP00000369427
MASKEMFEDTVEERVINEEYKIWKKNTPFLYDLVMTHALQWPSLTVQWLPEVTKPEGKDYALHWLVLGTHTSDEQNHLVVARVHIPNDDAQFDASHCDSDKGEFGGFGSVTGKIECEIKINHEGEVNRARYMPQNPHIIATKTPSSDVLVFDYTKHPAKPDPSGECNPDLRLRGHQKEGYGLSWNSNLSGHLLSASDDHTVCLWDINAGPKEGKIVDAKAIFTGHSAVVEDVAWHLLHESLFGSVADDQKLMIWDTRSNTTSKPSHLVDAHTAEVNCLSFNPYSEFILATGSADKTVALWDLRNLKLKLHTFESHKDEIFQVHWSPHNETILASSGTDRRLNVWDLSKIGEEQSAEDAEDGPPELLFIHGGHTAKISDFSWNPNEPWVICSVSEDNIMQIWQMAENIYNDEESDVTTSELEGQGS

SEQ ID NO: 72880 - protein, 416 aa, Homo sapiens
  Payload ID: 14437
  Gene Symbol: RBBP7
  Gene Name: retinoblastoma binding protein 7
  ENSP ID: ENSP00000386068
MASKEMFEDTVEERVINEEYKIWKKNTPFLYDLVMTHALQWPSLTVQWLPEVTKPEGKDYALHWLVLGTHTSDEQNHLVVARVHIPNDDAQFDASHCDSDKGGKIECEIKINHEGEVNRARYMPQNPHIIATKTPSSDVLVFDYTKHPAKPDPSGECNPDLRLRGHQKEGYGLSWNSNLSGHLLSASDDHTVCLWDINAGPKEGKIVDAKAIFTGHSAVVEDVAWHLLHESLFGSVADDQKLMIWDTRSNTTSKPSHLVDAHTAEVNCLSFNPYSEFILATGSADKTVALWDLRNLKLKLHTFESHKDEIFQVHWSPHNETILASSGTDRRLNVWDLSKIGEEQSAEDAEDGPPELLFIHGGHTAKISDFSWNPNEPWVICSVSEDNIMQIWQMAENIYNDEESDVTTSELEGQGS

SEQ ID NO: 72881 - protein, 285 aa, Homo sapiens
  Payload ID: 14437
  Gene Symbol: RBBP7
  Gene Name: retinoblastoma binding protein 7
  ENSP ID: ENSP00000392714
ARVHIPNDDAQFDASHCDSDKGEFGGFGSVTGKIECEIKINHEGEVNRARYMPQNPHIIATKTPSSDVLVFDYTKHPAKPDPSGECNPDLRLRGHQKEGYGLSWNSNLSGHLLSASDDHTVCLWDINAGPKEGKIVDAKAIFTGHSAVVEDVAWHLLHESLFGSVADDQKLMIWDTRSNTTSKPSHLVDAHTAEVNCLSFNPYSEFILATGSADKVCDSFLVSVCQEMKSRDSSVKLYQTRGSTIEKNVLYVVLHGDAHRVHWSPHNETILASSGTDRRLNVWDL

SEQ ID NO: 72882 - protein, 175 aa, Homo sapiens
  Payload ID: 14437
  Gene Symbol: RBBP7
  Gene Name: retinoblastoma binding protein 7
  ENSP ID: ENSP00000402796
DDHTVCLWDINAGPKEGKIVDAKAIFTGHSAVVEDVAWHLLHESLFGSVADDQKLMIWDTRSNTTSKPSHLVDAHTAEVNCLSFNPYSEFILATGSADKTVALWDLRNLKLKLHTFESHKDEIFQVHWSPHNETILASSGTDRRLNVWDLSKIGEEQSAEDAEDGPPELLVRIGL

SEQ ID NO: 72883 - protein, 85 aa, Homo sapiens
  Payload ID: 14437
  Gene Symbol: RBBP7
  Gene Name: retinoblastoma binding protein 7
  ENSP ID: ENSP00000415747
LNVWDLSKIGEEQSAEDAEDGPPELLFIHGGHTAKISDFSWNPNEPWVICSVSEDNIMQIWQMAENIYNDEESDVTTSELEGQGS

SEQ ID NO: 72884 - protein, 37 aa, Homo sapiens
  Payload ID: 14437
  Gene Symbol: RBBP7
  Gene Name: retinoblastoma binding protein 7
  ENSP ID: ENSP00000417507
MAMFEDTVEERVINEEYKIWKKNTPFLYDLVMTHALQ

SEQ ID NO: 72885 - protein, 67 aa, Homo sapiens
  Payload ID: 14437
  Gene Symbol: RBBP7
  Gene Name: retinoblastoma binding protein 7
  ENSP ID: ENSP00000417791
MTHALQWPSLTVQWLPEVTKPEGKDYALHWLVLGTHTSDEQNHLVVARVHIPNDDAQFDASHCDSDK

SEQ ID NO: 72886 - protein, 897 aa, Homo sapiens
  Payload ID: 14438
  Gene Symbol: RBBP8
  Gene Name: retinoblastoma binding protein 8
  Uniprot ID: Q99708
  ENSP ID: ENSP00000323050
MNISGSSCGSPNSADTSSDFKDLWTKLKECHDREVQGLQVKVTKLKQERILDAQRLEEFFTKNQQLREQQKVLHETIKVLEDRLRAGLCDRCAVTEEHMRKKQQEFENIRQQNLKLITELMNERNTLQEENKKLSEQLQQKIENDQQHQAAELECEEDVIPDSPITAFSFSGVNRLRRKENPHVRYIEQTHTKLEHSVCANEMRKVSKSSTHPQHNPNENEILVADTYDQSQSPMAKAHGTSSYTPDKSSFNLATVVAETLGLGVQEESETQGPMSPLGDELYHCLEGNHKKQPFEESTRNTEDSLRFSDSTSKTPPQEELPTRVSSPVFGATSSIKSGLDLNTSLSPSLLQPGKKKHLKTLPFSNTCISRLEKTRSKSEDSALFTHHSLGSEVNKIIIQSSNKQILINKNISESLGEQNRTEYGKDSNTDKHLEPLKSLGGRTSKRKKTEEESEHEVSCPQASFDKENAFPFPMDNQFSMNGDCVMDKPLDLSDRFSAIQRQEKSQGSETSKNKFRQVTLYEALKTIPKGFSSSRKASDGNCTLPKDSPGEPCSQECIILQPLNKCSPDNKPSLQIKEENAVFKIPLRPRESLETENVLDDIKSAGSHEPIKIQTRSDHGGCELASVLQLNPCRTGKIKSLQNNQDVSFENIQWSIDPGADLSQYKMDVTVIDTKDGSQSKLGGETVDMDCTLVSETVLLKMKKQEQKGEKSSNEERKMNDSLEDMFDRTTHEEYESCLADSFSQAADEEEELSTATKKLHTHGDKQDKVKQKAFVEPYFKGDERETSLQNFPHIEVVRKKEERRKLLGHTCKECEIYYADMPAEEREKKLASCSRHRFRYIPPNTPENFWEVGFPSTQTCMERGYIKEDLDPCPRPKRRQPYNAIFSPKGKEQKT

SEQ ID NO: 72887 - protein, 902 aa, Homo sapiens
  Payload ID: 14438
  Gene Symbol: RBBP8
  Gene Name: retinoblastoma binding protein 8
  ENSP ID: ENSP00000354024
MNISGSSCGSPNSADTSSDFKDLWTKLKECHDREVQGLQVKVTKLKQERILDAQRLEEFFTKNQQLREQQKVLHETIKVLEDRLRAGLCDRCAVTEEHMRKKQQEFENIRQQNLKLITELMNERNTLQEENKKLSEQLQQKIENDQQHQAAELECEEDVIPDSPITAFSFSGVNRLRRKENPHVRYIEQTHTKLEHSVCANEMRKVSKSSTHPQHNPNENEILVADTYDQSQSPMAKAHGTSSYTPDKSSFNLATVVAETLGLGVQEESETQGPMSPLGDELYHCLEGNHKKQPFEESTRNTEDSLRFSDSTSKTPPQEELPTRVSSPVFGATSSIKSGLDLNTSLSPSLLQPGKKKHLKTLPFSNTCISRLEKTRSKSEDSALFTHHSLGSEVNKIIIQSSNKQILINKNISESLGEQNRTEYGKDSNTDKHLEPLKSLGGRTSKRKKTEEESEHEVSCPQASFDKENAFPFPMDNQFSMNGDCVMDKPLDLSDRFSAIQRQEKSQGSETSKNKFRQVTLYEALKTIPKGFSSSRKASDGNCTLPKDSPGEPCSQECIILQPLNKCSPDNKPSLQIKEENAVFKIPLRPRESLETENVLDDIKSAGSHEPIKIQTRSDHGGCELASVLQLNPCRTGKIKSLQNNQDVSFENIQWSIDPGADLSQYKMDVTVIDTKDGSQSKLGGETVDMDCTLVSETVLLKMKKQEQKGEKSSMLFYIDEERKMNDSLEDMFDRTTHEEYESCLADSFSQAADEEEELSTATKKLHTHGDKQDKVKQKAFVEPYFKGDERETSLQNFPHIEVVRKKEERRKLLGHTCKECEIYYADMPAEEREKKLASCSRHRFRYIPPNTPENFWEVGFPSTQTCMERGYIKEDLDPCPRPKRRQPYNAIFSPKGKEQKT

SEQ ID NO: 72888 - protein, 580 aa, Homo sapiens
  Payload ID: 14438
  Gene Symbol: RBBP8
  Gene Name: retinoblastoma binding protein 8
  ENSP ID: ENSP00000382627
MNISGSSCGSPNSADTSSDFKDLWTKLKECHDREVQGLQVKVTKLKQERILDAQRLEEFFTKNQQLREQQKVLHETIKVLEDRLRAGLCDRCAVTEEHMRKKQQEFENIRQQNLKLITELMNERNTLQEENKKLSEQLQQKIENDQQHQAAELECEEDVIPDSPITAFSFSGVNRLRRKENPHVRYIEQTHTKLEHSVCANEMRKVSKSSTHPQHNPNENEILVADTYDQSQSPMAKAHGTSSYTPDKSSFNLATVVAETLGLGVQEESETQGPMSPLGDELYHCLEGNHKKQPFEESTRNTEDSLRFSDSTSKTPPQEELPTRVSSPVFGATSSIKSGLDLNTSLSPSLLQPGKKKHLKTLPFSNTCISRLEKTRSKSEDSALFTHHSLGSEVNKIIIQSSNKQILINKNISESLGEQNRTEYGKDSNTDKHLEPLKSLGGRTSKRKKTEEESEHEVSCPQASFDKENAFPFPMDNQFSMNGDCVMDKPLDLSDRFSAIQRQEKSQGSETSKNKFRQVTLYEALKTIPKGFSSSRKASDGNCTLPKDSPGEPCSQECIILQPLNKCSPDNKPSLQIKEE

SEQ ID NO: 72889 - protein, 897 aa, Homo sapiens; identical to SEQ ID NO: 72886
  Payload ID: 14438
  Gene Symbol: RBBP8
  Gene Name: retinoblastoma binding protein 8
  Uniprot ID: Q99708
  ENSP ID: ENSP00000382628

SEQ ID NO: 72890 - protein, 867 aa, Homo sapiens
  Payload ID: 14438
  Gene Symbol: RBBP8
  Gene Name: retinoblastoma binding protein 8
  Uniprot ID: Q99708
  ENSP ID: ENSP00000382630
MNISGSSCGSPNSADTSSDFKDLWTKLKECHDREVQGLQVKVTKLKQERILDAQRLEEFFTKNQQLREQQKVLHETIKVLEDRLRAGLCDRCAVTEEHMRKKQQEFENIRQQNLKLITELMNERNTLQEENKKLSEQLQQKIENDQQHQAAELECEEDVIPDSPITAFSFSGVNRLRRKENPHVRYIEQTHTKLEHSVCANEMRKVSKSSTHPQHNPNENEILVADTYDQSQSPMAKAHGTSSYTPDKSSFNLATVVAETLGLGVQEESETQGPMSPLGDELYHCLEGNHKKQPFEESTRNTEDSLRFSDSTSKTPPQEELPTRVSSPVFGATSSIKSGLDLNTSLSPSLLQPGKKKHLKTLPFSNTCISRLEKTRSKSEDSALFTHHSLGSEVNKIIIQSSNKQILINKNISESLGEQNRTEYGKDSNTDKHLEPLKSLGGRTSKRKKTEEESEHEVSCPQASFDKENAFPFPMDNQFSMNGDCVMDKPLDLSDRFSAIQRQEKSQGSETSKNKFRQVTLYEALKTIPKGFSSSRKASDGNCTLPKDSPGEPCSQECIILQPLNKCSPDNKPSLQIKEENAVFKIPLRPRESLETENVLDDIKSAGSHEPIKIQTRSDHGGCELASVLQLNPCRTGKIKSLQNNQDVSFENIQWSIDPGADLSQYKMDVTVIDTKDGSQSKLGGETVDMDCTLVSETVLLKMKKQEQKGEKSSNEERKMNDSLEDMFDRTTHEEYESCLADSFSQAADEEEELSTATKKLHTHGDKQDKVKQKAFVEPYFKGDESIMQICQQKKEKRNWLPAQDTDSATFHPTHQRIFGKLVFLPLRLVWKEVILRKILILVLVQKDVSLTTQYFLQKARSRRHRR

SEQ ID NO: 72891 - protein, 64 aa, Homo sapiens
  Payload ID: 14438
  Gene Symbol: RBBP8
  Gene Name: retinoblastoma binding protein 8
  ENSP ID: ENSP00000462390
MNISGSSCGSPNSADTSSDFKDLWTKLKECHDREVQGLQVKVTKLKQERILDAQRLEEFFTKNQ

SEQ ID NO: 72892 - protein, 160 aa, Homo sapiens
  Payload ID: 14438
  Gene Symbol: RBBP8
  Gene Name: retinoblastoma binding protein 8
  ENSP ID: ENSP00000463310
  MOD_RES (1)..(1): Any amino acid
XEEHMRKKQQEFENIRQQNLKLITELMNERNTLQEENKKLSEQLQQKIENDQQHQAAELECEEDVIPDSPITAFSFSGVNRLRRKENPHVRYIEQTHTKLEHSVCANEMRKVSKSSTHPQHNPNENEILVADTYDQSQSPMATTVVAETLGLGVQEESET

SEQ ID NO: 72893 - protein, 84 aa, Homo sapiens
  Payload ID: 14438
  Gene Symbol: RBBP8
  Gene Name: retinoblastoma binding protein 8
  ENSP ID: ENSP00000463439
MNISGSSCGSPNSADTSSDFKDLWTKLKECHDREVQGLQVKVTKLKQERILDAQRLEEFFTKNQQLREQQKVLHETIKVLEDRL

SEQ ID NO: 72894 - protein, 75 aa, Homo sapiens
  Payload ID: 14438
  Gene Symbol: RBBP8
  Gene Name: retinoblastoma binding protein 8
  ENSP ID: ENSP00000463544
MPAEEREKKLASCSRHRFRYIPPNTPENFWEVGFPSTQTCMERGYIKEDLDPCPRPKRRQPYNAIFSPKGKEQKT

SEQ ID NO: 72895 - protein, 205 aa, Homo sapiens
  Payload ID: 14438
  Gene Symbol: RBBP8
  Gene Name: retinoblastoma binding protein 8
  ENSP ID: ENSP00000463738
MNISGSSCGSPNSADTSSDFKDLWTKLKECHDREVQGLQVKVTKLKQERILDAQRLEEFFTKNQQLREQQKVLHETIKVLEDRLRAGLCDRCAVTEEHMRKKQQEFENIRQQNLKLITELMNERNTLQEENKKLSEQLQQKIENDQQHQAAELECEEDVIPDSPITAFSFSGVNRLRRKENPHVRYIEQTHTKLEHSVCANEMRK

SEQ ID NO: 72896 - protein, 29 aa, Homo sapiens
  Payload ID: 14438
  Gene Symbol: RBBP8
  Gene Name: retinoblastoma binding protein 8
  ENSP ID: ENSP00000464284
MNISGSSCGSPNSADTSSDFKDLWTKLKE

SEQ ID NO: 72897 - protein, 10 aa, Homo sapiens
  Payload ID: 14438
  Gene Symbol: RBBP8
  Gene Name: retinoblastoma binding protein 8
  ENSP ID: ENSP00000464628
MNISGSSCGS

SEQ ID NO: 72898 - protein, 324 aa, Homo sapiens
  Payload ID: 14438
  Gene Symbol: RBBP8
  Gene Name: retinoblastoma binding protein 8
  ENSP ID: ENSP00000464691
PCSQECIILQPLNKCSPDNKPSLQIKEENAVFKIPLRPRESLETENVLDDIKSAGSHEPIKIQTRSDHGGCELASVLQLNPCRTGKIKSLQNNQDVSFENIQWSIDPGADLSQYKMDVTVIDTKDGSQSKLGGETVDMDCTLVSETVLLKMKKQEQKGEKSSNEERKMNDSLEDMFDRTTHEEYESCLADSFSQAADEEEELSTATKKLHKRLACKIFLILRWFGKKRREENCLGTRVRNVKFIMQICQQKKEKRNWLPAQDTDSATFHPTHQRIFGKLVFLPLRLVWKEVILRKILILVLVQKDVSLTTQYFLQKARSRRHRR

SEQ ID NO: 72899 - protein, 45 aa, Homo sapiens
  Payload ID: 14438
  Gene Symbol: RBBP8
  Gene Name: retinoblastoma binding protein 8
  ENSP ID: ENSP00000477396
  MOD_RES (1)..(1): Any amino acid
XNKKLSEQLQQKIETILSKSLLLCYLTTLLIHEDSYHGPPESCFL

SEQ ID NO: 72900 - protein, 186 aa, Homo sapiens
  Payload ID: 14439
  Gene Symbol: RBBP9
  Gene Name: retinoblastoma binding protein 9
  Uniprot ID: O75884
  ENSP ID: ENSP00000336866
MASPSKAVIVPGNGGGDVTTHGWYGWVKKELEKIPGFQCLAKNMPDPITARESIWLPFMETELHCDEKTIIIGHSSGAIAAMRYAETHRVYAIVLVSAYTSDLGDENERASGYFTRPWQWEKIKANCPYIVQFGSTDDPFLPWKEQQEVADRLETKLHKFTDCGHFQNTEFHELITVVKSLLKVPA

SEQ ID NO: 72901 - protein, 173 aa, Homo sapiens
  Payload ID: 14439
  Gene Symbol: RBBP9
  Gene Name: retinoblastoma binding protein 9
  ENSP ID: ENSP00000482005
MASPSKAVIVPGNGGGDVTTHGWYGWVKKELEKIPGFQCLAKNMPDPITARESIWLPFMETELHCDEKTIIIGHSSGAIAAMRYAETHRVYAIVLVSAYTSDLGDENERASGYFTRPWQWEKIKANCPYIVQFGSTDDPFLPWKEQQEVADRWKPNCTNSLTVATFRTQSFMN

SEQ ID NO: 72902 - protein, 1014 aa, Homo sapiens
  Payload ID: 14440
  Gene Symbol: RBL1
  Gene Name: retinoblastoma-like 1
  Uniprot ID: P28749
  ENSP ID: ENSP00000343646
MFEDKPHAEGAAVVAAAGEALQALCQELNLDEGSAAEALDDFTAIRGNYSLEGEVTHWLACSLYVACRKSIIPTVGKGIMEGNCVSLTRILRSAKLSLIQFFSKMKKWMDMSNLPQEFRERIERLERNFEVSTVIFKKYEPIFLDIFQNPYEEPPKLPRSRKQRRIPCSVKDLFNFCWTLFVYTKGNFRMIGDDLVNSYHLLLCCLDLIFANAIMCPNRQDLLNPSFKGLPSDFHTADFTASEEPPCIIAVLCELHDGLLVEAKGIKEHYFKPYISKLFDRKILKGECLLDLSSFTDNSKAVNKEYEEYVLTVGDFDERIFLGADAEEEIGTPRKFTRDTPLGKLTAQANVEYNLQQHFEKKRSFAPSTPLTGRRYLREKEAVITPVASATQSVSRLQSIVAGLKNAPSDQLINIFESCVRNPVENIMKILKGIGETFCQHYTQSTDEQPGSHIDFAVNRLKLAEILYYKILETVMVQETRRLHGMDMSVLLEQDIFHRSLMACCLEIVLFAYSSPRTFPWIIEVLNLQPFYFYKVIEVVIRSEEGLSRDMVKHLNSIEEQILESLAWSHDSALWEALQVSANKVPTCEEVIFPNNFETGNGGNVQGHLPLMPMSPLMHPRVKEVRTDSGSLRRDMQPLSPISVHERYSSPTAGSAKRRLFGEDPPKEMLMDKIITEGTKLKIAPSSSITAENVSILPGQTLLTMATAPVTGTTGHKVTIPLHGVANDAGEITLIPLSMNTNQESKVKSPVSLTAHSLIGASPKQTNLTKAQEVHSTGINRPKRTGSLALFYRKVYHLASVRLRDLCLKLDVSNELRRKIWTCFEFTLVHCPDLMKDRHLDQLLLCAFYIMAKVTKEERTFQEIMKSYRNQPQANSHVYRSVLLKSIPREVVAYNKNINDDFEMIDCDLEDATKTPDCSSGPVKEERGDLIKFYNTIYVGRVKSFALKYDLANQDHMMDAPPLSPFPHIKQQPGSPRRISQQHSIYISPHKNGSGLTPRSALLYKFNGSPSKVR

SEQ ID NO: 72903 - protein, 1068 aa, Homo sapiens
  Payload ID: 14440
  Gene Symbol: RBL1
  Gene Name: retinoblastoma-like 1
  Uniprot ID: P28749
  ENSP ID: ENSP00000362768
MFEDKPHAEGAAVVAAAGEALQALCQELNLDEGSAAEALDDFTAIRGNYSLEGEVTHWLACSLYVACRKSIIPTVGKGIMEGNCVSLTRILRSAKLSLIQFFSKMKKWMDMSNLPQEFRERIERLERNFEVSTVIFKKYEPIFLDIFQNPYEEPPKLPRSRKQRRIPCSVKDLFNFCWTLFVYTKGNFRMIGDDLVNSYHLLLCCLDLIFANAIMCPNRQDLLNPSFKGLPSDFHTADFTASEEPPCIIAVLCELHDGLLVEAKGIKEHYFKPYISKLFDRKILKGECLLDLSSFTDNSKAVNKEYEEYVLTVGDFDERIFLGADAEEEIGTPRKFTRDTPLGKLTAQANVEYNLQQHFEKKRSFAPSTPLTGRRYLREKEAVITPVASATQSVSRLQSIVAGLKNAPSDQLINIFESCVRNPVENIMKILKGIGETFCQHYTQSTDEQPGSHIDFAVNRLKLAEILYYKILETVMVQETRRLHGMDMSVLLEQDIFHRSLMACCLEIVLFAYSSPRTFPWIIEVLNLQPFYFYKVIEVVIRSEEGLSRDMVKHLNSIEEQILESLAWSHDSALWEALQVSANKVPTCEEVIFPNNFETGNGGNVQGHLPLMPMSPLMHPRVKEVRTDSGSLRRDMQPLSPISVHERYSSPTAGSAKRRLFGEDPPKEMLMDKIITEGTKLKIAPSSSITAENVSILPGQTLLTMATAPVTGTTGHKVTIPLHGVANDAGEITLIPLSMNTNQESKVKSPVSLTAHSLIGASPKQTNLTKAQEVHSTGINRPKRTGSLALFYRKVYHLASVRLRDLCLKLDVSNELRRKIWTCFEFTLVHCPDLMKDRHLDQLLLCAFYIMAKVTKEERTFQEIMKSYRNQPQANSHVYRSVLLKSIPREVVAYNKNINDDFEMIDCDLEDATKTPDCSSGPVKEERGDLIKFYNTIYVGRVKSFALKYDLANQDHMMDAPPLSPFPHIKQQPGSPRRISQQHSIYISPHKNGSGLTPRSALLYKFNGSPSKSLKDINNMIRQGEQRTKKRVIAIDSDAESPAKRVCQENDDVLLKRLQDVVSERANH

SEQ ID NO: 72904 - protein, 254 aa, Homo sapiens
  Payload ID: 14440
  Gene Symbol: RBL1
  Gene Name: retinoblastoma-like 1
  ENSP ID: ENSP00000434711
  MOD_RES (1)..(1): Any amino acid
XIFLDIFQNPYEEPPKLPRSRKQRQDLLNPSFKGLPSDFHTADFTASEEPPCIIAVLCELHDGLLVEAKGIKEHYFKPYISKLFDRKILKGECLLDLSSFTDNSKAVNKEYEEYVLTVGDFDERIFLGADAEEEIGTPRKFTRDTPLGKLTAQANVEYNLQQHFEKKRSFAPSTPLTGRRYLREKEAVITPVASATQSVSRLQSIVAGLKNAPSDQLINIFESCVRNPVENIMKILKGIGETFCQHYTQSTDEQ

SEQ ID NO: 72905 - protein, 113 aa, Homo sapiens
  Payload ID: 14440
  Gene Symbol: RBL1
  Gene Name: retinoblastoma-like 1
  ENSP ID: ENSP00000437240
MFEDKPHAEGAAVVAAAGEALQALCQELNLDEGSAAEALDDFTAIRGNYSLEGEVTHWLACSLYVACRKSIIPTVGKGIMEGNCVSLTRILRSAKLRGCCCPMSPGQLTFWQP

SEQ ID NO: 72906 - protein, 1139 aa, Homo sapiens
  Payload ID: 14441
  Gene Symbol: RBL2
  Gene Name: retinoblastoma-like 2
  Uniprot ID: Q08999
  ENSP ID: ENSP00000262133
MPSGGDQSPPPPPPPPAAAASDEEEEDDGEAEDAAPPAESPTPQIQQRFDELCSRLNMDEAARAEAWDSYRSMSESYTLEGNDLHWLACALYVACRKSVPTVSKGTVEGNYVSLTRILKCSEQSLIEFFNKMKKWEDMANLPPHFRERTERLERNFTVSAVIFKKYEPIFQDIFKYPQEEQPRQQRGRKQRRQPCTVSEIFHFCWVLFIYAKGNFPMISDDLVNSYHLLLCALDLVYGNALQCSNRKELVNPNFKGLSEDFHAKDSKPSSDPPCIIEKLCSLHDGLVLEAKGIKEHFWKPYIRKLYEKKLLKGKEENLTGFLEPGNFGESFKAINKAYEEYVLSVGNLDERIFLGEDAEEEIGTLSRCLNAGSGTETAERVQMKNILQQHFDKSKALRISTPLTGVRYIKENSPCVTPVSTATHSLSRLHTMLTGLRNAPSEKLEQILRTCSRDPTQAIANRLKEMFEIYSQHFQPDEDFSNCAKEIASKHFRFAEMLYYKVLESVIEQEQKRLGDMDLSGILEQDAFHRSLLACCLEVVTFSYKPPGNFPFITEIFDVPLYHFYKVIEVFIRAEDGLCREVVKHLNQIEEQILDHLAWKPESPLWEKIRDNENRVPTCEEVMPPQNLERADEICIAGSPLTPRRVTEVRADTGGLGRSITSPTTLYDRYSSPPASTTRRRLFVENDSPSDGGTPGRMPPQPLVNAVPVQNVSGETVSVTPVPGQTLVTMATATVTANNGQTVTIPVQGIANENGGITFFPVQVNVGGQAQAVTGSIQPLSAQALAGSLSSQQVTGTTLQVPGQVAIQQISPGGQQQKQGQSVTSSSNRPRKTSSLSLFFRKVYHLAAVRLRDLCAKLDISDELRKKIWTCFEFSIIQCPELMMDRHLDQLLMCAIYVMAKVTKEDKSFQNIMRCYRTQPQARSQVYRSVLIKGKRKRRNSGSSDSRSHQNSPTELNKDRTSRDSSPVMRSSSTLPVPQPSSAPPTPTRLTGANSDMEEEERGDLIQFYNNIYIKQIKTFAMKYSQANMDAPPLSPYPFVRTGSPRRIQLSQNHPVYISPHKNETMLSPREKIFYYFSNSPSKRLREINSMIRTGETPTKKRGILLEDGSESPAKRICPENHSALLRRLQDVANDRGSH

SEQ ID NO: 72907 - protein, 639 aa, Homo sapiens
  Payload ID: 14441
  Gene Symbol: RBL2
  Gene Name: retinoblastoma-like 2
  ENSP ID: ENSP00000443744
MQSLTKGNDLHWLACALYVACRKSVPTVSKGTVEGNYVSLTRILKCSEQSLIEFFNKMKKWEDMANLPPHFRERTERLERNFTVSAVIFKKYEPIFQDIFKYPQEEQPRQQRGRKQRRQPCTVSEIFHFCWVLFIYAKGNFPMISDDLVNSYHLLLCALDLVYGNALQCSNRKELVNPNFKGLSEDFHAKDSKPSSDPPCIIEKLCSLHDGLVLEAKGIKEHFWKPYIRKLYEKKLLKGKEENLTGFLEPGNFGESFKAINKAYEEYVLSVGNLDERIFLGEDAEEEIGTLSRCLNAGSGTETAERVQMKNILQQHFDKSKALRISTPLTGVRYIKENSPCVTPVSTATHSLSRLHTMLTGLRNAPSEKLEQILRTCSRDPTQAIANRLKEMFEIYSQHFQPDEDFSNCAKEIASKHFRFAEMLYYKVLESVIEQEQKRLGDMDLSGILEQDAFHRSLLACCLEVVTFSYKPPGNFPFITEIFDVPLYHFYKVIEVFIRAEDGLCREVVKHLNQIEEQILDHLAWKPESPLWEKIRDNENRVPTCEEVMPPQNLERADEICIAGSPLTPRRVTEVRADTGGLGRSITSPTTLYDRYSSPPASTTRRRLFVENDSPSDGGTPGRMPPQPLVNAVPVQNVS

SEQ ID NO: 72908 - protein, 849 aa, Homo sapiens
  Payload ID: 14441
  Gene Symbol: RBL2
  Gene Name: retinoblastoma-like 2
  ENSP ID: ENSP00000444685
MESRCVAQAGMQWHDLGSLQPLPPRFKRFFCLSLLSSCEYSKAINKAYEEYVLSVGNLDERIFLGEDAEEEIGTLSRCLNAGSGTETAERVQMKNILQQHFDKSKALRISTPLTGVRYIKENSPCVTPVSTATHSLSRLHTMLTGLRNAPSEKLEQILRTCSRDPTQAIANRLKEMFEIYSQHFQPDEDFSNCAKEIASKHFRFAEMLYYKVLESVIEQEQKRLGDMDLSGILEQDAFHRSLLACCLEVVTFSYKPPGNFPFITEIFDVPLYHFYKVIEVFIRAEDGLCREVVKHLNQIEEQILDHLAWKPESPLWEKIRDNENRVPTCEEVMPPQNLERADEICIAGSPLTPRRVTEVRADTGGLGRSITSPTTLYDRYSSPPASTTRRRLFVENDSPSDGGTPGRMPPQPLVNAVPVQNVSGETVSVTPVPGQTLVTMATATVTANNGQTVTIPVQGIANENGGITFFPVQVNVGGQAQAVTGSIQPLSAQALAGSLSSQQVTGTTLQVPGQVAIQQISPGGQQQKQGQSVTSSSNRPRKTSSLSLFFRKVYHLAAVRLRDLCAKLDISDELRKKIWTCFEFSIIQCPELMMDRHLDQLLMCAIYVMAKVTKEDKSFQNIMRCYRTQPQARSQVYRSVLIKGKRKRRNSGSSDSRSHQNSPTELNKDRTSRDSSPVMRSSSTLPVPQPSSAPPTPTRLTGANSDMEEEERGDLIQFYNNIYIKQIKTFAMKYSQANMDAPPLSPYPFVRTGSPRRIQLSQNHPVYISPHKNETMLSPREKIFYYFSNSPSKRLREINSMIRTGETPTKKRGILLEDGSESPAKRICPENHSALLRRLQDVANDRGSH

SEQ ID NO: 72909 - protein, 128 aa, Homo sapiens
  Payload ID: 14441
  Gene Symbol: RBL2
  Gene Name: retinoblastoma-like 2
  ENSP ID: ENSP00000462464
MKKWEDMANLPPHFRERTERLERNFTVSAVIFKKYEPIFQDIFKYPQEEQPRQQRGRKQRRQPCTVSEIFHFCWVLFIYAKGNFPMISDDLVNSYHLLLCALDLVYGNALQCSNRKELVNPNFKGLSE

SEQ ID NO: 72910 - protein, 263 aa, Homo sapiens
  Payload ID: 14442
  Gene Symbol: RAET1E
  Gene Name: retinoic acid early transcript 1E
  Uniprot ID: Q8TD07
  ENSP ID: ENSP00000349709
MRRISLTSSPVRLLLFLLLLLIALEIMVGGHSLCFNFTIKSLSRPGQPWCEAQVFLNKNLFLQYNSDNNMVKPLGLLGKKVYATSTWGELTQTLGEVGRDLRMLLCDIKPQIKTSDPSTLQVEMFCQREAERCTGASWQFATNGEKSLLFDAMNMTWTVINHEASKIKETWKKDRGLEKYFRKLSKGDCDHWLREFLGHWEAMPEPTVSPVNASDIHWSSSSLPDRWIILGAFILLVLMGIVLICVWWQNGEWQAGLWPLRTS

SEQ ID NO: 72911 - protein, 227 aa, Homo sapiens
  Payload ID: 14442
  Gene Symbol: RAET1E
  Gene Name: retinoic acid early transcript 1E
  Uniprot ID: Q8TD07
  ENSP ID: ENSP00000356332
MRRISLTSSPVRLLLFLLLLLIALEIMYNSDNNMVKPLGLLGKKVYATSTWGELTQTLGEVGRDLRMLLCDIKPQIKTSDPSTLQVEMFCQREAERCTGASWQFATNGEKSLLFDAMNMTWTVINHEASKIKETWKKDRGLEKYFRKLSKGDCDHWLREFLGHWEAMPEPTVSPVNASDIHWSSSSLPDRWIILGAFILLVLMGIVLICVWWQNGEWQAGLWPLRTS

SEQ ID NO: 72912 - protein, 117 aa, Homo sapiens
  Payload ID: 14442
  Gene Symbol: RAET1E
  Gene Name: retinoic acid early transcript 1E
  ENSP ID: ENSP00000376096
MRRISLTSSPVRLLLFLLLLLIALEIMVGGHSLCFNFTIKSLSRPGQPWCEAQVFLNKNLFLQYNSDNNMVKPLGLLGKKILPLCKSRCFVNVKQNGALVHPGSSPPMERNPSSLTQ

SEQ ID NO: 72913 - protein, 209 aa, Homo sapiens
  Payload ID: 14442
  Gene Symbol: RAET1E
  Gene Name: retinoic acid early transcript 1E
  Uniprot ID: Q8TD07
  ENSP ID: ENSP00000432366
MRRISLTSSPVRLLLFLLLLLIALEIMVGGHSLCFNFTIKSLSRPGQPWCEAQVFLNKNLFLQYNSDNNMVKPLGLLGKKVYATSTWGELTQTLGEVGRDLRMLLCDIKPQIKTSDPSTLQVEMFCQREAERCTGASWQFATNGEKSLLFDAMNMTWTVINHEASKIKETWKKDRGLEKYFRKLSKGDCDHWLREFLGHWEAMPEPTGN

SEQ ID NO: 72914 - protein, 80 aa, Homo sapiens
  Payload ID: 14442
  Gene Symbol: RAET1E
  Gene Name: retinoic acid early transcript 1E
  ENSP ID: ENSP00000433489
MRRISLTSSPVRLLLFLLLLLIALEIMVGGHSLCFNFTIKSLSRPGQPWCEAQVFLNKNLFLQYNSDNNMVKPLGLLGKK

SEQ ID NO: 72915 - protein, 212 aa, Homo sapiens
  Payload ID: 14442
  Gene Symbol: RAET1E
  Gene Name: retinoic acid early transcript 1E
  Uniprot ID: Q8TD07
  ENSP ID: ENSP00000437067
MRRISLTSSPVRLLLFLLLLLIALEIMVGGHSLCFNFTIKSLSRPGQPWCEAQVFLNKNLFLQYNSDNNMVKPLGLLGKKVYATSTWGELTQTLGEVGRDLRMLLCDIKPQIKTSDPSTLQVEMFCQREAERCTGASWQFATNGEKSLLFDAMNMTWTVINHEASKIKETWKKDRGLEKYFRKLSKGDCDHWLREFLGHWEAMPEPTGRRST

SEQ ID NO: 72916 - protein, 334 aa, Homo sapiens
  Payload ID: 14443
  Gene Symbol: RAET1G
  Gene Name: retinoic acid early transcript 1G
  Uniprot ID: Q6H3X3
  ENSP ID: ENSP00000356329
MAAAASPAFLLRLPLLLLLSSWCRTGLADPHSLCYDITVIPKFRPGPRWCAVQGQVDEKTFLHYDCGSKTVTPVSPLGKKLNVTTAWKAQNPVLREVVDILTEQLLDIQLENYIPKEPLTLQARMSCEQKAEGHGSGSWQLSFDGQIFLLFDSENRMWTTVHPGARKMKEKWENDKDMTMSFHYISMGDCTGWLEDFLMGMDSTLEPSAGAPPTMSSGTAQPRATATTLILCCLLIMCLLICSRHSLTQSHGHHPQSLQPPPHPPLLHPTWLLRRVLWSDSYQIAKRPLSGGHVTRVTLPIIGDDSHSLPCPLALYTINNGAARYSEPLQVSIS

SEQ ID NO: 72917 - protein, 213 aa, Homo sapiens
  Payload ID: 14443
  Gene Symbol: RAET1G
  Gene Name: retinoic acid early transcript 1G
  Uniprot ID: Q6H3X3
  ENSP ID: ENSP00000356330
MAAAASPAFLLRLPLLLLLSSWCRTGLADPHSLCYDITVIPKFRPGPRWCAVQGQVDEKTFLHYDCGSKTVTPVSPLGKKLNVTTAWKAQNPVLREVVDILTEQLLDIQLENYIPKEPLTLQARMSCEQKAEGHGSGSWQLSFDGQIFLLFDSENRMWTTVHPGARKMKEKWENDKDMTMSFHYISMGDCTGWLEDFLMGMDSTLEPSAGGTV

SEQ ID NO: 72918 - protein, 221 aa, Homo sapiens
  Payload ID: 14443
  Gene Symbol: RAET1G
  Gene Name: retinoic acid early transcript 1G
  ENSP ID: ENSP00000417503
MAAAASPAFLLRLPLLLLLSSWCRTGLADPHSLCYDITVIPKFRPGPRWCAVQGQVDEKTFLHYDCGSKTVTPVSPLGKKLNVTTAWKAQNPVLREVVDILTEQLLDIQLENYIPKEPLTLQARMSCEQKAEGHGSGSWQLSFDGQIFLLFDSENRMWTTVHPGARKMKEKWENDKDMTMSFHYISMGDCTGWLEDFLMGMDSTLEPSAGGNRRKRNGDLQ

SEQ ID NO: 72919 - protein, 246 aa, Homo sapiens
  Payload ID: 14444
  Gene Symbol: RAET1L
  Gene Name: retinoic acid early transcript 1L
  Uniprot ID: Q5VY80
  ENSP ID: ENSP00000286380
MAAAAIPALLLCLPLLFLLFGWSRARRDDPHSLCYDITVIPKFRPGPRWCAVQGQVDEKTFLHYDCGNKTVTPVSPLGKKLNVTMAWKAQNPVLREVVDILTEQLLDIQLENYTPKEPLTLQARMSCEQKAEGHSSGSWQFSIDGQTFLLFDSEKRMWTTVHPGARKMKEKWENDKDVAMSFHYISMGDCIGWLEDFLMGMDSTLEPSAGAPLAMSSGTTQLRATATTLILCCLLIILPCFILPGI

SEQ ID NO: 72920 - protein, 246 aa, Homo sapiens; identical to SEQ ID NO: 72919
  Payload ID: 14444
  Gene Symbol: RAET1L
  Gene Name: retinoic acid early transcript 1L
  Uniprot ID: Q5VY80
  ENSP ID: ENSP00000356310

SEQ ID NO: 72921 - protein, 1906 aa, Homo sapiens
  Payload ID: 14445
  Gene Symbol: RAI1
  Gene Name: retinoic acid induced 1
  Uniprot ID: Q7Z5J4
  ENSP ID: ENSP00000323074
MQSFRERCGFHGKQQNYQQTSQETSRLENYRQPSQAGLSCDRQRLLAKDYYNPQPYPSYEGGAGTPSGTAAAVAADKYHRGSKALPTQQGLQGRPAFPGYGVQDSSPYPGRYAGEESLQAWGAPQPPPPQPQPLPAGVAKYDENLMKKTAVPPSRQYAEQGAQVPFRTHSLHVQQPPPPQQPLAYPKLQRQKLQNDIASPLPFPQGTHFPQHSQSFPTSSTYSSSVQGGGQGAHSYKSCTAPTAQPHDRPLTASSSLAPGQRVQNLHAYQSGRLSYDQQQQQQQQQQQQQQALQSRHHAQETLHYQNLAKYQHYGQQGQGYCQPDAAVRTPEQYYQTFSPSSSHSPARSVGRSPSYSSTPSPLMPNLENFPYSQQPLSTGAFPAGITDHSHFMPLLNPSPTDATSSVDTQAGNCKPLQKDKLPENLLSDLSLQSLTALTSQVENISNTVQQLLLSKAAVPQKKGVKNLVSRTPEQHKSQHCSPEGSGYSAEPAGTPLSEPPSSTPQSTHAEPQEADYLSGSEDPLERSFLYCNQARGSPARVNSNSKAKPESVSTCSVTSPDDMSTKSDDSFQSLHGSLPLDSFSKFVAGERDCPRLLLSALAQEDLASEILGLQEAIGEKADKAWAEAPSLVKDSSKPPFSLENHSACLDSVAKSAWPRPGEPEALPDSLQLDKGGNAKDFSPGLFEDPSVAFATPDPKKTTGPLSFGTKPTLGVPAPDPTTAAFDCFPDTTAASSADSANPFAWPEENLGDACPRWGLHPGELTKGLEQGGKASDGISKGDTHEASACLGFQEEDPPGEKVASLPGDFKQEEVGGVKEEAGGLLQCPEVAKADRWLEDSRHCCSTADFGDLPLLPPTSRKEDLEAEEEYSSLCELLGSPEQRPGMQDPLSPKAPLICTKEEVEEVLDSKAGWGSPCHLSGESVILLGPTVGTESKVQSWFESSLSHMKPGEEGPDGERAPGDSTTSDASLAQKPNKPAVPEAPIAKKEPVPRGKSLRSRRVHRGLPEAEDSPCRAPVLPKDLLLPESCTGPPQGQMEGAGAPGRGASEGLPRMCTRSLTALSEPRTPGPPGLTTTPAPPDKLGGKQRAAFKSGKRVGKPSPKAASSPSNPAALPVASDSSPMGSKTKETDSPSTPGKDQRSMILRSRTKTQEIFHSKRRRPSEGRLPNCRATKKLLDNSHLPATFKVSSSPQKEGRVSQRARVPKPGAGSKLSDRPLHALKRKSAFMAPVPTKKRNLVLRSRSSSSSNASGNGGDGKEERPEGSPTLFKRMSSPKKAKPTKGNGEPATKLPPPETPDACLKLASRAAFQGAMKTKVLPPRKGRGLKLEAIVQKITSPSLKKFACKAPGASPGNPLSPSLSDKDRGLKGAGGSPVGVEEGLVNVGTGQKLPTSGADPLCRNPTNRSLKGKLMNSKKLSSTDCFKTEAFTSPEALQPGGTALAPKKRSRKGRAGAHGLSKGPLEKRPYLGPALLLTPRDRASGTQGASEDNSGGGGKKPKMEELGLASQPPEGRPCQPQTRAQKQPGHTNYSSYSKRKRLTRGRAKNTTSSPCKGRAKRRRQQQVLPLDPAEPEIRLKYISSCKRLRSDSRTPAFSPFVRVEKRDAFTTICTVVNSPGDAPKPHRKPSSSASSSSSSSSFSLDAAGASLATLPGGSILQPRPSLPLSSTMHLGPVVSKALSTSCLVCCLCQNPANFKDLGDLCGPYYPEHCLPKKKPKLKEKVRPEGTCEEASLPLERTLKGPECAAAATAGKPPRPDGPADPAKQGPLRTSARGLSRRLQSCYCCDGREDGGEEAAPADKGRKHECSKEAPAEPGGEAQEHWVHEACAVWTGGVYLVAGKLFGLQEAMKVAVDMMCSSCQEAGATIGCCHKGCLHTYHYPCASDAGCIFIEENFSLKCPKHKRLP

SEQ ID NO: 72922 - protein, 942 aa, Homo sapiens
  Payload ID: 14445
  Gene Symbol: RAI1
  Gene Name: retinoic acid induced 1
  ENSP ID: ENSP00000379120
MQSFRERCGFHGKQQNYQQTSQETSRLENYRQPSQAGLSCDRQRLLAKDYYNPQPYPSYEGGAGTPSGTAAAVAADKYHRGSKALPTQQGLQGRPAFPGYGVQDSSPYPGRYAGEESLQAWGAPQPPPPQPQPLPAGVAKYDENLMKKTAVPPSRQYAEQGAQVPFRTHSLHVQQPPPPQQPLAYPKLQRQKLQNDIASPLPFPQGTHFPQHSQSFPTSSTYSSSVQGGGQGAHSYKSCTAPTAQPHDRPLTASSSLAPGQRVQNLHAYQSGRLSYDQQQQQQQQQQQQQQALQSRHHAQETLHYQNLAKYQHYGQQGQGYCQPDAAVRTPEQYYQTFSPSSSHSPARSVGRSPSYSSTPSPLMPNLENFPYSQQPLSTGAFPAGITDHSHFMPLLNPSPTDATSSVDTQAGNCKPLQKDKLPENLLSDLSLQSLTALTSQVENISNTVQQLLLSKAAVPQKKGVKNLVSRTPEQHKSQHCSPEGSGYSAEPAGTPLSEPPSSTPQSTHAEPQEADYLSGSEDPLERSFLYCNQARGSPARVNSNSKAKPESVSTCSVTSPDDMSTKSDDSFQSLHGSLPLDSFSKFVAGERDCPRLLLSALAQEDLASEILGLQEAIGEKADKAWAEAPSLVKDSSKPPFSLENHSACLDSVAKSAWPRPGEPEALPDSLQLDKGGNAKDFSPGLFEDPSVAFATPDPKKTTGPLSFGTKPTLGVPAPDPTTAAFDCFPDTTAASSADSANPFAWPEENLGDACPRWGLHPGELTKGLEQGGKASDGISKGDTHEASACLGFQEEDPPGEKVASLPGDFKQEEVGGVKEEAGGLLQCPEVAKADRWLEDSRHCCSTADFGDLPLLPPTSRKEDLEAEEEYSSLCELLGSPEQRPGMQDPLSPKAPLICTKEEVEEVLDSKAGWGSPCHLSGESVILLGPTVGTESKVQSWF

SEQ ID NO: 72923 - protein, 65 aa, Homo sapiens
  Payload ID: 14445
  Gene Symbol: RAI1
  Gene Name: retinoic acid induced 1
  ENSP ID: ENSP00000463607
MQSFRERCGFHGKQQNYQQTSQETSRLENYRQPSQAGLSCDRQRLLAKDYYNPQPYPSYEGGAGT

SEQ ID NO: 72924 - protein, 156 aa, Homo sapiens
  Payload ID: 14445
  Gene Symbol: RAI1
  Gene Name: retinoic acid induced 1
  ENSP ID: ENSP00000463984
  MOD_RES (1)..(1): Any amino acid
XAEPGGEAQEHWVHEACAVWTGGVYLVAGKLFGLQEAMKVAVDMMCSSCQEAGATIGCCHKGCLHTYHYPCASDAGTSPPRNRRALEPIQAVQGDPPWAQLPKPRPHLTLQFPSSLAPAILLSFCLPRPLLGNARDMEMRHSPGTCLRSAQSSEGR

SEQ ID NO: 72925 - protein, 980 aa, Homo sapiens
  Payload ID: 14446
  Gene Symbol: RAI14
  Gene Name: retinoic acid induced 14
  Uniprot ID: Q9P0K7
  ENSP ID: ENSP00000265109
MKSLKAKFRKSDTNEWNKNDDRLLQAVENGDAEKVASLLGKKGASATKHDSEGKTAFHLAAAKGHVECLRVMITHGVDVTAQDTTGHSALHLAAKNSHHECIRKLLQSKCPAESVDSSGKTALHYAAAQGCLQAVQILCEHKSPINLKDLDGNIPLLLAVQNGHSEICHFLLDHGADVNSRNKSGRTALMLACEIGSSNAVEALIKKGADLNLVDSLGYNALHYSKLSENAGIQSLLLSKISQDADLKTPTKPKQHDQVSKISSERSGTPKKRKAPPPPISPTQLSDVSSPRSITSTPLSGKESVFFAEPPFKAEISSIRENKDRLSDSTTGADSLLDISSEADQQDLLSLLQAKVASLTLHNKELQDKLQAKSPKEAEADLSFDSYHSTQTDLGPSLGKPGETSPPDSKSSPSVLIHSLGKSTTDNDVRIQQLQEILQDLQKRLESSEAERKQLQVELQSRRAELVCLNNTEISENSSDLSQKLKETQSKYEEAMKEVLSVQKQMKLGLVSPESMDNYSHFHELRVTEEEINVLKQDLQNALEESERNKEKVRELEEKLVEREKGTVIKPPVEEYEEMKSSYCSVIENMNKEKAFLFEKYQEAQEEIMKLKDTLKSQMTQEASDEAEDMKEAMNRMIDELNKQVSELSQLYKEAQAELEDYRKRKSLEDVTAEYIHKAEHEKLMQLTNVSRAKAEDALSEMKSQYSKVLNELTQLKQLVDAQKENSVSITEHLQVITTLRTAAKEMEEKISNLKEHLASKEVEVAKLEKQLLEEKAAMTDAMVPRSSYEKLQSSLESEVSVLASKLKESVKEKEKVHSEVVQIRSEVSQVKREKENIQTLLKSKEQEVNELLQKFQQAQEELAEMKRYAESSSKLEEDKDKKINEMSKEVTKLKEALNSLSQLSYSTSSSKRQSQQLEALQQQVKQLQNQLAECKKQHQEVISVYRMHLLYAVQGQMDEDVQKVLKQILTMCKNQSQKK

SEQ ID NO: 72926 - protein, 980 aa, Homo sapiens; identical to SEQ ID NO: 72925
  Payload ID: 14446
  Gene Symbol: RAI14
  Gene Name: retinoic acid induced 14
  Uniprot ID: Q9P0K7
  ENSP ID: ENSP00000388725

SEQ ID NO: 72927 - protein, 126 aa, Homo sapiens
  Payload ID: 14446
  Gene Symbol: RAI14
  Gene Name: retinoic acid induced 14
  ENSP ID: ENSP00000421424
MKSLKAKFRKSDTNEWNKNDDRLLQAVENGDAEKVASLLGKKGASATKHDSEGKTAFHLAAAKGHVECLRVMITHGVDVTAQDTTGHSALHLAAKNSHHECIRKLLQSKCPAESVDSSGKTALHYA

SEQ ID NO: 72928 - protein, 126 aa, Homo sapiens; identical to SEQ ID NO: 72927
  Payload ID: 14446
  Gene Symbol: RAI14
  Gene Name: retinoic acid induced 14
  ENSP ID: ENSP00000422112

SEQ ID NO: 72929 - protein, 107 aa, Homo sapiens
  Payload ID: 14446
  Gene Symbol: RAI14
  Gene Name: retinoic acid induced 14
  ENSP ID: ENSP00000422114
MKSLKAKFRKSDTNEWNKNDDRLLQAVENGDAEKVASLLGKKGASATKHDSEGKTAFHLAAAKGHVECLRVMITHGVDVTAQDTTGHSALHLAAKNSHHECIRKLLQ

SEQ ID NO: 72930 - protein, 951 aa, Homo sapiens
  Payload ID: 14446
  Gene Symbol: RAI14
  Gene Name: retinoic acid induced 14
  Uniprot ID: Q9P0K7
  ENSP ID: ENSP00000422377
MKSLKAKFRKSDTNEWNKNDDRLLQAVENGDAEKVASLLGKKGASATKHDSEGKTAFHLAAAKGHVECLRVMITHGVDVTAQDTTGHSALHLAAKNSHHECIRKLLQSKCPAESVDSSGKTALHYAAAQGCLQAVQILCEHKSPINLKDLDGNIPLLLAVQNGHSEICHFLLDHGADVNSRNKSGRTALMLACEIGSSNAVEALIKKGADLNLVDSLGYNALHYSKLSENAGIQSLLLSKISQDADLKTPTKPKQLSDVSSPRSITSTPLSGKESVFFAEPPFKAEISSIRENKDRLSDSTTGADSLLDISSEADQQDLLSLLQAKVASLTLHNKELQDKLQAKSPKEAEADLSFDSYHSTQTDLGPSLGKPGETSPPDSKSSPSVLIHSLGKSTTDNDVRIQQLQEILQDLQKRLESSEAERKQLQVELQSRRAELVCLNNTEISENSSDLSQKLKETQSKYEEAMKEVLSVQKQMKLGLVSPESMDNYSHFHELRVTEEEINVLKQDLQNALEESERNKEKVRELEEKLVEREKGTVIKPPVEEYEEMKSSYCSVIENMNKEKAFLFEKYQEAQEEIMKLKDTLKSQMTQEASDEAEDMKEAMNRMIDELNKQVSELSQLYKEAQAELEDYRKRKSLEDVTAEYIHKAEHEKLMQLTNVSRAKAEDALSEMKSQYSKVLNELTQLKQLVDAQKENSVSITEHLQVITTLRTAAKEMEEKISNLKEHLASKEVEVAKLEKQLLEEKAAMTDAMVPRSSYEKLQSSLESEVSVLASKLKESVKEKEKVHSEVVQIRSEVSQVKREKENIQTLLKSKEQEVNELLQKFQQAQEELAEMKRYAESSSKLEEDKDKKINEMSKEVTKLKEALNSLSQLSYSTSSSKRQSQQLEALQQQVKQLQNQLAECKKQHQEVISVYRMHLLYAVQGQMDEDVQKVLKQILTMCKNQSQKK

SEQ ID NO: 72931 - protein, 114 aa, Homo sapiens
  Payload ID: 14446
  Gene Symbol: RAI14
  Gene Name: retinoic acid induced 14
  ENSP ID: ENSP00000422515
MKSLKAKFRKSDTNEWNKNDDRLLQAVENGDAEKVASLLGKKGASATKHDSEGKTAFHLAAAKGHVECLRVMITHGVDVTAQDTTGHSALHLAAKNSHHECIRKLLQSKCPAES

SEQ ID NO: 72932 - protein, 980 aa, Homo sapiens; identical to SEQ ID NO: 72925
  Payload ID: 14446
  Gene Symbol: RAI14
  Gene Name: retinoic acid induced 14
  Uniprot ID: Q9P0K7
  ENSP ID: ENSP00000422942

SEQ ID NO: 72933 - protein, 972 aa, Homo sapiens
  Payload ID: 14446
  Gene Symbol: RAI14
  Gene Name: retinoic acid induced 14
  Uniprot ID: Q9P0K7
  ENSP ID: ENSP00000423854
MEAKTNEWNKNDDRLLQAVENGDAEKVASLLGKKGASATKHDSEGKTAFHLAAAKGHVECLRVMITHGVDVTAQDTTGHSALHLAAKNSHHECIRKLLQSKCPAESVDSSGKTALHYAAAQGCLQAVQILCEHKSPINLKDLDGNIPLLLAVQNGHSEICHFLLDHGADVNSRNKSGRTALMLACEIGSSNAVEALIKKGADLNLVDSLGYNALHYSKLSENAGIQSLLLSKISQDADLKTPTKPKQHDQVSKISSERSGTPKKRKAPPPPISPTQLSDVSSPRSITSTPLSGKESVFFAEPPFKAEISSIRENKDRLSDSTTGADSLLDISSEADQQDLLSLLQAKVASLTLHNKELQDKLQAKSPKEAEADLSFDSYHSTQTDLGPSLGKPGETSPPDSKSSPSVLIHSLGKSTTDNDVRIQQLQEILQDLQKRLESSEAERKQLQVELQSRRAELVCLNNTEISENSSDLSQKLKETQSKYEEAMKEVLSVQKQMKLGLVSPESMDNYSHFHELRVTEEEINVLKQDLQNALEESERNKEKVRELEEKLVEREKGTVIKPPVEEYEEMKSSYCSVIENMNKEKAFLFEKYQEAQEEIMKLKDTLKSQMTQEASDEAEDMKEAMNRMIDELNKQVSELSQLYKEAQAELEDYRKRKSLEDVTAEYIHKAEHEKLMQLTNVSRAKAEDALSEMKSQYSKVLNELTQLKQLVDAQKENSVSITEHLQVITTLRTAAKEMEEKISNLKEHLASKEVEVAKLEKQLLEEKAAMTDAMVPRSSYEKLQSSLESEVSVLASKLKESVKEKEKVHSEVVQIRSEVSQVKREKENIQTLLKSKEQEVNELLQKFQQAQEELAEMKRYAESSSKLEEDKDKKINEMSKEVTKLKEALNSLSQLSYSTSSSKRQSQQLEALQQQVKQLQNQLAECKKQHQEVISVYRMHLLYAVQGQMDEDVQKVLKQILTMCKNQSQKK

SEQ ID NO: 72934 - protein, 66 aa, Homo sapiens
  Payload ID: 14446
  Gene Symbol: RAI14
  Gene Name: retinoic acid induced 14
  ENSP ID: ENSP00000423965
MKSLKAKFRKSDTNEWNKNDDRLLQAVENGDAEKVASLLGKKGASATKHDISILLLQKDTWNASGS

SEQ ID NO: 72935 - protein, 104 aa, Homo sapiens
  Payload ID: 14446
  Gene Symbol: RAI14
  Gene Name: retinoic acid induced 14
  ENSP ID: ENSP00000424502
MKSLKAKFRKSDTNEWNKNDDRLLQAVENGDAEKVASLLGKKGASATKHDSEGKTAFHLAAAKGHVECLRVMITHGVDVTAQDTTGHSALHLAAKNSHHECIRK

SEQ ID NO: 72936 - protein, 56 aa, Homo sapiens
  Payload ID: 14446
  Gene Symbol: RAI14
  Gene Name: retinoic acid induced 14
  ENSP ID: ENSP00000424507
MKSLKAKFRKSDTNEWNKNDDRLLQAVENGDAEKVASLLGKKGASATKHDSEGKTA

SEQ ID NO: 72937 - protein, 139 aa, Homo sapiens
  Payload ID: 14446
  Gene Symbol: RAI14
  Gene Name: retinoic acid induced 14
  ENSP ID: ENSP00000424879
MKSLKAKFRKSDTNEWNKNDDRLLQAVENGDAEKVASLLGKKGASATKHDSEGKTAFHLAAAKGHVECLRVMITHGVDVTAQDTTGHSALHLAAKNSHHECIRKLLQSKCPAESVDSSGKTALHYAAAQGCLQAVQILC

SEQ ID NO: 72938 - protein, 150 aa, Homo sapiens
  Payload ID: 14446
  Gene Symbol: RAI14
  Gene Name: retinoic acid induced 14
  ENSP ID: ENSP00000425115
MKSLKAKFRKSDTNEWNKNDDRLLQAVENGDAEKVASLLGKKGASATKHDSEGKTAFHLAAAKGHVECLRVMITHGVDVTAQDTTGHSALHLAAKNSHHECIRKLLQSKCPAESVDSSGKTALHYAAAQGCLQAVQILCEHKSPINLKDL

SEQ ID NO: 72939 - protein, 20 aa, Homo sapiens
  Payload ID: 14446
  Gene Symbol: RAI14
  Gene Name: retinoic acid induced 14
  ENSP ID: ENSP00000425337
MKSLKAKFRKSDEFEICKEL

SEQ ID NO: 72940 - protein, 56 aa, Homo sapiens; identical to SEQ ID NO: 72936
  Payload ID: 14446
  Gene Symbol: RAI14
  Gene Name: retinoic acid induced 14
  ENSP ID: ENSP00000425929

SEQ ID NO: 72941 - protein, 125 aa, Homo sapiens
  Payload ID: 14446
  Gene Symbol: RAI14
  Gene Name: retinoic acid induced 14
  ENSP ID: ENSP00000426770
MKSLKAKFRKSDTNEWNKNDDRLLQAVENGDAEKVASLLGKKGASATKHDSEGKTAFHLAAAKGHVECLRVMITHGVDVTAQDTTGHSALHLAAKNSHHECIRKLLQSKCPAESVDSSGKTALHY

SEQ ID NO: 72942 - protein, 983 aa, Homo sapiens
  Payload ID: 14446
  Gene Symbol: RAI14
  Gene Name: retinoic acid induced 14
  Uniprot ID: Q9P0K7
  ENSP ID: ENSP00000427123
MQPTYLPWLSAKEKKTNEWNKNDDRLLQAVENGDAEKVASLLGKKGASATKHDSEGKTAFHLAAAKGHVECLRVMITHGVDVTAQDTTGHSALHLAAKNSHHECIRKLLQSKCPAESVDSSGKTALHYAAAQGCLQAVQILCEHKSPINLKDLDGNIPLLLAVQNGHSEICHFLLDHGADVNSRNKSGRTALMLACEIGSSNAVEALIKKGADLNLVDSLGYNALHYSKLSENAGIQSLLLSKISQDADLKTPTKPKQHDQVSKISSERSGTPKKRKAPPPPISPTQLSDVSSPRSITSTPLSGKESVFFAEPPFKAEISSIRENKDRLSDSTTGADSLLDISSEADQQDLLSLLQAKVASLTLHNKELQDKLQAKSPKEAEADLSFDSYHSTQTDLGPSLGKPGETSPPDSKSSPSVLIHSLGKSTTDNDVRIQQLQEILQDLQKRLESSEAERKQLQVELQSRRAELVCLNNTEISENSSDLSQKLKETQSKYEEAMKEVLSVQKQMKLGLVSPESMDNYSHFHELRVTEEEINVLKQDLQNALEESERNKEKVRELEEKLVEREKGTVIKPPVEEYEEMKSSYCSVIENMNKEKAFLFEKYQEAQEEIMKLKDTLKSQMTQEASDEAEDMKEAMNRMIDELNKQVSELSQLYKEAQAELEDYRKRKSLEDVTAEYIHKAEHEKLMQLTNVSRAKAEDALSEMKSQYSKVLNELTQLKQLVDAQKENSVSITEHLQVITTLRTAAKEMEEKISNLKEHLASKEVEVAKLEKQLLEEKAAMTDAMVPRSSYEKLQSSLESEVSVLASKLKESVKEKEKVHSEVVQIRSEVSQVKREKENIQTLLKSKEQEVNELLQKFQQAQEELAEMKRYAESSSKLEEDKDKKINEMSKEVTKLKEALNSLSQLSYSTSSSKRQSQQLEALQQQVKQLQNQLAECKKQHQEVISVYRMHLLYAVQGQMDEDVQKVLKQILTMCKNQSQKK

SEQ ID NO: 72943 - protein, 530 aa, Homo sapiens
  Payload ID: 14447
  Gene Symbol: RAI2
  Gene Name: retinoic acid induced 2
  Uniprot ID: Q9Y5P3
  ENSP ID: ENSP00000333456
MDDLQSQNLSMDMTDSPPALANNRLENGMAQLITTEAWNINSTDLVKKALVTVPAPSILNPPAESQSGMALKVAATVLQPLCLGESPVVMPIHMQVEGSSAPELNPNGNATYVMTTQGPVQLPVVLEQHVFQHLNSPLVLPQEAPCSSSTIHNNLFQGAEDPEAQPQLLDLRIPSQPQEPTLPFEAVLQNLFPSQGTLGPPPCQPPPGYAPVPPQPFSSPLSPLVPPATLLVPYPVIVPLPVPVPIPIPIPMPQSSESKFSSSFPKPPSSFGLHPFKGTQTPLEKDELKPFDILQPKEYFQLSRHTVIKMGSENEALDLSMKSVPWLKAGEVSPPIFQEDAALDLSVAAHRKSEPPPETLYDSGASVDSSGHTVMEKLPSGMEISFAPATSHEAPAMMDSHISSSDAATEMLSQPNHPSGEVKAENNIEMVGESQAAKVIVSVEDAVPTIFCGKIKGLSGVSTKNFSFKREDSVLQGYDINSQGEESMGNAEPLRKPIKNRSIKLKKVNSQEIHMLPIKKQRLATFFPRK

SEQ ID NO: 72944 - protein, 530 aa, Homo sapiens; identical to SEQ ID NO: 72943
  Payload ID: 14447
  Gene Symbol: RAI2
  Gene Name: retinoic acid induced 2
  Uniprot ID: Q9Y5P3
  ENSP ID: ENSP00000353106

SEQ ID NO: 72945 - protein, 480 aa, Homo sapiens
  Payload ID: 14447
  Gene Symbol: RAI2
  Gene Name: retinoic acid induced 2
  Uniprot ID: Q9Y5P3
  ENSP ID: ENSP00000392578
MDDLQSQNLSMDMTDSPPALANNRLENGMAQLITTEAWNINSTDLVEGSSAPELNPNGNATYVMTTQGPVQLPVVLEQHVFQHLNSPLVLPQEAPCSSSTIHNNLFQGAEDPEAQPQLLDLRIPSQPQEPTLPFEAVLQNLFPSQGTLGPPPCQPPPGYAPVPPQPFSSPLSPLVPPATLLVPYPVIVPLPVPVPIPIPIPMPQSSESKFSSSFPKPPSSFGLHPFKGTQTPLEKDELKPFDILQPKEYFQLSRHTVIKMGSENEALDLSMKSVPWLKAGEVSPPIFQEDAALDLSVAAHRKSEPPPETLYDSGASVDSSGHTVMEKLPSGMEISFAPATSHEAPAMMDSHISSSDAATEMLSQPNHPSGEVKAENNIEMVGESQAAKVIVSVEDAVPTIFCGKIKGLSGVSTKNFSFKREDSVLQGYDINSQGEESMGNAEPLRKPIKNRSIKLKKVNSQEIHMLPIKKQRLATFFPRK

SEQ ID NO: 72946 - protein, 530 aa, Homo sapiens; identical to SEQ ID NO: 72943
  Payload ID: 14447
  Gene Symbol: RAI2
  Gene Name: retinoic acid induced 2
  Uniprot ID: Q9Y5P3
  ENSP ID: ENSP00000401323

SEQ ID NO: 72947 - protein, 530 aa, Homo sapiens; identical to SEQ ID NO: 72943
  Payload ID: 14447
  Gene Symbol: RAI2
  Gene Name: retinoic acid induced 2
  Uniprot ID: Q9Y5P3
  ENSP ID: ENSP00000444210

SEQ ID NO: 72948 - protein, 81 aa, Homo sapiens
  Payload ID: 14447
  Gene Symbol: RAI2
  Gene Name: retinoic acid induced 2
  ENSP ID: ENSP00000473562
MDDLQSQNLSMDMTDSPPALANNRLENGMAQLITTEAWNINSTDLPLCLGESPVVMPIHMQVEGSSAPELNPNGNATYVMT

SEQ ID NO: 72949 - protein, 294 aa, Homo sapiens
  Payload ID: 14448
  Gene Symbol: RARRES1
  Gene Name: retinoic acid receptor responder (tazarotene induced) 1
  Uniprot ID: P49788
  ENSP ID: ENSP00000237696
MQPRRQRLPAPWSGPRGPRPTAPLLALLLLLAPVAAPAGSGDPDDPGQPQDAGVPRRLLQQAARAALHFFNFRSGSPSALRVLAEVQEGRAWINPKEGCKVHVVFSTERYNPESLLQEGEGRLGKCSARVFFKNQKPRPTINVTCTRLIEKKKRQQEDYLLYKQMKQLKNPLEIVSIPDNHGHIDPSLRLIWDLAFLGSSYVMWEMTTQVSHYYLAQLTSVRQWKTNDDTIDFDYTVLLHELSTQEIIPCRIHLVWYPGKPLKVKYHCQELQTPEEASGTEEGSAVVPTELSNF

SEQ ID NO: 72950 - protein, 228 aa, Homo sapiens
  Payload ID: 14448
  Gene Symbol: RARRES1
  Gene Name: retinoic acid receptor responder (tazarotene induced) 1
  Uniprot ID: P49788
  ENSP ID: ENSP00000418556
MQPRRQRLPAPWSGPRGPRPTAPLLALLLLLAPVAAPAGSGDPDDPGQPQDAGVPRRLLQQAARAALHFFNFRSGSPSALRVLAEVQEGRAWINPKEGCKVHVVFSTERYNPESLLQEGEGRLGKCSARVFFKNQKPRPTINVTCTRLIEKKKRQQEDYLLYKQMKQLKNPLEIVSIPDNHGHIDPSLRLIWDLAFLGSSYVMWEMTTQVSHYYLAQLTSVRQWVRKT

SEQ ID NO: 72951 - protein, 163 aa, Homo sapiens
  Payload ID: 14449
  Gene Symbol: RARRES2
  Gene Name: retinoic acid receptor responder (tazarotene induced) 2
  Uniprot ID: Q99969
  ENSP ID: ENSP00000223271
MRRLLIPLALWLGAVGVGVAELTEAQRRGLQVALEEFHKHPPVQWAFQETSVESAVDTPFPAGIFVRLEFKLQQTSCRKRDWKKPECKVRPNGRKRKCLACIKLGSEDKVLGRLVHCPIETQVLREAEEHQETQCLRVQRAGEDPHSFYFPGQFAFSKALPRS

SEQ ID NO: 72952 - protein, 159 aa, Homo sapiens
  Payload ID: 14449
  Gene Symbol: RARRES2
  Gene Name: retinoic acid receptor responder (tazarotene induced) 2
  ENSP ID: ENSP00000417669
MRRLLIPLALWLGAVGVGVAELTEAQRRGLQVALEEFHKHPPVQWAFQETSVESAVDTPFPAGIFVRLEFKLQQTSCRKRDWKKPECKVRPNGRKRKCLACIKLGSEDKVLGRLVHCPIETQVLRRCVVPPGPLRVVTSGRPQPPGRGTRSIPSHDNKA

SEQ ID NO: 72953 - protein, 163 aa, Homo sapiens; identical to SEQ ID NO: 72951
  Payload ID: 14449
  Gene Symbol: RARRES2
  Gene Name: retinoic acid receptor responder (tazarotene induced) 2
  Uniprot ID: Q99969
  ENSP ID: ENSP00000418009

SEQ ID NO: 72954 - protein, 163 aa, Homo sapiens; identical to SEQ ID NO: 72951
  Payload ID: 14449
  Gene Symbol: RARRES2
  Gene Name: retinoic acid receptor responder (tazarotene induced) 2
  Uniprot ID: Q99969
  ENSP ID: ENSP00000418483

SEQ ID NO: 72955 - protein, 164 aa, Homo sapiens
  Payload ID: 14450
  Gene Symbol: RARRES3
  Gene Name: retinoic acid receptor responder (tazarotene induced) 3
  Uniprot ID: Q9UL19
  ENSP ID: ENSP00000255688
MASPHQEPKPGDLIEIFRLGYEHWALYIGDGYVIHLAPPSEYPGAGSSSVFSVLSNSAEVKRERLEDVVGGCCYRVNNSLDHEYQPRPVEVIISSAKEMVGQKMKYSIVSRNCEHFVTQLRYGKSRCKQVEKAKVEVGVATALGILVVAGCSFAIRRYQKKATA

SEQ ID NO: 72956 - protein, 164 aa, Homo sapiens
  Payload ID: 14450
  Gene Symbol: RARRES3
  Gene Name: retinoic acid receptor responder (tazarotene induced) 3
  ENSP ID: ENSP00000346431
MGLPEPKPKPGDLIEIFRLGYEHWALYIGDGYVIHLAPPSEYPGAGSSSVFSVLSNSAEVKRERLEDVVGGCCYRVNNSLDHEYQPRPVEVIISSAKEMVGQKMKYSIVSRNCEHFVTQLRYGKSRCKQVEKAKVEVGVATALGILVVAGCSFAIRRYQKKATA

SEQ ID NO: 72957 - protein, 156 aa, Homo sapiens
  Payload ID: 14450
  Gene Symbol: RARRES3
  Gene Name: retinoic acid receptor responder (tazarotene induced) 3
  Uniprot ID: Q9UL19
  ENSP ID: ENSP00000402943
MASPHQEPKPGDLIEIFRLGYEHWALYIGDGYVIHLAPPSEYPGAGSSSVFSVLSNSAEVKRERLEDVVGGCCYRVNNSLDHEYQPRPVEVIISSAKEMVGQKMKYSIVSRNCEHFVTQLRYGKSRCKQVRTSLDNPSPSAWGWTHGAVQPGDHCE

SEQ ID NO: 72958 - protein, 462 aa, Homo sapiens
  Payload ID: 14451
  Gene Symbol: RARA
  Gene Name: retinoic acid receptor, alpha
  Uniprot ID: P10276
  ENSP ID: ENSP00000254066
MASNSSSCPTPGGGHLNGYPVPPYAFFFPPMLGGLSPPGALTTLQHQLPVSGYSTPSPATIETQSSSSEEIVPSPPSPPPLPRIYKPCFVCQDKSSGYHYGVSACEGCKGFFRRSIQKNMVYTCHRDKNCIINKVTRNRCQYCRLQKCFEVGMSKESVRNDRNKKKKEVPKPECSESYTLTPEVGELIEKVRKAHQETFPALCQLGKYTTNNSSEQRVSLDIDLWDKFSELSTKCIIKTVEFAKQLPGFTTLTIADQITLLKAACLDILILRICTRYTPEQDTMTFSDGLTLNRTQMHNAGFGPLTDLVFAFANQLLPLEMDDAETGLLSAICLICGDRQDLEQPDRVDMLQEPLLEALKVYVRKRRPSRPHMFPKMLMKITDLRSISAKGAERVITLKMEIPGSMPPLIQEMLENSEGLDTLSGQPGGGGRDGGGLAPPPGSCSPSLSPSSNRSSPATHSP

SEQ ID NO: 72959 - protein, 457 aa, Homo sapiens
  Payload ID: 14451
  Gene Symbol: RARA
  Gene Name: retinoic acid receptor, alpha
  Uniprot ID: P10276
  ENSP ID: ENSP00000377643
MYESVEVGGPTPNPFLVVDFYNQNRACLLPEKGLPAPGPYSTPLRTPLWNGSNHSIETQSSSSEEIVPSPPSPPPLPRIYKPCFVCQDKSSGYHYGVSACEGCKGFFRRSIQKNMVYTCHRDKNCIINKVTRNRCQYCRLQKCFEVGMSKESVRNDRNKKKKEVPKPECSESYTLTPEVGELIEKVRKAHQETFPALCQLGKYTTNNSSEQRVSLDIDLWDKFSELSTKCIIKTVEFAKQLPGFTTLTIADQITLLKAACLDILILRICTRYTPEQDTMTFSDGLTLNRTQMHNAGFGPLTDLVFAFANQLLPLEMDDAETGLLSAICLICGDRQDLEQPDRVDMLQEPLLEALKVYVRKRRPSRPHMFPKMLMKITDLRSISAKGAERVITLKMEIPGSMPPLIQEMLENSEGLDTLSGQPGGGGRDGGGLAPPPGSCSPSLSPSSNRSSPATHSP

SEQ ID NO: 72960 - protein, 478 aa, Homo sapiens
  Payload ID: 14451
  Gene Symbol: RARA
  Gene Name: retinoic acid receptor, alpha
  ENSP ID: ENSP00000377648
MMSQTMTQAGVSFRHSVRAAQCHTRVPNTWPRATRPYASCRRSPRLRGRWPGSAGQGAGGRAPRAGWRAGDVTGSAIETQSSSSEEIVPSPPSPPPLPRIYKPCFVCQDKSSGYHYGVSACEGCKGFFRRSIQKNMVYTCHRDKNCIINKVTRNRCQYCRLQKCFEVGMSKESVRNDRNKKKKEVPKPECSESYTLTPEVGELIEKVRKAHQETFPALCQLGKYTTNNSSEQRVSLDIDLWDKFSELSTKCIIKTVEFAKQLPGFTTLTIADQITLLKAACLDILILRICTRYTPEQDTMTFSDGLTLNRTQMHNAGFGPLTDLVFAFANQLLPLEMDDAETGLLSAICLICGDRQDLEQPDRVDMLQEPLLEALKVYVRKRRPSRPHMFPKMLMKITDLRSISAKGAERVITLKMEIPGSMPPLIQEMLENSEGLDTLSGQPGGGGRDGGGLAPPPGSCSPSLSPSSNRSSPATHSP

SEQ ID NO: 72961 - protein, 462 aa, Homo sapiens; identical to SEQ ID NO: 72958
  Payload ID: 14451
  Gene Symbol: RARA
  Gene Name: retinoic acid receptor, alpha
  Uniprot ID: P10276
  ENSP ID: ENSP00000377649

SEQ ID NO: 72962 - protein, 365 aa, Homo sapiens
  Payload ID: 14451
  Gene Symbol: RARA
  Gene Name: retinoic acid receptor, alpha
  Uniprot ID: P10276
  ENSP ID: ENSP00000389993
MASNSSSCPTPGGGHLNGYPVPPYAFFFPPMLGGLSPPGALTTLQHQLPVSGYSTPSPATVRNDRNKKKKEVPKPECSESYTLTPEVGELIEKVRKAHQETFPALCQLGKYTTNNSSEQRVSLDIDLWDKFSELSTKCIIKTVEFAKQLPGFTTLTIADQITLLKAACLDILILRICTRYTPEQDTMTFSDGLTLNRTQMHNAGFGPLTDLVFAFANQLLPLEMDDAETGLLSAICLICGDRQDLEQPDRVDMLQEPLLEALKVYVRKRRPSRPHMFPKMLMKITDLRSISAKGAERVITLKMEIPGSMPPLIQEMLENSEGLDTLSGQPGGGGRDGGGLAPPPGSCSPSLSPSSNRSSPATHSP

SEQ ID NO: 72963 - protein, 186 aa, Homo sapiens
  Payload ID: 14451
  Gene Symbol: RARA
  Gene Name: retinoic acid receptor, alpha
  ENSP ID: ENSP00000462514
MVYTCHRDKNCIINKVTRNRCQYCRLQKCFEVGMSKESVRNDRNKKKKEVPKPECSESYTLTPEVGELIEKVRKAHQETFPALCQLGKYTTNNSSEQRVSLDIDLWDKFSELSTKCIIKTVEFAKQLPGFTTLTIADQITLLKAACLDILILRICTRYTPEQDTMTFSDGLTLNRTQMHNAGFGPL

SEQ ID NO: 72964 - protein, 66 aa, Homo sapiens
  Payload ID: 14451
  Gene Symbol: RARA
  Gene Name: retinoic acid receptor, alpha
  ENSP ID: ENSP00000464287
MASNSSSCPTPGGGHLNGYPVPPYAFFFPPMLGGLSPPGALTTLQHQLPVSGYSTPSPATIETQSS

SEQ ID NO: 72965 - protein, 448 aa, Homo sapiens
  Payload ID: 14452
  Gene Symbol: RARB
  Gene Name: retinoic acid receptor, beta
  Uniprot ID: P10826
  ENSP ID: ENSP00000332296
MFDCMDVLSVSPGQILDFYTASPSSCMLQEKALKACFSGLTQTEWQHRHTAQSIETQSTSSEELVPSPPSPLPPPRVYKPCFVCQDKSSGYHYGVSACEGCKGFFRRSIQKNMIYTCHRDKNCVINKVTRNRCQYCRLQKCFEVGMSKESVRNDRNKKKKETSKQECTESYEMTAELDDLTEKIRKAHQETFPSLCQLGKYTTNSSADHRVRLDLGLWDKFSELATKCIIKIVEFAKRLPGFTGLTIADQITLLKAACLDILILRICTRYTPEQDTMTFSDGLTLNRTQMHNAGFGPLTDLVFTFANQLLPLEMDDTETGLLSAICLICGDRQDLEEPTKVDKLQEPLLEALKIYIRKRRPSKPHMFPKILMKITDLRSISAKGAERVITLKMEIPGSMPPLIQEMLENSEGHEPLTPSSSGNTAEHSPSISPSSVENSGVSQSPLVQ

SEQ ID NO: 72966 - protein, 402 aa, Homo sapiens
  Payload ID: 14452
  Gene Symbol: RARB
  Gene Name: retinoic acid receptor, beta
  ENSP ID: ENSP00000373282
MTTSGHACPVPAVNGHMTHYPATPYPLLFPPVIGGLSLPPLHGLHGHPPPSGCSTPSPATIETQSTSSEELVPSPPSPLPPPRVYKPCFVCQDKSSGYHYGVSACEGCKGFFRRSIQKNMIYTCHRDKNCVINKVTRNRCQYCRLQKCFEVGMSKESVRNDRNKKKKETSKQECTESYEMTAELDDLTEKIRKAHQETFPSLCQLGKYTTNSSADHRVRLDLGLWDKFSELATKCIIKIVEFAKRLPGFTGLTIADQITLLKAACLDILILRICTRYTPEQDTMTFSDGLTLNRTQMHNAGFGPLTDLVFTFANQLLPLEMDDTETGLLSAICLICGDRQDLEEPTKVDKLQEPLLEALKIYIRKRRPSKPHMFPKILMKITDLRSISAKGAERVITLKMEI

SEQ ID NO: 72967 - protein, 336 aa, Homo sapiens
  Payload ID: 14452
  Gene Symbol: RARB
  Gene Name: retinoic acid receptor, beta
  Uniprot ID: P10826
  ENSP ID: ENSP00000391391
MIYTCHRDKNCVINKVTRNRCQYCRLQKCFEVGMSKESVRNDRNKKKKETSKQECTESYEMTAELDDLTEKIRKAHQETFPSLCQLGKYTTNSSADHRVRLDLGLWDKFSELATKCIIKIVEFAKRLPGFTGLTIADQITLLKAACLDILILRICTRYTPEQDTMTFSDGLTLNRTQMHNAGFGPLTDLVFTFANQLLPLEMDDTETGLLSAICLICGDRQDLEEPTKVDKLQEPLLEALKIYIRKRRPSKPHMFPKILMKITDLRSISAKGAERVITLKMEIPGSMPPLIQEMLENSEGHEPLTPSSSGNTAEHSPSISPSSVENSGVSQSPLVQ

SEQ ID NO: 72968 - protein, 336 aa, Homo sapiens; identical to SEQ ID NO: 72967
  Payload ID: 14452
  Gene Symbol: RARB
  Gene Name: retinoic acid receptor, beta
  Uniprot ID: P10826
  ENSP ID: ENSP00000398840

SEQ ID NO: 72969 - protein, 443 aa, Homo sapiens
  Payload ID: 14453
  Gene Symbol: RARG
  Gene Name: retinoic acid receptor, gamma
  Uniprot ID: P13631
  ENSP ID: ENSP00000343698
MYDCMETFAPGPRRLYGAAGPGAGLLRRATGGSCFAGLESFAWPQPASLQSVETQSTSSEEMVPSSPSPPPPPRVYKPCFVCNDKSSGYHYGVSSCEGCKGFFRRSIQKNMVYTCHRDKNCIINKVTRNRCQYCRLQKCFEVGMSKEAVRNDRNKKKKEVKEEGSPDSYELSPQLEELITKVSKAHQETFPSLCQLGKYTTNSSADHRVQLDLGLWDKFSELATKCIIKIVEFAKRLPGFTGLSIADQITLLKAACLDILMLRICTRYTPEQDTMTFSDGLTLNRTQMHNAGFGPLTDLVFAFAGQLLPLEMDDTETGLLSAICLICGDRMDLEEPEKVDKLQEPLLEALRLYARRRRPSQPYMFPRMLMKITDLRGISTKGAERAITLKMEIPGPMPPLIREMLENPEMFEDDSSQPGPHPNASSEDEVPGGQGKGGLKSPA

SEQ ID NO: 72970 - protein, 382 aa, Homo sapiens
  Payload ID: 14453
  Gene Symbol: RARG
  Gene Name: retinoic acid receptor, gamma
  Uniprot ID: P13631
  ENSP ID: ENSP00000377947
MVPSSPSPPPPPRVYKPCFVCNDKSSGYHYGVSSCEGCKGFFRRSIQKNMVYTCHRDKNCIINKVTRNRCQYCRLQKCFEVGMSKEAVRNDRNKKKKEVKEEGSPDSYELSPQLEELITKVSKAHQETFPSLCQLGKYTTNSSADHRVQLDLGLWDKFSELATKCIIKIVEFAKRLPGFTGLSIADQITLLKAACLDILMLRICTRYTPEQDTMTFSDGLTLNRTQMHNAGFGPLTDLVFAFAGQLLPLEMDDTETGLLSAICLICGDRMDLEEPEKVDKLQEPLLEALRLYARRRRPSQPYMFPRMLMKITDLRGISTKGAERAITLKMEIPGPMPPLIREMLENPEMFEDDSSQPGPHPNASSEDEVPGGQGKGGLKSPA

SEQ ID NO: 72971 - protein, 454 aa, Homo sapiens
  Payload ID: 14453
  Gene Symbol: RARG
  Gene Name: retinoic acid receptor, gamma
  Uniprot ID: P13631
  ENSP ID: ENSP00000388510
MATNKERLFAAGALGPGSGYPGAGFPFAFPGALRGSPPFEMLSPSFRGLGQPDLPKEMASLSVETQSTSSEEMVPSSPSPPPPPRVYKPCFVCNDKSSGYHYGVSSCEGCKGFFRRSIQKNMVYTCHRDKNCIINKVTRNRCQYCRLQKCFEVGMSKEAVRNDRNKKKKEVKEEGSPDSYELSPQLEELITKVSKAHQETFPSLCQLGKYTTNSSADHRVQLDLGLWDKFSELATKCIIKIVEFAKRLPGFTGLSIADQITLLKAACLDILMLRICTRYTPEQDTMTFSDGLTLNRTQMHNAGFGPLTDLVFAFAGQLLPLEMDDTETGLLSAICLICGDRMDLEEPEKVDKLQEPLLEALRLYARRRRPSQPYMFPRMLMKITDLRGISTKGAERAITLKMEIPGPMPPLIREMLENPEMFEDDSSQPGPHPNASSEDEVPGGQGKGGLKSPA

SEQ ID NO: 72972 - protein, 432 aa, Homo sapiens
  Payload ID: 14453
  Gene Symbol: RARG
  Gene Name: retinoic acid receptor, gamma
  Uniprot ID: P13631
  ENSP ID: ENSP00000444335
MLALPLPPCWSGAPPGEEGESAAGPWCFQHPVSLQAGSRCTTVWKRLPRVRDGCTGRPGPGPACCAEPPAAPVSPDLNLLPGRNPPACNGFFRRSIQKNMVYTCHRDKNCIINKVTRNRCQYCRLQKCFEVGMSKEAVRNDRNKKKKEVKEEGSPDSYELSPQLEELITKVSKAHQETFPSLCQLGKYTTNSSADHRVQLDLGLWDKFSELATKCIIKIVEFAKRLPGFTGLSIADQITLLKAACLDILMLRICTRYTPEQDTMTFSDGLTLNRTQMHNAGFGPLTDLVFAFAGQLLPLEMDDTETGLLSAICLICGDRMDLEEPEKVDKLQEPLLEALRLYARRRRPSQPYMFPRMLMKITDLRGISTKGAERAITLKMEIPGPMPPLIREMLENPEMFEDDSSQPGPHPNASSEDEVPGGQGKGGLKSPA

SEQ ID NO: 72973 - protein, 15 aa, Homo sapiens
  Payload ID: 14453
  Gene Symbol: RARG
  Gene Name: retinoic acid receptor, gamma
  ENSP ID: ENSP00000454385
MATNKERLFAAGALG

SEQ ID NO: 72974 - protein, 57 aa, Homo sapiens
  Payload ID: 14453
  Gene Symbol: RARG
  Gene Name: retinoic acid receptor, gamma
  ENSP ID: ENSP00000454417
MATNKERLFAAGALGPGSGYPGAGFPFAFPGALRGSPPFEMLSPSFRGLGQPDLPKE

SEQ ID NO: 72975 - protein, 32 aa, Homo sapiens
  Payload ID: 14453
  Gene Symbol: RARG
  Gene Name: retinoic acid receptor, gamma
  ENSP ID: ENSP00000454604
MATNKERLFAAGALGPGSGYPGAGFPFAFPGA

SEQ ID NO: 72976 - protein, 462 aa, Homo sapiens
  Payload ID: 14454
  Gene Symbol: RXRA
  Gene Name: retinoid X receptor, alpha
  Uniprot ID: P19793
  ENSP ID: ENSP00000419692
MDTKHFLPLDFSTQVNSSLTSPTGRGSMAAPSLHPSLGPGIGSPGQLHSPISTLSSPINGMGPPFSVISSPMGPHSMSVPTTPTLGFSTGSPQLSSPMNPVSSSEDIKPPLGLNGVLKVPAHPSGNMASFTKHICAICGDRSSGKHYGVYSCEGCKGFFKRTVRKDLTYTCRDNKDCLIDKRQRNRCQYCRYQKCLAMGMKREAVQEERQRGKDRNENEVESTSSANEDMPVERILEAELAVEPKTETYVEANMGLNPSSPNDPVTNICQAADKQLFTLVEWAKRIPHFSELPLDDQVILLRAGWNELLIASFSHRSIAVKDGILLATGLHVHRNSAHSAGVGAIFDRVLTELVSKMRDMQMDKTELGCLRAIVLFNPDSKGLSNPAEVEALREKVYASLEAYCKHKYPEQPGRFAKLLLRLPALRSIGLKCLEHLFFFKLIGDTPIDTFLMEMLEAPHQMT

SEQ ID NO: 72977 - protein, 533 aa, Homo sapiens
  Payload ID: 14455
  Gene Symbol: RXRB
  Gene Name: retinoid X receptor, beta
  Uniprot ID: P28702
  ENSP ID: ENSP00000363812
MSWAARPPFLPQRHAAGQCGPVGVRKEMHCGVASRWRRRRPWLDPAAAAAAAVAGGEQQTPEPEPGEAGRDGMGDSGRDSRSPDSSSPNPLPQGVPPPSPPGPPLPPSTAPSLGGSGAPPPPPMPPPPLGSPFPVISSSMGSPGLPPPAPPGFSGPVSSPQINSTVSLPGGGSGPPEDVKPPVLGVRGLHCPPPPGGPGAGKRLCAICGDRSSGKHYGVYSCEGCKGFFKRTIRKDLTYSCRDNKDCTVDKRQRNRCQYCRYQKCLATGMKREAVQEERQRGKDKDGDGEGAGGAPEEMPVDRILEAELAVEQKSDQGVEGPGGTGGSGSSPNDPVTNICQAADKQLFTLVEWAKRIPHFSSLPLDDQVILLRAGWNELLIASFSHRSIDVRDGILLATGLHVHRNSAHSAGVGAIFDRVLTELVSKMRDMRMDKTELGCLRAIILFNPDAKGLSNPSEVEVLREKVYASLETYCKQKYPEQQGRFAKLLLRLPALRSIGLKCLEHLFFFKLIGDTPIDTFLMEMLEAPHQLA

SEQ ID NO: 72978 - protein, 537 aa, Homo sapiens
  Payload ID: 14455
  Gene Symbol: RXRB
  Gene Name: retinoid X receptor, beta
  Uniprot ID: P28702
  ENSP ID: ENSP00000363817
MSWAARPPFLPQRHAAGQCGPVGVRKEMHCGVASRWRRRRPWLDPAAAAAAAVAGGEQQTPEPEPGEAGRDGMGDSGRDSRSPDSSSPNPLPQGVPPPSPPGPPLPPSTAPSLGGSGAPPPPPMPPPPLGSPFPVISSSMGSPGLPPPAPPGFSGPVSSPQINSTVSLPGGGSGPPEDVKPPVLGVRGLHCPPPPGGPGAGKRLCAICGDRSSGKHYGVYSCEGCKGFFKRTIRKDLTYSCRDNKDCTVDKRQRNRCQYCRYQKCLATGMKREAVQEERQRGKDKDGDGEGAGGAPEEMPVDRILEAELAVEQKSDQGVEGPGGTGGSGSSPNDPVTNICQAADKQLFTLVEWAKRIPHFSSLPLDDQVILLRAGWNELLIASFSHRSIDVRDGILLATGLHVHRNSAHSAGVGAIFDRSLSRVLTELVSKMRDMRMDKTELGCLRAIILFNPDAKGLSNPSEVEVLREKVYASLETYCKQKYPEQQGRFAKLLLRLPALRSIGLKCLEHLFFFKLIGDTPIDTFLMEMLEAPHQLA

SEQ ID NO: 72979 - protein, 537 aa, Homo sapiens; identical to SEQ ID NO: 72978
  Payload ID: 14455
  Gene Symbol: RXRB
  Gene Name: retinoid X receptor, beta
  Uniprot ID: P28702
  ENSP ID: ENSP00000372703

SEQ ID NO: 72980 - protein, 533 aa, Homo sapiens; identical to SEQ ID NO: 72977
  Payload ID: 14455
  Gene Symbol: RXRB
  Gene Name: retinoid X receptor, beta
  Uniprot ID: P28702
  ENSP ID: ENSP00000372704

SEQ ID NO: 72981 - protein, 96 aa, Homo sapiens
  Payload ID: 14455
  Gene Symbol: RXRB
  Gene Name: retinoid X receptor, beta
  ENSP ID: ENSP00000389514
  MOD_RES (1)..(1): Any amino acid
XSPNDPVTNICQAADKQLFTLVEWAKRIPHFSSLPLDDQVILLRAGLHVHRNSAHSAGVGAIFDRVLTELVSKMRDMRMDKTELGCLRAIILFNPD

SEQ ID NO: 72982 - protein, 96 aa, Homo sapiens; identical to SEQ ID NO: 72981
  Payload ID: 14455
  Gene Symbol: RXRB
  Gene Name: retinoid X receptor, beta
  ENSP ID: ENSP00000392937
  MOD_RES (1)..(1): Any amino acid

SEQ ID NO: 72983 - protein, 537 aa, Homo sapiens; identical to SEQ ID NO: 72978
  Payload ID: 14455
  Gene Symbol: RXRB
  Gene Name: retinoid X receptor, beta
  Uniprot ID: P28702
  ENSP ID: ENSP00000393286

SEQ ID NO: 72984 - protein, 537 aa, Homo sapiens; identical to SEQ ID NO: 72978
  Payload ID: 14455
  Gene Symbol: RXRB
  Gene Name: retinoid X receptor, beta
  Uniprot ID: P28702
  ENSP ID: ENSP00000393870

SEQ ID NO: 72985 - protein, 537 aa, Homo sapiens; identical to SEQ ID NO: 72978
  Payload ID: 14455
  Gene Symbol: RXRB
  Gene Name: retinoid X receptor, beta
  Uniprot ID: P28702
  ENSP ID: ENSP00000400104

SEQ ID NO: 72986 - protein, 533 aa, Homo sapiens; identical to SEQ ID NO: 72977
  Payload ID: 14455
  Gene Symbol: RXRB
  Gene Name: retinoid X receptor, beta
  Uniprot ID: P28702
  ENSP ID: ENSP00000402506

SEQ ID NO: 72987 - protein, 537 aa, Homo sapiens; identical to SEQ ID NO: 72978
  Payload ID: 14455
  Gene Symbol: RXRB
  Gene Name: retinoid X receptor, beta
  Uniprot ID: P28702
  ENSP ID: ENSP00000402590

SEQ ID NO: 72988 - protein, 96 aa, Homo sapiens; identical to SEQ ID NO: 72981
  Payload ID: 14455
  Gene Symbol: RXRB
  Gene Name: retinoid X receptor, beta
  ENSP ID: ENSP00000406246
  MOD_RES (1)..(1): Any amino acid

SEQ ID NO: 72989 - protein, 96 aa, Homo sapiens; identical to SEQ ID NO: 72981
  Payload ID: 14455
  Gene Symbol: RXRB
  Gene Name: retinoid X receptor, beta
  ENSP ID: ENSP00000410433
  MOD_RES (1)..(1): Any amino acid

SEQ ID NO: 72990 - protein, 533 aa, Homo sapiens; identical to SEQ ID NO: 72977
  Payload ID: 14455
  Gene Symbol: RXRB
  Gene Name: retinoid X receptor, beta
  Uniprot ID: P28702
  ENSP ID: ENSP00000410468

SEQ ID NO: 72991 - protein, 533 aa, Homo sapiens; identical to SEQ ID NO: 72977
  Payload ID: 14455
  Gene Symbol: RXRB
  Gene Name: retinoid X receptor, beta
  Uniprot ID: P28702
  ENSP ID: ENSP00000411238

SEQ ID NO: 72992 - protein, 96 aa, Homo sapiens; identical to SEQ ID NO: 72981
  Payload ID: 14455
  Gene Symbol: RXRB
  Gene Name: retinoid X receptor, beta
  ENSP ID: ENSP00000411729
  MOD_RES (1)..(1): Any amino acid

SEQ ID NO: 72993 - protein, 533 aa, Homo sapiens; identical to SEQ ID NO: 72977
  Payload ID: 14455
  Gene Symbol: RXRB
  Gene Name: retinoid X receptor, beta
  Uniprot ID: P28702
  ENSP ID: ENSP00000415199

SEQ ID NO: 72994 - protein, 79 aa, Homo sapiens
  Payload ID: 14455
  Gene Symbol: RXRB
  Gene Name: retinoid X receptor, beta
  ENSP ID: ENSP00000431353
MSWAARPPFLPQRHAAGQCGPVGVRKEMHCGVASRWRRRRPWLDPAAAAAAAVAGGEQQTPEPEPGEAGRDGMGDSGRD

SEQ ID NO: 72995 - protein, 79 aa, Homo sapiens; identical to SEQ ID NO: 72994
  Payload ID: 14455
  Gene Symbol: RXRB
  Gene Name: retinoid X receptor, beta
  ENSP ID: ENSP00000431369

SEQ ID NO: 72996 - protein, 79 aa, Homo sapiens; identical to SEQ ID NO: 72994
  Payload ID: 14455
  Gene Symbol: RXRB
  Gene Name: retinoid X receptor, beta
  ENSP ID: ENSP00000432690

SEQ ID NO: 72997 - protein, 79 aa, Homo sapiens; identical to SEQ ID NO: 72994
  Payload ID: 14455
  Gene Symbol: RXRB
  Gene Name: retinoid X receptor, beta
  ENSP ID: ENSP00000433265

SEQ ID NO: 72998 - protein, 79 aa, Homo sapiens; identical to SEQ ID NO: 72994
  Payload ID: 14455
  Gene Symbol: RXRB
  Gene Name: retinoid X receptor, beta
  ENSP ID: ENSP00000434208

SEQ ID NO: 72999 - protein, 347 aa, Homo sapiens
  Payload ID: 14455
  Gene Symbol: RXRB
  Gene Name: retinoid X receptor, beta
  ENSP ID: ENSP00000435434
MRECGGGPGAGKRLCAICGDRSSGKHYGVYSCEGCKGFFKRTIRKDLTYSCRDNKDCTVDKRQRNRCQYCRYQKCLATGMKREAVQEERQRGKDKDGDGEGAGGAPEEMPVDRILEAELAVEQKSDQGVEGPGGTGGSGSSPNDPVTNICQAADKQLFTLVEWAKRIPHFSSLPLDDQVILLRAGWNELLIASFSHRSIDVRDGILLATGLHVHRNSAHSAGVGAIFDRSLSRVLTELVSKMRDMRMDKTELGCLRAIILFNPDAKGLSNPSEVEVLREKVYASLETYCKQKYPEQQGRFAKLLLRLPALRSIGLKCLEHLFFFKLIGDTPIDTFLMEMLEAPHQLA

SEQ ID NO: 73000 - protein, 79 aa, Homo sapiens; identical to SEQ ID NO: 72994
  Payload ID: 14455
  Gene Symbol: RXRB
  Gene Name: retinoid X receptor, beta
  ENSP ID: ENSP00000435471

SEQ ID NO: 73001 - protein, 463 aa, Homo sapiens
  Payload ID: 14456
  Gene Symbol: RXRG
  Gene Name: retinoid X receptor, gamma
  Uniprot ID: P48443
  ENSP ID: ENSP00000352900
MYGNYSHFMKFPAGYGGSPGHTGSTSMSPSAALSTGKPMDSHPSYTDTPVSAPRTLSAVGTPLNALGSPYRVITSAMGPPSGALAAPPGINLVAPPSSQLNVVNSVSSSEDIKPLPGLPGIGNMNYPSTSPGSLVKHICAICGDRSSGKHYGVYSCEGCKGFFKRTIRKDLIYTCRDNKDCLIDKRQRNRCQYCRYQKCLVMGMKREAVQEERQRSRERAESEAECATSGHEDMPVERILEAELAVEPKTESYGDMNMENSTNDPVTNICHAADKQLFTLVEWAKRIPHFSDLTLEDQVILLRAGWNELLIASFSHRSVSVQDGILLATGLHVHRSSAHSAGVGSIFDRVLTELVSKMKDMQMDKSELGCLRAIVLFNPDAKGLSNPSEVETLREKVYATLEAYTKQKYPEQPGRFAKLLLRLPALRSIGLKCLEHLFFFKLIGDTPIDTFLMEMLETPLQIT

SEQ ID NO: 73002 - protein, 340 aa, Homo sapiens
  Payload ID: 14456
  Gene Symbol: RXRG
  Gene Name: retinoid X receptor, gamma
  ENSP ID: ENSP00000482458
MNYPSTSPGSLVKHICAICGDRSSGKHYGVYSCEGCKGFFKRTIRKDLIYTCRDNKDCLIDKRQRNRCQYCRYQKCLVMGMKREAVQEERQRSRERAESEAECATSGHEDMPVERILEAELAVEPKTESYGDMNMENSTNDPVTNICHAADKQLFTLVEWAKRIPHFSDLTLEDQVILLRAGWNELLIASFSHRSVSVQDGILLATGLHVHRSSAHSAGVGSIFDRVLTELVSKMKDMQMDKSELGCLRAIVLFNPDAKGLSNPSEVETLREKVYATLEAYTKQKYPEQPGRFAKLLLRLPALRSIGLKCLEHLFFFKLIGDTPIDTFLMEMLETPLQIT

SEQ ID NO: 73003 - protein, 197 aa, Homo sapiens
  Payload ID: 14457
  Gene Symbol: RBP1
  Gene Name: retinol binding protein 1, cellular
  ENSP ID: ENSP00000232219
MDPPAGFVRAGNPAVAAPQSPLSPEGAHFRAAHHPRSTGSRCPGSLQPSRPLVANWLQSLPEMPVDFTGYWKMLVNENFEEYLRALDVNVALRKIANLLKPDKEIVQDGDHMIIRTLSTFRNYIMDFQVGKEFEEDLTGIDDRKCMTTVSWDGDKLQCVQKGEKEGRGWTQWIEGDELHLEMRVEGVVCKQVFKKVQ

SEQ ID NO: 73004 - protein, 91 aa, Homo sapiens
  Payload ID: 14457
  Gene Symbol: RBP1
  Gene Name: retinol binding protein 1, cellular
  ENSP ID: ENSP00000424813
MPVDFTGYWKMLVNENFEEYLRALDVNVALRKIANLLKPDKEIVQDGDHMIIRTLSTFRNYIMDFQVGKEFEEDLTGIDDRKCMSETGFSS

SEQ ID NO: 73005 - protein, 98 aa, Homo sapiens
  Payload ID: 14457
  Gene Symbol: RBP1
  Gene Name: retinol binding protein 1, cellular
  ENSP ID: ENSP00000427492
MPVDFTGYWKMLVNENFEEYLRALDVNVALRKIANLLKPDKEIVQDGDHMIIRTLSTFRNYIMDFQVGKEFEEDLTGIDDRKCMVRIRVHLVSPAQGA

SEQ ID NO: 73006 - protein, 157 aa, Homo sapiens
  Payload ID: 14457
  Gene Symbol: RBP1
  Gene Name: retinol binding protein 1, cellular
  Uniprot ID: P09455
  ENSP ID: ENSP00000429166
MDPPAGFVRAGNPAVAAPQSPLSPEGAHFRAAHHPRSTGSRCPGSLQPSRPLVANWLQSLPEMPVDFTGYWKMLVNENFEEYLRALDVNVALRKIANLLKPDKEIVQDGDHMIIRTLSTFRNYIMDFQVGKEFEEDLTGIDDRKCMAGVQSRDLSSL

SEQ ID NO: 73007 - protein, 153 aa, Homo sapiens
  Payload ID: 14457
  Gene Symbol: RBP1
  Gene Name: retinol binding protein 1, cellular
  Uniprot ID: P09455
  ENSP ID: ENSP00000477621
MDPPAGFVRAGNPAVAAPQSPLSPEGAHFRAAHHPRSTGSRCPGSLQPSRPLVANWLQSLPEMPVDFTGYWKMLVNENFEEYLRALDVNVALRKIANLLKPDKEIVQDGDHMIIRTLSTFRNYIMDFQVGKEFEEDLTGIDDRKCMSETGFSS

SEQ ID NO: 73008 - protein, 135 aa, Homo sapiens
  Payload ID: 14457
  Gene Symbol: RBP1
  Gene Name: retinol binding protein 1, cellular
  Uniprot ID: P09455
  ENSP ID: ENSP00000482165
MPVDFTGYWKMLVNENFEEYLRALDVNVALRKIANLLKPDKEIVQDGDHMIIRTLSTFRNYIMDFQVGKEFEEDLTGIDDRKCMTTVSWDGDKLQCVQKGEKEGRGWTQWIEGDELHLEMRVEGVVCKQVFKKVQ

SEQ ID NO: 73009 - protein, 134 aa, Homo sapiens
  Payload ID: 14458
  Gene Symbol: RBP2
  Gene Name: retinol binding protein 2, cellular
  Uniprot ID: P50120
  ENSP ID: ENSP00000232217
MTRDQNGTWEMESNENFEGYMKALDIDFATRKIAVRLTQTKVIDQDGDNFKTKTTSTFRNYDVDFTVGVEFDEYTKSLDNRHVKALVTWEGDVLVCVQKGEKENRGWKQWIEGDKLYLELTCGDQVCRQVFKKK

SEQ ID NO: 73010 - protein, 24 aa, Homo sapiens
  Payload ID: 14458
  Gene Symbol: RBP2
  Gene Name: retinol binding protein 2, cellular
  ENSP ID: ENSP00000421266
MTRDQNGTWEMESNENFEGYMKAL

SEQ ID NO: 73011 - protein, 103 aa, Homo sapiens
  Payload ID: 14458
  Gene Symbol: RBP2
  Gene Name: retinol binding protein 2, cellular
  ENSP ID: ENSP00000424333
MTRDQNGTWEMESNENFEGYMKALDIDFATRKIAVRLTQTKVIDQDGDNFKTKTTSTFRNYDVDFTVGVEFDEYTKSLDNRHVKALVTWEGDVLVCVQKGEKE

SEQ ID NO: 73012 - protein, 1247 aa, Homo sapiens
  Payload ID: 14459
  Gene Symbol: RBP3
  Gene Name: retinol binding protein 3, interstitial
  Uniprot ID: P10745
  ENSP ID: ENSP00000463151
MMREWVLLMSVLLCGLAGPTHLFQPSLVLDMAKVLLDNYCFPENLLGMQEAIQQAIKSHEILSISDPQTLASVLTAGVQSSLNDPRLVISYEPSTPEPPPQVPALTSLSEEELLAWLQRGLRHEVLEGNVGYLRVDSVPGQEVLSMMGEFLVAHVWGNLMGTSALVLDLRHCTGGQVSGIPYIISYLHPGNTILHVDTIYNRPSNTTTEIWTLPQVLGERYGADKDVVVLTSSQTRGVAEDIAHILKQMRRAIVVGERTGGGALDLRKLRIGESDFFFTVPVSRSLGPLGGGSQTWEGSGVLPCVGTPAEQALEKALAILTLRSALPGVVHCLQEVLKDYYTLVDRVPTLLQHLASMDFSTVVSEEDLVTKLNAGLQAASEDPRLLVRAIGPTETPSWPAPDAAAEDSPGVAPELPEDEAIRQALVDSVFQVSVLPGNVGYLRFDSFADASVLGVLAPYVLRQVWEPLQDTEHLIMDLRHNPGGPSSAVPLLLSYFQGPEAGPVHLFTTYDRRTNITQEHFSHMELPGPRYSTQRGVYLLTSHRTATAAEEFAFLMQSLGWATLVGEITAGNLLHTRTVPLLDTPEGSLALTVPVLTFIDNHGEAWLGGGVVPDAIVLAEEALDKAQEVLEFHQSLGALVEGTGHLLEAHYARPEVVGQTSALLRAKLAQGAYRTAVDLESLASQLTADLQEVSGDHRLLVFHSPGELVVEEAPPPPPAVPSPEELTYLIEALFKTEVLPGQLGYLRFDAMAELETVKAVGPQLVRLVWQQLVDTAALVIDLRYNPGSYSTAIPLLCSYFFEAEPRQHLYSVFDRATSKVTEVWTLPQVAGQRYGSHKDLYILMSHTSGSAAEAFAHTMQDLQRATVIGEPTAGGALSVGIYQVGSSPLYASMPTQMAMSATTGKAWDLAGVEPDITVPMSEALSIAQDIVALRAKVPTVLQTAGKLVADNYASAELGAKMATKLSGLQSRYSRVTSEVALAEILGADLQMLSGDPHLKAAHIPENAKDRIPGIVPMQIPSPEVFEELIKFSFHTNVLEDNIGYLRFDMFGDGELLTQVSRLLVEHIWKKIMHTDAMIIDMRFNIGGPTSSIPILCSYFFDEGPPVLLDKIYSRPDDSVSELWTHAQVVGERYGSKKSMVILTSSVTAGTAEEFTYIMKRLGRALVIGEVTSGGCQPPQTYHVDDTNLYLTIPTARSVGASDGSSWEGVGVTPHVVVPAEEALARAKEMLQHNQLRVKRSPGLQDHL

SEQ ID NO: 73013 - protein, 201 aa, Homo sapiens
  Payload ID: 14460
  Gene Symbol: RBP4
  Gene Name: retinol binding protein 4, plasma
  Uniprot ID: P02753
  ENSP ID: ENSP00000360519
MKWVWALLLLAALGSGRAERDCRVSSFRVKENFDKARFSGTWYAMAKKDPEGLFLQDNIVAEFSVDETGQMSATAKGRVRLLNNWDVCADMVGTFTDTEDPAKFKMKYWGVASFLQKGNDDHWIVDTDYDTYAVQYSCRLLNLDGTCADSYSFVFSRDPNGLPPEAQKIVRQRQEELCLARQYRLIVHNGYCDGRSERNLL

SEQ ID NO: 73014 - protein, 201 aa, Homo sapiens; identical to SEQ ID NO: 73013
  Payload ID: 14460
  Gene Symbol: RBP4
  Gene Name: retinol binding protein 4, plasma
  Uniprot ID: P02753
  ENSP ID: ENSP00000360522

SEQ ID NO: 73015 - protein, 199 aa, Homo sapiens
  Payload ID: 14460
  Gene Symbol: RBP4
  Gene Name: retinol binding protein 4, plasma
  ENSP ID: ENSP00000360524
MNYSKIPAQVDLRRQTERDCRVSSFRVKENFDKARFSGTWYAMAKKDPEGLFLQDNIVAEFSVDETGQMSATAKGRVRLLNNWDVCADMVGTFTDTEDPAKFKMKYWGVASFLQKGNDDHWIVDTDYDTYAVQYSCRLLNLDGTCADSYSFVFSRDPNGLPPEAQKIVRQRQEELCLARQYRLIVHNGYCDGRSERNLL

SEQ ID NO: 73016 - protein, 199 aa, Homo sapiens
  Payload ID: 14460
  Gene Symbol: RBP4
  Gene Name: retinol binding protein 4, plasma
  ENSP ID: ENSP00000480654
MKWVWALLLLAAWAAAERDCRVSSFRVKENFDKARFSGTWYAMAKKDPEGLFLQDNIVAEFSVDETGQMSATAKGRVRLLNNWDVCADMVGTFTDTEDPAKFKMKYWGVASFLQKGNDDHWIVDTDYDTYAVQYSCRLLNLDGTCADSYSFVFSRDPNGLPPEAQKIVRQRQEELCLARQYRLIVHNGYCDGRSERNLL

SEQ ID NO: 73017 - protein, 199 aa, Homo sapiens; identical to SEQ ID NO: 73015
  Payload ID: 14460
  Gene Symbol: RBP4
  Gene Name: retinol binding protein 4, plasma
  ENSP ID: ENSP00000487033

SEQ ID NO: 73018 - protein, 135 aa, Homo sapiens
  Payload ID: 14461
  Gene Symbol: RBP5
  Gene Name: retinol binding protein 5, cellular
  Uniprot ID: P82980
  ENSP ID: ENSP00000266560
MPPNLTGYYRFVSQKNMEDYLQALNISLAVRKIALLLKPDKEIEHQGNHMTVRTLSTFRNYTVQFDVGVEFEEDLRSVDGRKCQTIVTWEEEHLVCVQKGEVPNRGWRHWLEGEMLYLELTARDAVCEQVFRKVR

SEQ ID NO: 73019 - protein, 97 aa, Homo sapiens
  Payload ID: 14461
  Gene Symbol: RBP5
  Gene Name: retinol binding protein 5, cellular
  ENSP ID: ENSP00000438083
MPPNLTGYYRFVSQKNMEDYLQALNISLAVRKIALLLKPDKEIEHQGNHMTVRTLSTFRNYTVQFDVGVEFEEDLRSVDGRKCQAALGMNSPARAIS

SEQ ID NO: 73020 - protein, 69 aa, Homo sapiens
  Payload ID: 14461
  Gene Symbol: RBP5
  Gene Name: retinol binding protein 5, cellular
  ENSP ID: ENSP00000445483
MPPNLTGYYRFVSQKNMEDYLQALSSPHRHQLGCAEDRAAAEAGQGDRTPGQPHDGEDAQHLPKLHCAV

SEQ ID NO: 73021 - protein, 134 aa, Homo sapiens
  Payload ID: 14462
  Gene Symbol: RBP7
  Gene Name: retinol binding protein 7, cellular
  Uniprot ID: Q96R05
  ENSP ID: ENSP00000294435
MPADLSGTWTLLSSDNFEGYMLALGIDFATRKIAKLLKPQKVIEQNGDSFTIHTNSSLRNYFVKFKVGEEFDEDNRGLDNRKCKSLVIWDNDRLTCIQKGEKKNRGWTHWIEGDKLHLEMFCEGQVCKQTFQRA

SEQ ID NO: 73022 - protein, 59 aa, Homo sapiens
  Payload ID: 14462
  Gene Symbol: RBP7
  Gene Name: retinol binding protein 7, cellular
  ENSP ID: ENSP00000324228
MPADLSGTWTLLSSDNFEGYMLALDGVLLLLPRLECNGGISAHRNFRLPGSNNSPASAS

SEQ ID NO: 73023 - protein, 341 aa, Homo sapiens
  Payload ID: 14463
  Gene Symbol: RDH10
  Gene Name: retinol dehydrogenase 10 (all-trans)
  Uniprot ID: Q8IZV5
  ENSP ID: ENSP00000240285
MNIVVEFFVVTFKVLWAFVLAAARWLVRPKEKSVAGQVCLITGAGSGLGRLFALEFARRRALLVLWDINTQSNEETAGMVRHIYRDLEAADAAALQAGNGEEEILPHCNLQVFTYTCDVGKRENVYLTAERVRKEVGEVSVLVNNAGVVSGHHLLECPDELIERTMMVNCHAHFWTTKAFLPTMLEINHGHIVTVASSLGLFSTAGVEDYCASKFGVVGFHESLSHELKAAEKDGIKTTLVCPYLVDTGMFRGCRIRKEIEPFLPPLKPDYCVKQAMKAILTDQPMICTPRLMYIVTFMKSILPFEAVVCMYRFLGADKCMYPFIAQRKQATNNNEAKNGI

SEQ ID NO: 73024 - protein, 176 aa, Homo sapiens
  Payload ID: 14463
  Gene Symbol: RDH10
  Gene Name: retinol dehydrogenase 10 (all-trans)
  ENSP ID: ENSP00000428132
MMVNCHAHFWTTKAFLPTMLEINHGHIVTVASSLGLFSTAGVEDYCASKFGVVGFHESLSHELKAAEKDGIKTTLVCPYLVDTGMFRGCRIRKEIEPFLPPLKPDYCVKQAMKAILTDQPMICTPRLMYIVTFMKSILPFEAVVCMYRFLGADKCMYPFIAQRKQATNNNEAKNGI

SEQ ID NO: 73025 - protein, 62 aa, Homo sapiens
  Payload ID: 14463
  Gene Symbol: RDH10
  Gene Name: retinol dehydrogenase 10 (all-trans)
  ENSP ID: ENSP00000429727
MMVNCHAHFWTTKAFLPTMLEINHGHIVTVASSLGLFSTAGVEDYCASKFGVVGFHESLSHE

SEQ ID NO: 73026 - protein, 318 aa, Homo sapiens
  Payload ID: 14464
  Gene Symbol: RDH11
  Gene Name: retinol dehydrogenase 11 (all-trans/9-cis/11-cis)
  Uniprot ID: Q8TC12
  ENSP ID: ENSP00000370750
MVELMFPLLLLLLPFLLYMAAPQIRKMLSSGVCTSTVQLPGKVVVVTGANTGIGKETAKELAQRGARVYLACRDVEKGELVAKEIQTTTGNQQVLVRKLDLSDTKSIRAFAKGFLAEEKHLHVLINNAGVMMCPYSKTADGFEMHIGVNHLGHFLLTHLLLEKLKESAPSRIVNVSSLAHHLGRIHFHNLQGEKFYNAGLAYCHSKLANILFTQELARRLKGSGVTTYSVHPGTVQSELVRHSSFMRWMWWLFSFFIKTPQQGAQTSLHCALTEGLEILSGNHFSDCHVAWVSAQARNETIARRLWDVSCDLLGLPID

SEQ ID NO: 73027 - protein, 248 aa, Homo sapiens
  Payload ID: 14464
  Gene Symbol: RDH11
  Gene Name: retinol dehydrogenase 11 (all-trans/9-cis/11-cis)
  Uniprot ID: Q8TC12
  ENSP ID: ENSP00000416395
MVELMFPLLLLLLPFLLYMAAPQIRKMLSSGVCTSTVQLPGKVVVVTGANTGIGKETAKELAQRGARVYLACRDVEKGELVAKEIQTTTGNQQVLVRKLDLSDTKSIRAFAKGFLAEEKHLHVLINNAGVMMCPYSKTADGFEMHIGVNHLGSGVTTYSVHPGTVQSELVRHSSFMRWMWWLFSFFIKTPQQGAQTSLHCALTEGLEILSGNHFSDCHVAWVSAQARNETIARRLWDVSCDLLGLPID

SEQ ID NO: 73028 - protein, 186 aa, Homo sapiens
  Payload ID: 14464
  Gene Symbol: RDH11
  Gene Name: retinol dehydrogenase 11 (all-trans/9-cis/11-cis)
  ENSP ID: ENSP00000450435
MVELMFPLLLLLLPFLLYMAAPQIRKMLSSGVCTSTVQLPGKVVVVTGANTGIGKETAKELAQREEKHLHVLINNAGVMMCPYSKTADGFEMHIGVNHLGHFLLTHLLLEKLKESAPSRIVNVSSLAHHLGRIHFHNLQGEKFYNAGLAYCHSKLANILFTQELARRLKGSGVTTYSVHPGTVQSE

SEQ ID NO: 73029 - protein, 178 aa, Homo sapiens
  Payload ID: 14464
  Gene Symbol: RDH11
  Gene Name: retinol dehydrogenase 11 (all-trans/9-cis/11-cis)
  ENSP ID: ENSP00000450651
MVELMFPLLLLLLPFLLYMAAPQIRKMLSSGVCTSTVQLPGKVVVVTGANTGIGKETAKELAQRGHFLLTHLLLEKLKESAPSRIVNVSSLAHHLGRIHFHNLQGEKFYNAGLAYCHSKLANILFTQELARRLKGSGVTTYSVHPGTVQSELVRHSSFMRWMWWLFSFFIKTPQQGAQ

SEQ ID NO: 73030 - protein, 204 aa, Homo sapiens
  Payload ID: 14464
  Gene Symbol: RDH11
  Gene Name: retinol dehydrogenase 11 (all-trans/9-cis/11-cis)
  ENSP ID: ENSP00000450802
SDTKSIRAFAKGFLAEEKHLHVLINNAGVMMCPYSKTADGFEMHIGVNHLGHFLLTHLLLEKLKESAPSRIVNVSSLAHHLGRIHFHNLQGEKFYNAGLAYCHSKLANILFTQELARRLKVQSELVRHSSFMRWMWWLFSFFIKTPQQGAQTSLHCALTEGLEILSGNHFSDCHVAWVSAQARNETIARRLWDVSCDLLGLPID

SEQ ID NO: 73031 - protein, 61 aa, Homo sapiens
  Payload ID: 14464
  Gene Symbol: RDH11
  Gene Name: retinol dehydrogenase 11 (all-trans/9-cis/11-cis)
  ENSP ID: ENSP00000451280
MVELMFPLLLLLLPFLLYMAAPQIRSLPPNPSAARETKGISPIKDSKCVFPRTSPGKDPLP

SEQ ID NO: 73032 - protein, 305 aa, Homo sapiens
  Payload ID: 14464
  Gene Symbol: RDH11
  Gene Name: retinol dehydrogenase 11 (all-trans/9-cis/11-cis)
  Uniprot ID: Q8TC12
  ENSP ID: ENSP00000452079
MVELMFPLLLLLLPFLLYMAAPQIRKMLSSGVCTSTVQLPGKVVVVTGANTGARVYLACRDVEKGELVAKEIQTTTGNQQVLVRKLDLSDTKSIRAFAKGFLAEEKHLHVLINNAGVMMCPYSKTADGFEMHIGVNHLGHFLLTHLLLEKLKESAPSRIVNVSSLAHHLGRIHFHNLQGEKFYNAGLAYCHSKLANILFTQELARRLKGSGVTTYSVHPGTVQSELVRHSSFMRWMWWLFSFFIKTPQQGAQTSLHCALTEGLEILSGNHFSDCHVAWVSAQARNETIARRLWDVSCDLLGLPID

SEQ ID NO: 73033 - protein, 62 aa, Homo sapiens
  Payload ID: 14464
  Gene Symbol: RDH11
  Gene Name: retinol dehydrogenase 11 (all-trans/9-cis/11-cis)
  ENSP ID: ENSP00000452108
MVELMFPLLLLLLPFLLYMAAPQIRSSSIFSLPGCGKGGIGGQRDPDHDREPAGVGAETGPV

SEQ ID NO: 73034 - protein, 316 aa, Homo sapiens
  Payload ID: 14465
  Gene Symbol: RDH12
  Gene Name: retinol dehydrogenase 12 (all-trans/9-cis/11-cis)
  Uniprot ID: Q96NR8
  ENSP ID: ENSP00000267502
MLVTLGLLTSFFSFLYMVAPSIRKFFAGGVCRTNVQLPGKVVVITGANTGIGKETARELASRGARVYIACRDVLKGESAASEIRVDTKNSQVLVRKLDLSDTKSIRAFAEGFLAEEKQLHILINNAGVMMCPYSKTADGFETHLGVNHLGHFLLTYLLLERLKVSAPARVVNVSSVAHHIGKIPFHDLQSEKRYSRGFAYCHSKLANVLFTRELAKRLQGTGVTTYAVHPGVVRSELVRHSSLLCLLWRLFSPFVKTAREGAQTSLHCALAEGLEPLSGKYFSDCKRTWVSPRARNNKTAERLWNVSCELLGIRWE

SEQ ID NO: 73035 - protein, 316 aa, Homo sapiens; identical to SEQ ID NO: 73034
  Payload ID: 14465
  Gene Symbol: RDH12
  Gene Name: retinol dehydrogenase 12 (all-trans/9-cis/11-cis)
  Uniprot ID: Q96NR8
  ENSP ID: ENSP00000449079

SEQ ID NO: 73036 - protein, 220 aa, Homo sapiens
  Payload ID: 14466
  Gene Symbol: RDH13
  Gene Name: retinol dehydrogenase 13 (all-trans/9-cis)
  ENSP ID: ENSP00000291892
MSRYLLPLSALGTVAGAAVLLKDYVTGGACPSKATIPGKTVIVTGANTGIGKQTALELARRGGNIILACRDMEKCEAAAKDIRGETLNHHVNARHLDLASLKSIREFAAKIIEEEERVDILINNAGVMRCPHWTTEDGFEMQFGVNHLGHFLLTNLLLDKLKASAPSRIINLSSLAHVAGHIDFDDLNWQTRKYNTKAAYCQSKLAIVLFTKELSRRLQG

SEQ ID NO: 73037 - protein, 260 aa, Homo sapiens
  Payload ID: 14466
  Gene Symbol: RDH13
  Gene Name: retinol dehydrogenase 13 (all-trans/9-cis)
  Uniprot ID: Q8NBN7
  ENSP ID: ENSP00000379547
MEKCEAAAKDIRGETLNHHVNARHLDLASLKSIREFAAKIIEEEERVDILINNAGVMRCPHWTTEDGFEMQFGVNHLGHFLLTNLLLDKLKASAPSRIINLSSLAHVAGHIDFDDLNWQTRKYNTKAAYCQSKLAIVLFTKELSRRLQGSGVTVNALHPGVARTELGRHTGIHGSTFSSTTLGPIFWLLVKSPELAAQPSTYLAVAEELADVSGKYFDGLKQKAPAPEAEDEEVARRLWAESARLVGLEAPSVREQPLPR

SEQ ID NO: 73038 - protein, 331 aa, Homo sapiens
  Payload ID: 14466
  Gene Symbol: RDH13
  Gene Name: retinol dehydrogenase 13 (all-trans/9-cis)
  Uniprot ID: Q8NBN7
  ENSP ID: ENSP00000391121
MSRYLLPLSALGTVAGAAVLLKDYVTGGACPSKATIPGKTVIVTGANTGIGKQTALELARRGGNIILACRDMEKCEAAAKDIRGETLNHHVNARHLDLASLKSIREFAAKIIEEEERVDILINNAGVMRCPHWTTEDGFEMQFGVNHLGHFLLTNLLLDKLKASAPSRIINLSSLAHVAGHIDFDDLNWQTRKYNTKAAYCQSKLAIVLFTKELSRRLQGSGVTVNALHPGVARTELGRHTGIHGSTFSSTTLGPIFWLLVKSPELAAQPSTYLAVAEELADVSGKYFDGLKQKAPAPEAEDEEVARRLWAESARLVGLEAPSVREQPLPR

SEQ ID NO: 73039 - protein, 220 aa, Homo sapiens; identical to SEQ ID NO: 73036
  Payload ID: 14466
  Gene Symbol: RDH13
  Gene Name: retinol dehydrogenase 13 (all-trans/9-cis)
  ENSP ID: ENSP00000465538

SEQ ID NO: 73040 - protein, 42 aa, Homo sapiens
  Payload ID: 14466
  Gene Symbol: RDH13
  Gene Name: retinol dehydrogenase 13 (all-trans/9-cis)
  ENSP ID: ENSP00000466708
MEKCEAAAKDIRGETLNHHVNARHLDLASLKSIREFAAKIIE

SEQ ID NO: 73041 - protein, 35 aa, Homo sapiens
  Payload ID: 14466
  Gene Symbol: RDH13
  Gene Name: retinol dehydrogenase 13 (all-trans/9-cis)
  ENSP ID: ENSP00000467208
MSRYLLPLSALGTVAGAAVLLKRQHHPGLPRHGEV

SEQ ID NO: 73042 - protein, 29 aa, Homo sapiens
  Payload ID: 14466
  Gene Symbol: RDH13
  Gene Name: retinol dehydrogenase 13 (all-trans/9-cis)
  ENSP ID: ENSP00000467754
MSRYLLPLSALGTVAGAAVLLKDYVTGGA

SEQ ID NO: 73043 - protein, 35 aa, Homo sapiens; identical to SEQ ID NO: 73041
  Payload ID: 14466
  Gene Symbol: RDH13
  Gene Name: retinol dehydrogenase 13 (all-trans/9-cis)
  ENSP ID: ENSP00000468422

SEQ ID NO: 73044 - protein, 331 aa, Homo sapiens; identical to SEQ ID NO: 73038
  Payload ID: 14466
  Gene Symbol: RDH13
  Gene Name: retinol dehydrogenase 13 (all-trans/9-cis)
  Uniprot ID: Q8NBN7
  ENSP ID: ENSP00000477512

SEQ ID NO: 73045 - protein, 35 aa, Homo sapiens; identical to SEQ ID NO: 73041
  Payload ID: 14466
  Gene Symbol: RDH13
  Gene Name: retinol dehydrogenase 13 (all-trans/9-cis)
  ENSP ID: ENSP00000477683

SEQ ID NO: 73046 - protein, 260 aa, Homo sapiens; identical to SEQ ID NO: 73037
  Payload ID: 14466
  Gene Symbol: RDH13
  Gene Name: retinol dehydrogenase 13 (all-trans/9-cis)
  Uniprot ID: Q8NBN7
  ENSP ID: ENSP00000477732

SEQ ID NO: 73047 - protein, 260 aa, Homo sapiens; identical to SEQ ID NO: 73037
  Payload ID: 14466
  Gene Symbol: RDH13
  Gene Name: retinol dehydrogenase 13 (all-trans/9-cis)
  ENSP ID: ENSP00000477884

SEQ ID NO: 73048 - protein, 35 aa, Homo sapiens; identical to SEQ ID NO: 73041
  Payload ID: 14466
  Gene Symbol: RDH13
  Gene Name: retinol dehydrogenase 13 (all-trans/9-cis)
  ENSP ID: ENSP00000478098

SEQ ID NO: 73049 - protein, 42 aa, Homo sapiens; identical to SEQ ID NO: 73040
  Payload ID: 14466
  Gene Symbol: RDH13
  Gene Name: retinol dehydrogenase 13 (all-trans/9-cis)
  ENSP ID: ENSP00000478404

SEQ ID NO: 73050 - protein, 260 aa, Homo sapiens; identical to SEQ ID NO: 73037
  Payload ID: 14466
  Gene Symbol: RDH13
  Gene Name: retinol dehydrogenase 13 (all-trans/9-cis)
  ENSP ID: ENSP00000479552

SEQ ID NO: 73051 - protein, 260 aa, Homo sapiens; identical to SEQ ID NO: 73037
  Payload ID: 14466
  Gene Symbol: RDH13
  Gene Name: retinol dehydrogenase 13 (all-trans/9-cis)
  Uniprot ID: Q8NBN7
  ENSP ID: ENSP00000480095

SEQ ID NO: 73052 - protein, 220 aa, Homo sapiens; identical to SEQ ID NO: 73036
  Payload ID: 14466
  Gene Symbol: RDH13
  Gene Name: retinol dehydrogenase 13 (all-trans/9-cis)
  ENSP ID: ENSP00000481856

SEQ ID NO: 73053 - protein, 260 aa, Homo sapiens; identical to SEQ ID NO: 73037
  Payload ID: 14466
  Gene Symbol: RDH13
  Gene Name: retinol dehydrogenase 13 (all-trans/9-cis)
  ENSP ID: ENSP00000482051

SEQ ID NO: 73054 - protein, 29 aa, Homo sapiens
  Payload ID: 14466
  Gene Symbol: RDH13
  Gene Name: retinol dehydrogenase 13 (all-trans/9-cis)
  ENSP ID: ENSP00000482473
MSRYLLPLSALGTVAGAAVLLKDYVTGGA

SEQ ID NO: 73055 - protein, 260 aa, Homo sapiens; identical to SEQ ID NO: 73037
  Payload ID: 14466
  Gene Symbol: RDH13
  Gene Name: retinol dehydrogenase 13 (all-trans/9-cis)
  ENSP ID: ENSP00000482782

SEQ ID NO: 73056 - protein, 260 aa, Homo sapiens; identical to SEQ ID NO: 73037
  Payload ID: 14466
  Gene Symbol: RDH13
  Gene Name: retinol dehydrogenase 13 (all-trans/9-cis)
  ENSP ID: ENSP00000482809

SEQ ID NO: 73057 - protein, 220 aa, Homo sapiens; identical to SEQ ID NO: 73036
  Payload ID: 14466
  Gene Symbol: RDH13
  Gene Name: retinol dehydrogenase 13 (all-trans/9-cis)
  ENSP ID: ENSP00000483247

SEQ ID NO: 73058 - protein, 260 aa, Homo sapiens; identical to SEQ ID NO: 73037
  Payload ID: 14466
  Gene Symbol: RDH13
  Gene Name: retinol dehydrogenase 13 (all-trans/9-cis)
  ENSP ID: ENSP00000484111

SEQ ID NO: 73059 - protein, 260 aa, Homo sapiens; identical to SEQ ID NO: 73037
  Payload ID: 14466
  Gene Symbol: RDH13
  Gene Name: retinol dehydrogenase 13 (all-trans/9-cis)
  ENSP ID: ENSP00000484246

SEQ ID NO: 73060 - protein, 260 aa, Homo sapiens; identical to SEQ ID NO: 73037
  Payload ID: 14466
  Gene Symbol: RDH13
  Gene Name: retinol dehydrogenase 13 (all-trans/9-cis)
  Uniprot ID: Q8NBN7
  ENSP ID: ENSP00000484637

SEQ ID NO: 73061 - protein, 336 aa, Homo sapiens
  Payload ID: 14467
  Gene Symbol: RDH14
  Gene Name: retinol dehydrogenase 14 (all-trans/9-cis/11-cis)
  Uniprot ID: Q9HBH5
  ENSP ID: ENSP00000370648
MAVATAAAVLAALGGALWLAARRFVGPRVQRLRRGGDPGLMHGKTVLITGANSGLGRATAAELLRLGARVIMGCRDRARAEEAAGQLRRELRQAAECGPEPGVSGVGELIVRELDLASLRSVRAFCQEMLQEEPRLDVLINNAGIFQCPYMKTEDGFEMQFGVNHLGHFLLTNLLLGLLKSSAPSRIVVVSSKLYKYGDINFDDLNSEQSYNKSFCYSRSKLANILFTRELARRLEGTNVTVNVLHPGIVRTNLGRHIHIPLLVKPLFNLVSWAFFKTPVEGAQTSIYLASSPEVEGVSGRYFGDCKEEELLPKAMDESVARKLWDISEVMVGLLK

SEQ ID NO: 73062 - protein, 317 aa, Homo sapiens
  Payload ID: 14468
  Gene Symbol: RDH16
  Gene Name: retinol dehydrogenase 16 (all-trans)
  Uniprot ID: O75452
  ENSP ID: ENSP00000381206
MWLYLAVFVGLYYLLHWYRERQVLSHLRDKYVFITGCDSGFGKLLARQLDARGLRVLAACLTEKGAEQLRGQTSDRLETVTLDVTKTESVAAAAQWVKECVRDKGLWGLVNNAGISLPTAPNELLTKQDFVTILDVNLLGVIDVTLSLLPLVRRARGRVVNVSSVMGRVSLFGGGYCISKYGVEAFSDSLRRELSYFGVKVAMIEPGYFKTAVTSKERFLKSFLEIWDRSSPEVKEAYGEKFVADYKKSAEQMEQKCTQDLSLVTNCMEHALIACHPRTRYSAGWDAKLLYLPMSYMPTFLVDAIMYWVSPSPAKAL

SEQ ID NO: 73063 - protein, 318 aa, Homo sapiens
  Payload ID: 14469
  Gene Symbol: RDH5
  Gene Name: retinol dehydrogenase 5 (11-cis/9-cis)
  Uniprot ID: Q92781
  ENSP ID: ENSP00000257895
MWLPLLLGALLWAVLWLLRDRQSLPASNAFVFITGCDSGFGRLLALQLDQRGFRVLASCLTPSGAEDLQRVASSRLHTTLLDITDPQSVQQAAKWVEMHVKEAGLFGLVNNAGVAGIIGPTPWLTRDDFQRVLNVNTMGPIGVTLALLPLLQQARGRVINITSVLGRLAANGGGYCVSKFGLEAFSDSLRRDVAHFGIRVSIVEPGFFRTPVTNLESLEKTLQACWARLPPATQAHYGGAFLTKYLKMQQRIMNLICDPDLTKVSRCLEHALTARHPRTRYSPGWDAKLLWLPASYLPASLVDAVLTWVLPKPAQAVY

SEQ ID NO: 73064 - protein, 318 aa, Homo sapiens; identical to SEQ ID NO: 73063
  Payload ID: 14469
  Gene Symbol: RDH5
  Gene Name: retinol dehydrogenase 5 (11-cis/9-cis)
  Uniprot ID: Q92781
  ENSP ID: ENSP00000447128

SEQ ID NO: 73065 - protein, 103 aa, Homo sapiens
  Payload ID: 14469
  Gene Symbol: RDH5
  Gene Name: retinol dehydrogenase 5 (11-cis/9-cis)
  ENSP ID: ENSP00000447513
  MOD_RES (1)..(1): Any amino acid
XLLLGALLWAVLWLLRDRQSLPASNAFVFITGCDSGFGRLLALQLDQRGFRVLASCLTPSGAEDLQRVASSRLHTTLLDITDPQSVQQAAKWVEMHVKEAGGM

SEQ ID NO: 73066 - protein, 55 aa, Homo sapiens
  Payload ID: 14469
  Gene Symbol: RDH5
  Gene Name: retinol dehydrogenase 5 (11-cis/9-cis)
  ENSP ID: ENSP00000448014
MHVKEAGLFGLVNNAGVAGIIGPTPWLTRDDFQRVLNVNTMGPIGVTLALLPLLQ

SEQ ID NO: 73067 - protein, 221 aa, Homo sapiens
  Payload ID: 14469
  Gene Symbol: RDH5
  Gene Name: retinol dehydrogenase 5 (11-cis/9-cis)
  ENSP ID: ENSP00000449927
MHVKEAGLFGLVNNAGVAGIIGPTPWLTRDDFQRVLNVNTMGPIGVTLALLPLLQQARGRVINITSVLGRLAANGGGYCVSKFGLEAFSDSLRRDVAHFGIRVSIVEPGFFRTPVTNLESLEKTLQACWARLPPATQAHYGGAFLTKYLKMQQRIMNLICDPDLTKVSRCLEHALTARHPRTRYSPGWDAKLLWLPASYLPASLVDAVLTWVLPKPAQAVY

SEQ ID NO: 73068 - protein, 79 aa, Homo sapiens
  Payload ID: 14470
  Gene Symbol: RDH8
  Gene Name: retinol dehydrogenase 8 (all-trans)
  ENSP ID: ENSP00000465773
  MOD_RES (1)..(1): Any amino acid
XFESLAIQLLQFNILFLWLSSQALTLRPCTTSGTSISQPPGSCFAPWDRTHRTWFRPLSTSSARLDHPCADRPTSATRR

SEQ ID NO: 73069 - protein, 331 aa, Homo sapiens
  Payload ID: 14470
  Gene Symbol: RDH8
  Gene Name: retinol dehydrogenase 8 (all-trans)
  ENSP ID: ENSP00000466058
MNGQSQVLPGGGHESREGINMAAAPRTVLISGCSSGIGLELAVQLAHDPKKRYQVVATMRDLGKKETLEAAAGEALGQTLTVAQLDVCSDESVAQCLSCIQGEVDVLVNNAGMGLVGPLEGLSLAAMQNVFDTNFFGAVRLVKAVLPGMKRRRQGHIVVISSVMGLQGVIFNDVYAASKFALEGFFESLAIQLLQFNIFISLVEPGPVVTEFEGKLLAQVSMAEFPGTDPETLHYFRDLYLPASRKLFCSVGQNPQDVVQAIVNVISSTRPPLRRQTNIRYSPLTTLKTVDSSGSLYVRTTHRLLFRCPRLLNLGLQCLSCGCLPTRVRPR

SEQ ID NO: 73070 - protein, 610 aa, Homo sapiens
  Payload ID: 14471
  Gene Symbol: RETSAT
  Gene Name: retinol saturase (all-trans-retinol 13,14-reductase)
  Uniprot ID: Q6NUM9
  ENSP ID: ENSP00000295802
MWLPLVLLLAVLLLAVLCKVYLGLFSGSSPNPFSEDVKRPPAPLVTDKEARKKVLKQAFSANQVPEKLDVVVIGSGFGGLAAAAILAKAGKRVLVLEQHTKAGGCCHTFGKNGLEFDTGIHYIGRMEEGSIGRFILDQITEGQLDWAPLSSPFDIMVLEGPNGRKEYPMYSGEKAYIQGLKEKFPQEEAIIDKYIKLVKVVSSGAPHAILLKFLPLPVVQLLDRCGLLTRFSPFLQASTQSLAEVLQQLGASSELQAVLSYIFPTYGVTPNHSAFSMHALLVNHYMKGGFYPRGGSSEIAFHTIPVIQRAGGAVLTKATVQSVLLDSAGKACGVSVKKGHELVNIYCPIVVSNAGLFNTYEHLLPGNARCLPGVKQQLGTVRPGLGMTSVFICLRGTKEDLHLPSTNYYVYYDTDMDQAMERYVSMPREEAAEHIPLLFFAFPSAKDPTWEDRFPGRSTMIMLIPTAYEWFEEWQAELKGKRGSDYETFKNSFVEASMSVVLKLFPQLEGKVESVTAGSPLTNQFYLAAPRGACYGADHDLGRLHPCVMASLRAQSPIPNLYLTGQDIFTCGLVGALQGALLCSSAILKRNLYSDLKNLDSRIRAQKKKN

SEQ ID NO: 73071 - protein, 255 aa, Homo sapiens
  Payload ID: 14471
  Gene Symbol: RETSAT
  Gene Name: retinol saturase (all-trans-retinol 13,14-reductase)
  ENSP ID: ENSP00000387196
  MOD_RES (1)..(1): Any amino acid
XWLPLVLLLAVLLLAVLCKVYLGLFSGSSPNPFSEDVKRPPAPLVTDKEARKKVLKQGIHYIGRMEEGSIGRFILDQITEGQLDWAPLSSPFDIMVLEGPNGRKEYPMYSGEKAYIQGLKEKFPQEEAIIDKYIKLVKVVSSGAPHAILLKFLPLPVVQLLDRCGLLTRFSPFLQASTQSLAEVLQQLGASSELQAVLSYIFPTYGVTPNHSAFSMHALLVNHYMKGGFYPRGGSSEIAFHTIPVIQRAGGAVLT

SEQ ID NO: 73072 - protein, 320 aa, Homo sapiens
  Payload ID: 14471
  Gene Symbol: RETSAT
  Gene Name: retinol saturase (all-trans-retinol 13,14-reductase)
  ENSP ID: ENSP00000388202
  MOD_RES (1)..(1): Any amino acid
XGRKEYPMYSGEKAYIQGLKEKFPQEEAIIDKYIKLVKVVSSGAPHAILLKFLPLPVVQLLDRCGLLTRFSPFLQASTQSLAEVLQQLGASSELQAVLSYIFPTYGVTPNHSAFSMHALLVNHYMKGGFYPRGGSSEIAFHTIPVIQRAGGAVLTKATVQSVLLDSAGKACGVSVKKGHELVNIYCPIVVSNAGLFNTYEHLLPGNARCLPGVKQQLGTVRPGLGMTSVFICLRGTKEDLHLPSTNYYVYYDTDMDQAMERYVSMPREEAAEHIPLLFFAFPSAKDPTWEDRFPGGECDCRIPTHQPVLSGCSPRCLLRG

SEQ ID NO: 73073 - protein, 399 aa, Homo sapiens
  Payload ID: 14471
  Gene Symbol: RETSAT
  Gene Name: retinol saturase (all-trans-retinol 13,14-reductase)
  ENSP ID: ENSP00000412166
  MOD_RES (1)..(1): Any amino acid
XPLVLLLAVLLLAVLCKVYLGLFSGSSPNPFSEDVKRPPAPLVTDKEARKKVLKQGVTPNHSAFSMHALLVNHYMKGGFYPRGGSSEIAFHTIPVIQRAGGAVLTKATVQSVLLDSAGKACGVSVKKGHELVNIYCPIVVSNAGLFNTYEHLLPGNARCLPGVKQQLGTVRPGLGMTSVFICLRGTKEDLHLPSTNYYVYYDTDMDQAMERYVSMPREEAAEHIPLLFFAFPSAKDPTWEDRFPGRSTMIMLIPTAYEWFEEWQAELKGKRGSDYETFKNSFVEASMSVVLKLFPQLEGKVESVTAGSPLTNQFYLAAPRGACYGADHDLGRLHPCVMASLRAQSPIPNLYLTGQDIFTCGLVGALQGALLCSSAILKRNLYSDLKNLDSRIRAQKKKN

SEQ ID NO: 73074 - protein, 140 aa, Homo sapiens
  Payload ID: 14471
  Gene Symbol: RETSAT
  Gene Name: retinol saturase (all-trans-retinol 13,14-reductase)
  ENSP ID: ENSP00000444814
  MOD_RES (1)..(1): Any amino acid
XFHTIPVIQRAGGAVLTKATVQSVLLDSAGKACGVSVKKGHELVNIYCPIVVSNAGLFNTYEHLLPGNARCLPGKRRVCTAPLAGSPMCPLLEPTCSVWVMLLLFLAGPLIVLKQQGENATSNIILTLAFNVGETEAHTD

SEQ ID NO: 73075 - protein, 224 aa, Homo sapiens
  Payload ID: 14472
  Gene Symbol: RS1
  Gene Name: retinoschisin 1
  Uniprot ID: O15537
  ENSP ID: ENSP00000369320
MSRKIEGFLLLLLFGYEATLGLSSTEDEGEDPWYQKACKCDCQGGPNALWSAGATSLDCIPECPYHKPLGFESGEVTPDQITCSNPEQYVGWYSSWTANKARLNSQGFGCAWLSKFQDSSQWLQIDLKEIKVISGILTQGRCDIDEWMTKYSVQYRTDERLNWIYYKDQTGNNRVFYGNSDRTSTVQNLLRPPIISRFIRLIPLGWHVRIAIRMELLECVSKCA

SEQ ID NO: 73076 - protein, 1388 aa, Homo sapiens
  Payload ID: 14473
  Gene Symbol: RGAG1
  Gene Name: retrotransposon gag domain containing 1
  Uniprot ID: Q8NET4
  ENSP ID: ENSP00000419786
MSIPLHSLRFNNTMREENVEPQNKQMAFCRPMTETRADVQILHSHVQLPIVSTSASDPGGTSTQLMTSPVFDTMSAPLMGVPNSGALSPPLMPASDSGALSPLLMPASDSGALSPLLMPALDSGTLSPLLSTSEYGVMSPGMMTIPDFGTMSATLMVAPDSAEISPLAMPAPSSGVVCTPIMSTSSSEAMSTPLMLAPDSGELSPILMQDMNPGVMSTQPVPAPSSEAMSPLQITDEDTEAMSKVLMTALASGEISSLLMSGTDSEAISSLIMSAVASGGTSPQPTSTQNSGGIPTPLMSDLDSGIMSSLLMSSPGSEVMSTPLLSVPDAGEMSTLPKPAPDAEAMSPALMTALPSGVMPTQTMPAPGSGAMSPWSTQNVDSEMMSNPPVRATASGVMSAPPVRALDSGAMSTPLMGAPASGNMSTLQKTVPASGAMTTSLMTVPSSGVMSTEQMSATASRVMSAQLTMAKTSGAMPTGSMKAVAKQYKRATASGKMSTPLRRAPTSGAMSTQPVTATASETMSMPQLTVPASGSMSMLQMRAPVSEAMSMPQMRTMASGLTSAAQMKAMTSGAMSTPLMTAQTSGSTSTLLMRDTASGVMSCPQMRSLASGALSKPLMTPKASGTMFTEKMTTTASEAMPTLLMRDTVSGALSMPQMTDTASGGLSASLMRDTASGAMSTSQMTATVSGGMSMPLMRAQDPGVMPASLMRAKVSGKMLSQPMSTQDPGGMSMSPMKSMTAGGMQMNSPTSDVMSTPTVRAWTSETMSTPLMRTSDPGERPSLLTRASSSGEMSLPLMRAPASGEIATPLRSPAYGAMSAPQMTATASGMMSSMPQVKAPISGAMSMPLTRSTASGGMSMPLMRAPDSRVTSTSQMMPTASGDMCTLPVRAPASGGVSSPLVRAPASGTMSTPLRRPSACETVSTELMRASASGHMSTAQTTAMVSGGMSKPLMRAPASGTMPMPLMSAMASGEMSMPLMETMASGATSTLQTSVANSRSMSLSQTTYTVSGRMATAPIRASASGARSTSFMRASVSGSMPMPLPRATASGCGMGMSMPQMTATDSRGMSTPLMRASGPGTMSTPQTAFGVMSTPEIKATDSGEASTSHINITASGSKPTSHMTATTPETAKPPPKEVPSFGMLTPALCYLLEEQEAARGSCSVEEEMEIDEEKQMKGFLDDSERMAFLVSLHLGAAERWFILQMEVGEPLSHENKSFLRRSQGIYDSLSEIDILSAVLCHPKQGQKSVRQYATDFLLLARHLSWSDAILRTRFLEGLSEAVTTKMGRIFLKVAGSLKELIDRSLYTECQLAEEKDSPGNSSQVLPTACKRNNEEAMGNELSSQQQTEEHQHVSKRCYYLKEHGDPQEGLHDHLGQSTGHHQKAHTNK

SEQ ID NO: 73077 - protein, 88 aa, Homo sapiens
  Payload ID: 14473
  Gene Symbol: RGAG1
  Gene Name: retrotransposon gag domain containing 1
  ENSP ID: ENSP00000430395
MSIPLHSLRFNNTMREENVEPQNKQMAFCRPMTETRADVQILHSHVQLPIVSTSASDPGGTSTQLMTSPVFDTMSAPLMGVPNSGALS

SEQ ID NO: 73078 - protein, 1388 aa, Homo sapiens; identical to SEQ ID NO: 73076
  Payload ID: 14473
  Gene Symbol: RGAG1
  Gene Name: retrotransposon gag domain containing 1
  Uniprot ID: Q8NET4
  ENSP ID: ENSP00000441452

SEQ ID NO: 73079 - protein, 569 aa, Homo sapiens
  Payload ID: 14474
  Gene Symbol: RGAG4
  Gene Name: retrotransposon gag domain containing 4
  Uniprot ID: Q5HYW3
  ENSP ID: ENSP00000418667
MSEASGNLNSLRMANVALREELNALRGENANLGLQLGRALAEVNSLRGNVSSYIRWPVPIVPVLAEENLEFALSEIEVIPGGELPFLCRPPPRAEPDCISDDLLINVIQDRSTPDGPADPPLLPIPPPPALPPPASKEPPPQPPLAPLERPEIEPFSGDPVYLAEFLMQLETFIADHEVHFPGGAERVAFLISFFTGEAKDWAISVTQEGSPLHANFPRFLDEIRKEFCGPIPPRVAKKAIRKLKQGHCTLGSYADAFQFLAQFLSWDDCRLQNQFLKGLSEFFRKELLWSTEMADLDELILECVEIERKVRVPKPIPLPGVRNIIFPFAPSPNEEESEDEEYYSEDEDQEARRHRLHSKDQRKRMRAFQQEMKEKEEEEMKKEEEMKKKEEKEEEEEEEMKQKEEEEEIRNKNEEEGESKDEEDEDEDGGQKPEGEPQQDPGTEETYGEVEEEPLDEAQDDDLDELMEMEPTFVHASSQTSGPTSGYHAENFLGASPPIIQPSRRRNQNRVPLLEGLPGTNSPFYSSPQLIRRTGRLGQRQVRRRPPVLFRLTPRQGGHRAARGRIRV

SEQ ID NO: 73080 - protein, 569 aa, Homo sapiens; identical to SEQ ID NO: 73079
  Payload ID: 14474
  Gene Symbol: RGAG4
  Gene Name: retrotransposon gag domain containing 4
  Uniprot ID: Q5HYW3
  ENSP ID: ENSP00000476792

SEQ ID NO: 73081 - protein, 1358 aa, Homo sapiens
  Payload ID: 14475
  Gene Symbol: RTL1
  Gene Name: retrotransposon-like 1
  Uniprot ID: A6NKG5
  ENSP ID: ENSP00000435342
MIEPSEDSFETMMEHKNPSSKQMESSEGSSNTTEATSGSGVRGEAGPASGPAQEKKEPPSGPLQEMEELPTDLLQDMEEPSSGPRKEIEDPPNDLLQDLEESCNGSHQARGDPLSGASDRMKEASVNPSGAREEQEAHTDLKESGREETPQEQNQTEHSTAELMAMVRSIISLYFRMQDLKEQQRVAEEILIKGINAGQLPAPKHFSGDRREFHEFIVLCQLTLQSYPRMFYNDRLRVGYVINHLSGLALEWAKALLQENSPLIGDFPAFLEAMSEVFEYRQALRVAEEAMFTIRQGGRSATEYIDEFQSLVPILGWPDEVLQAHLCQGLNEEIRHYLFRVPQPDSLDSLIVLILQIEEKLAERRAMLRLPPEARPRNLTWIDSPAPERWMVSSWLPSEVHPDINRAHLFLLLMVRVNPYHSVAVQALVDSGADGNFMDEKFAQEHYVELYEKPYPQPVQSVDGSLIGNEPVWLYTEPLVCIHQNHQESIEFDIVPSPNFSVVLGIRWLRVHAPEVDWIKGRCTFHSPYCLKNCFRPPPPCIALERHGMSLLPGLPHPYSDLADVFNPKEADDETSDQPSSDGSDDLSESEPSELQQAGDSDHSETFYECPSTAPWEPVGARMQERARLQEEYWDLQDMLTNRQDYIQMIPELFDQLHGAEWFTKLELRGTIVEESVNGHRTEDVWKAAFGLELEEMKSYQPFALSPDPIIPQNVIHFILKDMLGFFVLSYGQEVLIYSMSQEEHLHHVRQVLVRFRHHNVYCSLDKSQFHRQTVEFLGFVVTPKGVKLNKNVMTIITGYPTPGSKLSLRNFIEFVFPYRHFVERFSIIAEPLVRQLLSSYQFYWGVEEQEAFECLKRAFRKAPLLHHPKPQNPFYLETGVTGTALHASLIQIDDQTGKRACCAFYSRNISPIEVEYSQAEMKILPIRAAFMVWCRYLENTEEPIMILLNTEDLASLNNDRLTVLLPGHWVFFFSHFNFDVMELPEQDGGRALPPVRNLRWRRAFQRNTAARQTLLLASRGFPRDPSTESGEEENEEQDELNEQILRQELLAMIPIDQILNSFLAHFSMAQIRAVILHFFRGLLYWKNTLALAAILVLLRVRQCLSLRPAPAMRVARPQPQRSLRLILDSSLIAGSSITTAITQLLTQMPALVGANTIPAQELAELFLGPGRWQRNALHSQAHRGLQFTPGFWLTLCEFFGVRVTPQEGHLPALRQNRYLELHVVGDEDVVLREALQDDLQRYRQCGLHDGLQDTSQDKQDNDVQEAPPSHTAATHPPRPRHLMDPQVLEFLGSRLLHIHSADGQLHLLSREQAARALSQFLTLIYRRALPIPAWESQPREQARLEELPDEDEDANLD

SEQ ID NO: 73082 - protein, 1251 aa, Homo sapiens
  Payload ID: 14476
  Gene Symbol: REV1
  Gene Name: REV1, polymerase (DNA directed)
  Uniprot ID: Q9UBZ9
  ENSP ID: ENSP00000258428
MRRGGWRKRAENDGWETWGGYMAAKVQKLEEQFRSDAAMQKDGTSSTIFSGVAIYVNGYTDPSAEELRKLMMLHGGQYHVYYSRSKTTHIIATNLPNAKIKELKGEKVIRPEWIVESIKAGRLLSYIPYQLYTKQSSVQKGLSFNPVCRPEDPLPGPSNIAKQLNNRVNHIVKKIETENEVKVNGMNSWNEEDENNDFSFVDLEQTSPGRKQNGIPHPRGSTAIFNGHTPSSNGALKTQDCLVPMVNSVASRLSPAFSQEEDKAEKSSTDFRDCTLQQLQQSTRNTDALRNPHRTNSFSLSPLHSNTKINGAHHSTVQGPSSTKSTSSVSTFSKAAPSVPSKPSDCNFISNFYSHSRLHHISMWKCELTEFVNTLQRQSNGIFPGREKLKKMKTGRSALVVTDTGDMSVLNSPRHQSCIMHVDMDCFFVSVGIRNRPDLKGKPVAVTSNRGTGRAPLRPGANPQLEWQYYQNKILKGKAADIPDSSLWENPDSAQANGIDSVLSRAEIASCSYEARQLGIKNGMFFGHAKQLCPNLQAVPYDFHAYKEVAQTLYETLASYTHNIEAVSCDEALVDITEILAETKLTPDEFANAVRMEIKDQTKCAASVGIGSNILLARMATRKAKPDGQYHLKPEEVDDFIRGQLVTNLPGVGHSMESKLASLGIKTCGDLQYMTMAKLQKEFGPKTGQMLYRFCRGLDDRPVRTEKERKSVSAEINYGIRFTQPKEAEAFLLSLSEEIQRRLEATGMKGKRLTLKIMVRKPGAPVETAKFGGHGICDNIARTVTLDQATDNAKIIGKAMLNMFHTMKLNISDMRGVGIHVNQLVPTNLNPSTCPSRPSVQSSHFPSGSYSVRDVFQVQKAKKSTEEEHKEVFRAAVDLEISSASRTCTFLPPFPAHLPTSPDTNKAESSGKWNGLHTPVSVQSRLNLSIEVPSPSQLDQSVLEALPPDLREQVEQVCAVQQAESHGDKKKEPVNGCNTGILPQPVGTVLLQIPEPQESNSDAGINLIALPAFSQVDPEVFAALPAELQRELKAAYDQRQRQGENSTHQQSASASVPKNPLLHLKAAVKEKKRNKKKKTIGSPKRIQSPLNNKLLNSPAKTLPGACGSPQKLIDGFLKHEGPPAEKPLEELSASTSGVPGLSSLQSDPAGCVRPPAPNLAGAVEFNDVKTLLREWITTISDPMEEDILQVVKYCTDLIEEKDLEKLDLVIKYMKRLMQQSVESVWNMAFDFILDNVQVVLQQTYGSTLKVT

SEQ ID NO: 73083 - protein, 1250 aa, Homo sapiens
  Payload ID: 14476
  Gene Symbol: REV1
  Gene Name: REV1, polymerase (DNA directed)
  Uniprot ID: Q9UBZ9
  ENSP ID: ENSP00000377091
MRRGGWRKRAENDGWETWGGYMAAKVQKLEEQFRSDAAMQKDGTSSTIFSGVAIYVNGYTDPSAEELRKLMMLHGGQYHVYYSRSKTTHIIATNLPNAKIKELKGEKVIRPEWIVESIKAGRLLSYIPYQLYTKQSSVQKGLSFNPVCRPEDPLPGPSNIAKQLNNRVNHIVKKIETENEVKVNGMNSWNEEDENNDFSFVDLEQTSPGRKQNGIPHPRGSTAIFNGHTPSSNGALKTQDCLVPMVNSVASRLSPAFSQEEDKAEKSSTDFRDCTLQQLQQSTRNTDALRNPHRTNSFSLSPLHSNTKINGAHHSTVQGPSSTKSTSSVSTFSKAAPSVPSKPSDCNFISNFYSHSRLHHISMWKCELTEFVNTLQRQSNGIFPGREKLKKMKTGRSALVVTDTGDMSVLNSPRHQSCIMHVDMDCFFVSVGIRNRPDLKGKPVAVTSNRGTGRAPLRPGANPQLEWQYYQNKILKGKADIPDSSLWENPDSAQANGIDSVLSRAEIASCSYEARQLGIKNGMFFGHAKQLCPNLQAVPYDFHAYKEVAQTLYETLASYTHNIEAVSCDEALVDITEILAETKLTPDEFANAVRMEIKDQTKCAASVGIGSNILLARMATRKAKPDGQYHLKPEEVDDFIRGQLVTNLPGVGHSMESKLASLGIKTCGDLQYMTMAKLQKEFGPKTGQMLYRFCRGLDDRPVRTEKERKSVSAEINYGIRFTQPKEAEAFLLSLSEEIQRRLEATGMKGKRLTLKIMVRKPGAPVETAKFGGHGICDNIARTVTLDQATDNAKIIGKAMLNMFHTMKLNISDMRGVGIHVNQLVPTNLNPSTCPSRPSVQSSHFPSGSYSVRDVFQVQKAKKSTEEEHKEVFRAAVDLEISSASRTCTFLPPFPAHLPTSPDTNKAESSGKWNGLHTPVSVQSRLNLSIEVPSPSQLDQSVLEALPPDLREQVEQVCAVQQAESHGDKKKEPVNGCNTGILPQPVGTVLLQIPEPQESNSDAGINLIALPAFSQVDPEVFAALPAELQRELKAAYDQRQRQGENSTHQQSASASVPKNPLLHLKAAVKEKKRNKKKKTIGSPKRIQSPLNNKLLNSPAKTLPGACGSPQKLIDGFLKHEGPPAEKPLEELSASTSGVPGLSSLQSDPAGCVRPPAPNLAGAVEFNDVKTLLREWITTISDPMEEDILQVVKYCTDLIEEKDLEKLDLVIKYMKRLMQQSVESVWNMAFDFILDNVQVVLQQTYGSTLKVT

SEQ ID NO: 73084 - protein, 97 aa, Homo sapiens
  Payload ID: 14476
  Gene Symbol: REV1
  Gene Name: REV1, polymerase (DNA directed)
  ENSP ID: ENSP00000404213
  MOD_RES (1)..(1): Any amino acid
XFLLSLSEEIQRRLEATGMKGKRLTLKIMVRKPGAPVETAKFGGHGICDNIARTVTLDQATDNAKIIGKAMLNMFHTMKLNISDMRGSPISSVKPLS

SEQ ID NO: 73085 - protein, 192 aa, Homo sapiens
  Payload ID: 14476
  Gene Symbol: REV1
  Gene Name: REV1, polymerase (DNA directed)
  ENSP ID: ENSP00000414875
MWKCELTEFVNTLQRQSNGIFPGREKLKKMKTGRSALVVTDTGDMSVLNSPRHQSCIMHVDMDCFFVSVGIRNRPDLKGKPVAVTSNRGTGRAPLRPGANPQLEWQYYQNKILKGKADIPDSSLWENPDSAQANGIDSVLSRAEIASCSYEARSLKVLEPWLLPRVMSYHVQCCWHLNHCGATSGAWNWSIG

SEQ ID NO: 73086 - protein, 69 aa, Homo sapiens
  Payload ID: 14476
  Gene Symbol: REV1
  Gene Name: REV1, polymerase (DNA directed)
  ENSP ID: ENSP00000416274
MRRGGWRKRAENDGWETWGGYMAAKVQKLEEQFRSDAAMQKDGTSSTIFSGVAIYVNGYTDWFSCFTSH

SEQ ID NO: 73087 - protein, 3130 aa, Homo sapiens
  Payload ID: 14477
  Gene Symbol: REV3L
  Gene Name: REV3-like, polymerase (DNA directed), zeta, catalytic subunit
  Uniprot ID: O60673
  ENSP ID: ENSP00000351697
MFSVRIVTADYYMASPLQGLDTCQSPLTQAPVKKVPVVRVFGATPAGQKTCLHLHGIFPYLYVPYDGYGQQPESYLSQMAFSIDRALNVALGNPSSTAQHVFKVSLVSGMPFYGYHEKERHFMKIYLYNPTMVKRICELLQSGAIMNKFYQPHEAHIPYLLQLFIDYNLYGMNLINLAAVKFRKARRKSNTLHATGSCKNHLSGNSLADTLFRWEQDEIPSSLILEGVEPQSTCELEVDAVAADILNRLDIEAQIGGNPGLQAIWEDEKQRRRNRNETSQMSQPESQDHRFVPATESEKKFQKRLQEILKQNDFSVTLSGSVDYSDGSQEFSAELTLHSEVLSPEMLQCTPANMVEVHKDKESSKGHTRHKVEEALINEEAILNLMENSQTFQPLTQRLSESPVFMDSSPDEALVHLLAGLESDGYRGERNRMPSPCRSFGNNKYPQNSDDEENEPQIEKEEMELSLVMSQRWDSNIEEHCAKKRSLCRNTHRSSTEDDDSSSGEEMEWSDNSLLLASLSIPQLDGTADENSDNPLNNENSRTHSSVIATSKLSVKPSIFHKDAATLEPSSSAKITFQCKHTSALSSHVLNKEDLIEDLSQTNKNTEKGLDNSVTSFTNESTYSMKYPGSLSSTVHSENSHKENSKKEILPVSSCESSIFDYEEDIPSVTRQVPSRKYTNIRKIEKDSPFIHMHRHPNENTLGKNSFNFSDLNHSKNKVSSEGNEKGNSTALSSLFPSSFTENCELLSCSGENRTMVHSLNSTADESGLNKLKIRYEEFQEHKTEKPSLSQQAAHYMFFPSVVLSNCLTRPQKLSPVTYKLQPGNKPSRLKLNKRKLAGHQETSTKSSETGSTKDNFIQNNPCNSNPEKDNALASDLTKTTRGAFENKTPTDGFIDCHFGDGTLETEQSFGLYGNKYTLRAKRKVNYETEDSESSFVTHNSKISLPHPMEIGESLDGTLKSRKRRKMSKKLPPVIIKYIIINRFRGRKNMLVKLGKIDSKEKQVILTEEKMELYKKLAPLKDFWPKVPDSPATKYPIYPLTPKKSHRRKSKHKSAKKKTGKQQRTNNENIKRTLSFRKKRSHAILSPPSPSYNAETEDCDLNYSDVMSKLGFLSERSTSPINSSPPRCWSPTDPRAEEIMAAAEKEAMLFKGPNVYKKTVNSRIGKTSRARAQIKKSKAKLANPSIVTKKRNKRNQTNKLVDDGKKKPRAKQKTNEKGTSRKHTTLKDEKIKSQSGAEVKFVLKHQNVSEFASSSGGSQLLFKQKDMPLMGSAVDHPLSASLPTGINAQQKLSGCFSSFLESKKSVDLQTFPSSRDDLHPSVVCNSIGPGVSKINVQRPHNQSAMFTLKESTLIQKNIFDLSNHLSQVAQNTQISSGMSSKIEDNANNIQRNYLSSIGKLSEYRNSLESKLDQAYTPNFLHCKDSQQQIVCIAEQSKHSETCSPGNTASEESQMPNNCFVTSLRSPIKQIAWEQKQRGFILDMSNFKPERVKPRSLSEAISQTKALSQCKNRNVSTPSAFGEGQSGLAVLKELLQKRQQKAQNANTTQDPLSNKHQPNKNISGSLEHNKANKRTRSVTSPRKPRTPRSTKQKEKIPKLLKVDSLNLQNSSQLDNSVSDDSPIFFSDPGFESCYSLEDSLSPEHNYNFDINTIGQTGFCSFYSGSQFVPADQNLPQKFLSDAVQDLFPGQAIEKNEFLSHDNQKCDEDKHHTTDSASWIRSGTLSPEIFEKSTIDSNENRRHNQWKNSFHPLTTRSNSIMDSFCVQQAEDCLSEKSRLNRSSVSKEVFLSLPQPNNSDWIQGHTRKEMGQSLDSANTSFTAILSSPDGELVDVACEDLELYVSRNNDMLTPTPDSSPRSTSSPSQSKNGSFTPRTANILKPLMSPPSREEIMATLLDHDLSETIYQEPFCSNPSDVPEKPREIGGRLLMVETRLANDLAEFEGDFSLEGLRLWKTAFSAMTQNPRPGSPLRSGQGVVNKGSSNSPKMVEDKKIVIMPCKCAPSRQLVQVWLQAKEEYERSKKLPKTKPTGVVKSAENFSSSVNPDDKPVVPPKMDVSPCILPTTAHTKEDVDNSQIALQAPTTGCSQTASESQMLPPVASASDPEKDEDDDDNYYISYSSPDSPVIPPWQQPISPDSKALNGDDRPSSPVEELPSLAFENFLKPIKDGIQKSPCSEPQEPLVISPINTRARTGKCESLCFHSTPIIQRKLLERLPEAPGLSPLSTEPKTQKLSNKKGSNTDTLRRVLLTQAKNQFAAVNTPQKETSQIDGPSLNNTYGFKVSIQNLQEAKALHEIQNLTLISVELHARTRRDLEPDPEFDPICALFYCISSDTPLPDTEKTELTGVIVIDKDKTVFSQDIRYQTPLLIRSGITGLEVTYAADEKALFHEIANIIKRYDPDILLGYEIQMHSWGYLLQRAAALSIDLCRMISRVPDDKIENRFAAERDEYGSYTMSEINIVGRITLNLWRIMRNEVALTNYTFENVSFHVLHQRFPLFTFRVLSDWFDNKTDLYRWKMVDHYVSRVRGNLQMLEQLDLIGKTSEMARLFGIQFLHVLTRGSQYRVESMMLRIAKPMNYIPVTPSVQQRSQMRAPQCVPLIMEPESRFYSNSVLVLDFQSLYPSIVIAYNYCFSTCLGHVENLGKYDEFKFGCTSLRVPPDLLYQVRHDITVSPNGVAFVKPSVRKGVLPRMLEEILKTRFMVKQSMKAYKQDRALSRMLDARQLGLKLIANVTFGYTSANFSGRMPCIEVGDSIVHKARETLERAIKLVNDTKKWGARVVYGDTDSMFVLLKGATKEQSFKIGQEIAEAVTATNPKPVKLKFEKVYLPCVLQTKKRYVGYMYETLDQKDPVFDAKGIETVRRDSCPAVSKILERSLKLLFETRDISLIKQYVQRQCMKLLEGKASIQDFIFAKEYRGSFSYKPGACVPALELTRKMLTYDRRSEPQVGERVPYVIIYGTPGVPLIQLVRRPVEVLQDPTLRLNATYYITKQILPPLARIFSLIGIDVFSWYHELPRIHKATSSSRSEPEGRKGTISQYFTTLHCPVCDDLTQHGICSKCRSQPQHVAVILNQEIRELERQQEQLVKICKNCTGCFDRHIPCVSLNCPVLFKLSRVNRELSKAPYLRQLLDQF

SEQ ID NO: 73088 - protein, 3130 aa, Homo sapiens; identical to SEQ ID NO: 73087
  Payload ID: 14477
  Gene Symbol: REV3L
  Gene Name: REV3-like, polymerase (DNA directed), zeta, catalytic subunit
  Uniprot ID: O60673
  ENSP ID: ENSP00000357792

SEQ ID NO: 73089 - protein, 3130 aa, Homo sapiens; identical to SEQ ID NO: 73087
  Payload ID: 14477
  Gene Symbol: REV3L
  Gene Name: REV3-like, polymerase (DNA directed), zeta, catalytic subunit
  Uniprot ID: O60673
  ENSP ID: ENSP00000357795

SEQ ID NO: 73090 - protein, 47 aa, Homo sapiens
  Payload ID: 14477
  Gene Symbol: REV3L
  Gene Name: REV3-like, polymerase (DNA directed), zeta, catalytic subunit
  ENSP ID: ENSP00000391605
MFSVRIVTADYYMASPLQGLDTCQSPLTQAPVKKVPVVRVFGATPAE

SEQ ID NO: 73091 - protein, 47 aa, Homo sapiens; identical to SEQ ID NO: 73090
  Payload ID: 14477
  Gene Symbol: REV3L
  Gene Name: REV3-like, polymerase (DNA directed), zeta, catalytic subunit
  ENSP ID: ENSP00000393184

SEQ ID NO: 73092 - protein, 184 aa, Homo sapiens
  Payload ID: 14477
  Gene Symbol: REV3L
  Gene Name: REV3-like, polymerase (DNA directed), zeta, catalytic subunit
  ENSP ID: ENSP00000400600
RPSSPVEELPSLAFENFLKPIKDGIQKSPCSEPQEPLVISPINTRARTGKCESLCFHSTPIIQRKLLERLPEAPGLSPLSTEPKTQKLSNKKGSNTDTLRRVLLTQAKNQFAAVNTPQKETSQIDGPSLNNTYGFKVSIQNLQEAKALHEISDIRLHYLLDLELQDSKSPMLLMRRHFFMKLQI

SEQ ID NO: 73093 - protein, 3052 aa, Homo sapiens
  Payload ID: 14477
  Gene Symbol: REV3L
  Gene Name: REV3-like, polymerase (DNA directed), zeta, catalytic subunit
  Uniprot ID: O60673
  ENSP ID: ENSP00000402003
MAFSIDRALNVALGNPSSTAQHVFKVSLVSGMPFYGYHEKERHFMKIYLYNPTMVKRICELLQSGAIMNKFYQPHEAHIPYLLQLFIDYNLYGMNLINLAAVKFRKARRKSNTLHATGSCKNHLSGNSLADTLFRWEQDEIPSSLILEGVEPQSTCELEVDAVAADILNRLDIEAQIGGNPGLQAIWEDEKQRRRNRNETSQMSQPESQDHRFVPATESEKKFQKRLQEILKQNDFSVTLSGSVDYSDGSQEFSAELTLHSEVLSPEMLQCTPANMVEVHKDKESSKGHTRHKVEEALINEEAILNLMENSQTFQPLTQRLSESPVFMDSSPDEALVHLLAGLESDGYRGERNRMPSPCRSFGNNKYPQNSDDEENEPQIEKEEMELSLVMSQRWDSNIEEHCAKKRSLCRNTHRSSTEDDDSSSGEEMEWSDNSLLLASLSIPQLDGTADENSDNPLNNENSRTHSSVIATSKLSVKPSIFHKDAATLEPSSSAKITFQCKHTSALSSHVLNKEDLIEDLSQTNKNTEKGLDNSVTSFTNESTYSMKYPGSLSSTVHSENSHKENSKKEILPVSSCESSIFDYEEDIPSVTRQVPSRKYTNIRKIEKDSPFIHMHRHPNENTLGKNSFNFSDLNHSKNKVSSEGNEKGNSTALSSLFPSSFTENCELLSCSGENRTMVHSLNSTADESGLNKLKIRYEEFQEHKTEKPSLSQQAAHYMFFPSVVLSNCLTRPQKLSPVTYKLQPGNKPSRLKLNKRKLAGHQETSTKSSETGSTKDNFIQNNPCNSNPEKDNALASDLTKTTRGAFENKTPTDGFIDCHFGDGTLETEQSFGLYGNKYTLRAKRKVNYETEDSESSFVTHNSKISLPHPMEIGESLDGTLKSRKRRKMSKKLPPVIIKYIIINRFRGRKNMLVKLGKIDSKEKQVILTEEKMELYKKLAPLKDFWPKVPDSPATKYPIYPLTPKKSHRRKSKHKSAKKKTGKQQRTNNENIKRTLSFRKKRSHAILSPPSPSYNAETEDCDLNYSDVMSKLGFLSERSTSPINSSPPRCWSPTDPRAEEIMAAAEKEAMLFKGPNVYKKTVNSRIGKTSRARAQIKKSKAKLANPSIVTKKRNKRNQTNKLVDDGKKKPRAKQKTNEKGTSRKHTTLKDEKIKSQSGAEVKFVLKHQNVSEFASSSGGSQLLFKQKDMPLMGSAVDHPLSASLPTGINAQQKLSGCFSSFLESKKSVDLQTFPSSRDDLHPSVVCNSIGPGVSKINVQRPHNQSAMFTLKESTLIQKNIFDLSNHLSQVAQNTQISSGMSSKIEDNANNIQRNYLSSIGKLSEYRNSLESKLDQAYTPNFLHCKDSQQQIVCIAEQSKHSETCSPGNTASEESQMPNNCFVTSLRSPIKQIAWEQKQRGFILDMSNFKPERVKPRSLSEAISQTKALSQCKNRNVSTPSAFGEGQSGLAVLKELLQKRQQKAQNANTTQDPLSNKHQPNKNISGSLEHNKANKRTRSVTSPRKPRTPRSTKQKEKIPKLLKVDSLNLQNSSQLDNSVSDDSPIFFSDPGFESCYSLEDSLSPEHNYNFDINTIGQTGFCSFYSGSQFVPADQNLPQKFLSDAVQDLFPGQAIEKNEFLSHDNQKCDEDKHHTTDSASWIRSGTLSPEIFEKSTIDSNENRRHNQWKNSFHPLTTRSNSIMDSFCVQQAEDCLSEKSRLNRSSVSKEVFLSLPQPNNSDWIQGHTRKEMGQSLDSANTSFTAILSSPDGELVDVACEDLELYVSRNNDMLTPTPDSSPRSTSSPSQSKNGSFTPRTANILKPLMSPPSREEIMATLLDHDLSETIYQEPFCSNPSDVPEKPREIGGRLLMVETRLANDLAEFEGDFSLEGLRLWKTAFSAMTQNPRPGSPLRSGQGVVNKGSSNSPKMVEDKKIVIMPCKCAPSRQLVQVWLQAKEEYERSKKLPKTKPTGVVKSAENFSSSVNPDDKPVVPPKMDVSPCILPTTAHTKEDVDNSQIALQAPTTGCSQTASESQMLPPVASASDPEKDEDDDDNYYISYSSPDSPVIPPWQQPISPDSKALNGDDRPSSPVEELPSLAFENFLKPIKDGIQKSPCSEPQEPLVISPINTRARTGKCESLCFHSTPIIQRKLLERLPEAPGLSPLSTEPKTQKLSNKKGSNTDTLRRVLLTQAKNQFAAVNTPQKETSQIDGPSLNNTYGFKVSIQNLQEAKALHEIQNLTLISVELHARTRRDLEPDPEFDPICALFYCISSDTPLPDTEKTELTGVIVIDKDKTVFSQDIRYQTPLLIRSGITGLEVTYAADEKALFHEIANIIKRYDPDILLGYEIQMHSWGYLLQRAAALSIDLCRMISRVPDDKIENRFAAERDEYGSYTMSEINIVGRITLNLWRIMRNEVALTNYTFENVSFHVLHQRFPLFTFRVLSDWFDNKTDLYRWKMVDHYVSRVRGNLQMLEQLDLIGKTSEMARLFGIQFLHVLTRGSQYRVESMMLRIAKPMNYIPVTPSVQQRSQMRAPQCVPLIMEPESRFYSNSVLVLDFQSLYPSIVIAYNYCFSTCLGHVENLGKYDEFKFGCTSLRVPPDLLYQVRHDITVSPNGVAFVKPSVRKGVLPRMLEEILKTRFMVKQSMKAYKQDRALSRMLDARQLGLKLIANVTFGYTSANFSGRMPCIEVGDSIVHKARETLERAIKLVNDTKKWGARVVYGDTDSMFVLLKGATKEQSFKIGQEIAEAVTATNPKPVKLKFEKVYLPCVLQTKKRYVGYMYETLDQKDPVFDAKGIETVRRDSCPAVSKILERSLKLLFETRDISLIKQYVQRQCMKLLEGKASIQDFIFAKEYRGSFSYKPGACVPALELTRKMLTYDRRSEPQVGERVPYVIIYGTPGVPLIQLVRRPVEVLQDPTLRLNATYYITKQILPPLARIFSLIGIDVFSWYHELPRIHKATSSSRSEPEGRKGTISQYFTTLHCPVCDDLTQHGICSKCRSQPQHVAVILNQEIRELERQQEQLVKICKNCTGCFDRHIPCVSLNCPVLFKLSRVNRELSKAPYLRQLLDQF

SEQ ID NO: 73094 - protein, 323 aa, Homo sapiens [sequence omitted]

SEQ ID NO: 73095 - protein, 971 aa, Homo sapiens
  Payload ID: 14478
  Gene Symbol: RECK
  Gene Name: reversion-inducing-cysteine-rich protein with kazal motifs
  Uniprot ID: O95980
  ENSP ID: ENSP00000367202
MATVRASLRGALLLLLAVAGVAEVAGGLAPGSAGALCCNHSKDNQMCRDVCEQIFSSKSESRLKHLLQRAPDYCPETMVEIWNCMNSSLPGVFKKSDGWVGLGCCELAIALECRQACKQASSKNDISKVCRKEYENALFSCISRNEMGSVCCSYAGHHTNCREYCQAIFRTDSSPGPSQIKAVENYCASISPQLIHCVNNYTQSYPMRNPTDSLYCCDRAEDHACQNACKRILMSKKTEMEIVDGLIEGCKTQPLPQDPLWQCFLESSQSVHPGVTVHPPPSTGLDGAKLHCCSKANTSTCRELCTKLYSMSWGNTQSWQEFDRFCEYNPVEVSMLTCLADVREPCQLGCRNLTYCTNFNNRPTELFRSCNAQSDQGAMNDMKLWEKGSIKMPFINIPVLDIKKCQPEMWKAIACSLQIKPCHSKSRGSIICKSDCVEILKKCGDQNKFPEDHTAESICELLSPTDDLKNCIPLDTYLRPSTLGNIVEEVTHPCNPNPCPANELCEVNRKGCPSGDPCLPYFCVQGCKLGEASDFIVRQGTLIQVPSSAGEVGCYKICSCGQSGLLENCMEMHCIDLQKSCIVGGKRKSHGTSFSIDCNVCSCFAGNLVCSTRLCLSEHSSEDDRRTFTGLPCNCADQFVPVCGQNGRTYPSACIARCVGLQDHQFEFGSCMSKDPCNPNPCQKNQRCIPKPQVCLTTFDKFGCSQYECVPRQLACDQVQDPVCDTDHMEHNNLCTLYQRGKSLSYKGPCQPFCRATEPVCGHNGETYSSVCAAYSDRVAVDYYGDCQAVGVLSEHSSVAECASVKCPSLLAAGCKPIIPPGACCPLCAGMLRVLFDKEKLDTIAKVTNKKPITVLEILQKIRMHVSVPQCDVFGYFSIESEIVILIIPVDHYPKALQIEACNKEAEKIESLINSDSPTLASHVPLSALIISQVQVSSSVPSAGVRARPSCHSLLLPLSLGLALHLLWTYN

SEQ ID NO: 73096 - protein, 1221 aa, Homo sapiens
  Payload ID: 14479
  Gene Symbol: REXO1
  Gene Name: REX1, RNA exonuclease 1 homolog
  Uniprot ID: Q8N1G1
  ENSP ID: ENSP00000170168
MLRSTGFFRAIDCPYWSGAPGGPCRRPYCHFRHRGARGSGAPGDGGEAPPAAGLGYDPYNPELPKPPAQRENGTLGLGEEPRPDVLELELVNQAIEAVRSEVELEQRRYRELLETTREHRSAEAPALAPRGPNASPTVGPDEDAFPLAFDYSPGSHGLLSPDAGYQPTPLAAPAEPGSKYSLASLDRGQGRGGGGGGALEYVPKAVSQPRRHSRPVPSGKYVVDNSRPPTDLEYDPLSNYSARHLSRASSRDERAAKRPRGSRGSEPYTPAPKKLCDPFGSCDARFSDSEDEAATVPGNEPTTASTPKARADPEIKATGQPPSKEGLEAEGGGLRETKETAVQCDVGDLQPPPAKPASPAQVQSSQDGGCPKEGKPKKKKTGAPPAPSCKDGAQGKDKTKDKGRGRPVEKPRADKKGPQASSPRRKAERPEGTKKKPSSATPVATSGKGRPDRPARRPSPTSGDSRPAAGRGPPRPLQLPDRKSTKAPSGKLVERKARSLDEGASQDAPKLKKRALSHADLFGDESEDEAAGPGVPSVWPSALPSLSSDSDSDSDSSLGFPEAQGPPKRLKASPPPSPAPSSSSSSSSSTSSAGADVDYSALEKEVDFDSDPMEECLRIFNESTSVKTEDRGRLARQPPKEEKSEEKGLSGLTTLFPGQKRRISHLSKQGQEVEPPRRGPAVPPARPPTAQEVCYLRAQQAQRASASLLQAPARLAEKSPSVHISAPGEKRRIAHIPNPRLAAAPTGAKRTLAASGSQSSNGPEPGGQQLKTRTLSGMASKTTTTIIPKRIAHSPSLQSLKKPIIPKEFGGKVPTVIRQRYLNLFIEECLKFCTSNQEAIEKALNEEKVAYDRSPSKNIYLNVAVNTLKKLRGLAPSAVPGLSKTSGRRVVSHEVVLGGRLAAKTSFSLSRPSSPRVEDLKGAALYSRLREYLLTQDQLKENGYPFPHPERPGGAIIFTAEEKRPKDSSCRTCCRCGTEYLVSSSGRCIRDEECYYHWGRLRRNRVAGGWETQYMCCSAAAGSVGCQVAKQHVQDGRKERLEGFVKTFEKELSGDTHPGIYALDCEMSYTTYGLELTRVTVVDTDVHVVYDTFVKPDNEIVDYNTRFSGVTEADLADTSVTLRDVQAVLLSMFSADTILIGHSLESDLLALKVIHSTVVDTSVLFPHRLGLPYKRSLRNLMADYLRQIIQDNVDGHSSSEDAGACMHLVIWKVREDAKTKR

SEQ ID NO: 73097 - protein, 161 aa, Homo sapiens
  Payload ID: 14479
  Gene Symbol: REXO1
  Gene Name: REX1, RNA exonuclease 1 homolog
  ENSP ID: ENSP00000468713
  MOD_RES (1)..(1): Any amino acid
XAPSAVPGLSKTSGRRVVSHEVVLGGRLAAKTSFSLSRPSSPRVEDLKGAALYSRLREYLLTQDQLKENGYPFPHPERPGGAIIFTAEEKRPKDSSCRTCCRCGTEYLVSSSGRCIRDEECYYHWGRLRRNRVAGGWETQYMCCSAAAGSVGCQVAKGPNQ

SEQ ID NO: 73098 - protein, 123 aa, Homo sapiens
  Payload ID: 14479
  Gene Symbol: REXO1
  Gene Name: REX1, RNA exonuclease 1 homolog
  ENSP ID: ENSP00000480368
  MOD_RES (1)..(1): Any amino acid
XTAEEKRPKDSSCRTCCRCGTEYLVSSSGRCIRDEECYYHWGRLRRNRVAGGWETQYMCCSAAAGSVGCQVAKQHVQDGRKERLEGFVKTFEKELSGDTHPGIYALDCEMVRLFSAQRRVQDW

SEQ ID NO: 73099 - protein, 64 aa, Homo sapiens
  Payload ID: 14479
  Gene Symbol: REXO1
  Gene Name: REX1, RNA exonuclease 1 homolog
  ENSP ID: ENSP00000481515
  MOD_RES (1)..(1): Any amino acid
XTTTIIPKRIAHSPSLQSLKKPIIPKEFGGKVPTVIRQRYLNLFIEECLKFCTSNQEAIEKPQL

SEQ ID NO: 73100 - protein, 422 aa, Homo sapiens
  Payload ID: 14480
  Gene Symbol: REXO4
  Gene Name: REX4 homolog, 3,-5, exonuclease
  ENSP ID: ENSP00000486065
MGKAKVPASKRAPSSPVAKPGPVKTLTRKKNKKKKRFWKSKAREVSKKPASGPGAVVRPPKAPEDFSQNWKALQEWLLKQKSQAPEKPLVISQMGSKKKPKIIQQNKKETSPQVKGEEMPAGKDQEASRGSVPSGSKMDRRAPVPRTKASGTEHNKKGTKERTNGDIVPERGDIEHKKRKAKEAAPAPPTEEDIWFDDVDPADIEAAIGPEAAKIARKQLGQSEGSVSLSLVKEQAFGGLTRALALDCEMVGVGPKGEESMAARVSIVNQYGKCVYDKYVKPTEPVTDYRTAVSGIRPENLKQGEELEVVQKEVAEMLKGRILVGHALHNDLKVLFLDHPKKKIRDTQKYKPFKSQVKSGRPSLRLLSEKILGLQVQQAEHCSIQDAQAAMRLYVMVKKEWESMARDRRPLLTAPDHCSDDA

SEQ ID NO: 73101 - protein, 233 aa, Homo sapiens
  Payload ID: 14480
  Gene Symbol: REXO4
  Gene Name: REX4 homolog, 3,-5, exonuclease
  ENSP ID: ENSP00000486474
MGKAKVPASKRAPSSPVAKPGPVKTLTRKKNKKKKRFWKSKAREVSKKPASGPGAVVRPPKAPEDFSQNWKALQEVPRWTGGRQYLAPRPVEQSTIRKEPRKGQMVILFQNEGTSSIRSGKLRRQPQPHPPREELEVVQKEVAEMLKGRILVGHALHNDLKVLFLDHPKKKIRDTQKYKPFKSQVKSGRPSLRLLSEKILGLQVQQAEHCSIQDAQAAMRLYVMVKKEWESMA

SEQ ID NO: 73102 - protein, 189 aa, Homo sapiens
  Payload ID: 14480
  Gene Symbol: REXO4
  Gene Name: REX4 homolog, 3,-5, exonuclease
  ENSP ID: ENSP00000486690
MGSKKKPKIIQQNKKETSPQVKGEEMPAGKDQEASRGSVPSGSKMDRRAPVPRTKASGTEHNKKGTKERTNGDIVPERGDIEHKKRKAKEAAPAPPTEEDIWFDDVDPADIEAAIGPEAAKIARKQLGQSEGSVSLSLVKEQAFGGLTRALALDCEMVGVGPKGEESMAARVSIVNQYGKCVYDKYVKP

SEQ ID NO: 73103 - protein, 250 aa, Homo sapiens
  Payload ID: 14480
  Gene Symbol: REXO4
  Gene Name: REX4 homolog, 3,-5, exonuclease
  ENSP ID: ENSP00000487504
MGKAKVPASKRAPSSPVAKPGPVKTLTRKKNKKKKRFWKSKAREVSKKPASGPGAVVRPPKAPEDFSQNWKALQEVPRWTGGRQYLAPRPVEQSTIRKEPRKGQMVILFQNEGTSSIRSGKLRRQPQPHPPREELEVVQKEVAEMLKGRILVGHALHNDLKVLFLDHPKKKIRDTQKYKPFKSQVKSGRPSLRLLSEKILGLQVQQAEHCSIQDAQAAMRLYVMVKKEWESMARDRRPLLTAPDHCSDDA

SEQ ID NO: 73104 - protein, 250 aa, Homo sapiens; identical to SEQ ID NO: 73103
  Payload ID: 14481
  Gene Symbol: REXO4
  Gene Name: REX4 homolog, 3'-5' exonuclease
  Uniprot ID: Q9GZR2
  ENSP ID: ENSP00000361003

SEQ ID NO: 73105 - protein, 422 aa, Homo sapiens; identical to SEQ ID NO: 73100
  Payload ID: 14481
  Gene Symbol: REXO4
  Gene Name: REX4 homolog, 3'-5' exonuclease
  Uniprot ID: Q9GZR2
  ENSP ID: ENSP00000361010

SEQ ID NO: 73106 - protein, 189 aa, Homo sapiens; identical to SEQ ID NO: 73102
  Payload ID: 14481
  Gene Symbol: REXO4
  Gene Name: REX4 homolog, 3'-5' exonuclease
  ENSP ID: ENSP00000391534

SEQ ID NO: 73107 - protein, 233 aa, Homo sapiens; identical to SEQ ID NO: 73101
  Payload ID: 14481
  Gene Symbol: REXO4
  Gene Name: REX4 homolog, 3'-5' exonuclease
  ENSP ID: ENSP00000394229

SEQ ID NO: 73108 - protein, 331 aa, Homo sapiens
  Payload ID: 14482
  Gene Symbol: RFNG
  Gene Name: RFNG O-fucosylpeptide 3-beta-N-acetylglucosaminyltransferase
  Uniprot ID: Q9Y644
  ENSP ID: ENSP00000307971
MSRARGALCRACLALAAALAALLLLPLPLPRAPAPARTPAPAPRAPPSRPAAPSLRPDDVFIAVKTTRKNHGPRLRLLLRTWISRARQQTFIFTDGDDPELELQGGDRVINTNCSAVRTRQALCCKMSVEYDKFIESGRKWFCHVDDDNYVNARSLLHLLSSFSPSQDVYLGRPSLDHPIEATERVQGGRTVTTVKFWFATGGAGFCLSRGLALKMSPWASLGSFMSTAEQVRLPDDCTVGYIVEGLLGARLLHSPLFHSHLENLQRLPPDTLLQQVTLSHGGPENPHNVVNVAGGFSLHQDPTRFKSIHCLLYPDTDWCPRQKQGAPTSR

SEQ ID NO: 73109 - protein, 205 aa, Homo sapiens
  Payload ID: 14482
  Gene Symbol: RFNG
  Gene Name: RFNG O-fucosylpeptide 3-beta-N-acetylglucosaminyltransferase
  ENSP ID: ENSP00000402931
MSVEYDKFIESGRKWFCHVDDDNYVNARSLLHLLSSFSPSQDVYLGRPSLDHPIEATERVQGGRTVTTVKFWFATGGAGFCLSRGLALKMSPWASLGSFMSTAEQVRLPDDCTVGYIVEGLLGARLLHSPLFHSHLENLQRLPPDTLLQQVTLSHGGPENPHNVVNVAGGFSLHQDPTRFKSIHCLLYPDTDWCPRQKQGAPTSR

SEQ ID NO: 73110 - protein, 60 aa, Homo sapiens
  Payload ID: 14482
  Gene Symbol: RFNG
  Gene Name: RFNG O-fucosylpeptide 3-beta-N-acetylglucosaminyltransferase
  ENSP ID: ENSP00000463623
MSVEYDKFIESGRKWFCHVDDDNYVNARSLLHLLSSFSPSQDVYLGRPSLDHPIEATERV

SEQ ID NO: 73111 - protein, 69 aa, Homo sapiens
  Payload ID: 14483
  Gene Symbol: RFPL3S
  Gene Name: RFPL3 antisense
  ENSP ID: ENSP00000371516
MGNLSSCIKVPPEDQWKVDSKEWASEDPFSVTKVTPRNTVNVAAYLASPGRTGASVVPEFIKGQMLKTP

SEQ ID NO: 73112 - protein, 76 aa, Homo sapiens
  Payload ID: 14483
  Gene Symbol: RFPL3S
  Gene Name: RFPL3 antisense
  ENSP ID: ENSP00000371518
MGNLSSCIKVPPEDQWKVDSKEWASEDPFSVTKVTPRNTVNEILRRYSLYTKRHMTQPGLWANHRVHSHEGTVEIY

SEQ ID NO: 73113 - protein, 98 aa, Homo sapiens [sequence omitted]

SEQ ID NO: 73114 - protein, 69 aa, Homo sapiens
  Payload ID: 14483
  Gene Symbol: RFPL3S
  Gene Name: RFPL3 antisense
  ENSP ID: ENSP00000463921
MGNLSSCIKVPPEDQWKVDSKEWASEDPFSVTKVTPRNTVNEILRRYSLYTKRHMTQPGLWANHRVHSH

SEQ ID NO: 73115 - protein, 107 aa, Homo sapiens
  Payload ID: 14483
  Gene Symbol: RFPL3S
  Gene Name: RFPL3 antisense
  Uniprot ID: P0C7P2
  ENSP ID: ENSP00000482492
MQTDTSNLSARSCRFCVMSPLRTLLRSSEMRRKLLAVSASKVISTVKRKTSCSASGQKPTPCLSSTSKAQISPDFSFFNSVSSSKIKTFHEETSLFQIFIGMLCGNT

SEQ ID NO: 73116 - protein, 541 aa, Homo sapiens
  Payload ID: 14484
  Gene Symbol: RFT1
  Gene Name: RFT1 homolog
  Uniprot ID: Q96AA3
  ENSP ID: ENSP00000296292
MGSQEVLGHAARLASSGLLLQVLFRLITFVLNAFILRFLSKEIVGVVNVRLTLLYSTTLFLAREAFRRACLSGGTQRDWSQTLNLLWLTVPLGVFWSLFLGWIWLQLLEVPDPNVVPHYATGVVLFGLSAVVELLGEPFWVLAQAHMFVKLKVIAESLSVILKSVLTAFLVLWLPHWGLYIFSLAQLFYTTVLVLCYVIYFTKLLGSPESTKLQTLPVSRITDLLPNITRNGAFINWKEAKLTWSFFKQSFLKQILTEGERYVMTFLNVLNFGDQGVYDIVNNLGSLVARLIFQPIEESFYIFFAKVLERGKDATLQKQEDVAVAAAVLESLLKLALLAGLTITVFGFAYSQLALDIYGGTMLSSGSGPVLLRSYCLYVLLLAINGVTECFTFAAMSKEEVDRYNFVMLALSSSFLVLSYLLTRWCGSVGFILANCFNMGIRITQSLCFIHRYYRRSPHRPLAGLHLSPVLLGTFALSGGVTAVSEVFLCCEQGWPARLAHIAVGAFCLGATLGTAFLTETKLIHFLRTQLGVPRRTDKMT

SEQ ID NO: 73117 - protein, 502 aa, Homo sapiens
  Payload ID: 14484
  Gene Symbol: RFT1
  Gene Name: RFT1 homolog
  ENSP ID: ENSP00000378223
MGSQEVLGHAARLASSGLLLQVLFRLITFVLNAFILRFLSKEIVGVVNVRVPLGVFWSLFLGWIWLQLLEVPDPNVVPHYATGVVLFGLSAVVELLGEPFWVLAQAHMFVKLKVIAESLSVILKSVLTAFLVLWLPHWGLYIFSLAQLFYTTVLVLCYVIYFTKLLGSPESTKLQTLPVSRITDLLPNITRNGAFINWKEAKLTWSFFKQSFLKQILTEGERYVMTFLNVLNFGDQGVYDIVNNLGSLVARLIFQPIEESFYIFFAKVLERGKDATLQKQEDVAVAAAVLESLLKLALLAGLTITVFGFAYSQLALDIYGGTMLSSGSGPVLLRSYCLYVLLLAINGVTECFTFAAMSKEEVDRYNFVMLALSSSFLVLSYLLTRWCGSVGFILANCFNMGIRITQSLCFIHRYYRRSPHRPLAGLHLSPVLLGTFALSGGVTAVSEVFLCCEQGWPARLAHIAVGAFCLGATLGTAFLTETKLIHFLRTQLGVPRRTDKMT

SEQ ID NO: 73118 - protein, 291 aa, Homo sapiens
  Payload ID: 14484
  Gene Symbol: RFT1
  Gene Name: RFT1 homolog
  ENSP ID: ENSP00000420325
MGSQEVLGHAARLASSGLLLQVLFRLITFVLNAFILRFLSKEIVGVVNVRLTLLYSTTLFLAREAFRRACLSGGTQRDWSQTLNLLWLTVPLGVFWSLFLGWIWLQLLEVPDPNVVPHYATGVVLFGLSAVVELLGEPFWVLAQAHMFVKLKVIAESLSVILKSVLTAFLVLWLPHWGLYIFSLAQAFINWKEAKLTWSFFKQSFLKQILTEGERYVMTFLNVLNFGDQGVYDIVNNLGSLVARLIFQPIEESFYIFFAKVLERGKDATLQKQEDVAVAAAVLESLLKLAL

SEQ ID NO: 73119 - protein, 473 aa, Homo sapiens
  Payload ID: 14485
  Gene Symbol: RFX8
  Gene Name: RFX family member 8, lacking RFX DNA binding domain
  Uniprot ID: Q6ZV50
  ENSP ID: ENSP00000401536
MYEIYVETCGQNTENQVNPATFGKCEDHSPMKTDPVGSPLSEFRRCPFLEQEQAKKYSCNMMAFLADEYCNYCRDILRNVEDLLTSFWKSLQQDTVMLMSLPDVCQLFKCYDVQLYKGIEDVLLHDFLEDVSIQYLKSVQLFSKKFKLWLLNALEGVPALLQISKLKEVTLFVKRLRRKTYLSNMAKTMRMVLKSKRRVSVLKSDLQAIINQGTLATSKKALASDRSGADELENNPEMKCLRNLISLLGTSTDLRVFLSCLSSHLQAFVFQTSRSKEEFTKLAASFQLRWNLLLTAVSKAMTLCHRDSFGSWHLFHLLLLEYMIHILQSCLEEEEEEEDMGTVKEMLPDDPTLGQPDQALFHSLNSSLSQACASPSMEPLGVMPTHMGQGRYPVGVSNMVLRILGFLVDTAMGNKLIQVLLEDETTESAVKLSLPMGQEALITLKDGQQFVIQISDVPQSSEDIYFRENNANV

SEQ ID NO: 73120 - protein, 153 aa, Homo sapiens
  Payload ID: 14485
  Gene Symbol: RFX8
  Gene Name: RFX family member 8, lacking RFX DNA binding domain
  ENSP ID: ENSP00000422968
MYEIYVETCGQNTENQVNPATFGKLVRLVFPDLGTRRLGTRGSARYHYDGICIKKSSFFYAQYCYLIGEKRYHSGDAIAFEKSTNYNSIIQQEATCEDHSPMKTDPVGSPLSEFRRCPFLEQEQAKKYSCNMMAFLADEYCNYCRDILRNVRN

SEQ ID NO: 73121 - protein, 80 aa, Homo sapiens
  Payload ID: 14485
  Gene Symbol: RFX8
  Gene Name: RFX family member 8, lacking RFX DNA binding domain
  ENSP ID: ENSP00000424661
MYEIYVETCGQNTENQVNPATFGKLVRLVFPDLGTRRLGTRGSARYHYDGICIKKSSFFYAQYCYLIGEKRYHSVKIIHR

SEQ ID NO: 73122 - protein, 1435 aa, Homo sapiens
  Payload ID: 14486
  Gene Symbol: RLTPR
  Gene Name: RGD motif, leucine rich repeats, tropomodulin domain and proline-rich containing
  Uniprot ID: Q6F5E8
  ENSP ID: ENSP00000334958
MAQTPDGISCELRGEITRFLWPKEVELLLKTWLPGEGAVQNHVLALLRWRAYLLHTTCLPLRVDCTFSYLEVQAMALQETPPQVTFELESLRELVLEFPGVAALEQLAQHVAAAIKKVFPRSTLGKLFRRPTPASMLARLERSSPSESTDPCSPCGGFLETYEALCDYNGFPFREEIQWDVDTIYHRQGCRHFSLGDFSHLGSRDLALSVAALSYNLWFRCLSCVDMKLSLEVSEQILHMMSQSSHLEELVLETCSLRGDFVRRLAQALAGHSSSGLRELSLAGNLLDDRGMTALSRHLERCPGALRRLSLAQTGLTPRGMRALGRALATNAAFDSTLTHLDLSGNPGALGASEDSGGLYSFLSRPNVLSFLNLAGTDTALDTVRGCSVGGWMTGRADWRAGRGGLGPPAGVANSLPPQLFAAVSRGCCTSLTHLDASRNVFSRTKSRAAPAALQLFLSRARTLRHLGLAGCKLPPDALRALLDGLALNTHLRDLHLDLSACELRSAGAQVIQDLVCDAGAVSSLDLADNGFGSDMVTLVLAIGRSRSLRHVALGRNFNVRCKETLDDVLHRIVQLMQDDDCPLQSLSVAESRLKLGASVLLRALATNPNLTALDISGNAMGDAGAKLLAKALRVNSRLRSVVWDRNHTSALGLLDVAQALEQNHSLKAMPLPLNDVAQAQRSRPELTARAVHQIQACLLRNNRADPASSDHTTRLQPLGLVSDPSEQEVNELCQSVQEHVELLGCGAGPQGEAAVRQAEDAIQNANFSLSILPILYEAGSSPSHHWQLGQKLEGLLRQVGEVCRQDIQDFTQATLDTARSLCPQMLQGSSWREQLEGVLAGSRGLPELLPEQLLQDAFTRLRDMRLSITGTLAESIVAQALAGLSAARDQLVESLAQQATVTMPPALPAPDGGEPSLLEPGELEGLFFPEEKEEEKEKDDSPPQKWPELSHGLHLVPFIHSAAEEAEPEPELAAPGEDAEPQAGPSARGSPSPAAPGPPAGPLPRMDLPLAGQPLRHPTRARPRPRRQHHHRPPPGGPQVPPALPQEGNGLSARVDEGVEEFFSKRLIQQDRLWAPEEDPATEGGATPVPRTLRKKLGTLFAFKKPRSTRGPRTDLETSPGAAPRTRKTTFGDLLRPPTRPSRGEELGGAEGDTSSPDPAGRSRPRYTRDSKAYSMILLPAEEEATLGARPDKRRPLERGETELAPSFEQRVQVMLQRIGVSRGSGGAEGKRKQSKDGEIKKAGSDGDIMDSSTEAPPISIKSRTHSVSADPSCRPGPGSQGPESATWKTLGQQLNAELRSRGWGQQDGPGPPSPGQSPSPCRTSPSPDSLGLPEDPCLGPRNEDGQLRPRPLSAGRRAVSVHEDQLQAPAERPLRLQRSPVLKRRPKLEAPPSPSLGSGLGTEPLPPQPTEPSSPERSPPSPATDQRGGGPNP

SEQ ID NO: 73123 - protein, 1372 aa, Homo sapiens
  Payload ID: 14486
  Gene Symbol: RLTPR
  Gene Name: RGD motif, leucine rich repeats, tropomodulin domain and proline-rich containing
  Uniprot ID: Q6F5E8
  ENSP ID: ENSP00000441481
MAQTPDGISCELRGEITRFLWPKEVELLLKTWLPGEGAVQNHVLALLRWRAYLLHTTCLPLRVDCTFSYLEVQAMALQETPPQVTFELESLRELVLEFPGVAALEQLAQHVAAAIKKVFPRSTLGKLFRRPTPASMLARLERSSPSESTDPCSPCGGFLETYEALCDYNGFPFREEIQWDVDTIYHRQGCRHFSLGDFSHLGSRDLALSVAALSYNLWFRCLSCVDMKLSLEVSEQILHMMSQSSHLEELVLETCSLRGDFVRRLAQALAGHSSSGLRELSLAGNLLDDRGMTALSRHLERCPGALRRLSLAQTGLTPRGMRALGRALATNAAFDSTLTHLDLSGNPGALGASEDSGGLYSFLSRPNVLSFLNLAGTDTALDTLFAAVSRGCCTSLTHLDASRNVFSRTKSRAAPAALQLFLSRARTLRHLGLAGCKLPPDALRALLDGLALNTHLRDLHLDLSACELRSAGAQVIQDLVCDAGAVSSLDLADNGFGSDMVTLVLAIGRSRSLRHVALGRNFNVRCKETLDDVLHRIVQLMQDDDCPLQSLSVAESRLKLGASVLLRALATNPNLTALDISGNAMGDAGAKLLAKALRVNSRLRSVVWDRNHTSALGLLDVAQALEQNHSLKAMPLPLNDVAQAQRSRPELTARAVHQIQACLLRNNRADPASSDHTTRLQPLGLVSDPSEQEVNELCQSVQEHVELLGCGAGPQGEAAVRQAEDAIQNANFSLSILPILYEAGSSPSHHWQLGQKLEGLLRQVGEVCRQDIQDFTQATLDTARSLCPQMLQGSSWREQLEGVLAGSRGLPELLPEQLLQDAFTRLRDMRLSITGTLAESIVAQALAGLSAARDQLVESLAQQATVTMPPALPAPDGGEPSLLEPGELEGLFFPEEKEEEKEKDDSPPQKWPELSHGLHLVPFIHSAAEEAEPEPELAAPGEDAEPQAGPSARGSPSPAAPGPPAGPLPRMDLPLAGQPLRHPTRARPRPRRQHHHRPPPGGPQVPPALPQEGNGLSARVDEGVEEFFSKRLIQQDRLWAPEEDPATEGGATPVPRTLRKKLGTLFAFKKPRSTRGPRTDLETSPGAAPRTRKTTFGDLLRPPTRPSRGEELGGAEGDTSSPDPAGRSRPRYTRDSKAYSMILLPAEEEATLGARPDKRRPLERGETELAPSFEQRVQVMLQRIGVSRGSGGAEGKRKQSKDGEIKKAGSDGDIMDSSTEAPPISIKSRTHSVSADPSCRPGPGSQGPESATWKTLGQQLNAELRSRGWGQQDGPGPPSPGQSPSPCRTSPSPDSLGLPEDPCLGPRNEERPLRLQRSPVLKRRPKLEAPPSPSLGSGLGTEPLPPQPTEPSSPERSPPSPATDQRGGGPNP

SEQ ID NO: 73124 - protein, 124 aa, Homo sapiens
  Payload ID: 14486
  Gene Symbol: RLTPR
  Gene Name: RGD motif, leucine rich repeats, tropomodulin domain and proline-rich containing
  ENSP ID: ENSP00000473419
  MOD_RES (1)..(1): Any amino acid
XRPPTRPSRGEELGGAEGDTSSPDPAGRSRPRYTRDSKAYSMILLPAEEEATLGARPDKRRPLERGETELAPSFEQRVQVMLQRIGVSRGSGGAEGKRKQSKDGEIKKAGSDGLVPESPAPPCR

SEQ ID NO: 73125 - protein, 55 aa, Homo sapiens
  Payload ID: 14486
  Gene Symbol: RLTPR
  Gene Name: RGD motif, leucine rich repeats, tropomodulin domain and proline-rich containing
  ENSP ID: ENSP00000473580
MAQTPDGISCELRGTATMESLPAAHHLPPAEGGLHVQLPGGPGHGAAGDTPSGHL

SEQ ID NO: 73126 - protein, 391 aa, Homo sapiens
  Payload ID: 14487
  Gene Symbol: RGP1
  Gene Name: RGP1 homolog, RAB6A GEF complex partner 1
  Uniprot ID: Q92546
  ENSP ID: ENSP00000367318
MIEVVAELSRGPVFLAGEALECVVTVTNPLPPTATSASSEALAWASAQIHCQFHASESRVALPPPDSSQPDVQPDSQTVFLPHRGERGQCILSTPPKILFCDLRLDPGESKSYSYSEVLPIEGPPSFRGQSVKYVYKLTIGCQRVNSPITLLRVPLRVLVLTGLQDVRFPQDEAVAPSSPFLEEDEGGKKDSWLAELAGERLMAATSCRSLHLYNISDGRGKVGTFGIFKSVYRLGEDVVGTLNLGEGTVACLQFSVSLQTEERVQPEYQRRRGAGGVPSVSHVTHARHQESCLHTTRTSFSLPIPLSSTPGFCTAIVSLKWRLHFEFVTSREPGLVLLPPVEQPEPTTWTGPEQVPVDTFSWDLPIKVLPTSPTLASYAAPGPSTSTITI

SEQ ID NO: 73127 - protein, 398 aa, Homo sapiens
  Payload ID: 14488
  Gene Symbol: RHCE
  Gene Name: Rh blood group, CcEe antigens
  ENSP ID: ENSP00000243186
MSSKYPRSVRRCLPLCALTLEAALILLFYFFTHYDASLEDQKGLVASYQVGQDLTVMAALGLGFLTSNFRRHSWSSVAFNLFMLALGVQWAILLDGFLSQFPPGKVVITLFSIRLATMSAMSVLISAGAVLGKVNLAQLVVMVLVEVTALGTLRMVISNIFNTDYHMNLRHFYVFAAYFGLTVAWCLPKPLPKGTEDNDQRATIPSLSAMLGALFLWMFWPSVNSALLRSPIQRKNAMFNTYYALAVSVVTAISGSSLAHPQRKISMTYVHSAVLAGGVAVGTSCHLIPSPWLAMVLGLVAGLISIGGAKCLPVCCNRVLGIPHLRHALHLQLAGSAWRDHLHCAAGASYCLERQWHDWLPGPPQHWGTQLGHRDSSHVWSPDRFAPKSQNMESTSCG

SEQ ID NO: 73128 - protein, 417 aa, Homo sapiens
  Payload ID: 14488
  Gene Symbol: RHCE
  Gene Name: Rh blood group, CcEe antigens
  Uniprot ID: P18577
  ENSP ID: ENSP00000294413
MSSKYPRSVRRCLPLCALTLEAALILLFYFFTHYDASLEDQKGLVASYQVGQDLTVMAALGLGFLTSNFRRHSWSSVAFNLFMLALGVQWAILLDGFLSQFPPGKVVITLFSIRLATMSAMSVLISAGAVLGKVNLAQLVVMVLVEVTALGTLRMVISNIFNTDYHMNLRHFYVFAAYFGLTVAWCLPKPLPKGTEDNDQRATIPSLSAMLGALFLWMFWPSVNSALLRSPIQRKNAMFNTYYALAVSVVTAISGSSLAHPQRKISMTYVHSAVLAGGVAVGTSCHLIPSPWLAMVLGLVAGLISIGGAKCLPVCCNRVLGIHHISVMHSIFSLLGLLGEITYIVLLVLHTVWNGNGMIGFQVLLSIGELSLAIVIALTSGLLTGLLLNLKIWKAPHVAKYFDDQVFWKFPHLAVGF

SEQ ID NO: 73129 - protein, 401 aa, Homo sapiens
  Payload ID: 14488
  Gene Symbol: RHCE
  Gene Name: Rh blood group, CcEe antigens
  ENSP ID: ENSP00000311185
MYFINQRLFLRLWRVPVMRASHCYQSQGWRPVAVGQDLTVMAALGLGFLTSNFRRHSWSSVAFNLFMLALGVQWAILLDGFLSQFPPGKVVITLFSIRLATMSAMSVLISAGAVLGKVNLAQLVVMVLVEVTALGTLRMVISNIFNTDYHMNLRHFYVFAAYFGLTVAWCLPKPLPKGTEDNDQRATIPSLSAMLGALFLWMFWPSVNSALLRSPIQRKNAMFNTYYALAVSVVTAISGSSLAHPQRKISMTYVHSAVLAGGVAVGTSCHLIPSPWLAMVLGLVAGLISIGGAKCLPVCCNRVLGIHHISVMHSIFSLLGLLGEITYIVLLVLHTVWNGNGMIGFQVLLSIGELSLAIVIALTSGLLTGLLLNLKIWKAPHVAKYFDDQVFWKFPHLAVGF

SEQ ID NO: 73130 - protein, 354 aa, Homo sapiens
  Payload ID: 14488
  Gene Symbol: RHCE
  Gene Name: Rh blood group, CcEe antigens
  ENSP ID: ENSP00000334570
MSSKYPRSVRRCLPLCALTLEAALILLFYFFTHYDASLEDQKGLVASYQVGQDLTVMAALGLGFLTSNFRRHSWSSVAFNLFMLALGVQWAILLDGFLSQFPPGKVVITLFSIRLATMSAMSVLISAGAVLGKVNLAQLVVMVLVEVTALGTLRMVISNIFNTDYHMNLRHFYVFAAYFGLTVAWCLPKPLPKGTEDNDQRATIPSLSAMLGALFLWMFWPSVNSALLRSPIQRKNAMFNTYYALAVSVVTAISGSSLAHPQRKISMTYVHSAVLAGGVAVGTSCHLIPSPWLAMVLGLVAGLISIGGAKCLPDWLPGPPQHWGTQLGHRDSSHVWSPDRFAPKSQNMESTSCG

SEQ ID NO: 73131 - protein, 266 aa, Homo sapiens
  Payload ID: 14488
  Gene Symbol: RHCE
  Gene Name: Rh blood group, CcEe antigens
  ENSP ID: ENSP00000344485
MSSKYPRSVRRCLPLCALTLEAALILLFYFFTHYDASLEDQKGLVASYQVGQDLTVMAALGLGFLTSNFRRHSWSSVAFNLFMLALGVQWAILLDGFLSQFPPGKVVITLFSIRLATMSAMSVLISAGAVLGKVNLAQLVVMVLVEVTALGTLRMVISNIFNVCCNRVLGIHHISVMHSIFSLLGLLGEITYIVLLVLHTVWNGNGMIGFQVLLSIGELSLAIVIALTSGLLTGLLLNLKIWKAPHVAKYFDDQVFWKFPHLAVGF

SEQ ID NO: 73132 - protein, 267 aa, Homo sapiens
  Payload ID: 14488
  Gene Symbol: RHCE
  Gene Name: Rh blood group, CcEe antigens
  ENSP ID: ENSP00000345084
MSSKYPRSVRRCLPLCALTLEAALILLFYFFTHYDASLEDQKGLVASYQVGQDLTVMAALGLGFLTSNFRRHSWSSVAFNLFMLALGVQWAILLDGFLSQFPPGKVVITLFSIRLATMSAMSVLISAGAVLGKVNLAQLVVMVLVEVTALGTLRMVISNIFNTYVHSAVLAGGVAVGTSCHLIPSPWLAMVLGLVAGLISIGGAKCLPVCCNRVLGIHHISVMHSIFSLLGLLGEITYIVLLVLHTVWNGNGMFAPKSQNMESTSCG

SEQ ID NO: 73133 - protein, 302 aa, Homo sapiens
  Payload ID: 14488
  Gene Symbol: RHCE
  Gene Name: Rh blood group, CcEe antigens
  ENSP ID: ENSP00000363472
MSSKYPRSVRRCLPLCALTLEAALILLFYFFTHYDASLEDQKGLVASYQVGQDLTVMAALGLGFLTSNFRRHSWSSVAFNLFMLALGVQWAILLDGFLSQFPPGKVVITLFSIRLATMSAMSVLISAGAVLGKVNLAQLVVMVLVEVTALGTLRMVISNIFNTDYHMNLRHFYVFAAYFGLTVAWCLPKPLPKGTEDNDQRATIPSLSAMLGALFLWMFWPSVNSALLRSPIQRKNAMFNTYYALAVSVVTAISGSSLAHPQRKISMTYVHSAVLAGGVAVGTSCHLIPSPWLAMVLGLVAG

SEQ ID NO: 73134 - protein, 372 aa, Homo sapiens
  Payload ID: 14488
  Gene Symbol: RHCE
  Gene Name: Rh blood group, CcEe antigens
  ENSP ID: ENSP00000415417
MSSKYPRSVRRCLPLCALTLEAALILLFYFFTHYDASLEDQKGLVASYQVGQDLTVMAALGLGFLTSNFRRHSWSSVAFNLFMLALGVQWAILLDGFLSQFPPGKVVITLFSIRLATMSAMSVLISAGAVLGKVNLAQLVVMVLVEVTALGTLRMVISNIFNTDYHMNLRHFYVFAAYFGLTVAWCLPKPLPKGTEDNDQRATIPSLSAMLGALFLWMFWPSVNSALLRSPIQRKNAMFNTYYALAVSVVTAISGSSLAHPQRKISMTYVHSAVLAGGVAVGTSCHLIPSPWLAMVLGLVAGLISIGGAKCLPVCCNRVLGIHHISVMHSIFSLLGLLGEITYIVLLVLHTVWNGNGMFAPKSQNMESTSCG

SEQ ID NO: 73135 - protein, 77 aa, Homo sapiens
  Payload ID: 14488
  Gene Symbol: RHCE
  Gene Name: Rh blood group, CcEe antigens
  ENSP ID: ENSP00000431741
  MOD_RES (1)..(1): Any amino acid
XGAVLGKVNLAQLVVMVLVEVTALGTLRMVISNIFNDWLPGPPQHWGTQLGHRDSSHVWSPDRFAPKSQNMESTSCG

SEQ ID NO: 73136 - protein, 55 aa, Homo sapiens
  Payload ID: 14488
  Gene Symbol: RHCE
  Gene Name: Rh blood group, CcEe antigens
  ENSP ID: ENSP00000435401
MSSKYPRSVRRCLPLCALTLEAALILLFYFFTHYDASLEDQKGLVASYQVFGWPP

SEQ ID NO: 73137 - protein, 417 aa, Homo sapiens
  Payload ID: 14489
  Gene Symbol: RHD
  Gene Name: Rh blood group, D antigen
  Uniprot ID: Q02161
  ENSP ID: ENSP00000331871
MSSKYPRSVRRCLPLWALTLEAALILLFYFFTHYDASLEDQKGLVASYQVGQDLTVMAAIGLGFLTSSFRRHSWSSVAFNLFMLALGVQWAILLDGFLSQFPSGKVVITLFSIRLATMSALSVLISVDAVLGKVNLAQLVVMVLVEVTALGNLRMVISNIFNTDYHMNMMHIYVFAAYFGLSVAWCLPKPLPEGTEDKDQTATIPSLSAMLGALFLWMFWPSFNSALLRSPIERKNAVFNTYYAVAVSVVTAISGSSLAHPQGKISKTYVHSAVLAGGVAVGTSCHLIPSPWLAMVLGLVAGLISVGGAKYLPGCCNRVLGIPHSSIMGYNFSLLGLLGEIIYIVLLVLDTVGAGNGMIGFQVLLSIGELSLAIVIALMSGLLTGLLLNLKIWKAPHEAKYFDDQVFWKFPHLAVGF

SEQ ID NO: 73138 - protein, 493 aa, Homo sapiens
  Payload ID: 14489
  Gene Symbol: RHD
  Gene Name: Rh blood group, D antigen
  Uniprot ID: Q02161
  ENSP ID: ENSP00000339577
MSSKYPRSVRRCLPLWALTLEAALILLFYFFTHYDASLEDQKGLVASYQVGQDLTVMAAIGLGFLTSSFRRHSWSSVAFNLFMLALGVQWAILLDGFLSQFPSGKVVITLFSIRLATMSALSVLISVDAVLGKVNLAQLVVMVLVEVTALGNLRMVISNIFNTDYHMNMMHIYVFAAYFGLSVAWCLPKPLPEGTEDKDQTATIPSLSAMLGALFLWMFWPSFNSALLRSPIERKNAVFNTYYAVAVSVVTAISGSSLAHPQGKISKTYVHSAVLAGGVAVGTSCHLIPSPWLAMVLGLVAGLISVGGAKYLPGCCNRVLGIPHSSIMGYNFSLLGLLGEIIYIVLLVLDTVGAGNGMSLGWNLAVKMAEAGDEELMRLDVSQRNHGGAAVPTGSWMPSTETTIAPNYRDHISVVSSFGCWILSKSIQEKQGLFKNKTTSSHCCLHLYVRNAHDSKVSNVRAGTGVRENGVESFLCHSLRRISPFIMHCRIQQ

SEQ ID NO: 73139 - protein, 396 aa, Homo sapiens
  Payload ID: 14489
  Gene Symbol: RHD
  Gene Name: Rh blood group, D antigen
  Uniprot ID: Q02161
  ENSP ID: ENSP00000350150
MSSKYPRSVRRCLPLWALTLEAALILLFYFFTHYDASLEDQKGLVASYQVGQDLTVMAAIGLGFLTSSFRRHSWSSVAFNLFMLALGVQWAILLDGFLSQFPSGKVVITLFSIRLATMSALSVLISVDAVLGKVNLAQLVVMVLVEVTALGNLRMVISNIFNTDYHMNMMHIYVFAAYFGLSVAWCLPKPLPEGTEDKDQTATIPSLSAMLGALFLWMFWPSFNSALLRSPIERKNAVFNTYYAVAVSVVTAISGSSLAHPQGKISKTYVHSAVLAGGVAVGTSCHLIPSPWLAMVLGLVAGLISVGGAKYLPGCCNRVLGIPHSSIMGYNFSLLGLLGEIIYIVLLVLDTVGAGNGIFLIWLLDFKQKHPRKTRPVQKQDNFLSLLPAFVREKRS

SEQ ID NO: 73140 - protein, 378 aa, Homo sapiens
  Payload ID: 14489
  Gene Symbol: RHD
  Gene Name: Rh blood group, D antigen
  Uniprot ID: Q02161
  ENSP ID: ENSP00000396420
MSSKYPRSVRRCLPLWALTLEAALILLFYFFTHYDASLEDQKGLVASYQVGQDLTVMAAIGLGFLTSSFRRHSWSSVAFNLFMLALGVQWAILLDGFLSQFPSGKVVITLFSIRLATMSALSVLISVDAVLGKVNLAQLVVMVLVEVTALGNLRMVISNIFNTDYHMNMMHIYVFAAYFGLSVAWCLPKPLPEGTEDKDQTATIPSLSAMLGALFLWMFWPSFNSALLRSPIERKNAVFNTYYAVAVSVVTAISGSSLAHPQGKISKTYVHSAVLAGGVAVGTSCHLIPSPWLAMVLGLVAGLISVGGAKYLPDWLPGPPQHWGTQLGHRDSSHVWSPDSFLIWLLDFKQKHPRKTRPVQKQDNFLSLLPAFVREKRS

SEQ ID NO: 73141 - protein, 431 aa, Homo sapiens
  Payload ID: 14489
  Gene Symbol: RHD
  Gene Name: Rh blood group, D antigen
  ENSP ID: ENSP00000399640
MSSKYPRSVRRCLPLWALTLEAALILLFYFFTHYDASLEDQKGLVASYQVGQDLTVMAAIGLGFLTSSFRRHSWSSVAFNLFMLALGVQWAILLDGFLSQFPSGKVVITLFSIRLATMSALSVLISVDAVLGKVNLAQLVVMVLVEVTALGNLRMVISNIFNTDYHMNMMHIYVFAAYFGLSVAWCLPKPLPEGTEDKDQTATIPSLSAMLGALFLWMFWPSFNSALLRSPIERKNAVFNTYYAVAVSVVTAISGSSLAHPQGKISKTYVHSAVLAGGVAVGTSCHLIPSPWLAMVLGLVAGLISVGGAKYLPGCCNRVLGIPHSSIMGYNFSLLGLLGEIIYIVLLVLDTVGAGNGMSLGWNLAVKMAEAGDEELMRLDVSQRNHGGAAVPTGSWMPSTETTIAPNYRDHISVGLASRSSSALGNSAWPS

SEQ ID NO: 73142 - protein, 321 aa, Homo sapiens
  Payload ID: 14489
  Gene Symbol: RHD
  Gene Name: Rh blood group, D antigen
  Uniprot ID: Q02161
  ENSP ID: ENSP00000413849
MSSKYPRSVRRCLPLWALTLEAALILLFYFFTHYDASLEDQKGLVASYQVGQDLTVMAAIGLGFLTSSFRRHSWSSVAFNLFMLALGVQWAILLDGFLSQFPSGKVVITLFSIRLATMSALSVLISVDAVLGKVNLAQLVVMVLVEVTALGNLRMVISNIFNTDYHMNMMHIYVFAAYFGLSVAWCLPKPLPEGTEDKDQTATIPSLSAMLGALFLWMFWPSFNSALLRSPIERKNAVFNTYYAVAVSVVTAISGSSLAHPQGKISKTYVHSAVLAGGVAVGTSCHLIPSPWLAMVLGLVAGLISVGGAKYLPFPHLAVGF

SEQ ID NO: 73143 - protein, 463 aa, Homo sapiens
  Payload ID: 14489
  Gene Symbol: RHD
  Gene Name: Rh blood group, D antigen
  ENSP ID: ENSP00000456966
MSSKYPRSVRRCLPLWALTLEAALILLFYFFTHYDASLEDQKGLVASYQVGQDLTVMAAIGLGFLTSSFRRHSWSSVAFNLFMLALGVQWAILLDGFLSQFPSGKVVITLFSIRLATMSALSVLISVDAVLGKVNLAQLVVMVLVEVTALGNLRMVISNIFNTDYHMNMMHIYVFAAYFGLSVAWCLPKPLPEGTEDKDQTATIPSLSAMLGALFLWMFWPSFNSALLRSPIERKNAVFNTYYAVAVSVVTAISGSSLAHPQGKISKTYVHSAVLAGGVAVGTSCHLIPSPWLAMVLGLVAGLISVGGAKYLPGCCNRVLGIPHSSIMGYNFSLLGLLGEIIYIVLLVLDTVGAGNGMIGFQVLLSIGELSLAIVIALMSGLLTVSSFGCWILSKSIQEKQGLFKNKTTSSHCCLHLYVRNAHDSKVSNVRAGTGVRENGVESFLCHSLRRISPFIMHCRIQQ

SEQ ID NO: 73144 - protein, 431 aa, Homo sapiens; identical to SEQ ID NO: 73141
  Payload ID: 14489
  Gene Symbol: RHD
  Gene Name: Rh blood group, D antigen
  ENSP ID: ENSP00000478087

SEQ ID NO: 73145 - protein, 302 aa, Homo sapiens
  Payload ID: 14489
  Gene Symbol: RHD
  Gene Name: Rh blood group, D antigen
  ENSP ID: ENSP00000480925
MSSKYPRSVRRCLPLWALTLEAALILLFYFFTHYDASLEDQKGLVASYQVGQDLTVMAAIGLGFLTSSFRRHSWSSVAFNLFMLALGVQWAILLDGFLSQFPSGKVVITLFSIRLATMSALSVLISVDAVLGKVNLAQLVVMVLVEVTALGNLRMVISNIFNTDYHMNMMHIYVFAAYFGLSVAWCLPKPLPEGTEDKDQTATIPSLSAMLGALFLWMFWPSFNSALLRSPIERKNAVFNTYYAVAVSVVTAISGSSLAHPQGKISKTYVHSAVLAGGVAVGTSCHLIPSPWLAMVLGLVAG

SEQ ID NO: 73146 - protein, 97 aa, Homo sapiens
  Payload ID: 14490
  Gene Symbol: RHBG
  Gene Name: Rh family, B glycoprotein (gene/pseudogene)
  ENSP ID: ENSP00000389836
MAGSPSRAAGRRLQLPLLCLFLQGATAVLFAVFVRYNHKTDAALWHRSNHSNADNEFYFRYPNGVSLLLPRLECNGTISAHHNLCLPGSSDSPASVS

SEQ ID NO: 73147 - protein, 458 aa, Homo sapiens
  Payload ID: 14490
  Gene Symbol: RHBG
  Gene Name: Rh family, B glycoprotein (gene/pseudogene)
  Uniprot ID: Q9H310
  ENSP ID: ENSP00000441197
MAGSPSRAAGRRLQLPLLCLFLQGATAVLFAVFVRYNHKTDAALWHRSNHSNADNEFYFRYPSFQDVHAMVFVGFGFLMVFLQRYGFSSVGFTFLLAAFALQWSTLVQGFLHSFHGGHIHVGVESMINADFCAGAVLISFGAVLGKTGPTQLLLMALLEVVLFGINEFVLLHLLGVRDAGGSMTIHTFGAYFGLVLSRVLYRPQLEKSKHRQGSVYHSDLFAMIGTIFLWIFWPSFNAALTALGAGQHRTALNTYYSLAASTLGTFALSALVGEDGRLDMVHIQNAALAGGVVVGTSSEMMLTPFGALAAGFLAGTVSTLGYKFFTPILESKFKVQDTCGVHNLHGMPGVLGALLGVLVAGLATHEAYGDGLESVFPLIAEGQRSATSQAMHQLFGLFVTLMFASVGGGLGGLLLKLPFLDSPPDSQHYEDQVHWQVPGEHEDKAQRPLRVEEADTQA

SEQ ID NO: 73148 - protein, 153 aa, Homo sapiens
  Payload ID: 14490
  Gene Symbol: RHBG
  Gene Name: Rh family, B glycoprotein (gene/pseudogene)
  ENSP ID: ENSP00000477836
MAGSPSRAAGRRLQLPLLCLFLQGATAVLFAVFVRYNHKTDAALWHRSNHSNADNEFYFRYPKESHSVAQAGVQRRNLGSLQPSPPRLPGRACHGLRGLWLPHGLPAALRLQQRGLHLPPGRLCPAVVHTGPGLSPLLPRWPHPCWRGEHDQC

SEQ ID NO: 73149 - protein, 97 aa, Homo sapiens
  Payload ID: 14490
  Gene Symbol: RHBG
  Gene Name: Rh family, B glycoprotein (gene/pseudogene)
  ENSP ID: ENSP00000478851
  MOD_RES (1)..(1): Any amino acid
XAGSPSRAAGRRLQLPLLCLFLQGATAVLFAVFVRYNHKTDAALWHRSNHSNADNEFYFRYPNGVSLLLPRLECNGTISAHHNLCLPGSSDSPASVS

SEQ ID NO: 73150 - protein, 97 aa, Homo sapiens; identical to SEQ ID NO: 73146
  Payload ID: 14490
  Gene Symbol: RHBG
  Gene Name: Rh family, B glycoprotein (gene/pseudogene)
  ENSP ID: ENSP00000483178

SEQ ID NO: 73151 - protein, 479 aa, Homo sapiens
  Payload ID: 14491
  Gene Symbol: RHCG
  Gene Name: Rh family, C glycoprotein
  Uniprot ID: Q9UBD6
  ENSP ID: ENSP00000268122
MAWNTNLRWRLPLTCLLLQVIMVILFGVFVRYDFEADAHWWSERTHKNLSDMENEFYYRYPSFQDVHVMVFVGFGFLMTFLQRYGFSAVGFNFLLAAFGIQWALLMQGWFHFLQDRYIVVGVENLINADFCVASVCVAFGAVLGKVSPIQLLIMTFFQVTLFAVNEFILLNLLKVKDAGGSMTIHTFGAYFGLTVTRILYRRNLEQSKERQNSVYQSDLFAMIGTLFLWMYWPSFNSAISYHGDSQHRAAINTYCSLAACVLTSVAISSALHKKGKLDMVHIQNATLAGGVAVGTAAEMMLMPYGALIIGFVCGIISTLGFVYLTPFLESRLHIQDTCGINNLHGIPGIIGGIVGAVTAASASLEVYGKEGLVHSFDFQGFNGDWTARTQGKFQIYGLLVTLAMALMGGIIVGLILRLPFWGQPSDENCFEDAVYWEMPEGNSTVYIPEDPTFKPSGPSVPSVPMVSPLPMASSVPLVP

SEQ ID NO: 73152 - protein, 233 aa, Homo sapiens
  Payload ID: 14491
  Gene Symbol: RHCG
  Gene Name: Rh family, C glycoprotein
  ENSP ID: ENSP00000452899
MAWNTNLRWRLPLTCLLLQVIMVILFGVFVRYDFEADAHWWSERTHKNLSDMENEFYYRYPSFQDVHVMVFVGFGFLMTFLQRYGFSAVGFNFLLAAFGIQWALLMQGWFHFLQDRYIVVGVENLINADFCVASVCVAFGAVLGKVSPIQLLIMTFFQAPSSCGCTGPASTQPYPTMGTASTEPPSTPTAPWQPACLPRWQYPVPCTRRASWTWCTSRMPRSQEGWPWVPLLR

SEQ ID NO: 73153 - protein, 237 aa, Homo sapiens
  Payload ID: 14491
  Gene Symbol: RHCG
  Gene Name: Rh family, C glycoprotein
  ENSP ID: ENSP00000453496
  MOD_RES (1)..(1): Any amino acid
XDSQHRAAINTYCSLAACVLTSVAISSALHKKGKLDMVHIQNATLAGGVAVGTAAEMMLMPYGALIIGFVCGIISTLGFVYLTPFLESRLHIQDTCGINNLHGIPGIIGGIVGAVTAASASLEVYGKEGLVHSFDFQGFNGDWTARTQGKFQIYGLLVTLAMALMGGIIVGLILRLPFWGQPSDENCFEDAVYWEMPEGNSTVYIPEDPTFKPSGPSVPSVPMVSPLPMASSVPLVP

SEQ ID NO: 73154 - protein, 331 aa, Homo sapiens
  Payload ID: 14491
  Gene Symbol: RHCG
  Gene Name: Rh family, C glycoprotein
  ENSP ID: ENSP00000453588
MAWNTNLRWRLPLTCLLLQVIMVILFGVFVRYDFEADAHWWSERTHKNLSDMENEFYYRYPSFQDVHVMVFVGFGFLMTFLQRYGFSAVGFNFLLAAFGIQWALLMQGWFHFLQDRYIVVGVENLINADFCVASVCVAFGAVLGKVSPIQLLIMTFFQVTLFAVNEFILLNLLKVKDAGGSMTIHTFGAYFGLTVTRILYRRNLEQSKERQNSVYQSDLFAMIGTLFLWMYWPSFNSAISYHGDSQHRAAINTYCSLAACVLTSVAISSALHKKGKLDMVHIQNATLAGGVAVGTAAEMMLMPYGALIIGFVCGIISTLGFVYLTAASWVL

SEQ ID NO: 73155 - protein, 136 aa, Homo sapiens
  Payload ID: 14491
  Gene Symbol: RHCG
  Gene Name: Rh family, C glycoprotein
  ENSP ID: ENSP00000453716
MAWNTNLRWRLPLTCLLLQVIMVILFGVFVRYDFEADAHWWSERTHKNLSDMENEFYYRYPSFQDVHVMVFVGFGFLMTFLQRYGFSAVGFNFLLAAFGIQWALLMQGWFHFLQDRYIVVGVENDSPGWESSKCHT

SEQ ID NO: 73156 - protein, 410 aa, Homo sapiens [sequence omitted]

SEQ ID NO: 73157 - protein, 409 aa, Homo sapiens
  Payload ID: 14492
  Gene Symbol: RHAG
  Gene Name: Rh-associated glycoprotein
  Uniprot ID: Q02094
  ENSP ID: ENSP00000360217
MRFTFPLMAIVLEIAMIVLFGLFVEYETDQTVLEQLNITKPTDMGIFFELYPLFQDVHVMIFVGFGFLMTFLKKYGFSSVGINLLVAALGLQWGTIVQGILQSQGQKFNIGIKNMINADFSAATVLISFGAVLGKTSPTQMLIMTILEIVFFAHNEYLVSEIFKASDIGASMTIHAFGAYFGLAVAGILYRSGLRKGHENEESAYYSDLFAMIGTLFLWMFWPSFNSAIAEPGDKQCRAIVNTYFSLAACVLTAFAFSSLVEHRGKLNMVHIQNATLAGGVAVGTCADMAIHPFGSMIIGSIAGMVSVLGYKFLTPLFTTKLRIHDTCGVHNLHGLPGVVGGLAGIVAVAMGASNTSMAMQAAALGSSIGTAVVGGLMTGLILKLPLWGQPSDQNCYDDSVYWKVPKTR

SEQ ID NO: 73158 - protein, 381 aa, Homo sapiens [sequence omitted]

SEQ ID NO: 73159 - protein, 232 aa, Homo sapiens
  Payload ID: 14493
  Gene Symbol: RND1
  Gene Name: Rho family GTPase 1
  Uniprot ID: Q92730
  ENSP ID: ENSP00000308461
MKERRAPQPVVARCKLVLVGDVQCGKTAMLQVLAKDCYPETYVPTVFENYTACLETEEQRVELSLWDTSGSPYYDNVRPLCYSDSDAVLLCFDISRPETVDSALKKWRTEILDYCPSTRVLLIGCKTDLRTDLSTLMELSHQKQAPISYEQGCAIAKQLGAEIYLEGSAFTSEKSIHSIFRTASMLCLNKPSPLPQKSPVRSLSKRLLHLPSRSELISSTFKKEKAKSCSIM

SEQ ID NO: 73160 - protein, 126 aa, Homo sapiens
  Payload ID: 14493
  Gene Symbol: RND1
  Gene Name: Rho family GTPase 1
  ENSP ID: ENSP00000447059
WRTEILDYCPSTRVLLIGCKTDLRTDLSTLMELSHQKQAPISYEQGCAIAKQLGAEIYLEGSAFTSEKSIHSIFRTASMLCLNKPSPLPQKSPVRSLSKRLLHLPSRSELISSTFKKEKAKSCSIM

SEQ ID NO: 73161 - protein, 96 aa, Homo sapiens
  Payload ID: 14493
  Gene Symbol: RND1
  Gene Name: Rho family GTPase 1
  ENSP ID: ENSP00000449045
MKERRAPQPVVARCKLVLVGDVQCGKTAMLQVLAKDCYPEVSCPPARWPAFLPACPPWGRFPPAQETWLPQPQPILSRFLRLYHPQLLFGWRTALP

SEQ ID NO: 73162 - protein, 227 aa, Homo sapiens
  Payload ID: 14494
  Gene Symbol: RND2
  Gene Name: Rho family GTPase 2
  Uniprot ID: P52198
  ENSP ID: ENSP00000466680
MEGQSGRCKIVVVGDAECGKTALLQVFAKDAYPGSYVPTVFENYTASFEIDKRRIELNMWDTSGSSYYDNVRPLAYPDSDAVLICFDISRPETLDSVLKKWQGETQEFCPNAKVVLVGCKLDMRTDLATLRELSKQRLIPVTHEQGTVLAKQVGAVSYVECSSRSSERSVRDVFHVATVASLGRGHRQLRRTDSRRGMQRSAQLSGRPDRGNEGEIHKDRAKSCNLM

SEQ ID NO: 73163 - protein, 244 aa, Homo sapiens
  Payload ID: 14495
  Gene Symbol: RND3
  Gene Name: Rho family GTPase 3
  Uniprot ID: P61587
  ENSP ID: ENSP00000263895
MKERRASQKLSSKSIMDPNQNVKCKIVVVGDSQCGKTALLHVFAKDCFPENYVPTVFENYTASFEIDTQRIELSLWDTSGSPYYDNVRPLSYPDSDAVLICFDISRPETLDSVLKKWKGEIQEFCPNTKMLLVGCKSDLRTDVSTLVELSNHRQTPVSYDQGANMAKQIGAATYIECSALQSENSVRDIFHVATLACVNKTNKNVKRNKSQRATKRISHMPSRPELSAVATDLRKDKAKSCTVM

SEQ ID NO: 73164 - protein, 244 aa, Homo sapiens; identical to SEQ ID NO: 73163
  Payload ID: 14495
  Gene Symbol: RND3
  Gene Name: Rho family GTPase 3
  Uniprot ID: P61587
  ENSP ID: ENSP00000364886

SEQ ID NO: 73165 - protein, 115 aa, Homo sapiens
  Payload ID: 14495
  Gene Symbol: RND3
  Gene Name: Rho family GTPase 3
  ENSP ID: ENSP00000386576
MLLVGCKSDLRTDVSTLVELSNHRQTPVSYDQGANMAKQIGAATYIECSALQSENSVRDIFHVATLACVNKTNKNVKRNKSQRATKRISHMPSRPELSAVATDLRKDKAKSCTVM

SEQ ID NO: 73166 - protein, 116 aa, Homo sapiens
  Payload ID: 14495
  Gene Symbol: RND3
  Gene Name: Rho family GTPase 3
  ENSP ID: ENSP00000395997
MKERRASQKLSSKSIMDPNQNVKCKIVVVGDSQCGKTALLHVFAKDCFPENYVPTVFENYTASFEIDTQRIELSLWDTSGSPYYDNVRPLSYPDSDAVLICFDISRPETLDSVLKK

SEQ ID NO: 73167 - protein, 116 aa, Homo sapiens; identical to SEQ ID NO: 73166
  Payload ID: 14495
  Gene Symbol: RND3
  Gene Name: Rho family GTPase 3
  ENSP ID: ENSP00000411950

SEQ ID NO: 73168 - protein, 204 aa, Homo sapiens
  Payload ID: 14496
  Gene Symbol: ARHGDIA
  Gene Name: Rho GDP dissociation inhibitor (GDI) alpha
  Uniprot ID: P52565
  ENSP ID: ENSP00000269321
MAEQEPTAEQLAQIAAENEEDEHSVNYKPPAQKSIQEIQELDKDDESLRKYKEALLGRVAVSADPNVPNVVVTGLTLVCSSAPGPLELDLTGDLESFKKQSFVLKEGVEYRIKISFRVNREIVSGMKYIQHTYRKGVKIDKTDYMVGSYGPRAEEYEFLTPVEEAPKGMLARGSYSIKSRFTDDDKTDHLSWEWNLTIKKDWKD

SEQ ID NO: 73169 - protein, 160 aa, Homo sapiens
  Payload ID: 14496
  Gene Symbol: ARHGDIA
  Gene Name: Rho GDP dissociation inhibitor (GDI) alpha
  Uniprot ID: P52565
  ENSP ID: ENSP00000383556
MAEQEPTAEQLAQIAAENEEDEHSVNYKPPAQKSIQEIQELDKDDESLRKYKEALLGRVAVSADPNVPNVVVTGLTLVCSSAPGPLELDLTGDLESFKKQSFVLKEGVEYRIKISFRVNREIVSGMKYIQHTYRKGVKNDDKTDHLSWEWNLTIKKDWKD

SEQ ID NO: 73170 - protein, 204 aa, Homo sapiens; identical to SEQ ID NO: 73168
  Payload ID: 14496
  Gene Symbol: ARHGDIA
  Gene Name: Rho GDP dissociation inhibitor (GDI) alpha
  Uniprot ID: P52565
  ENSP ID: ENSP00000441348

SEQ ID NO: 73171 - protein, 129 aa, Homo sapiens
  Payload ID: 14496
  Gene Symbol: ARHGDIA
  Gene Name: Rho GDP dissociation inhibitor (GDI) alpha
  ENSP ID: ENSP00000461956
MAEQEPTAEQLAQIAAENEEDEHSVNYKPPAQKSIQEIQELDKDDESLRKYKEALLGRVAVSAVDKTDYMVGSYGPRAEEYEFLTPVEEAPKGMLARGSYSIKSRFTDDDKTDHLSWEWNLTIKKDWKD

SEQ ID NO: 73172 - protein, 249 aa, Homo sapiens
  Payload ID: 14496
  Gene Symbol: ARHGDIA
  Gene Name: Rho GDP dissociation inhibitor (GDI) alpha
  ENSP ID: ENSP00000462209
MAEQEPTAEQLAQIAAENEEDEHSVNYKPPAQKSIQEIQELDKDDESLRKYKEALLGRVAVSADPNVPNVVVTGLTLVCSSAPGPLELDLTGDLESFKKQSFVLKEGVEYRIKISFRVNREIVSGMKYIQHTYRKGVKIDKTDYMTTTRPTTCPGSGISPSRRTGRTEPSQRRAGQTDGRTTDRRMCPPQPLPSPYQSADRPSVPLPPWSASLAWLNRVPPTPLLSPPPPTGPASSVSCLVAASACAVG

SEQ ID NO: 73173 - protein, 92 aa, Homo sapiens
  Payload ID: 14496
  Gene Symbol: ARHGDIA
  Gene Name: Rho GDP dissociation inhibitor (GDI) alpha
  ENSP ID: ENSP00000462323
MAEQEPTAEQLAQIAAENEEDEHSVNYKPPAQKSIQEIQELDKDDESLRKYKEALLGRVAVSADPNVPNVVVTGLTLVCSSAPGPLELDLTG

SEQ ID NO: 73174 - protein, 193 aa, Homo sapiens
  Payload ID: 14496
  Gene Symbol: ARHGDIA
  Gene Name: Rho GDP dissociation inhibitor (GDI) alpha
  ENSP ID: ENSP00000462960
MAEQEPTAEQLAQIAAENEEDEHSVNYKPPAQKSIQEIQELDKDDESLRKYKEALLGRVAVSADPNVPNVVVTGLTLVCSSAPGPLELDLTGDLESFKKQSFVLKEGVEYRIKISFRVNREIVSGMKYIQHTYRKGVKIDKTDYMVGSYGPRAEEYEFLTPVEEAPKGSISPSHPRPGFRRERSSHSPGPVVA

SEQ ID NO: 73175 - protein, 92 aa, Homo sapiens; identical to SEQ ID NO: 73173
  Payload ID: 14496
  Gene Symbol: ARHGDIA
  Gene Name: Rho GDP dissociation inhibitor (GDI) alpha
  ENSP ID: ENSP00000463530

SEQ ID NO: 73176 - protein, 235 aa, Homo sapiens
  Payload ID: 14496
  Gene Symbol: ARHGDIA
  Gene Name: Rho GDP dissociation inhibitor (GDI) alpha
  ENSP ID: ENSP00000463939
MAEQEPTAEQLAQIAAENEEDEHSVNYKPPAQKSIQEIQELDKDDESLRKYKEALLGRVAVSADPNVPNVVVTGLTLVCSSAPGPLELDLTGDLESFKKQSFVLKEGVEYRIKISFRVNREIVSGMKYIQHTYRKGVKIDKTDYMVGSYGPRAEEYEFLTPVEEAPKGSISPSHPRPGFRRERSSHSPGPVVAPGRVRLLLRGGAGVWDARPRGGRAVLQPRCSLASPLVAVGPV

SEQ ID NO: 73177 - protein, 204 aa, Homo sapiens; identical to SEQ ID NO: 73168
  Payload ID: 14496
  Gene Symbol: ARHGDIA
  Gene Name: Rho GDP dissociation inhibitor (GDI) alpha
  Uniprot ID: P52565
  ENSP ID: ENSP00000464205

SEQ ID NO: 73178 - protein, 201 aa, Homo sapiens
  Payload ID: 14497
  Gene Symbol: ARHGDIB
  Gene Name: Rho GDP dissociation inhibitor (GDI) beta
  Uniprot ID: P52566
  ENSP ID: ENSP00000228945
MTEKAPEPHVEEDDDDELDSKLNYKPPPQKSLKELQEMDKDDESLIKYKKTLLGDGPVVTDPKAPNVVVTRLTLVCESAPGPITMDLTGDLEALKKETIVLKEGSEYRVKIHFKVNRDIVSGLKYVQHTYRTGVKVDKATFMVGSYGPRPEEYEFLTPVEEAPKGMLARGTYHNKSFFTDDDKQDHLSWEWNLSIKKEWTE

SEQ ID NO: 73179 - protein, 112 aa, Homo sapiens
  Payload ID: 14497
  Gene Symbol: ARHGDIB
  Gene Name: Rho GDP dissociation inhibitor (GDI) beta
  ENSP ID: ENSP00000437454
MTEKAPEPHVEEDDDDELDSKLNYKPPPQKSLKELQEMDKDDESLIKYKKTLLGDGPVVTDPKAPNVVVTRLTLVCESAPGPITMDLTGDLEALKKETIVLKEGSEYRVKIH

SEQ ID NO: 73180 - protein, 201 aa, Homo sapiens; identical to SEQ ID NO: 73178
  Payload ID: 14497
  Gene Symbol: ARHGDIB
  Gene Name: Rho GDP dissociation inhibitor (GDI) beta
  Uniprot ID: P52566
  ENSP ID: ENSP00000440560

SEQ ID NO: 73181 - protein, 201 aa, Homo sapiens; identical to SEQ ID NO: 73178
  Payload ID: 14497
  Gene Symbol: ARHGDIB
  Gene Name: Rho GDP dissociation inhibitor (GDI) beta
  Uniprot ID: P52566
  ENSP ID: ENSP00000444860

SEQ ID NO: 73182 - protein, 195 aa, Homo sapiens
  Payload ID: 14497
  Gene Symbol: ARHGDIB
  Gene Name: Rho GDP dissociation inhibitor (GDI) beta
  ENSP ID: ENSP00000445185
  MOD_RES (1)..(1): Any amino acid
XEPHVEEDDDDELDSKLNYKPPPQKSLKELQEMDKDDESLIKYKKTLLGDGPVVTDPKAPNVVVTRLTLVCESAPGPITMDLTDLEALKKETIVLKEGSEYRVKIHFKVNRDIVSGLKYVQHTYRTGVKVDKATFMVGSYGPRPEEYEFLTPVEEAPKGMLARGTYHNKSFFTDDDKQDHLSWEWNLSIKKEWTE

SEQ ID NO: 73183 - protein, 158 aa, Homo sapiens
  Payload ID: 14497
  Gene Symbol: ARHGDIB
  Gene Name: Rho GDP dissociation inhibitor (GDI) beta
  ENSP ID: ENSP00000445263
MTEKAPEPHVEEDDDDELDSKLNYKPPPQKSLKELQEMDKDDESLIKYKKTLLGDGPVVTDPKAPNVVVTRLTLVCESAPGPITMDLTGDLEALKKETIVLKEGSEYRVKIHFKVNRDIVSGLKYVQHTYRTGVKVDKATFMVGSYGPRPEEYEFLTP

SEQ ID NO: 73184 - protein, 88 aa, Homo sapiens
  Payload ID: 14497
  Gene Symbol: ARHGDIB
  Gene Name: Rho GDP dissociation inhibitor (GDI) beta
  ENSP ID: ENSP00000445450
MTEKAPEPHVEEDDDDELDSKLNYKPPPQKSLKELQEMDKDDESLIKYKKTLLGDGPVVTDPKAPNVVVTRLTLVCESAPGPITMDLT

SEQ ID NO: 73185 - protein, 225 aa, Homo sapiens
  Payload ID: 14498
  Gene Symbol: ARHGDIG
  Gene Name: Rho GDP dissociation inhibitor (GDI) gamma
  Uniprot ID: Q99819
  ENSP ID: ENSP00000219409
MLGLDACELGAQLLELLRLALCARVLLADKEGGPPAVDEVLDEAVPEYRAPGRKSLLEIRQLDPDDRSLAKYKRVLLGPLPPAVDPSLPNVQVTRLTLLSEQAPGPVVMDLTGDLAVLKDQVFVLKEGVDYRVKISFKVHREIVSGLKCLHHTYRRGLRVDKTVYMVGSYGPSAQEYEFVTPVEEAPRGALVRGPYLVVSLFTDDDRTHHLSWEWGLCICQDWKD

SEQ ID NO: 73186 - protein, 136 aa, Homo sapiens
  Payload ID: 14498
  Gene Symbol: ARHGDIG
  Gene Name: Rho GDP dissociation inhibitor (GDI) gamma
  ENSP ID: ENSP00000397395
MSASCDGCVGSRPPVHLASGYSLADLLVLEMGMGTQCWTEDQRRWSSLWPWSHLSSVLLADKEGGPPAVDEVLDEAVPEYRAPGRKSLLEIRQLDPDDRSLAKYKRVLLGPLPPAVDPSLPNVQVTRLTLLSEQAP

SEQ ID NO: 73187 - protein, 178 aa, Homo sapiens
  Payload ID: 14498
  Gene Symbol: ARHGDIG
  Gene Name: Rho GDP dissociation inhibitor (GDI) gamma
  ENSP ID: ENSP00000404435
MLGLDACELGAQLLELLRLALCARVLLADKEGGPPAVDEVLDEAVPEYRAPGRKSLLEIRQLDPDDRSLAKYKRVLLGPLPPAVDPSLPNVQVTRLTLLSEQAPGPVVMDLTGDLAVLKDQVFVLKEGVDYRVHREIVSGLKCLHHTYRRGLRVDKTVYMVGSYGPSAQEYEFVTPVE

SEQ ID NO: 73188 - protein, 76 aa, Homo sapiens
  Payload ID: 14498
  Gene Symbol: ARHGDIG
  Gene Name: Rho GDP dissociation inhibitor (GDI) gamma
  ENSP ID: ENSP00000408037
MSASCDGCVGSRPPVHLASGYSLADLLVLEMGMGTQCWTEDQRRWSSLWPWSHLSSDPSLPNVQVTRLTLLSEQAP

SEQ ID NO: 73189 - protein, 116 aa, Homo sapiens
  Payload ID: 14498
  Gene Symbol: ARHGDIG
  Gene Name: Rho GDP dissociation inhibitor (GDI) gamma
  ENSP ID: ENSP00000410541
MDLTGDLAVLKDQVFVLKEGVDYRVKISFKVHREIVSGLKCLHHTYRRGLRVDKTVYMVGSYGPSAQEYEFVTPVEEAPRGALVRGPYLVVSLFTDDDRTHHLSWEWGLCICQDWK

SEQ ID NO: 73190 - protein, 439 aa, Homo sapiens
  Payload ID: 14499
  Gene Symbol: ARHGAP1
  Gene Name: Rho GTPase activating protein 1
  Uniprot ID: Q07960
  ENSP ID: ENSP00000310491
MDPLSELQDDLTLDDTSEALNQLKLASIDEKNWPSDEMPDFPKSDDSKSSSPELVTHLKWDDPYYDIARHQIVEVAGDDKYGRKIIVFSACRMPPSHQLDHSKLLGYLKHTLDQYVESDYTLLYLHHGLTSDNKPSLSWLRDAYREFDRKYKKNIKALYIVHPTMFIKTLLILFKPLISFKFGQKIFYVNYLSELSEHVKLEQLGIPRQVLKYDDFLKSTQKSPATAPKPMPPRPPLPNQQFGVSLQHLQEKNPEQEPIPIVLRETVAYLQAHALTTEGIFRRSANTQVVREVQQKYNMGLPVDFDQYNELHLPAVILKTFLRELPEPLLTFDLYPHVVGFLNIDESQRVPATLQVLQTLPEENYQVLRFLTAFLVQISAHSDQNKMTNTNLAVVFGPNLLWAKDAAITLKAINPINTFTKFLLDHQGELFPSPDPSGL

SEQ ID NO: 73191 - protein, 192 aa, Homo sapiens
  Payload ID: 14499
  Gene Symbol: ARHGAP1
  Gene Name: Rho GTPase activating protein 1
  ENSP ID: ENSP00000432794
MDPLSELQDDLTLDDTSEALNQLKLASIDEKNWPSDEMPDFPKSDDSKSSSPELVTHLKWDDPYYDIARHQIVEVAGDDKYGRKIIVFSACRMPPSHQLDHSKLLGYLKHTLDQYVESDYTLLYLHHGLTSDNKPSLSWLRDAYREFDRKYKKNIKALYIVHPTMFIKTLLILFKPLISFKFGQKIFYVNYL

SEQ ID NO: 73192 - protein, 334 aa, Homo sapiens
  Payload ID: 14499
  Gene Symbol: ARHGAP1
  Gene Name: Rho GTPase activating protein 1
  ENSP ID: ENSP00000434883
  MOD_RES (1)..(1): Any amino acid
XLSELQDDLTLDDTSEALNQLKLASIDEKNWPSDEMPDFPKSDDSKSSSPELVTHLKWDDPYYDIARHQIVEVAGDDKYGRKIIVFSACRMPPSHQLDHSKLLGYKKNIKALYIVHPTMFIKTLLILFKPLISFKFGQKIFYVNYLSELSEHVKLEQLGIPRQVLKYDDFLKSTQKSPATAPKPMPPRPPLPNQQFGVSLQHLQEKNPEQEPIPIVLRETVAYLQAHALTTEGIFRRSANTQVVREVQQKYNMGLPVDFDQYNELHLPAVILKTFLRELPEPLLTFDLYPHVVGFLNIDESQRVPATLQVLQTLPEENYQVLRFLTAFLVQISA

SEQ ID NO: 73193 - protein, 786 aa, Homo sapiens
  Payload ID: 14500
  Gene Symbol: ARHGAP10
  Gene Name: Rho GTPase activating protein 10
  Uniprot ID: A1A4S6
  ENSP ID: ENSP00000336923
MGLQPLEFSDCYLDSPWFRERIRAHEAELERTNKFIKELIKDGKNLIAATKSLSVAQRKFAHSLRDFKFEFIGDAVTDDERCIDASLREFSNFLKNLEEQREIMALSVTETLIKPLEKFRKEQLGAVKEEKKKFDKETEKNYSLIDKHLNLSAKKKDSHLQEADIQVEQNRQHFYELSLEYVCKLQEIQERKKFEFVEPMLSFFQGMFTFYHQGHELAKDFNHYKMELQINIQNTRNRFEGTRSEVEELMNKIRQNPKDHKRASQFTAEGYLYVQEKRPAPFGSSWVKHYCMYRKAAKKFNMIPFEHRSGGKLGDGEVFFLKECTKRHTDSIDRRFCFDIEAADRPGVSLTMQAFSEEERKQWLEALGGKEALSHSFNTAIIPRPEGNAQLDKMGFTIIRKCISAVETRGINDQGLYRVVGVSSKVQRLLSMLMDVKTCNEVDLENSADWEVKTITSALKQYLRSLPEPLMTYELHGDFIVPAKSGSPESRVNAIHFLVHKLPEKNKEMLDILVKHLTNVSNHSKQNLMTVANLGVVFGPTLMRPQEETVAALMDLKFQNIVVEILIENHEKIFRTPPDTTFPEPTCLSASPPNAPPRQSKRQGQRTKRPVAVYNLCLELEDGDNPYPSKEDTPTSSLDSLSSPSPVTTAVPGPPGPDKNHLLADGGSFGDWASTIPGQTRSSMVQWLNPQSPTTTSSNSAVTPLSPGSSPFPFSPPATVADKPPESIRSRKARAVYPCEAEHSSELSFEIGAIFEDVQTSREPGWLEGTLNGKRGLIPQNYVKLL

SEQ ID NO: 73194 - protein, 413 aa, Homo sapiens
  Payload ID: 14500
  Gene Symbol: ARHGAP10
  Gene Name: Rho GTPase activating protein 10
  ENSP ID: ENSP00000422358
  MOD_RES (1)..(1): Any amino acid
XCTKRHTDSIDRRFCFDIEAADRPGVSLTMQAFSEEERKQWLEALGGKEALSHSFNTAIIPRPEGNAQLDKMGFTIIRKCISAVETRGINDQGLYRVVGVSSKVQRLLSMLMDVKTCNEVDLENSADWEVKTITSALKQYLRSLPEPLMTYELHGDFIVPAKSGSPESRVNAIHFLVHKLPEKNKEMLDILVKHLTNVSNHSKQNLMTVANLGVVFGPTLMRPQEETVAALMDLKFQNIVVEILIENHEKIFRTPPDTTFPEPTCLSASPPNAPPRQSKRQGQRTKRPVAVYNLCLELEDGDNPYPSKEDTPTSSLDSLSSPSPVTTAVPGPPGPDKNHLLADGGSFGDWASTIIRSRKARAVYPCEAEHSSELSFEIGAIFEDVQTSREPGWLEGTLNGKRGLIPQNYVKLL

SEQ ID NO: 73195 - protein, 1023 aa, Homo sapiens
  Payload ID: 14501
  Gene Symbol: ARHGAP11A
  Gene Name: Rho GTPase activating protein 11A
  Uniprot ID: Q6P4F7
  ENSP ID: ENSP00000355090
MWDQRLVRLALLQHLRAFYGIKVKGVRGQCDRRRHETAATEIGGKIFGVPFNALPHSAVPEYGHIPSFLVDACTSLEDHIHTEGLFRKSGSVIRLKALKNKVDHGEGCLSSAPPCDIAGLLKQFFRELPEPILPADLHEALLKAQQLGTEEKNKATLLLSCLLADHTVHVLRYFFNFLRNVSLRSSENKMDSSNLAVIFAPNLLQTSEGHEKMSSNTEKKLRLQAAVVQTLIDYASDIGRVPDFILEKIPAMLGIDGLCATPSLEGFEEGEYETPGEYKRKRRQSVGDFVSGALNKFKPNRTPSITPQEERIAQLSESPVILTPNAKRTLPVDSSHGFSSKKRKSIKHNFNFELLPSNLFNSSSTPVSVHIDTSSEGSSQSSLSPVLIGGNHLITAGVPRRSKRIAGKKVCRVESGKAGCFSPKISHKEKVRRSLRLKFNLGKNGREVNGCSGVNRYESVGWRLANQQSLKNRIESVKTGLLFSPDVDEKLPKKGSEKISKSEETLLTPERLVGTNYRMSWTGPNNSSFQEVDANEASSMVENLEVENSLEPDIMVEKSPATSCELTPSNLNNKHNSNITSSPLSGDENNMTKETLVKVQKAFSESGSNLHALMNQRQSSVTNVGKVKLTEPSYLEDSPEENLFETNDLTIVESKEKYEHHTGKGEKCFSERDFSPLQTQTFNRETTIKCYSTQMKMEHEKDIHSNMPKDYLSKQEFSSDEEIKKQQSPKDKLNNKLKENENMMEGNLPKCAAHSKDEARSSFSQQSTCVVTNLSKPRPMRIAKQQSLETCEKTVSESSQMTEHRKVSDHIQWFNKLSLNEPNRIKVKSPLKFQRTPVRQSVRRINSLLEYSRQPTGHKLASLGDTASPLVKSVSCDGALSSCIESASKDSSVSCIKSGPKEQKSMSCEESNIGAISKSSMELPSKSFLKMRKHPDSVNASLRSTTVYKQKILSDGQVKVPLDDLTNHDIVKPVVNNNMGISSGINNRVLRRPSERGRAWYKGSPKHPIGKTQLLPTSKPVDL

SEQ ID NO: 73196 - protein, 834 aa, Homo sapiens
  Payload ID: 14501
  Gene Symbol: ARHGAP11A
  Gene Name: Rho GTPase activating protein 11A
  Uniprot ID: Q6P4F7
  ENSP ID: ENSP00000440073
MDSSNLAVIFAPNLLQTSEGHEKMSSNTEKKLRLQAAVVQTLIDYASDIGRVPDFILEKIPAMLGIDGLCATPSLEGFEEGEYETPGEYKRKRRQSVGDFVSGALNKFKPNRTPSITPQEERIAQLSESPVILTPNAKRTLPVDSSHGFSSKKRKSIKHNFNFELLPSNLFNSSSTPVSVHIDTSSEGSSQSSLSPVLIGGNHLITAGVPRRSKRIAGKKVCRVESGKAGCFSPKISHKEKVRRSLRLKFNLGKNGREVNGCSGVNRYESVGWRLANQQSLKNRIESVKTGLLFSPDVDEKLPKKGSEKISKSEETLLTPERLVGTNYRMSWTGPNNSSFQEVDANEASSMVENLEVENSLEPDIMVEKSPATSCELTPSNLNNKHNSNITSSPLSGDENNMTKETLVKVQKAFSESGSNLHALMNQRQSSVTNVGKVKLTEPSYLEDSPEENLFETNDLTIVESKEKYEHHTGKGEKCFSERDFSPLQTQTFNRETTIKCYSTQMKMEHEKDIHSNMPKDYLSKQEFSSDEEIKKQQSPKDKLNNKLKENENMMEGNLPKCAAHSKDEARSSFSQQSTCVVTNLSKPRPMRIAKQQSLETCEKTVSESSQMTEHRKVSDHIQWFNKLSLNEPNRIKVKSPLKFQRTPVRQSVRRINSLLEYSRQPTGHKLASLGDTASPLVKSVSCDGALSSCIESASKDSSVSCIKSGPKEQKSMSCEESNIGAISKSSMELPSKSFLKMRKHPDSVNASLRSTTVYKQKILSDGQVKVPLDDLTNHDIVKPVVNNNMGISSGINNRVLRRPSERGRAWYKGSPKHPIGKTQLLPTSKPVDL

SEQ ID NO: 73197 - protein, 501 aa, Homo sapiens
  Payload ID: 14501
  Gene Symbol: ARHGAP11A
  Gene Name: Rho GTPase activating protein 11A
  Uniprot ID: Q6P4F7
  ENSP ID: ENSP00000454575
MWDQRLVRLALLQHLRAFYGIKVKGVRGQCDRRRHETAATEIGGKIFGVPFNALPHSAVPEYGHIPSFLVDACTSLEDHIHTEGLFRKSGSVIRLKALKNKVDHGEGCLSSAPPCDIAGLLKQFFRELPEPILPADLHEALLKAQQLGTEEKNKATLLLSCLLADHTVHVLRYFFNFLRNVSLRSSENKMDSSNLAVIFAPNLLQTSEGHEKMSSNTEKKLRLQAAVVQTLIDYASDIGRVPDFILEKIPAMLGIDGLCATPSLEGFEEGEYETPGEYKRKRRQSVGDFVSGALNKFKPNRTPSITPQEERIAQLSESPVILTPNAKRTLPVDSSHGFSSKKRKSIKHNFNFELLPSNLFNSSSTPVSVHIDTSSEGSSQSSLSPVLIGGNHLITAGVPRRSKRIAGKKVCRVESGKAGCFSPKISHKEKVRRSLRLKFNLGKNGREVNGCSGVNRYESVGWRLANQQSLKNRIESVKTGLLFSPDVDEKLPKKGTFTYYC

SEQ ID NO: 73198 - protein, 207 aa, Homo sapiens
  Payload ID: 14501
  Gene Symbol: ARHGAP11A
  Gene Name: Rho GTPase activating protein 11A
  ENSP ID: ENSP00000455593
  MOD_RES (1)..(1): Any amino acid
XFVSGALNKFKPNRTPSITPQEERIAQLSESPVILTPNAKRTLPVDSSHGFSIHIDTSSEGSSQSSLSPVLIGGNHLITAGVPRRSKRIAGKKVCRVESGKAGCFSPKISHKEKVRRSLRLKFNLGKNGREVNGCSGVNRYESVGWRLANQQSLKNRIESVKTGLLFSPDVDEKLPKKGSEKISKSEETLLTPERLVGTNYRMSWTG

SEQ ID NO: 73199 - protein, 834 aa, Homo sapiens; identical to SEQ ID NO: 73196
  Payload ID: 14501
  Gene Symbol: ARHGAP11A
  Gene Name: Rho GTPase activating protein 11A
  Uniprot ID: Q6P4F7
  ENSP ID: ENSP00000455754

SEQ ID NO: 73200 - protein, 473 aa, Homo sapiens
  Payload ID: 14501
  Gene Symbol: ARHGAP11A
  Gene Name: Rho GTPase activating protein 11A
  ENSP ID: ENSP00000456078
MWDQRLVRLALLQHLRAFYGIKVKGVRGQCDRRRHETAATEIGGKIFGVPFNALPHSAVPEYGHIPSFLVDACTSLEDHIHTEGLFRKSGSVIRLKALKNKVDHGEGCLSSAPPCDIAGLLKQFFRELPEPILPADLHEALLKAQQLGTEEKNKATLLLSCLLADHTVHVLRYFFNFLRNVSLRSSENKMDSSNLAVIFAPNLLQTSEGHEKMSSNTEKKLRLQAAVVQTLIDYASDIGRVPDFILEKIPAMLGIDGLCATPSLEGFEEGEYETPGEYKRKRRQSVGDFVSGALNKFKPNRTPSITPQEERIAQLSESPVILTPNAKRTLPVDSSHGFSSKKRKSIKHNFNFELLPSNLFNSSSTPVSGVPRRSKRIAGKKVCRVESGKAGCFSPKISHKEKVRRSLRLKFNLGKNGREVNGCSGVNRYESVGWRLANQQSLKNRIESVKTGLLFSPDVDEKLPKKGTFTYYC

SEQ ID NO: 73201 - protein, 1023 aa, Homo sapiens; identical to SEQ ID NO: 73195
  Payload ID: 14501
  Gene Symbol: ARHGAP11A
  Gene Name: Rho GTPase activating protein 11A
  Uniprot ID: Q6P4F7
  ENSP ID: ENSP00000479117

SEQ ID NO: 73202 - protein, 834 aa, Homo sapiens; identical to SEQ ID NO: 73196
  Payload ID: 14501
  Gene Symbol: ARHGAP11A
  Gene Name: Rho GTPase activating protein 11A
  Uniprot ID: Q6P4F7
  ENSP ID: ENSP00000480085

SEQ ID NO: 73203 - protein, 834 aa, Homo sapiens; identical to SEQ ID NO: 73196
  Payload ID: 14501
  Gene Symbol: ARHGAP11A
  Gene Name: Rho GTPase activating protein 11A
  Uniprot ID: Q6P4F7
  ENSP ID: ENSP00000481011

SEQ ID NO: 73204 - protein, 1023 aa, Homo sapiens; identical to SEQ ID NO: 73195
  Payload ID: 14501
  Gene Symbol: ARHGAP11A
  Gene Name: Rho GTPase activating protein 11A
  ENSP ID: ENSP00000488640

SEQ ID NO: 73205 - protein, 267 aa, Homo sapiens; identical to SEQ ID NO: 1201
  Payload ID: 14502
  Gene Symbol: ARHGAP11B
  Gene Name: Rho GTPase activating protein 11B
  Uniprot ID: Q3KRB8
  ENSP ID: ENSP00000392760

SEQ ID NO: 73206 - protein, 267 aa, Homo sapiens; identical to SEQ ID NO: 1201
  Payload ID: 14502
  Gene Symbol: ARHGAP11B
  Gene Name: Rho GTPase activating protein 11B
  Uniprot ID: Q3KRB8
  ENSP ID: ENSP00000457054

SEQ ID NO: 73207 - protein, 267 aa, Homo sapiens; identical to SEQ ID NO: 1201
  Payload ID: 14502
  Gene Symbol: ARHGAP11B
  Gene Name: Rho GTPase activating protein 11B
  Uniprot ID: Q3KRB8
  ENSP ID: ENSP00000481934

SEQ ID NO: 73208 - protein, 794 aa, Homo sapiens
  Payload ID: 14503
  Gene Symbol: ARHGAP12
  Gene Name: Rho GTPase activating protein 12
  Uniprot ID: Q8IWW6
  ENSP ID: ENSP00000310984
MKMADRSGKIIPGQVYIEVEYDYEYEAKDRKIVIKQGERYILVKKTNDDWWQVKPDENSKAFYVPAQYVKEVTRKALMPPVKQVAGLPNNSTKIMQSLHLQRSTENVNKLPELSSFGKPSSSVQGTGLIRDANQNFGPSYNQGQTVNLSLDLTHNNGKFNNDSHSPKVSSQNRTRSFGHFPGPEFLDVEKTSFSQEQSCDSAGEGSERIHQDSESGDELSSSSTEQIRATTPPNQGRPDSPVYANLQELKISQSALPPLPGSPAIQINGEWETHKDSSGRCYYYNRGTQERTWKPPRWTRDASISKGDFQNPGDQEWLKHVDDQGRQYYYSADGSRSEWELPKYNASSQQQREIIKSRSLDRRLQEPIVLTKWRHSTIVLDTNDKESPTASKPCFPENESSPSSPKHQDTDQEKYGLLNVTKIAENGKKVRKNWLSSWAVLQGSSLLFTKTQGSSTSWFGSNQSKPEFTVDLKGATIEMASKDKSSKKNVFELKTRQGTELLIQSDNDTVINDWFKVLSSTINNQAVETDEGIEEEIPDSPGIEKHDKEKEQKDPKKLRSFKVSSIDSSEQKKTKKNLKKFLTRRPTLQAVREKGYIKDQVFGSNLANLCQRENGTVPKFVKLCIEHVEEHGLDIDGIYRVSGNLAVIQKLRFAVNHDEKLDLNDSKWEDIHVITGALKMFFRELPEPLFTFNHFNDFVNAIKQEPRQRVAAVKDLIRQLPKPNQDTMQILFRHLRRVIENGEKNRMTYQSIAIVFGPTLLKPEKETGNIAVHTVYQNQIVELILLELSSIFGR

SEQ ID NO: 73209 - protein, 846 aa, Homo sapiens
  Payload ID: 14503
  Gene Symbol: ARHGAP12
  Gene Name: Rho GTPase activating protein 12
  Uniprot ID: Q8IWW6
  ENSP ID: ENSP00000345808
MKMADRSGKIIPGQVYIEVEYDYEYEAKDRKIVIKQGERYILVKKTNDDWWQVKPDENSKAFYVPAQYVKEVTRKALMPPVKQVAGLPNNSTKIMQSLHLQRSTENVNKLPELSSFGKPSSSVQGTGLIRDANQNFGPSYNQGQTVNLSLDLTHNNGKFNNDSHSPKVSSQNRTRSFGHFPGPEFLDVEKTSFSQEQSCDSAGEGSERIHQDSESGDELSSSSTEQIRATTPPNQGRPDSPVYANLQELKISQSALPPLPGSPAIQINGEWETHKDSSGRCYYYNRGTQERTWKPPRWTRDASISKGDFQNPGDQELLSSEENYYSTSYSQSDSQCGSPPRGWSEELDERGHTLYTSDYTNEKWLKHVDDQGRQYYYSADGSRSEWELPKYNASSQQQREIIKSRSLDRRLQEPIVLTKWRHSTIVLDTNDKESPTASKPCFPENESSPSSPKHQDTASSPKDQEKYGLLNVTKIAENGKKVRKNWLSSWAVLQGSSLLFTKTQGSSTSWFGSNQSKPEFTVDLKGATIEMASKDKSSKKNVFELKTRQGTELLIQSDNDTVINDWFKVLSSTINNQAVETDEGIEEEIPDSPGIEKHDKEKEQKDPKKLRSFKVSSIDSSEQKKTKKNLKKFLTRRPTLQAVREKGYIKDQVFGSNLANLCQRENGTVPKFVKLCIEHVEEHGLDIDGIYRVSGNLAVIQKLRFAVNHDEKLDLNDSKWEDIHVITGALKMFFRELPEPLFTFNHFNDFVNAIKQEPRQRVAAVKDLIRQLPKPNQDTMQILFRHLRRVIENGEKNRMTYQSIAIVFGPTLLKPEKETGNIAVHTVYQNQIVELILLELSSIFGR

SEQ ID NO: 73210 - protein, 799 aa, Homo sapiens
  Payload ID: 14503
  Gene Symbol: ARHGAP12
  Gene Name: Rho GTPase activating protein 12
  ENSP ID: ENSP00000364394
MKMADRSGKIIPGQVYIEVEYDYEYEAKDRKIVIKQGERYILVKKTNDDWWQVKPDENSKAFYVPAQYVKEVTRKALMPPVKQVAGLPNNSTKIMQSLHLQRSTENVNKLPELSSFGKPSSSVQGTGLIRDANQNFGPSYNQGQTVNLSLDLTHNNGKFNNDSHSPKVSSQNRTRSFGHFPGPEFLDVEKTSFSQEQSCDSAGEGSERIHQDSESGDELSSSSTEQIRATTPPNQGRPDSPVYANLQELKISQSALPPLPGSPAIQINGEWETHKDSSGRCYYYNRGTQERTWKPPRWTRDASISKGDFQNPGDQEWLKHVDDQGRQYYYSADGSRSEWELPKYNASSQQQREIIKSRSLDRRLQEPIVLTKWRHSTIVLDTNDKESPTASKPCFPENESSPSSPKHQDTASSPKDQEKYGLLNVTKIAENGKKVRKNWLSSWAVLQGSSLLFTKTQGSSTSWFGSNQSKPEFTVDLKGATIEMASKDKSSKKNVFELKTRQGTELLIQSDNDTVINDWFKVLSSTINNQAVETDEGIEEEIPDSPGIEKHDKEKEQKDPKKLRSFKVSSIDSSEQKKTKKNLKKFLTRRPTLQAVREKGYIKDQVFGSNLANLCQRENGTVPKFVKLCIEHVEEHGLDIDGIYRVSGNLAVIQKLRFAVNHDEKLDLNDSKWEDIHVITGALKMFFRELPEPLFTFNHFNDFVNAIKQEPRQRVAAVKDLIRQLPKPNQDTMQILFRHLRRVIENGEKNRMTYQSIAIVFGPTLLKPEKETGNIAVHTVYQNQIVELILLELSSIFGR

SEQ ID NO: 73211 - protein, 816 aa, Homo sapiens
  Payload ID: 14503
  Gene Symbol: ARHGAP12
  Gene Name: Rho GTPase activating protein 12
  Uniprot ID: Q8IWW6
  ENSP ID: ENSP00000364399
MKMADRSGKIIPGQVYIEVEYDYEYEAKDRKIVIKQGERYILVKKTNDDWWQVKPDENSKAFYVPAQYVKEVTRKALMPPVKQVAGLPNNSTKIMQSLHLQRSTENVNKLPELSSFGKPSSSVQGTGLIRDANQNFGPSYNQGQTVNLSLDLTHNNGKFNNDSHSPKVSSQNRTRSFGHFPGPEFLDVEKTSFSQEQSCDSAGEGSERIHQDSESGDELSSSSTEQIRATTPPNQGRPDSPVYANLQELKISQSALPPLPGSPAIQINGEWETHKDSSGRCYYYNRGTQERTWKPPRWTRDASISKGDFQNPGDQELLSSEENYYSTSYSQSDSQCGSPPRGWSEELDERGHTLYTSDYTNEKWLKHVDDQGRQYYYSADGSRSEWELPKYNASSQQQREIIKSRSLDRRLQEPIVLTKWRHSTIVLDTNDKDQEKYGLLNVTKIAENGKKVRKNWLSSWAVLQGSSLLFTKTQGSSTSWFGSNQSKPEFTVDLKGATIEMASKDKSSKKNVFELKTRQGTELLIQSDNDTVINDWFKVLSSTINNQAVETDEGIEEEIPDSPGIEKHDKEKEQKDPKKLRSFKVSSIDSSEQKKTKKNLKKFLTRRPTLQAVREKGYIKDQVFGSNLANLCQRENGTVPKFVKLCIEHVEEHGLDIDGIYRVSGNLAVIQKLRFAVNHDEKLDLNDSKWEDIHVITGALKMFFRELPEPLFTFNHFNDFVNAIKQEPRQRVAAVKDLIRQLPKPNQDTMQILFRHLRRVIENGEKNRMTYQSIAIVFGPTLLKPEKETGNIAVHTVYQNQIVELILLELSSIFGR

SEQ ID NO: 73212 - protein, 841 aa, Homo sapiens
  Payload ID: 14503
  Gene Symbol: ARHGAP12
  Gene Name: Rho GTPase activating protein 12
  Uniprot ID: Q8IWW6
  ENSP ID: ENSP00000379448
MKMADRSGKIIPGQVYIEVEYDYEYEAKDRKIVIKQGERYILVKKTNDDWWQVKPDENSKAFYVPAQYVKEVTRKALMPPVKQVAGLPNNSTKIMQSLHLQRSTENVNKLPELSSFGKPSSSVQGTGLIRDANQNFGPSYNQGQTVNLSLDLTHNNGKFNNDSHSPKVSSQNRTRSFGHFPGPEFLDVEKTSFSQEQSCDSAGEGSERIHQDSESGDELSSSSTEQIRATTPPNQGRPDSPVYANLQELKISQSALPPLPGSPAIQINGEWETHKDSSGRCYYYNRGTQERTWKPPRWTRDASISKGDFQNPGDQELLSSEENYYSTSYSQSDSQCGSPPRGWSEELDERGHTLYTSDYTNEKWLKHVDDQGRQYYYSADGSRSEWELPKYNASSQQQREIIKSRSLDRRLQEPIVLTKWRHSTIVLDTNDKESPTASKPCFPENESSPSSPKHQDTDQEKYGLLNVTKIAENGKKVRKNWLSSWAVLQGSSLLFTKTQGSSTSWFGSNQSKPEFTVDLKGATIEMASKDKSSKKNVFELKTRQGTELLIQSDNDTVINDWFKVLSSTINNQAVETDEGIEEEIPDSPGIEKHDKEKEQKDPKKLRSFKVSSIDSSEQKKTKKNLKKFLTRRPTLQAVREKGYIKDQVFGSNLANLCQRENGTVPKFVKLCIEHVEEHGLDIDGIYRVSGNLAVIQKLRFAVNHDEKLDLNDSKWEDIHVITGALKMFFRELPEPLFTFNHFNDFVNAIKQEPRQRVAAVKDLIRQLPKPNQDTMQILFRHLRRVIENGEKNRMTYQSIAIVFGPTLLKPEKETGNIAVHTVYQNQIVELILLELSSIFGR

SEQ ID NO: 73213 - protein, 196 aa, Homo sapiens
  Payload ID: 14503
  Gene Symbol: ARHGAP12
  Gene Name: Rho GTPase activating protein 12
  ENSP ID: ENSP00000398050
  MOD_RES (1)..(1): Any amino acid
XSTSYSQSDSQCGSPPRGWSEELDERGHTLYTSDYTNEKWLKHVDDQGRQYYYSADGSRSEWELPKYNASSQQQREIIKSRSLDRRLQEPIVLTKWRHSTIVLDTNDKESPTASKPCFPENESSPSSPKHQDTDQEKYGLLNVTKIAENGKKVRKNWLSSWAVLQGSSLLFTKTQGSSTSWFGSNQSKPEFTVDLK

SEQ ID NO: 73214 - protein, 475 aa, Homo sapiens
  Payload ID: 14504
  Gene Symbol: ARHGAP15
  Gene Name: Rho GTPase activating protein 15
  Uniprot ID: Q53QZ3
  ENSP ID: ENSP00000295095
MQKSTNSDTSVETLNSTRQGTGAVQMRIKNANSHHDRLSQSKSMILTDVGKVTEPISRHRRNHSQHILKDVIPPLEQLMVEKEGYLQKAKIADGGKKLRKNWSTSWIVLSSRRIEFYKESKQQALSNMKTGHKPESVDLCGAHIEWAKEKSSRKNVFQITTVSGNEFLLQSDIDFIILDWFHAIKNAIDRLPKDSSCPSRNLELFKIQRSSSTELLSHYDSDIKEQKPEHRKSLMFRLHHSASDTSDKNRVKSRLKKFITRRPSLKTLQEKGLIKDQIFGSHLHKVCERENSTVPWFVKQCIEAVEKRGLDVDGIYRVSGNLATIQKLRFIVNQEEKLNLDDSQWEDIHVVTGALKMFFRELPEPLFPYSFFEQFVEAIKKQDNNTRIEAVKSLVQKLPPPNRDTMKVLFGHLTKIVAKASKNLMSTQSLGIVFGPTLLRAENETGNMAIHMVYQNQIAELMLSEYSKIFGSEED

SEQ ID NO: 73215 - protein, 138 aa, Homo sapiens
  Payload ID: 14504
  Gene Symbol: ARHGAP15
  Gene Name: Rho GTPase activating protein 15
  ENSP ID: ENSP00000386560
MQKSTNSDTSVETLNSTRQGTGAVQMRIKNANSHHDRLSQSKSMILTDVGKVTEPISRHRRNHSQHILKDVIPPLEQLMVEKEGYLQKAKIADGGKKLRKNWSTSWIVLSSRRIEFYKESKQQALSNMSFCLMCSGGT

SEQ ID NO: 73216 - protein, 56 aa, Homo sapiens
  Payload ID: 14504
  Gene Symbol: ARHGAP15
  Gene Name: Rho GTPase activating protein 15
  ENSP ID: ENSP00000390310
  MOD_RES (1)..(1): Any amino acid
XLDVDGIYRVSGNLATIQKLRFIVNQVVSGIPALLSELDGDLWTPLVSCRFFTVVI

SEQ ID NO: 73217 - protein, 881 aa, Homo sapiens
  Payload ID: 14505
  Gene Symbol: ARHGAP17
  Gene Name: Rho GTPase activating protein 17
  Uniprot ID: Q68EM7
  ENSP ID: ENSP00000289968
MKKQFNRMKQLANQTVGRAEKTEVLSEDLLQIERRLDTVRSICHHSHKRLVACFQGQHGTDAERRHKKLPLTALAQNMQEASTQLEDSLLGKMLETCGDAENQLALELSQHEVFVEKEIVDPLYGIAEVEIPNIQKQRKQLARLVLDWDSVRARWNQAHKSSGTNFQGLPSKIDTLKEEMDEAGNKVEQCKDQLAADMYNFMAKEGEYGKFFVTLLEAQADYHRKALAVLEKTLPEMRAHQDKWAEKPAFGTPLEEHLKRSGREIALPIEACVMLLLETGMKEEGLFRIGAGASKLKKLKAALDCSTSHLDEFYSDPHAVAGALKSYLRELPEPLMTFNLYEEWTQVASVQDQDKKLQDLWRTCQKLPPQNFVNFRYLIKFLAKLAQTSDVNKMTPSNIAIVLGPNLLWARNEGTLAEMAAATSVHVVAVIEPIIQHADWFFPEEVEFNVSEAFVPLTTPSSNHSFHTGNDSDSGTLERKRPASMAVMEGDLVKKESFGVKLMDFQAHRRGGTLNRKHISPAFQPPLPPTDGSTVVPAGPEPPPQSSRAESSSGGGTVPSSAGILEQGPSPGDGSPPKPKDPVSAAVPAPGRNNSQIASGQNQPQAAAGSHQLSMGQPHNAAGPSPHTLRRAVKKPAPAPPKPGNPPPGHPGGQSSSGTSQHPPSLSPKPPTRSPSPPTQHTGQPPGQPSAPSQLSAPRRYSSSLSPIQAPNHPPPQPPTQATPLMHTKPNSQGPPNPMALPSEHGLEQPSHTPPQTPTPPSTPPLGKQNPSLPAPQTLAGGNPETAQPHAGTLPRPRPVPKPRNRPSVPPPPQPPGVHSAGDSSLTNTAPTASKIVTDSNSRVSEPHRSIFPEMHSDSASKDVPGRILLDIDNDTESTAL

SEQ ID NO: 73218 - protein, 803 aa, Homo sapiens
  Payload ID: 14505
  Gene Symbol: ARHGAP17
  Gene Name: Rho GTPase activating protein 17
  Uniprot ID: Q68EM7
  ENSP ID: ENSP00000303130
MKKQFNRMKQLANQTVGRAEKTEVLSEDLLQIERRLDTVRSICHHSHKRLVACFQGQHGTDAERRHKKLPLTALAQNMQEASTQLEDSLLGKMLETCGDAENQLALELSQHEVFVEKEIVDPLYGIAEVEIPNIQKQRKQLARLVLDWDSVRARWNQAHKSSGTNFQGLPSKIDTLKEEMDEAGNKVEQCKDQLAADMYNFMAKEGEYGKFFVTLLEAQADYHRKALAVLEKTLPEMRAHQDKWAEKPAFGTPLEEHLKRSGREIALPIEACVMLLLETGMKEEGLFRIGAGASKLKKLKAALDCSTSHLDEFYSDPHAVAGALKSYLRELPEPLMTFNLYEEWTQVASVQDQDKKLQDLWRTCQKLPPQNFVNFRYLIKFLAKLAQTSDVNKMTPSNIAIVLGPNLLWARNEGTLAEMAAATSVHVVAVIEPIIQHADWFFPEEVEFNVSEAFVPLTTPSSNHSFHTGNDSDSGTLERKRPASMAVMEGDLVKKESPPKPKDPVSAAVPAPGRNNSQIASGQNQPQAAAGSHQLSMGQPHNAAGPSPHTLRRAVKKPAPAPPKPGNPPPGHPGGQSSSGTSQHPPSLSPKPPTRSPSPPTQHTGQPPGQPSAPSQLSAPRRYSSSLSPIQAPNHPPPQPPTQATPLMHTKPNSQGPPNPMALPSEHGLEQPSHTPPQTPTPPSTPPLGKQNPSLPAPQTLAGGNPETAQPHAGTLPRPRPVPKPRNRPSVPPPPQPPGVHSAGDSSLTNTAPTASKIVTDSNSRVSEPHRSIFPEMHSDSASKDVPGRILLDIDNDTESTAL

SEQ ID NO: 73219 - protein, 211 aa, Homo sapiens
  Payload ID: 14505
  Gene Symbol: ARHGAP17
  Gene Name: Rho GTPase activating protein 17
  ENSP ID: ENSP00000406701
MAADVSRNSLQAHDNFLAEKTEVLSEDLLQIERRLDTVRSICHHSHKRLVACFQGQHGTDAERRHKKLPLTALAQNMQEASTQLEDSLLGKMLETCGDAENQLALELSQHEVFVEKEIVDPLYGIAEVEIPNIQKQRKQLARLVLDWDSVRARWNQAHKSSGTNFQGLPSKIDTLKEEMDEAGNKVEQCKDQLAADMYNFMAKEGEYGKFF

SEQ ID NO: 73220 - protein, 124 aa, Homo sapiens
  Payload ID: 14505
  Gene Symbol: ARHGAP17
  Gene Name: Rho GTPase activating protein 17
  ENSP ID: ENSP00000459074
MKKQFNRMKQLANQTVGRAEKTEVLSEDLLQIERRLDTVRSICHHSHKRLVACFQGQHGTDAERRHKKLPLTALAQNMQEASTQLEDSLLGCWRRVEMLRISWLSSSPSTKSLLRRRSWTLCTA

SEQ ID NO: 73221 - protein, 95 aa, Homo sapiens
  Payload ID: 14505
  Gene Symbol: ARHGAP17
  Gene Name: Rho GTPase activating protein 17
  ENSP ID: ENSP00000460600
  MOD_RES (1)..(1): Any amino acid
XPPSTPPLGKQNPSLPAPQTLAGGNPETAQPHAGTLPRPRPVPKPRNRPSVPPPPQPPGVHSAGDSSLTNTAPTASKIVTDALPSALTGGEGFQD

SEQ ID NO: 73222 - protein, 235 aa, Homo sapiens
  Payload ID: 14505
  Gene Symbol: ARHGAP17
  Gene Name: Rho GTPase activating protein 17
  ENSP ID: ENSP00000460985
  MOD_RES (1)..(1): Any amino acid
XKKPAPAPPKPGNPPPGHPGGQSSSGTSQHPPSLSPKPPTRSPSPPTQHTGQPPGQPSAPSQLSAPRRYSSSLSPIQAPNHPPPQPPTQATPLMHTKPNSQGPPNPMALPSEHGLEQPSHTPPQTPTPPSTPPLGKQNPSLPAPQTLAGGNPETAQPHAGTLPRPRPVPKPRNRPSVPPPPQPPGVHSAGDSSLTNTAPTASKIVTGFQNRIAASFLKCTQTQPAKTCLAASCWI

SEQ ID NO: 73223 - protein, 71 aa, Homo sapiens
  Payload ID: 14505
  Gene Symbol: ARHGAP17
  Gene Name: Rho GTPase activating protein 17
  ENSP ID: ENSP00000461411
MKKQFNRMKQLANQTVGRAEKTEVLSEDLLQIERRLDTVRSICHHSHKRLVACFQGQHGTDAERRHVFNLL

SEQ ID NO: 73224 - protein, 76 aa, Homo sapiens
  Payload ID: 14505
  Gene Symbol: ARHGAP17
  Gene Name: Rho GTPase activating protein 17
  ENSP ID: ENSP00000461426
MQEASTQLEDSLLGKMLETCGDAENQLALELSQHEVFVEKEIVDPLYGIAEVEIPNIQKQRKQLARLVLDWDSVRA

SEQ ID NO: 73225 - protein, 128 aa, Homo sapiens
  Payload ID: 14505
  Gene Symbol: ARHGAP17
  Gene Name: Rho GTPase activating protein 17
  ENSP ID: ENSP00000461639
  MOD_RES (1)..(1): Any amino acid
XPPPQPPTQATPLMHTKPNSQGPPNPMALPSEHGLEQPSHTPPQTPTPPSTPPLGKQNPSLPAPQTLAGGNPETAQPHAGTLPRPRPVPKPRNRPSVPPPPQPPGVHSAGDSSLTNTAPTASKIVTDV

SEQ ID NO: 73226 - protein, 663 aa, Homo sapiens
  Payload ID: 14506
  Gene Symbol: ARHGAP18
  Gene Name: Rho GTPase activating protein 18
  Uniprot ID: Q8N392
  ENSP ID: ENSP00000357131
MSWLSSSQGVVLTAYHPSGKDQTVGNSHAKAGEEATSSRRYGQYTMNQESTTIKVMEKPPFDRSISQDSLDELSMEDYWIELENIKKSSENSQEDQEVVVVKEPDEGELEEEWLKEAGLSNLFGESAGDPQESIVFLSTLTRTQAAAVQKRVETVSQTLRKKNKQYQIPDVRDIFAQQRESKETAPGGTESQSLRTNENKYQGRDDEASNLVGEEKLIPPEETPAPETDINLEVSFAEQALNQKESSKEKIQKSKGDDATLPSFRLPKDKTGTTRIGDLAPQDMKKVCHLALIELTALYDVLGIELKQQKAVKIKTKDSGLFCVPLTALLEQDQRKVPGMRIPLIFQKLISRIEERGLETEGLLRIPGAAIRIKNLCQELEAKFYEGTFNWESVKQHDAASLLKLFIRELPQPLLSVEYLKAFQAVQNLPTKKQQLQALNLLVILLPDANRDTLKALLEFLQRVIDNKEKNKMTVMNVAMVMAPNLFMCHALGLKSSEQREFVMAAGTANTMHLLIKYQKLLWTIPKFIVNQVRKQNTENHKKDKRAMKKLLKKMAYDREKYEKQDKSTNDADVPQGVIRVQAPHLSKVSMAIQLTEELKASDVLARFLSQESGVAQTLKKGEVFLYEIGGNIGERCLDDDTYMKDLYQLNPNAEWVIKSKPL

SEQ ID NO: 73227 - protein, 465 aa, Homo sapiens
  Payload ID: 14507
  Gene Symbol: ARHGAP19
  Gene Name: Rho GTPase activating protein 19
  Uniprot ID: Q14CB8
  ENSP ID: ENSP00000351058
MATEAQSEGEVPARESGRSDAICSFVICNDSSLRGQPIIFNPDFFVEKLRHEKPEIFTELVVSNITRLIDLPGTELAQLMGEVDLKLPGGAGPASGFFRSLMSLKRKEKGVIFGSPLTEEGIAQIYQLIEYLHKNLRVEGLFRVPGNSVRQQILRDALNNGTDIDLESGEFHSNDVATLLKMFLGELPEPLLTHKHFNAHLKIADLMQFDDKGNKTNIPDKDRQIEALQLLFLILPPPNRNLLKLLLDLLYQTAKKQDKNKMSAYNLALMFAPHVLWPKNAPAYIRECARLHYLGSRTQASKDDLDLIASCHTKSFQLAKSQKRNRVDSCPHQEETQHHTEEALRELFQHVHDMPESAKKKQLIRQFNKQSLTQTPGREPSTSQVQKRARSRSFSGLIKRKVLGNQMMSEKKKKNPTPESVAIGELKGTSKENRNLLFSGSPAVTMTPTRLKWSEGKKEGKKGFL

SEQ ID NO: 73228 - protein, 494 aa, Homo sapiens
  Payload ID: 14507
  Gene Symbol: ARHGAP19
  Gene Name: Rho GTPase activating protein 19
  Uniprot ID: Q14CB8
  ENSP ID: ENSP00000351333
MATEAQSEGEVPARESGRSDAICSFVICNDSSLRGQPIIFNPDFFVEKLRHEKPEIFTELVVSNITRLIDLPGTELAQLMGEVDLKLPGGAGPASGFFRSLMSLKRKEKGVIFGSPLTEEGIAQIYQLIEYLHKNLRVEGLFRVPGNSVRQQILRDALNNGTDIDLESGEFHSNDVATLLKMFLGELPEPLLTHKHFNAHLKIADLMQFDDKGNKTNIPDKDRQIEALQLLFLILPPPNRNLLKLLLDLLYQTAKKQDKNKMSAYNLALMFAPHVLWPKNVTANDLQENITKLNSGMAFMIKHSQKLFKAPAYIRECARLHYLGSRTQASKDDLDLIASCHTKSFQLAKSQKRNRVDSCPHQEETQHHTEEALRELFQHVHDMPESAKKKQLIRQFNKQSLTQTPGREPSTSQVQKRARSRSFSGLIKRKVLGNQMMSEKKKKNPTPESVAIGELKGTSKENRNLLFSGSPAVTMTPTRLKWSEGKKEGKKGFL

SEQ ID NO: 73229 - protein, 485 aa, Homo sapiens
  Payload ID: 14507
  Gene Symbol: ARHGAP19
  Gene Name: Rho GTPase activating protein 19
  Uniprot ID: Q14CB8
  ENSP ID: ENSP00000360066
MPHQKLSALIDAICSFVICNDSSLRGQPIIFNPDFFVEKLRHEKPEIFTELVVSNITRLIDLPGTELAQLMGEVDLKLPGGAGPASGFFRSLMSLKRKEKGVIFGSPLTEEGIAQIYQLIEYLHKNLRVEGLFRVPGNSVRQQILRDALNNGTDIDLESGEFHSNDVATLLKMFLGELPEPLLTHKHFNAHLKIADLMQFDDKGNKTNIPDKDRQIEALQLLFLILPPPNRNLLKLLLDLLYQTAKKQDKNKMSAYNLALMFAPHVLWPKNVTANDLQENITKLNSGMAFMIKHSQKLFKAPAYIRECARLHYLGSRTQASKDDLDLIASCHTKSFQLAKSQKRNRVDSCPHQEETQHHTEEALRELFQHVHDMPESAKKKQLIRQFNKQSLTQTPGREPSTSQVQKRARSRSFSGLIKRKVLGNQMMSEKKKKNPTPESVAIGELKGTSKENRNLLFSGSPAVTMTPTRLKWSEGKKEGKKGFL

SEQ ID NO: 73230 - protein, 300 aa, Homo sapiens
  Payload ID: 14507
  Gene Symbol: ARHGAP19
  Gene Name: Rho GTPase activating protein 19
  ENSP ID: ENSP00000473327
  MOD_RES (1)..(1): Any amino acid
XTEAQSEGEVPARESGRSDAICSFVICNDSSLRGQPIIFNPDFFVEKLRHEKPEIFTELVVSNITRLIDLPGTELAQLMGEVDLKLPGGAGPASGFFRSLMSLKRKEKGVIFGSPLTEEGIAQIYQLIEYLHKNLRVEGLFRVPGNSVRQQILRDALNNGTDIDLESGEFHSNDVATLLKMFLGELPEPLLTHKHFNAHLKIADLMQFDDKGNKTNIPDKDRQIEALQLLFLILPPPNRNLLKLLLDLLYQTAKKQDKNKMSAYNLALMFAPHVLWPKNGLVLLPTLEESNTITTHCSLI

SEQ ID NO: 73231 - protein, 197 aa, Homo sapiens
  Payload ID: 14507
  Gene Symbol: ARHGAP19
  Gene Name: Rho GTPase activating protein 19
  ENSP ID: ENSP00000473667
MATEAQSEGEVPARESGRSDAICSFVICNDSSLREKGVIFGSPLTEEGIAQIYQLIEYLHKNLRVEGLFRVPGNSVRQQILRDALNNGTDIDLESGEFHSNDVATLLKMFLGELPEPLLTHKHFNAHLKIADLMQFDDKGNKTNIPDKDRQIEALQLLFLILPPPNRNLLKLLLDLLYQTAKKQDKNKMSAYNLALM

SEQ ID NO: 73232 - protein, 1191 aa, Homo sapiens
  Payload ID: 14508
  Gene Symbol: ARHGAP20
  Gene Name: Rho GTPase activating protein 20
  Uniprot ID: Q9P2F6
  ENSP ID: ENSP00000260283
MEAMSPQQETLGGQPGRSSSLTGVSRLAGGSCTKKKMKTLAERRRSAPSLILDKALQKRPTTRDSPSASVDTCTFLSSLVCSNRTLLIDGRAELKRGLQRQERHLFLFNDLFVVAKIKYNNNFKIKNKIKLTDMWTASCVDEVGEGNTNAMKSFVLGWPTVNFVATFSSPEQKDKWLSLLQRYINLEKEKDYPKSIPLKIFAKDIGNCAYSKTITVMNSDTANEVINMSLPMLGITGSERDYQLWVNSGKEEAPYPLIGHEYPYGIKMSHLRDSALLTPGSKDSTTPFNLQEPFLMEQLPREMQCQFILKPSRLAAAQQLSDSGHKTFKRRRSIINWAFWRGSSTHLDNLPSSPTSPMPGQLFGISLPNICENDNLPKPVLDMLFFLNQKGPLTKGIFRQSANVKSCRELKEKLNSGVEVHLDCESIFVIASVLKDFLRNIPGSIFSSDLYDHWVSVMDQGNDEEKINTVQRLLDQLPRANVVLLRYLFGVLHNIEQHSSSNQMTAFNLAVCVAPSILWPPASSSPELENEFTKKVSLLIQFLIENCLRIFGEEITSLFREVSVRCDTRENASDISCFQLNDSSYDSLENELNEDVDAPCSDLVKKLGQGSRSMDSVLTLSDYDLDQPEVEGLLTLSDFDLAHSKDEDVQMKRPLESKPVNILVYTKIPLRDHARAPSAMCTPSYLSTAAANAAKSLRRHRRCSEPSIDYLDSKLSYLREFYQKKLRKSSCDAILSQKDEDYLKQNQPLQEEGKTCFKQSLVTGTDVSKKNATTQNTKKKSLSGSEGNHVKLFPKSKPVAISVASYSPMSSQDHSKNQPFDVNTSGYSPPHTADALKGPRTHRRCSEPNIEDQNRKLTYLRGIYSKKQHKTSCEAGLLHGEEDYLKRHKSLQMEGQKLINQSLVMGIEVGKSSATNQNTEKVLPPRLNLCPRTSYSSLSSPGTSPSGSSVSSQDSAFSQISEHSVFTPTETSSPIDCTFQAQRKREDLSPDFSNASHVSGMPGPSSGQACSRPAYTKKDTMEWHSQMHSVTLHPSTWLRNGVASLKNWSLKKKAKAARPEEEKIASPKGPLEPPPHASGVPEANSLQEEQKDLPLRAAEGLSPVQSAQRCSSSPFQDSERHCSSPFSLVESRLKLCMKSHEEIEPGSQSSSGSLPWERASASSWTLEDATSPDSGPTVVCDIEDRYLTKDI

SEQ ID NO: 73233 - protein, 1155 aa, Homo sapiens
  Payload ID: 14508
  Gene Symbol: ARHGAP20
  Gene Name: Rho GTPase activating protein 20
  Uniprot ID: Q9P2F6
  ENSP ID: ENSP00000431399
MKTLAERRRSAPSLILDKALQKRPTTRDSPSASVDTCTFLSSLVCSNRTLLIDGRAELKRGLQRQERHLFLFNDLFVVAKIKYNNNFKIKNKIKLTDMWTASCVDEVGEGNTNAMKSFVLGWPTVNFVATFSSPEQKDKWLSLLQRYINLEKEKDYPKSIPLKIFAKDIGNCAYSKTITVMNSDTANEVINMSLPMLGITGSERDYQLWVNSGKEEAPYPLIGHEYPYGIKMSHLRDSALLTPGSKDSTTPFNLQEPFLMEQLPREMQCQFILKPSRLAAAQQLSDSGHKTFKRRRSIINWAFWRGSSTHLDNLPSSPTSPMPGQLFGISLPNICENDNLPKPVLDMLFFLNQKGPLTKGIFRQSANVKSCRELKEKLNSGVEVHLDCESIFVIASVLKDFLRNIPGSIFSSDLYDHWVSVMDQGNDEEKINTVQRLLDQLPRANVVLLRYLFGVLHNIEQHSSSNQMTAFNLAVCVAPSILWPPASSSPELENEFTKKVSLLIQFLIENCLRIFGEEITSLFREVSVRCDTRENASDISCFQLNDSSYDSLENELNEDVDAPCSDLVKKLGQGSRSMDSVLTLSDYDLDQPEVEGLLTLSDFDLAHSKDEDVQMKRPLESKPVNILVYTKIPLRDHARAPSAMCTPSYLSTAAANAAKSLRRHRRCSEPSIDYLDSKLSYLREFYQKKLRKSSCDAILSQKDEDYLKQNQPLQEEGKTCFKQSLVTGTDVSKKNATTQNTKKKSLSGSEGNHVKLFPKSKPVAISVASYSPMSSQDHSKNQPFDVNTSGYSPPHTADALKGPRTHRRCSEPNIEDQNRKLTYLRGIYSKKQHKTSCEAGLLHGEEDYLKRHKSLQMEGQKLINQSLVMGIEVGKSSATNQNTEKVLPPRLNLCPRTSYSSLSSPGTSPSGSSVSSQDSAFSQISEHSVFTPTETSSPIDCTFQAQRKREDLSPDFSNASHVSGMPGPSSGQACSRPAYTKKDTMEWHSQMHSVTLHPSTWLRNGVASLKNWSLKKKAKAARPEEEKIASPKGPLEPPPHASGVPEANSLQEEQKDLPLRAAEGLSPVQSAQRCSSSPFQDSERHCSSPFSLVESRLKLCMKSHEEIEPGSQSSSGSLPWERASASSWTLEDATSPDSGPTVVCDIEDRYLTKDI

SEQ ID NO: 73234 - protein, 1168 aa, Homo sapiens
  Payload ID: 14508
  Gene Symbol: ARHGAP20
  Gene Name: Rho GTPase activating protein 20
  Uniprot ID: Q9P2F6
  ENSP ID: ENSP00000432076
MSARERQPALKKKMKTLAERRRSAPSLILDKALQKRPTTRDSPSASVDTCTFLSSLVCSNRTLLIDGRAELKRGLQRQERHLFLFNDLFVVAKIKYNNNFKIKNKIKLTDMWTASCVDEVGEGNTNAMKSFVLGWPTVNFVATFSSPEQKDKWLSLLQRYINLEKEKDYPKSIPLKIFAKDIGNCAYSKTITVMNSDTANEVINMSLPMLGITGSERDYQLWVNSGKEEAPYPLIGHEYPYGIKMSHLRDSALLTPGSKDSTTPFNLQEPFLMEQLPREMQCQFILKPSRLAAAQQLSDSGHKTFKRRRSIINWAFWRGSSTHLDNLPSSPTSPMPGQLFGISLPNICENDNLPKPVLDMLFFLNQKGPLTKGIFRQSANVKSCRELKEKLNSGVEVHLDCESIFVIASVLKDFLRNIPGSIFSSDLYDHWVSVMDQGNDEEKINTVQRLLDQLPRANVVLLRYLFGVLHNIEQHSSSNQMTAFNLAVCVAPSILWPPASSSPELENEFTKKVSLLIQFLIENCLRIFGEEITSLFREVSVRCDTRENASDISCFQLNDSSYDSLENELNEDVDAPCSDLVKKLGQGSRSMDSVLTLSDYDLDQPEVEGLLTLSDFDLAHSKDEDVQMKRPLESKPVNILVYTKIPLRDHARAPSAMCTPSYLSTAAANAAKSLRRHRRCSEPSIDYLDSKLSYLREFYQKKLRKSSCDAILSQKDEDYLKQNQPLQEEGKTCFKQSLVTGTDVSKKNATTQNTKKKSLSGSEGNHVKLFPKSKPVAISVASYSPMSSQDHSKNQPFDVNTSGYSPPHTADALKGPRTHRRCSEPNIEDQNRKLTYLRGIYSKKQHKTSCEAGLLHGEEDYLKRHKSLQMEGQKLINQSLVMGIEVGKSSATNQNTEKVLPPRLNLCPRTSYSSLSSPGTSPSGSSVSSQDSAFSQISEHSVFTPTETSSPIDCTFQAQRKREDLSPDFSNASHVSGMPGPSSGQACSRPAYTKKDTMEWHSQMHSVTLHPSTWLRNGVASLKNWSLKKKAKAARPEEEKIASPKGPLEPPPHASGVPEANSLQEEQKDLPLRAAEGLSPVQSAQRCSSSPFQDSERHCSSPFSLVESRLKLCMKSHEEIEPGSQSSSGSLPWERASASSWTLEDATSPDSGPTVVCDIEDRYLTKDI

SEQ ID NO: 73235 - protein, 1155 aa, Homo sapiens; identical to SEQ ID NO: 73233
  Payload ID: 14508
  Gene Symbol: ARHGAP20
  Gene Name: Rho GTPase activating protein 20
  Uniprot ID: Q9P2F6
  ENSP ID: ENSP00000436319

SEQ ID NO: 73236 - protein, 1165 aa, Homo sapiens
  Payload ID: 14508
  Gene Symbol: ARHGAP20
  Gene Name: Rho GTPase activating protein 20
  Uniprot ID: Q9P2F6
  ENSP ID: ENSP00000436522
MTFWIIINKKMKTLAERRRSAPSLILDKALQKRPTTRDSPSASVDTCTFLSSLVCSNRTLLIDGRAELKRGLQRQERHLFLFNDLFVVAKIKYNNNFKIKNKIKLTDMWTASCVDEVGEGNTNAMKSFVLGWPTVNFVATFSSPEQKDKWLSLLQRYINLEKEKDYPKSIPLKIFAKDIGNCAYSKTITVMNSDTANEVINMSLPMLGITGSERDYQLWVNSGKEEAPYPLIGHEYPYGIKMSHLRDSALLTPGSKDSTTPFNLQEPFLMEQLPREMQCQFILKPSRLAAAQQLSDSGHKTFKRRRSIINWAFWRGSSTHLDNLPSSPTSPMPGQLFGISLPNICENDNLPKPVLDMLFFLNQKGPLTKGIFRQSANVKSCRELKEKLNSGVEVHLDCESIFVIASVLKDFLRNIPGSIFSSDLYDHWVSVMDQGNDEEKINTVQRLLDQLPRANVVLLRYLFGVLHNIEQHSSSNQMTAFNLAVCVAPSILWPPASSSPELENEFTKKVSLLIQFLIENCLRIFGEEITSLFREVSVRCDTRENASDISCFQLNDSSYDSLENELNEDVDAPCSDLVKKLGQGSRSMDSVLTLSDYDLDQPEVEGLLTLSDFDLAHSKDEDVQMKRPLESKPVNILVYTKIPLRDHARAPSAMCTPSYLSTAAANAAKSLRRHRRCSEPSIDYLDSKLSYLREFYQKKLRKSSCDAILSQKDEDYLKQNQPLQEEGKTCFKQSLVTGTDVSKKNATTQNTKKKSLSGSEGNHVKLFPKSKPVAISVASYSPMSSQDHSKNQPFDVNTSGYSPPHTADALKGPRTHRRCSEPNIEDQNRKLTYLRGIYSKKQHKTSCEAGLLHGEEDYLKRHKSLQMEGQKLINQSLVMGIEVGKSSATNQNTEKVLPPRLNLCPRTSYSSLSSPGTSPSGSSVSSQDSAFSQISEHSVFTPTETSSPIDCTFQAQRKREDLSPDFSNASHVSGMPGPSSGQACSRPAYTKKDTMEWHSQMHSVTLHPSTWLRNGVASLKNWSLKKKAKAARPEEEKIASPKGPLEPPPHASGVPEANSLQEEQKDLPLRAAEGLSPVQSAQRCSSSPFQDSERHCSSPFSLVESRLKLCMKSHEEIEPGSQSSSGSLPWERASASSWTLEDATSPDSGPTVVCDIEDRYLTKDI

SEQ ID NO: 73237 - protein, 731 aa, Homo sapiens
  Payload ID: 14508
  Gene Symbol: ARHGAP20
  Gene Name: Rho GTPase activating protein 20
  ENSP ID: ENSP00000437905
MDQGNDEEKINTVQRLLDQLPRANVVLLRYLFGVLHNIEQHSSSNQMTAFNLAVCVAPSILWPPASSSPELENEFTKKVSLLIQFLIENCLRIFGEEITSLFREVSVRCDTRENASDISCFQLNDSSYDSLENELNEDVDAPCSDLVKKLGQGSRSMDSVLTLSDYDLDQPEVEGLLTLSDFDLAHSKDEDVQMKRPLESKPVNILVYTKIPLRDHARAPSAMCTPSYLSTAAANAAKSLRRHRRCSEPSIDYLDSKLSYLREFYQKKLRKSSCDAILSQKDEDYLKQNQPLQEEGKTCFKQSLVTGTDVSKKNATTQNTKKKSLSGSEGNHVKLFPKSKPVAISVASYSPMSSQDHSKNQPFDVNTSGYSPPHTADALKGPRTHRRCSEPNIEDQNRKLTYLRGIYSKKQHKTSCEAGLLHGEEDYLKRHKSLQMEGQKLINQSLVMGIEVGKSSATNQNTEKVLPPRLNLCPRTSYSSLSSPGTSPSGSSVSSQDSAFSQISEHSVFTPTETSSPIDCTFQAQRKREDLSPDFSNASHVSGMPGPSSGQACSRPAYTKKDTMEWHSQMHSVTLHPSTWLRNGVASLKNWSLKKKAKAARPEEEKIASPKGPLEPPPHASGVPEANSLQEEQKDLPLRAAEGLSPVQSAQRCSSSPFQDSERHCSSPFSLVESRLKLCMKSHEEIEPGSQSSSGSLPWERASASSWTLEDATSPDSGPTVVCDIEDRNCC

SEQ ID NO: 73238 - protein, 1165 aa, Homo sapiens
  Payload ID: 14509
  Gene Symbol: ARHGAP21
  Gene Name: Rho GTPase activating protein 21
  ENSP ID: ENSP00000365592
MMATRRTGLSEGDGDKLKACEVSKNKDGKEQSETVSLSEDETFSWPGPKTVTLKRTSQGFGFTLRHFIVYPPESAIQFSYKDEENGNRGGKQRNRLEPMDTIFVKQVKEGGPAFEAGLCTGDRIIKVNGESVIGKTYSQVIALIQNSDTTLELSVMPKDEDILQVAYSQDAYLKGNEAYSGNARNIPEPPPICYPWLPSAPSAMAQPVEISPPDSSLSKQQTSTPVLTQPGRAYRMEIQVPPSPTDVAKSNTAVCVCNESVRTVIVPSEKVVDLLSNRNNHTGPSHRTEEVRYGVSEQTSLKTVSRTTSPPLSIPTTHLIHQPAGSRSLEPSGILLKSGNYSGHSDGISSSRSQAVEAPSVSVNHYSPNSHQHIDWKNYKTYKEYIDNRRLHIGCRTIQERLDSLRAASQSTTDYNQVVPNRTTLQGRRRSTSHDRVPQSVQIRQRSVSQERLEDSVLMKYCPRSASQGALTSPSVSFSNHRTRSWDYIEGQDETLENVNSGTPIPDSNGEKKQTYKWSGFTEQDDRRGICERPRQQEIHKSFRGSNFTVAPSVVNSDNRRMSGRGVGSVSQFKKIPPDLKTLQSNRNFQTTCGMSLPRGISQDRSPLVKVRSNSLKAPSTHVTKPSFSQKSFVSIKDQRPVNHLHQNSLLNQQTWVRTDSAPDQQVETGKSPSLSGASAKPAPQSSENAGTSDLELPVSQRNQDLSLQEAETEQSDTLDNKEAVILREKPPSGRQTPQPLRHQSYILAVNDQETGSDTTCWLPNDARREVHIKRMEERKASSTSPPGDSLASIPFIDEPTSPSIDHDIAHIPASAVISASTSQVPSIATVPPCLTTSAPLIRRQLSHDHESVGPPSLDAQPNSKTERSKSYDEGLDDYREDAKLSFKHVSSLKGIKIADSQKSSEDSGSRKDSSSEVFSDAAKEGWLHFRPLVTDKGKRVGGSIRPWKQMYVVLRGHSLYLYKDKREQTTPSEEEQPISVNACLIDISYSETKRKNVFRLTTSDCECLFQAEDRDDMLAWIKTIQESSNLNEEDTGVTNRDLISRRIKEYNNLMSKAEQLPKTPRQSLSIRQTLLGAKSEPKTQSPHSPKEESERKLLSKDDTSPPKDKGTWRKGIPSIMRKTFEKKPTATGTFGVRLDDCPPAHTNRVGDTSPPDFLKSLIQF

SEQ ID NO: 73239 - protein, 1407 aa, Homo sapiens
  Payload ID: 14509
  Gene Symbol: ARHGAP21
  Gene Name: Rho GTPase activating protein 21
  Uniprot ID: Q5T5U3
  ENSP ID: ENSP00000365604
MATRRTGLSEGDGDKLKACEVSKNKDGKEQSETVSLSEDETFSWPGPKTVTLKRTSQGFGFTLRHFIVYPPESAIQFSYKDEENGNRGGKQRNRLEPMDTIFVKQVKEGGPAFEAGLCTGDRIIKVNGESVIGKTYSQVIALIQNSDTTLELSVMPKDEDILQVAYSQDAYLKGNEAYSGNARNIPEPPPICYPWLPSAPSAMAQPVEISPPDSSLSKQQTSTPVLTQPGRAYRMEIQVPPSPTDVAKSNTAVCVCNESVRTVIVPSEKVVDLLSNRNNHTGPSHRTEEVRYGVSEQTSLKTVSRTTSPPLSIPTTHLIHQPAGSRSLEPSGILLKSGNYSGHSDGISSSRSQAVEAPSVSVNHYSPNSHQHIDWKNYKTYKEYIDNRRLHIGCRTIQERLDSLRAASQSTTDYNQVVPNRTTLQGRRRSTSHDRVPQSVQIRQRSVSQERLEDSVLMKYCPRSASQGALTSPSVSFSNHRTRSWDYIEGQDETLENVNSGTPIPDSNGEKKQTYKWSGFTEQDDRRGICERPRQQEIHKSFRGSNFTVAPSVVNSDNRRMSGRGVGSVSHWRKGIPSIMRKTFEKKPTATGTFGVRLDDCPPAHTNRYIPLIVDICCKLVEERGLEYTGIYRVPGNNAAISSMQEELNKGMADIDIQDDKWRDLNVISSLLKSFFRKLPEPLFTNDKYADFIEANRKEDPLDRLKTLKRLIHDLPEHHYETLKFLSAHLKTVAENSEKNKMEPRNLAIVFGPTLVRTSEDNMTHMVTHMPDQYKIVETLIQHHDWFFTEEGAEEPLTTVQEESTVDSQPVPNIDHLLTNIGRTGVSPGDVSDSATSDSTKSKGSWGSGKDQYSRELLVSSIFAAASRKRKKPKEKAQPSSSEDELDNVFFKKENVEQCHNDTKEESKKESETLGRKQKIIIAKENSTRKDPSTTKDEKISLGKESTPSEEPSPPHNSKHNKSPTLSCRFAILKESPRSLLAQKSSHLEETGSDSGTLLSTSSQASLARFSMKKSTSPETKHSEFLANVSTITSDYSTTSSATYLTSLDSSRLSPEVQSVAESKGDEADDERSELISEGRPVETDSESEFPVFPTALTSERLFRGKLQEVTKSSRRNSEGSELSCTEGSLTSSLDSRRQLFSSHKLIECDTLSRKKSARFKSDSGSLGDAKNEKEAPSLTKVFDVMKKGKSTGSLLTPTRGESEKQEPTWKTKIADRLKLRPRAPADDMFGVGNHKVNAETAKRKSIRRRHTLGGHRDATEISVLNFWKVHEQSGERESELSAVNRLKPKCSAQDLSISDWLARERLRTSTSDLSRGEIGDPQTENPSTREIATTDTPLSLHCNTGSSSSTLASTNRPLLSIPPQSPDQINGESFQNVSKNASSAANAQPHKLSETPGSKAEFHPCL

SEQ ID NO: 73240 - protein, 1958 aa, Homo sapiens
  Payload ID: 14509
  Gene Symbol: ARHGAP21
  Gene Name: Rho GTPase activating protein 21
  Uniprot ID: Q5T5U3
  ENSP ID: ENSP00000379709
MMATRRTGLSEGDGDKLKACEVSKNKDGKEQSETVSLSEDETFSWPGPKTVTLKRTSQGFGFTLRHFIVYPPESAIQFSYKDEENGNRGGKQRNRLEPMDTIFVKQVKEGGPAFEAGLCTGDRIIKVNGESVIGKTYSQVIALIQNSDTTLELSVMPKDEDILQVLQFTKDVTALAYSQDAYLKGNEAYSGNARNIPEPPPICYPWLPSAPSAMAQPVEISPPDSSLSKQQTSTPVLTQPGRAYRMEIQVPPSPTDVAKSNTAVCVCNESVRTVIVPSEKVVDLLSNRNNHTGPSHRTEEVRYGVSEQTSLKTVSRTTSPPLSIPTTHLIHQPAGSRSLEPSGILLKSGNYSGHSDGISSSRSQAVEAPSVSVNHYSPNSHQHIDWKNYKTYKEYIDNRRLHIGCRTIQERLDSLRAASQSTTDYNQVVPNRTTLQGRRRSTSHDRVPQSVQIRQRSVSQERLEDSVLMKYCPRSASQGALTSPSVSFSNHRTRSWDYIEGQDETLENVNSGTPIPDSNGEKKQTYKWSGFTEQDDRRGICERPRQQEIHKSFRGSNFTVAPSVVNSDNRRMSGRGVGSVSQFKKIPPDLKTLQSNRNFQTTCGMSLPRGISQDRSPLVKVRSNSLKAPSTHVTKPSFSQKSFVSIKDQRPVNHLHQNSLLNQQTWVRTDSAPDQQVETGKSPSLSGASAKPAPQSSENAGTSDLELPVSQRNQDLSLQEAETEQSDTLDNKEAVILREKPPSGRQTPQPLRHQSYILAVNDQETGSDTTCWLPNDARREVHIKRMEERKASSTSPPGDSLASIPFIDEPTSPSIDHDIAHIPASAVISASTSQVPSIATVPPCLTTSAPLIRRQLSHDHESVGPPSLDAQPNSKTERSKSYDEGLDDYREDAKLSFKHVSSLKGIKIADSQKSSEDSGSRKDSSSEVFSDAAKEGWLHFRPLVTDKGKRVGGSIRPWKQMYVVLRGHSLYLYKDKREQTTPSEEEQPISVNACLIDISYSETKRKNVFRLTTSDCECLFQAEDRDDMLAWIKTIQESSNLNEEDTGVTNRDLISRRIKEYNNLMSKAEQLPKTPRQSLSIRQTLLGAKSEPKTQSPHSPKEESERKLLSKDDTSPPKDKGTWRKGIPSIMRKTFEKKPTATGTFGVRLDDCPPAHTNRYIPLIVDICCKLVEERGLEYTGIYRVPGNNAAISSMQEELNKGMADIDIQDDKWRDLNVISSLLKSFFRKLPEPLFTNDKYADFIEANRKEDPLDRLKTLKRLIHDLPEHHYETLKFLSAHLKTVAENSEKNKMEPRNLAIVFGPTLVRTSEDNMTHMVTHMPDQYKIVETLIQHHDWFFTEEGAEEPLTTVQEESTVDSQPVPNIDHLLTNIGRTGVSPGDVSDSATSDSTKSKGSWGSGKDQYSRELLVSSIFAAASRKRKKPKEKAQPSSSEDELDNVFFKKENVEQCHNDTKEESKKESETLGRKQKIIIAKENSTRKDPSTTKDEKISLGKESTPSEEPSPPHNSKHNKSPTLSCRFAILKESPRSLLAQKSSHLEETGSDSGTLLSTSSQASLARFSMKKSTSPETKHSEFLANVSTITSDYSTTSSATYLTSLDSSRLSPEVQSVAESKGDEADDERSELISEGRPVETDSESEFPVFPTALTSERLFRGKLQEVTKSSRRNSEGSELSCTEGSLTSSLDSRRQLFSSHKLIECDTLSRKKSARFKSDSGSLGDAKNEKEAPSLTKVFDVMKKGKSTGSLLTPTRGESEKQEPTWKTKIADRLKLRPRAPADDMFGVGNHKVNAETAKRKSIRRRHTLGGHRDATEISVLNFWKVHEQSGERESELSAVNRLKPKCSAQDLSISDWLARERLRTSTSDLSRGEIGDPQTENPSTREIATTDTPLSLHCNTGSSSSTLASTNRPLLSIPPQSPDQINGESFQNVSKNASSAANAQPHKLSETPGSKAEFHPCL

SEQ ID NO: 73241 - protein, 197 aa, Homo sapiens
  Payload ID: 14509
  Gene Symbol: ARHGAP21
  Gene Name: Rho GTPase activating protein 21
  ENSP ID: ENSP00000389940
  MOD_RES (1)..(1): Any amino acid
XNNAAISSMQEELNKGMADIDIQDDKWRDLNVISSLLKSFFRKLPEPLFTNDKYADFIEANRKEDPLDRLKTLKRLIHDLPEHHYETLKFLSAHLKTVAENSEKNKMEPRNLAIVFGPTLVRTSEDNMTHMVTHMPDQYKIVETLIQHHDWFFTEEGAEEPLIQLLVTQQNLRVLGDLERISIAGNCLCPPSLQLLV

SEQ ID NO: 73242 - protein, 179 aa, Homo sapiens
  Payload ID: 14509
  Gene Symbol: ARHGAP21
  Gene Name: Rho GTPase activating protein 21
  ENSP ID: ENSP00000400566
GDGDKLKACEVSKNKDGKEQSETVSLSEDETFSWPGPKTVTLKRTSQGFGFTLRHFIVYPPESAIQFSYKDEENGNRGGKQRNRLEPMDTIFVKQVKEGGPAFEAGLCTGDRIIKVNGESVIGKTYSQVIALIQNSDTTLELSVMPKDEDILQVNLEFSTFYKNTIAKFLQLSDMEMLC

SEQ ID NO: 73243 - protein, 113 aa, Homo sapiens
  Payload ID: 14509
  Gene Symbol: ARHGAP21
  Gene Name: Rho GTPase activating protein 21
  ENSP ID: ENSP00000402761
YIPLIVDICCKLVEERGLEYTGIYRVPGNNAAISSMQEELNKGMADIDIQDDKWRDLNVISSLLKSFFRKLPEPLFTNDKYADFIEANRKEDPLDRLKTLKRLFLSAHLKTVA

SEQ ID NO: 73244 - protein, 1131 aa, Homo sapiens
  Payload ID: 14509
  Gene Symbol: ARHGAP21
  Gene Name: Rho GTPase activating protein 21
  ENSP ID: ENSP00000405018
MMATRRTGLSEGDGDKLKACEVSKNKDGKEQSETVSLSEDETFSWPGPKTVTLKRTSQGFGFTLRHFIVYPPESAIQFSYKDEENGNRGGKQRNRLEPMDTIFVKQVKEGGPAFEAGLCTGDRIIKVNGESVIGKTYSQVIALIQNSDTTLELSVMPKDEDILQVLQFTKDVTALAYSQDAYLKGNEAYSGNARNIPEPPPICYPWLPSAPSAMAQPVEISPPDSSLSKQQTSTPVLTQPGRAYRMEIQVPPSPTDVAKSNTAVCVCNESVRTVIVPSEKVVDLLSNRNNHTGPSHRTEEVRYGVSEQTSLKTVSRTTSPPLSIPTTHLIHQPAGSRSLEPSGILLKSGNYSGHSDGISSSRSQAVEAPSVSVNHYSPNSHQHIDWKNYKTYKEYIDNRRLHIGCRTIQERLDSLRAASQSTTDYNQVVPNRTTLQGRRRSTSHDRVPQSVQIRQRSVSQERLEDSVLMKYCPRSASQGALTSPSVSFSNHRTRSWDYIEGQDETLENVNSGTPIPDSNGEKKQTYKWSGFTEQDDRRGICERPRQQEIHKSFRGSNFTVAPSVVNSDNRRMSGRGVGSVSQFKKIPPDLKTLQSNRNFQTTCGMSLPRGISQDRSPLVKVRSNSLKAPSTHVTKPSFSQKSFVSIKDQRPVNHLHQNSLLNQQTWVRTDSAPDQQVETGKSPSLSGASAKPAPQSSENAGTSDLELPVSQRNQDLSLQEAETEQSDTLDNKEAVILREKPPSGRQTPQPLRHQSYILAVNDQETGSDTTCWLPNDARREVHIKRMEERKASSTSPPGDSLASIPFIDEPTSPSIDHDIAHIPASAVISASTSQVPSIATVPPCLTTSAPLIRRQLSHDHESVGPPSLDAQPNSKTERSKSYDEGLDDYREDAKLSFKHVSSLKGIKIADSQKSSEDSGSRKDSSSEVFSDAAKEGWLHFRPLVTDKGKRVGGSIRPWKQMYVVLRGHSLYLYKDKREQTTPSEEEQPISVNACLIDISYSETKRKNVFRLTTSDCECLFQAEDRDDMLAWIKTIQESSNLNEEDTGVTNRDLISRRIKEYNNLMSKAEQLPKTPRQSLSIRQTLLGAKSEPKTQSPHSPKEESERKLLSKDDTSPPKDKGTWRKGIPSIM

SEQ ID NO: 73245 - protein, 1406 aa, Homo sapiens
  Payload ID: 14509
  Gene Symbol: ARHGAP21
  Gene Name: Rho GTPase activating protein 21
  ENSP ID: ENSP00000480005
MATRRTGLSEGDGDKLKACEVSKNKDGKEQSETVSLSEDETFSWPGPKTVTLKRTSQGFGFTLRHFIVYPPESAIQFSYKDEENGNRGGKQRNRLEPMDTIFVKQVKEGGPAFEAGLCTGDRIIKVNGESVIGKTYSQVIALIQNSDTTLELSVMPKDEDILQVAYSQDAYLKGNEAYSGNARNIPEPPPICYPWLPSAPSAMAQPVEISPPDSSLSKQQTSTPVLTQPGRAYRMEIQVPPSPTDVAKSNTAVCVCNESVRTVIVPSEKVVDLLSNRNNHTGPSHRTEEVRYGVSEQTSLKTVSRTTSPPLSIPTTHLIHQPAGSRSLEPSGILLKSGNYSGHSDGISSSRSQAVEAPSVSVNHYSPNSHQHIDWKNYKTYKEYIDNRRLHIGCRTIQERLDSLRAASQSTTDYNQVVPNRTTLQGRRRSTSHDRVPQSVQIRQRSVSQERLEDSVLMKYCPRSASQGALTSPSVSFSNHRTRSWDYIEGQDETLENVNSGTPIPDSNGEKKQTYKWSGFTEQDDRRGICERPRQQEIHKSFRGSNFTVAPSVVNSDNRRMSGRGVGSVSQFSSIPSIMRKTFEKKPTATGTFGVRLDDCPPAHTNRYIPLIVDICCKLVEERGLEYTGIYRVPGNNAAISSMQEELNKGMADIDIQDDKWRDLNVISSLLKSFFRKLPEPLFTNDKYADFIEANRKEDPLDRLKTLKRLIHDLPEHHYETLKFLSAHLKTVAENSEKNKMEPRNLAIVFGPTLVRTSEDNMTHMVTHMPDQYKIVETLIQHHDWFFTEEGAEEPLTTVQEESTVDSQPVPNIDHLLTNIGRTGVSPGDVSDSATSDSTKSKGSWGSGKDQYSRELLVSSIFAAASRKRKKPKEKAQPSSSEDELDNVFFKKENVEQCHNDTKEESKKESETLGRKQKIIIAKENSTRKDPSTTKDEKISLGKESTPSEEPSPPHNSKHNKSPTLSCRFAILKESPRSLLAQKSSHLEETGSDSGTLLSTSSQASLARFSMKKSTSPETKHSEFLANVSTITSDYSTTSSATYLTSLDSSRLSPEVQSVAESKGDEADDERSELISEGRPVETDSESEFPVFPTALTSERLFRGKLQEVTKSSRRNSEGSELSCTEGSLTSSLDSRRQLFSSHKLIECDTLSRKKSARFKSDSGSLGDAKNEKEAPSLTKVFDVMKKGKSTGSLLTPTRGESEKQEPTWKTKIADRLKLRPRAPADDMFGVGNHKVNAETAKRKSIRRRHTLGGHRDATEISVLNFWKVHEQSGERESELSAVNRLKPKCSAQDLSISDWLARERLRTSTSDLSRGEIGDPQTENPSTREIATTDTPLSLHCNTGSSSSTLASTNRPLLSIPPQSPDQINGESFQNVSKNASSAANAQPHKLSETPGSKAEFHPCL

SEQ ID NO: 73246 - protein, 698 aa, Homo sapiens
  Payload ID: 14510
  Gene Symbol: ARHGAP22
  Gene Name: Rho GTPase activating protein 22
  Uniprot ID: Q7Z5H3
  ENSP ID: ENSP00000249601
MLSPKIRQARRARSKSLVMGEQSRSPGRMPCPHRLGPVLKAGWLKKQRSIMKNWQQRWFVLRGDQLFYYKDKDEIKPQGFISLQGTQVTELPPGPEDPGKHLFEISPGGAGEREKVPANPEALLLMASSQRDMEDWVQAIRRVIWAPLGGGIFGQRLEETVHHERKYGPRLAPLLVEQCVDFIRERGLTEEGLFRMPGQANLVRDLQDSFDCGEKPLFDSTTDVHTVASLLKLYLRELPEPVVPFARYEDFLSCAQLLTKDEGEGTLELAKQVSNLPQANYNLLRYICKFLDEVQAYSNVNKMSVQNLATVFGPNILRPQVEDPVTIMEGTSLVQHLMTVLIRKHSQLFTAPVPEGPTSPRGGLQCAVGWGSEEVTRDSQGEPGGPGLPAHRTSSLDGAAVAVLSRTAPTGPGSRCSPGKKVQTLPSWKSSFRQPRSLSGSPKGGGSSLEVPIISSGGNWLMNGLSSLRGHRRASSGDRLKDSGSVQRLSTYDNVPAPGLVPGIPSVASMAWSGASSSESSVGGSLSSCTACRASDSSARSSLHTDWALEPSPLPSSSEDPKSLDLDHSMDEAGAGASNSEPSEPDSPTREHARRSEALQGLVTELRAELCRQRTEYERSVKRIEEGSADLRKRMSRLEEELDQEKKKYIMLEIKLRNSERAREDAERRNQLLQREMEEFFSTLGSLTVGAKGARAPK

SEQ ID NO: 73247 - protein, 539 aa, Homo sapiens
  Payload ID: 14510
  Gene Symbol: ARHGAP22
  Gene Name: Rho GTPase activating protein 22
  ENSP ID: ENSP00000363285
MGLCCCKDWRGHLRAPKGGAGEREKVPANPEALLLMASSQRDMEDWVQAIRRVIWAPLGGGIFGQRLEETVHHERKYGPRLAPLLVEQCVDFIRERGLTEEGLFRMPGQANLVRDLQDSFDCGEKPLFDRFLDEVQAYSNVNKMSVQNLATVFGPNILRPQVEDPVTIMEGTSLVQHLMTVLIRKHSQLFTAPVPEGPTSPRGGLQCAVGWGSEEVTRDSQGEPGGPGLPAHRTSSLDGAAVAVLSRTAPTGPGSRCSPGKKVQTLPSWKSSFRQPRSLSGSPKGGGSSLEVPIISSGGNWLMNGLSSLRGHRRASSGDRLKDSGSVQRLSTYDNVPAPGLVPGIPSVASMAWSGASSSESSVGGSLSSCTACRASDSSARSSLHTDWALEPSPLPSSSEDPKSLDLDHSMDEAGAGASNSEPSEPDSPTREHARRSEALQGLVTELRAELCRQRTEYERSVKRIEEGSADLRKRMSRLEEELDQEKKKYIMLEIKLRNSERAREDAERRNQLLQREMEEFFSTLGSLTVGAKGARAPK

SEQ ID NO: 73248 - protein, 589 aa, Homo sapiens
  Payload ID: 14510
  Gene Symbol: ARHGAP22
  Gene Name: Rho GTPase activating protein 22
  ENSP ID: ENSP00000363287
MASSQRDMEDWVQAIRRVIWAPLGGGTARRSHAHPLEPLPPGIFGQRLEETVHHERKYGPRLAPLLVEQCVDFIRERGLTEEGLFRMPGQANLVRDLQDSFDCGEKPLFDSTTDVHTVASLLKLYLRELPEPVVPFARYEDFLSCAQLLTKDEGEGTLELAKQVSNLPQANYNLLRYICKFLDEVQAYSNVNKMSVQNLATVFGPNILRPQVEDPVTIMEGTSLVQHLMTVLIRKHSQLFTAPVPEGPTSPRGGLQCAVGWGSEEVTRDSQGEPGGPGLPAHRTSSLDGAAVAVLSRTAPTGPGSRCSPGKKVQTLPSWKSSFRQPRSLSGSPKGGGSSLEVPIISSGGNWLMNGLSSLRGHRRASSGDRLKDSGSVQRLSTYDNVPAPGLVPGIPSVASMAWSGASSSESSVGGSLSSCTACRASDSSARSSLHTDWALEPSPLPSSSEDPKSLDLDHSMDEAGAGASNSEPSEPDSPTREHARRSEALQGLVTELRAELCRQRTEYERSVKRIEEGSADLRKRMSRLEEELDQEKKKYIMLEIKLRNSERAREDAERRNQLLQREMEEFFSTLGSLTVGAKGARAPK

SEQ ID NO: 73249 - protein, 608 aa, Homo sapiens
  Payload ID: 14510
  Gene Symbol: ARHGAP22
  Gene Name: Rho GTPase activating protein 22
  Uniprot ID: Q7Z5H3
  ENSP ID: ENSP00000410054
MPFWPIRCLKRSRRMPRGGAGEREKVPANPEALLLMASSQRDMEDWVQAIRRVIWAPLGGGIFGQRLEETVHHERKYGPRLAPLLVEQCVDFIRERGLTEEGLFRMPGQANLVRDLQDSFDCGEKPLFDSTTDVHTVASLLKLYLRELPEPVVPFARYEDFLSCAQLLTKDEGEGTLELAKQVSNLPQANYNLLRYICKFLDEVQAYSNVNKMSVQNLATVFGPNILRPQVEDPVTIMEGTSLVQHLMTVLIRKHSQLFTAPVPEGPTSPRGGLQCAVGWGSEEVTRDSQGEPGGPGLPAHRTSSLDGAAVAVLSRTAPTGPGSRCSPGKKVQTLPSWKSSFRQPRSLSGSPKGGGSSLEVPIISSGGNWLMNGLSSLRGHRRASSGDRLKDSGSVQRLSTYDNVPAPGLVPGIPSVASMAWSGASSSESSVGGSLSSCTACRASDSSARSSLHTDWALEPSPLPSSSEDPKSLDLDHSMDEAGAGASNSEPSEPDSPTREHARRSEALQGLVTELRAELCRQRTEYERSVKRIEEGSADLRKRMSRLEEELDQEKKKYIMLEIKLRNSERAREDAERRNQLLQREMEEFFSTLGSLTVGAKGARAPK

SEQ ID NO: 73250 - protein, 714 aa, Homo sapiens
  Payload ID: 14510
  Gene Symbol: ARHGAP22
  Gene Name: Rho GTPase activating protein 22
  Uniprot ID: Q7Z5H3
  ENSP ID: ENSP00000412461
MLSPKIRQARRARSKSLVMGEQSRSPGRMPCPHRLGPVLKAGWLKKQRSIMKNWQQRWFVLRGDQLFYYKDKDEIKPQGFISLQGTQVTELPPGPEDPGKHLFEISPGGAGEREKVPANPEALLLMASSQRDMEDWVQAIRRVIWAPLGGGTARRSHAHPLEPLPPGIFGQRLEETVHHERKYGPRLAPLLVEQCVDFIRERGLTEEGLFRMPGQANLVRDLQDSFDCGEKPLFDSTTDVHTVASLLKLYLRELPEPVVPFARYEDFLSCAQLLTKDEGEGTLELAKQVSNLPQANYNLLRYICKFLDEVQAYSNVNKMSVQNLATVFGPNILRPQVEDPVTIMEGTSLVQHLMTVLIRKHSQLFTAPVPEGPTSPRGGLQCAVGWGSEEVTRDSQGEPGGPGLPAHRTSSLDGAAVAVLSRTAPTGPGSRCSPGKKVQTLPSWKSSFRQPRSLSGSPKGGGSSLEVPIISSGGNWLMNGLSSLRGHRRASSGDRLKDSGSVQRLSTYDNVPAPGLVPGIPSVASMAWSGASSSESSVGGSLSSCTACRASDSSARSSLHTDWALEPSPLPSSSEDPKSLDLDHSMDEAGAGASNSEPSEPDSPTREHARRSEALQGLVTELRAELCRQRTEYERSVKRIEEGSADLRKRMSRLEEELDQEKKKYIMLEIKLRNSERAREDAERRNQLLQREMEEFFSTLGSLTVGAKGARAPK

SEQ ID NO: 73251 - protein, 704 aa, Homo sapiens
  Payload ID: 14510
  Gene Symbol: ARHGAP22
  Gene Name: Rho GTPase activating protein 22
  Uniprot ID: Q7Z5H3
  ENSP ID: ENSP00000416701
MLPTASSKRRTFAARYFTRSKSLVMGEQSRSPGRMPCPHRLGPVLKAGWLKKQRSIMKNWQQRWFVLRGDQLFYYKDKDEIKPQGFISLQGTQVTELPPGPEDPGKHLFEISPGGAGEREKVPANPEALLLMASSQRDMEDWVQAIRRVIWAPLGGGIFGQRLEETVHHERKYGPRLAPLLVEQCVDFIRERGLTEEGLFRMPGQANLVRDLQDSFDCGEKPLFDSTTDVHTVASLLKLYLRELPEPVVPFARYEDFLSCAQLLTKDEGEGTLELAKQVSNLPQANYNLLRYICKFLDEVQAYSNVNKMSVQNLATVFGPNILRPQVEDPVTIMEGTSLVQHLMTVLIRKHSQLFTAPVPEGPTSPRGGLQCAVGWGSEEVTRDSQGEPGGPGLPAHRTSSLDGAAVAVLSRTAPTGPGSRCSPGKKVQTLPSWKSSFRQPRSLSGSPKGGGSSLEVPIISSGGNWLMNGLSSLRGHRRASSGDRLKDSGSVQRLSTYDNVPAPGLVPGIPSVASMAWSGASSSESSVGGSLSSCTACRASDSSARSSLHTDWALEPSPLPSSSEDPKSLDLDHSMDEAGAGASNSEPSEPDSPTREHARRSEALQGLVTELRAELCRQRTEYERSVKRIEEGSADLRKRMSRLEEELDQEKKKYIMLEIKLRNSERAREDAERRNQLLQREMEEFFSTLGSLTVGAKGARAPK

SEQ ID NO: 73252 - protein, 261 aa, Homo sapiens
  Payload ID: 14510
  Gene Symbol: ARHGAP22
  Gene Name: Rho GTPase activating protein 22
  ENSP ID: ENSP00000422663
MLPTASSKRRTFAARYFTRSKSLVMGEQSRSPGRMPCPHRLGPVLKAGWLKKQRSIMKNWQQRWFVLRGDQLFYYKDKDEIKPQGFISLQGTQVTELPPGPEDPGKHLFEISPGGAGEREKVPANPEALLLMASSQRDMEDWVQAIRRVIWAPLGGGIFGQRLEETVHHERKYGPRLAPLLVEQCVDFIRERGLTEEGLFRMPGQANLVRDLQDSFDCGEKPLFDSTTDVHTVASLLKLYLRELPEPVVPFARALWSWLNK

SEQ ID NO: 73253 - protein, 531 aa, Homo sapiens
  Payload ID: 14510
  Gene Symbol: ARHGAP22
  Gene Name: Rho GTPase activating protein 22
  ENSP ID: ENSP00000422868
MCVPPHRKDGSIPCPRALCSQSVDIQAWQLSAAQRGDVGQPREFWHLRSQVPVPTCHLLTVQPWCLLPHPTPAGGRERRHSASSLLAALCLRKAVLRPHPAVLPGVGGCVVLSSGRMKAPLRGGLALGTGPAPTKLQLLHDWQSEPGPSGWQQGPSPPLFPAGTSLVQHLMTVLIRKHSQLFTAPVPEGPTSPRGGLQCAVGWGSEEVTRDSQGEPGGPGLPAHRTSSLDGAAVAVLSRTAPTGPGSRCSPGKKVQTLPSWKSSFRQPRSLSGSPKGGGSSLEVPIISSGGNWLMNGLSSLRGHRRASSGDRLKDSGSVQRLSTYDNVPAPGLVPGIPSVASMAWSGASSSESSVGGSLSSCTACRASDSSARSSLHTDWALEPSPLPSSSEDPKSLDLDHSMDEAGAGASNSEPSEPDSPTREHARRSEALQGLVTELRAELCRQRTEYERSVKRIEEGSADLRKRMSRLEEELDQEKKKYIMLEIKLRNSERAREDAERRNQLLQREMEEFFSTLGSLTVGAKGARAPK

SEQ ID NO: 73254 - protein, 135 aa, Homo sapiens
  Payload ID: 14511
  Gene Symbol: ARHGAP23
  Gene Name: Rho GTPase activating protein 23
  ENSP ID: ENSP00000478142
IRDLPGHYYETLKFLVGHLKTIADHSEKNKMEPRNLALVFGPTLVRTSEDNMTDMVTHMPDRYKIVETLIQHSDWFFSDEEDKGERILPPVVQPSPRVRGPPRRSRTPGRCWRSPSSRPSTASARSGGRRGGWAA

SEQ ID NO: 73255 - protein, 1491 aa, Homo sapiens
  Payload ID: 14511
  Gene Symbol: ARHGAP23
  Gene Name: Rho GTPase activating protein 23
  Uniprot ID: Q9P227
  ENSP ID: ENSP00000479208
MNGVAFCLVGIPPRPEPRPPQLPLGPRDGCSPRRPFPWQGPRTLLLYKSPQDGFGFTLRHFIVYPPESAVHCSLKEEENGGRGGGPSPRYRLEPMDTIFVKNVKEDGPAHRAGLRTGDRLVKVNGESVIGKTYSQVIALIQNSDDTLELSIMPKDEDILQLAYSQDAYLKGNEPYSGEARSIPEPPPICYPRKTYAPPARASTRATMVPEPTSALPSDPRSPAAWSDPGLRVPPAARAHLDNSSLGMSQPRPSPGAFPHLSSEPRTPRAFPEPGSRVPPSRLECQQALSHWLSNQVPRRAGERRCPAMAPRARSASQDRLEEVAAPRPWPCSTSQDALSQLGQEGWHRARSDDYLSRATRSAEALGPGALVSPRFERCGWASQRSSARTPACPTRDLPGPQAPPPSGLQGLDDLGYIGYRSYSPSFQRRTGLLHALSFRDSPFGGLPTFNLAQSPASFPPEASEPPRVVRPEPSTRALEPPAEDRGDEVVLRQKPPTGRKVQLTPARQMNLGFGDESPEPEASGRGERLGRKVAPLATTEDSLASIPFIDEPTSPSIDLQAKHVPASAVVSSAMNSAPVLGTSPSSPTFTFTLGRHYSQDCSSIKAGRRSSYLLAITTERSKSCDDGLNTFRDEGRVLRRLPNRIPSLRMLRSFFTDGSLDSWGTSEDADAPSKRHSTSDLSDATFSDIRREGWLYYKQILTKKGKKAGSGLRQWKRVYAALRARSLSLSKERREPGPAAAGAAAAGAGEDEAAPVCIGSCLVDISYSETKRRHVFRLTTADFCEYLFQAEDRDDMLGWIRAIRENSRAEGEDPGCANQALISKKLNDYRKVSHSSGPKADSSPKGSRGLGGLKSEFLKQSAARGLRTQDLPAGSKDDSAAAPKTPWGINIIKKNKKAAPRAFGVRLEECQPATENQRVPLIVAACCRIVEARGLESTGIYRVPGNNAVVSSLQEQLNRGPGDINLQDERWQDLNVISSLLKSFFRKLPEPLFTDDKYNDFIEANRIEDARERMRTLRKLIRDLPGHYYETLKFLVGHLKTIADHSEKNKMEPRNLALVFGPTLVRTSEDNMTDMVTHMPDRYKIVETLIQHSDWFFSDEEDKGERTPVGDKEPQAVPNIEYLLPNIGRTVPPGDPGSDSTTCSSAKSKGSWAPKKEPYAREMLAISFISAVNRKRKKRREARGLGSSTDDDSEQEAHKPGAGATAPGTQERPQGPLPGAVAPEAPGRLSPPAAPEERPAADTRSIVSGYSTLSTMDRSVCSGASGRRAGAGDEADDERSELSHVETDTEGAAGAGPGGRLTRRPSFSSHHLMPCDTLARRRLARGRPDGEGAGRGGPRAPEPPGSASSSSQESLRPPAAALASRPSRMEALRLRLRGTADDMLAVRLRRPLSPETRRRRSSWRRHTVVVQSPLTDLNFNEWKELGGGGPPEPAGARAHSDNKDSGLSSLESTKARAPSSAASQPPAPGDTGSLQSQPPRRSAASRLHQCL

SEQ ID NO: 73256 - protein, 163 aa, Homo sapiens
  Payload ID: 14511
  Gene Symbol: ARHGAP23
  Gene Name: Rho GTPase activating protein 23
  ENSP ID: ENSP00000481292
  MOD_RES (1)..(1): Any amino acid
XTFSDIRREGWLYYKQILTKKGKAEDRDDMLGWIRAIRENSRAEGEDPGCANQALISKKLNDYRKVSHSSGPKADSSPKGSRGLGGLKSEFLKQSAARGLRTQDLPAGSKDDSAAAPKTPWGINIIKKNKKAAPRAFGVRLEECQPATENQRVPLIVAACCRI

SEQ ID NO: 73257 - protein, 1491 aa, Homo sapiens; identical to SEQ ID NO: 73255
  Payload ID: 14511
  Gene Symbol: ARHGAP23
  Gene Name: Rho GTPase activating protein 23
  Uniprot ID: Q9P227
  ENSP ID: ENSP00000481862

SEQ ID NO: 73258 - protein, 83 aa, Homo sapiens
  Payload ID: 14511
  Gene Symbol: ARHGAP23
  Gene Name: Rho GTPase activating protein 23
  ENSP ID: ENSP00000482425
RVPLIVAACCRIVEARGLESTGIYRVPGNNAVVSSLQEQLNRGPGDINLQDERWQDLNVISSLLKSFFRKLPEPLFTDGALLF

SEQ ID NO: 73259 - protein, 102 aa, Homo sapiens
  Payload ID: 14511
  Gene Symbol: ARHGAP23
  Gene Name: Rho GTPase activating protein 23
  ENSP ID: ENSP00000482982
MDTIFVKNVKEDGPAHRAGLRTGDRLVKVNGESVIGKTYSQVIALIQNSDDTLELSIMPKDEDILQLAYSQDAYLKGNEPYSGEARSIPEPPPICYPRKTYA

SEQ ID NO: 73260 - protein, 1144 aa, Homo sapiens
  Payload ID: 14511
  Gene Symbol: ARHGAP23
  Gene Name: Rho GTPase activating protein 23
  Uniprot ID: Q9P227
  ENSP ID: ENSP00000482992
MNGVAFCLVGIPPRPEPRPPQLPLGPRDGCSPRRPFPWQGPRTLLLYKSPQDGFGFTLRHFIVYPPESAVHCSLKEEENGGRGGGPSPRYRLEPMDTIFVKNVKEDGPAHRAGLRTGDRLVKVNGESVIGKTYSQVIALIQNSDDTLELSIMPKDEDILQLAYSQDAYLKGNEPYSGEARSIPEPPPICYPRKTYAPPARASTRATMVPEPTSALPSDPRSPAAWSDPGLRVPPAARAHLDNSSLGMSQPRPSPGAFPHLSSEPRTPRAFPEPGSRVPPSRLECQQALSHWLSNQVPRRAGERRCPAMAPRARSASQDRLEEVAAPRPWPCSTSQDALSQLGQEGWHRARSDDYLSRATRSAEALGPGALVSPRFERCGWASQRSSARTPACPTRDLPGPQAPPPSGLQGLDDLGYIGYRSYSPSFQRRTGLLHALSFRDSPFGGLPTFNLAQSPASFPPEASEPPRVVRPEPSTRALEPPAEDRGDEVVLRQKPPTGRKVQLTPARQMNLGFGDESPEPEASGRGERLGRKVAPLATTEDSLASIPFIDEPTSPSIDLQAKHVPASAVVSSAMNSAPVLGTSPSSPTFTFTLGRHYSQDCSSIKAGRRSSYLLAITTERSKSCDDGLNTFRDEGRVLRRLPNRIPSLRMLRSFFTDGSLDSWGTSEDADAPSKRHSTSDLSDATFSDIRREGWLYYKQILTKKGKKAGSGLRQWKRVYAALRARSLSLSKERREPGPAAAGAAAAGAGEDEAAPVCIGSCLVDISYSETKRRHVFRLTTADFCEYLFQAEDRDDMLGWIRAIRENSRAEGEDPGCANQALISKKLNDYRKVSHSSGPKADSSPKGSRGLGGLKSEFLKQSAARGLRTQDLPAGSKDDSAAAPKTPWGINIIKKNKKAAPRAFGVRLEECQPATENQRVPLIVAACCRIVEARGLESTGIYRVPGNNAVVSSLQEQLNRGPGDINLQDERWQDLNVISSLLKSFFRKLPEPLFTDDKYNDFIEANRIEDARERMRTLRKLIRDLPGHYYETLKFLVGHLKTIADHSEKNKMEPRNLALVFGPTLVRTSEDNMTDMVTHMPDRYKIVETLIQHSDWFFSDEEDKGERTPVGDKEPQAVPNIEYLLPNIGRTVPPGDPGSADLLEI

SEQ ID NO: 73261 - protein, 129 aa, Homo sapiens
  Payload ID: 14511
  Gene Symbol: ARHGAP23
  Gene Name: Rho GTPase activating protein 23
  ENSP ID: ENSP00000483748
SKSCDDGLNTFRDEGRVLRRLPNRIPSLRMLRSFFTDGSLDSWGTSEDADAPSKRHSTSDLSDATFSDIRREGWLYYKQILTKKGKKAGSGLRQWKRVYAALRARSLSLSKERREPGPAAAGAAAAGAG

SEQ ID NO: 73262 - protein, 64 aa, Homo sapiens
  Payload ID: 14511
  Gene Symbol: ARHGAP23
  Gene Name: Rho GTPase activating protein 23
  ENSP ID: ENSP00000484509
  MOD_RES (1)..(1): Any amino acid
XFFSDEEDKGERTPVGDKEPQAVPNIEYLLPNIGRTVPPGDPGSDSTTCSSAKSKVRMKAILKA

SEQ ID NO: 73263 - protein, 129 aa, Homo sapiens; identical to SEQ ID NO: 73261
  Payload ID: 14511
  Gene Symbol: ARHGAP23
  Gene Name: Rho GTPase activating protein 23
  ENSP ID: ENSP00000487883

SEQ ID NO: 73264 - protein, 64 aa, Homo sapiens; identical to SEQ ID NO: 73262
  Payload ID: 14511
  Gene Symbol: ARHGAP23
  Gene Name: Rho GTPase activating protein 23
  ENSP ID: ENSP00000487994
  MOD_RES (1)..(1): Any amino acid

SEQ ID NO: 73265 - protein, 135 aa, Homo sapiens; identical to SEQ ID NO: 73254
  Payload ID: 14511
  Gene Symbol: ARHGAP23
  Gene Name: Rho GTPase activating protein 23
  ENSP ID: ENSP00000488310

SEQ ID NO: 73266 - protein, 1144 aa, Homo sapiens; identical to SEQ ID NO: 73260
  Payload ID: 14511
  Gene Symbol: ARHGAP23
  Gene Name: Rho GTPase activating protein 23
  Uniprot ID: Q9P227
  ENSP ID: ENSP00000488428

SEQ ID NO: 73267 - protein, 83 aa, Homo sapiens; identical to SEQ ID NO: 73258
  Payload ID: 14511
  Gene Symbol: ARHGAP23
  Gene Name: Rho GTPase activating protein 23
  ENSP ID: ENSP00000488699

SEQ ID NO: 73268 - protein, 163 aa, Homo sapiens; identical to SEQ ID NO: 73256
  Payload ID: 14511
  Gene Symbol: ARHGAP23
  Gene Name: Rho GTPase activating protein 23
  ENSP ID: ENSP00000488827
  MOD_RES (1)..(1): Any amino acid

SEQ ID NO: 73269 - protein, 102 aa, Homo sapiens; identical to SEQ ID NO: 73259
  Payload ID: 14511
  Gene Symbol: ARHGAP23
  Gene Name: Rho GTPase activating protein 23
  ENSP ID: ENSP00000488885

SEQ ID NO: 73270 - protein, 655 aa, Homo sapiens
  Payload ID: 14512
  Gene Symbol: ARHGAP24
  Gene Name: Rho GTPase activating protein 24
  Uniprot ID: Q8N264
  ENSP ID: ENSP00000264343
MPEDRNSGGCPAGALASTPFIPKTTYRRIKRCFSFRKGIFGQKLEDTVRYEKRYGNRLAPMLVEQCVDFIRQRGLKEEGLFRLPGQANLVKELQDAFDCGEKPSFDSNTDVHTVASLLKLYLRELPEPVIPYAKYEDFLSCAKLLSKEEEAGVKELAKQVKSLPVVNYNLLKYICRFLDEVQSYSGVNKMSVQNLATVFGPNILRPKVEDPLTIMEGTVVVQQLMSVMISKHDCLFPKDAELQSKPQDGVSNNNEIQKKATMGQLQNKENNNTKDSPSRQCSWDKSESPQRSSMNNGSPTALSGSKTNSPKNSVHKLDVSRSPPLMVKKNPAFNKGSGIVTNGSFSSSNAEGLEKTQTTPNGSLQARRSSSLKVSGTKMGTHSVQNGTVRMGILNSDTLGNPTNVRNMSWLPNGYVTLRDNKQKEQAGELGQHNRLSTYDNVHQQFSMMNLDDKQSIDSATWSTSSCEISLPENSNSCRSSTTTCPEQDFFGGNFEDPVLDGPPQDDLSHPRDYESKSDHRSVGGRSSRATSSSDNSETFVGNSSSNHSALHSLVSSLKQEMTKQKIEYESRIKSLEQRNLTLETEMMSLHDELDQERKKFTMIEIKMRNAERAKEDAEKRNDMLQKEMEQFFSTFGELTVEPRRTERGNTIWIQ

SEQ ID NO: 73271 - protein, 653 aa, Homo sapiens
  Payload ID: 14512
  Gene Symbol: ARHGAP24
  Gene Name: Rho GTPase activating protein 24
  Uniprot ID: Q8N264
  ENSP ID: ENSP00000378610
MTANHESYLLMASTQNDMEDWVKSIRRVIWGPFGGGIFGQKLEDTVRYEKRYGNRLAPMLVEQCVDFIRQRGLKEEGLFRLPGQANLVKELQDAFDCGEKPSFDSNTDVHTVASLLKLYLRELPEPVIPYAKYEDFLSCAKLLSKEEEAGVKELAKQVKSLPVVNYNLLKYICRFLDEVQSYSGVNKMSVQNLATVFGPNILRPKVEDPLTIMEGTVVVQQLMSVMISKHDCLFPKDAELQSKPQDGVSNNNEIQKKATMGQLQNKENNNTKDSPSRQCSWDKSESPQRSSMNNGSPTALSGSKTNSPKNSVHKLDVSRSPPLMVKKNPAFNKGSGIVTNGSFSSSNAEGLEKTQTTPNGSLQARRSSSLKVSGTKMGTHSVQNGTVRMGILNSDTLGNPTNVRNMSWLPNGYVTLRDNKQKEQAGELGQHNRLSTYDNVHQQFSMMNLDDKQSIDSATWSTSSCEISLPENSNSCRSSTTTCPEQDFFGGNFEDPVLDGPPQDDLSHPRDYESKSDHRSVGGRSSRATSSSDNSETFVGNSSSNHSALHSLVSSLKQEMTKQKIEYESRIKSLEQRNLTLETEMMSLHDELDQERKKFTMIEIKMRNAERAKEDAEKRNDMLQKEMEQFFSTFGELTVEPRRTERGNTIWIQ

SEQ ID NO: 73272 - protein, 748 aa, Homo sapiens
  Payload ID: 14512
  Gene Symbol: ARHGAP24
  Gene Name: Rho GTPase activating protein 24
  Uniprot ID: Q8N264
  ENSP ID: ENSP00000378611
MEENNDSTENPQQGQGRQNAIKCGWLRKQGGFVKTWHTRWFVLKGDQLYYFKDEDETKPLGTIFLPGNKVSEHPCNEENPGKFLFEVVPGGDRDRMTANHESYLLMASTQNDMEDWVKSIRRVIWGPFGGGIFGQKLEDTVRYEKRYGNRLAPMLVEQCVDFIRQRGLKEEGLFRLPGQANLVKELQDAFDCGEKPSFDSNTDVHTVASLLKLYLRELPEPVIPYAKYEDFLSCAKLLSKEEEAGVKELAKQVKSLPVVNYNLLKYICRFLDEVQSYSGVNKMSVQNLATVFGPNILRPKVEDPLTIMEGTVVVQQLMSVMISKHDCLFPKDAELQSKPQDGVSNNNEIQKKATMGQLQNKENNNTKDSPSRQCSWDKSESPQRSSMNNGSPTALSGSKTNSPKNSVHKLDVSRSPPLMVKKNPAFNKGSGIVTNGSFSSSNAEGLEKTQTTPNGSLQARRSSSLKVSGTKMGTHSVQNGTVRMGILNSDTLGNPTNVRNMSWLPNGYVTLRDNKQKEQAGELGQHNRLSTYDNVHQQFSMMNLDDKQSIDSATWSTSSCEISLPENSNSCRSSTTTCPEQDFFGGNFEDPVLDGPPQDDLSHPRDYESKSDHRSVGGRSSRATSSSDNSETFVGNSSSNHSALHSLVSSLKQEMTKQKIEYESRIKSLEQRNLTLETEMMSLHDELDQERKKFTMIEIKMRNAERAKEDAEKRNDMLQKEMEQFFSTFGELTVEPRRTERGNTIWIQ

SEQ ID NO: 73273 - protein, 246 aa, Homo sapiens
  Payload ID: 14512
  Gene Symbol: ARHGAP24
  Gene Name: Rho GTPase activating protein 24
  Uniprot ID: Q8N264
  ENSP ID: ENSP00000423206
MEENNDSTENPQQGQGRQNAIKCGWLRKQGGFVKTWHTRWFVLKGDQLYYFKDEDETKPLGTIFLPGNKVSEHPCNEENPGKFLFEVVPGGDRDRMTANHESYLLMASTQNDMEDWVKSIRRVIWGPFGGGIFGQKLEDTVRYEKRYGNRLAPMLVEQCVDFIRQRGLKEEGLFRLPGQANLVKELQDAFDCGEKPSFDSNTDVHTVASLLKLYLRELPEPVIPYAKYEDFLSCAKLLSKEEEAVS

SEQ ID NO: 73274 - protein, 118 aa, Homo sapiens
  Payload ID: 14512
  Gene Symbol: ARHGAP24
  Gene Name: Rho GTPase activating protein 24
  ENSP ID: ENSP00000424256
MFVQGIFGQKLEDTVRYEKRYGNRLAPMLVEQCVDFIRQRGLKEEGLFRLPGQANLVKELQDAFDCGEKPSFDSNTDVHTVASLLKLYLRELPEPVIPYAKYEDFLSCAKLLSKEEEA

SEQ ID NO: 73275 - protein, 622 aa, Homo sapiens
  Payload ID: 14512
  Gene Symbol: ARHGAP24
  Gene Name: Rho GTPase activating protein 24
  ENSP ID: ENSP00000425589
MFVQGGDRDRMTANHESYLLMASTQNDMEDWVKSIRRVIWGPFGGGIFGQKLEDTVRYEKRYGNRLAPMLVEQCVDFIRQRGLKEEGLFRLPGQANLVKELQDAFDCGEKPSFDSNTDVHTVASLLKLYLRELPEPVIPYAKYEDFLSCAKLLSKEEEAGVKELAKQVKSLPVVNYNLLKYICRFLDEVQSYSGVNKMSVQNLATVFGPNILRPKVEDPLTIMEGTVVVQQLMSVMISKHDCLFPKDAELQSKPQDGVSNNNEIQKKATMGQLQNKENNNTKDSPSRQCSWDKSESPQRSSMNNGSPTALSGSKTNSPKNSVHKLDVSRSPPLMVKKNPAFNKGSGIVTNGSFSSSNAEGLEKTQTTPNGSLQARRSSSLKVSGTKMGTHSVQNGTVRMGILNSDTLGNPTNVRNMSWLPNGYVTLRDNKQKEQAGELGQHNRLSTYDNVHQQFSMMNLDDKQSIDSATWSTSSCEISLPENSNSCRSSTTTCPEQDFFGGNFEDPVLDGPPQDDLSHPRDYESKSDHRSVGGRSSRATSSSDNSETFVGNSSSNHSALHSLVSSLKQEMTKQKIEYESRIKSLEQRNLTLETEMMSLHDELDQERKKFTMIEIKMRNAERA

SEQ ID NO: 73276 - protein, 82 aa, Homo sapiens
  Payload ID: 14512
  Gene Symbol: ARHGAP24
  Gene Name: Rho GTPase activating protein 24
  ENSP ID: ENSP00000426105
MTANHESYLLMASTQNDMEDWVKSIRRVIWGPFGGGIFGQKLEDTVRYEKRYGNRLAPMLVEQCVDFIRQRGLKEEGLFRLP

SEQ ID NO: 73277 - protein, 639 aa, Homo sapiens
  Payload ID: 14513
  Gene Symbol: ARHGAP25
  Gene Name: Rho GTPase activating protein 25
  Uniprot ID: P42331
  ENSP ID: ENSP00000386241
MSLGQSACLFLSIARSRSVMTGEQMAAFHPSSTPNPLERPIKMGWLKKQRSIVKNWQQRYFVLRAQQLYYYKDEEDTKPQGCMYLPGCTIKEIATNPEEAGKFVFEIIPASWDQNRMGQDSYVLMASSQAEMEEWVKFLRRVAGTPCGAVFGQRLDETVAYEQKFGPHLVPILVEKCAEFILEHGRNEEGIFRLPGQDNLVKQLRDAFDAGERPSFDRDTDVHTVASLLKLYLRDLPEPVVPWSQYEGFLLCGQLTNADEAKAQQELMKQLSILPRDNYSLLSYICRFLHEIQLNCAVNKMSVDNLATVIGVNLIRSKVEDPAVIMRGTPQIQRVMTMMIRDHEVLFPKSKDIPLSPPAQKNDPKKAPVARSSVGWDATEDLRISRTDSFSSMTSDSDTTSPTGQQPSDAFPEDSSKVPREKPGDWKMQSRKRTQTLPNRKCFLTSAFQGANSSKMEIFKNEFWSPSSEAKAGEGHRRTMSQDLRQLSDSQRTSTYDNVPSLPGSPGEEASALSSQACDSKGDTLASPNSETGPGKKNSGEEEIDSLQRMVQELRKEIETQKQMYEEQIKNLEKENYDVWAKVVRLNEELEKEKKKSAALEISLRNMERSREDVEKRNKALEEEVKEFVKSMKEPKTEA

SEQ ID NO: 73278 - protein, 638 aa, Homo sapiens
  Payload ID: 14513
  Gene Symbol: ARHGAP25
  Gene Name: Rho GTPase activating protein 25
  Uniprot ID: P42331
  ENSP ID: ENSP00000386863
MSLGQSACLFLSIARSRSVMTGEQMAAFHPSSTPNPLERPIKMGWLKKQRSIVKNWQQRYFVLRAQQLYYYKDEEDTKPQGCMYLPGCTIKEIATNPEEAGKFVFEIIPASWDQNRMGQDSYVLMASSQAEMEEWVKFLRRVAGTPCGVFGQRLDETVAYEQKFGPHLVPILVEKCAEFILEHGRNEEGIFRLPGQDNLVKQLRDAFDAGERPSFDRDTDVHTVASLLKLYLRDLPEPVVPWSQYEGFLLCGQLTNADEAKAQQELMKQLSILPRDNYSLLSYICRFLHEIQLNCAVNKMSVDNLATVIGVNLIRSKVEDPAVIMRGTPQIQRVMTMMIRDHEVLFPKSKDIPLSPPAQKNDPKKAPVARSSVGWDATEDLRISRTDSFSSMTSDSDTTSPTGQQPSDAFPEDSSKVPREKPGDWKMQSRKRTQTLPNRKCFLTSAFQGANSSKMEIFKNEFWSPSSEAKAGEGHRRTMSQDLRQLSDSQRTSTYDNVPSLPGSPGEEASALSSQACDSKGDTLASPNSETGPGKKNSGEEEIDSLQRMVQELRKEIETQKQMYEEQIKNLEKENYDVWAKVVRLNEELEKEKKKSAALEISLRNMERSREDVEKRNKALEEEVKEFVKSMKEPKTEA

SEQ ID NO: 73279 - protein, 646 aa, Homo sapiens
  Payload ID: 14513
  Gene Symbol: ARHGAP25
  Gene Name: Rho GTPase activating protein 25
  Uniprot ID: P42331
  ENSP ID: ENSP00000386911
MSLKLPRNWDFNLKVEAAKIARSRSVMTGEQMAAFHPSSTPNPLERPIKMGWLKKQRSIVKNWQQRYFVLRAQQLYYYKDEEDTKPQGCMYLPGCTIKEIATNPEEAGKFVFEIIPASWDQNRMGQDSYVLMASSQAEMEEWVKFLRRVAGTPCGAVFGQRLDETVAYEQKFGPHLVPILVEKCAEFILEHGRNEEGIFRLPGQDNLVKQLRDAFDAGERPSFDRDTDVHTVASLLKLYLRDLPEPVVPWSQYEGFLLCGQLTNADEAKAQQELMKQLSILPRDNYSLLSYICRFLHEIQLNCAVNKMSVDNLATVIGVNLIRSKVEDPAVIMRGTPQIQRVMTMMIRDHEVLFPKSKDIPLSPPAQKNDPKKAPVARSSVGWDATEDLRISRTDSFSSMTSDSDTTSPTGQQPSDAFPEDSSKVPREKPGDWKMQSRKRTQTLPNRKCFLTSAFQGANSSKMEIFKNEFWSPSSEAKAGEGHRRTMSQDLRQLSDSQRTSTYDNVPSLPGSPGEEASALSSQACDSKGDTLASPNSETGPGKKNSGEEEIDSLQRMVQELRKEIETQKQMYEEQIKNLEKENYDVWAKVVRLNEELEKEKKKSAALEISLRNMERSREDVEKRNKALEEEVKEFVKSMKEPKTEA

SEQ ID NO: 73280 - protein, 458 aa, Homo sapiens
  Payload ID: 14513
  Gene Symbol: ARHGAP25
  Gene Name: Rho GTPase activating protein 25
  Uniprot ID: P42331
  ENSP ID: ENSP00000417139
MSLGQSACLFLSIARSRSVMTGEQMAAFHPSSTPNPLERPIKMGWLKKQRSIVKNWQQRYFVLRAQQLYYYKDEEDTKPQGCMYLPGCTIKEIATNPEEAGKFVFEIIPASWDQNRMGQDSYVLMASSQAEMEEWVKFLRRVAGTPCGAVFGQRLDETVAYEQKFGPHLVPILVEKCAEFILEHGRNEEGIFRLPGQDNLVKQLRDAFDAGERPSFDRDTDVHTVASLLKLYLRDLPEPVVPWSQYEGFLLCGQLTNADEAKAQQELMKQLSILPRDNYSLLSYICRFLHEIQLNCAVNKMSVDNLATVIGVNLIRSKVEDPAVIMRGTPQIQRVMTMMIRDHEVLFPKSKDIPLSPPAQKNDPKKAPVARSSVGWDATEDLRISRTDSFSSMVRCREPSCFHWVLPLVQAIPCKACSRVAIWGVLGDAVAVGAAATDSSEHTLKAWPLSKSSFYWHL

SEQ ID NO: 73281 - protein, 283 aa, Homo sapiens
  Payload ID: 14513
  Gene Symbol: ARHGAP25
  Gene Name: Rho GTPase activating protein 25
  ENSP ID: ENSP00000417283
MTGEQMAAFHPSSTPNPLERPIKMGWLKKQRSIVKNWQQRYFVLRAQQLYYYKDEEDTKPQGCMYLPGCTIKEIATNPEEAGKFVFEIIPASWDQNRMGQDSYVLMASSQAEMEEWVKFLRRVAGTPCGAVFGQRLDETVAYEQKFGPHLVPILVEKCAEFILEHGRNEEGIFRLPGQDNLVKQLRDAFDAGERPSFDRDTDVHTVASLLKLYLRDLPEPVVPWSQYEGFLLCGQLTNADEAKNYRNRNDCQSVVSAQIHQFCPRVSLLAHGQAHLLVNDLLV

SEQ ID NO: 73282 - protein, 85 aa, Homo sapiens
  Payload ID: 14513
  Gene Symbol: ARHGAP25
  Gene Name: Rho GTPase activating protein 25
  ENSP ID: ENSP00000417425
MSLGQSACLFLSIARSRSVMTGEQMAAFHPSSTPNPLERPIKMGWLKKQRSIVKNWQQSGPPGSTRTGTVEFPTHGSESRLATGR

SEQ ID NO: 73283 - protein, 339 aa, Homo sapiens
  Payload ID: 14513
  Gene Symbol: ARHGAP25
  Gene Name: Rho GTPase activating protein 25
  ENSP ID: ENSP00000417467
MSVDNLATVIGVNLIRSKVEDPAVIMRGTPQIQRVMTMMIRDHEVLFPKSKDIPLSPPAQKNDPKKAPVARSSVGWDATEDLRISRTDSFSSMTSDSDTTSPTGQQPSDAFPEDSSKVPREKPGDWKMQSRKRTQTLPNRKCFLTSAFQGANSSKMEIFKNEFWSPSSEAKAGEGHRRTMSQDLRQLSDSQRTSTYDNVPSLPGSPGEEASALSSQACDSKGDTLASPNSETGPGKKNSGEEEIDSLQRMVQELRKEIETQKQMYEEQIKNLEKENYDVWAKVVRLNEELEKEKKKSAALEISLRNMERSREDVEKRNKALEEEVKEFVKSMKEPKTEA

SEQ ID NO: 73284 - protein, 505 aa, Homo sapiens
  Payload ID: 14513
  Gene Symbol: ARHGAP25
  Gene Name: Rho GTPase activating protein 25
  ENSP ID: ENSP00000417818
  MOD_RES (1)..(1): Any amino acid
XAQNDGQVLFALSSAVFGQRLDETVAYEQKFGPHLVPILVEKCAEFILEHGRNEEGIFRLPGQDNLVKQLRDAFDAGERPSFDRDTDVHTVASLLKLYLRDLPEPVVPWSQYEGFLLCGQLTNADEAKAQQELMKQLSILPRDNYSLLSYICRFLHEIQLNCAVNKMSVDNLATVIGVNLIRSKVEDPAVIMRGTPQIQRVMTMMIRDHEVLFPKSKDIPLSPPAQKNDPKKAPVARSSVGWDATEDLRISRTDSFSSMTSDSDTTSPTGQQPSDAFPEDSSKVPREKPGDWKMQSRKRTQTLPNRKCFLTSAFQGANSSKMEIFKNEFWSPSSEAKAGEGHRRTMSQDLRQLSDSQRTSTYDNVPSLPGSPGEEASALSSQACDSKGDTLASPNSETGPGKKNSGEEEIDSLQRMVQELRKEIETQKQMYEEQIKNLEKENYDVWAKVVRLNEELEKEKKKSAALEISLRNMERSREDVEKRNKALEEEVKEFVKSMKEPKTEA

SEQ ID NO: 73285 - protein, 139 aa, Homo sapiens
  Payload ID: 14513
  Gene Symbol: ARHGAP25
  Gene Name: Rho GTPase activating protein 25
  ENSP ID: ENSP00000420427
MSLKLPRNWDFNLKVEAAKIARSRSVMTGEQMAAFHPSSTPNPLERPIKMGWLKKQRSIVKNWQQRYFVLRAQQLYYYKDEEDTKPQQCLASAWMRLWPMNRNSAPIWCPSWWRNVQSSSWSTAGMKRASSVCLGRTTW

SEQ ID NO: 73286 - protein, 606 aa, Homo sapiens
  Payload ID: 14513
  Gene Symbol: ARHGAP25
  Gene Name: Rho GTPase activating protein 25
  Uniprot ID: P42331
  ENSP ID: ENSP00000420583
MSLKLPRNWDFNLKVEAAKIARSRSVMTGEQMAAFHPSSTPNPLERPIKMGWLKKQRSIVKNWQQRYFVLRAQQLYYYKDEEDTKPQGCMYLPGCTIKEIATNPEEAGKFVFEIIPVFGQRLDETVAYEQKFGPHLVPILVEKCAEFILEHGRNEEGIFRLPGQDNLVKQLRDAFDAGERPSFDRDTDVHTVASLLKLYLRDLPEPVVPWSQYEGFLLCGQLTNADEAKAQQELMKQLSILPRDNYSLLSYICRFLHEIQLNCAVNKMSVDNLATVIGVNLIRSKVEDPAVIMRGTPQIQRVMTMMIRDHEVLFPKSKDIPLSPPAQKNDPKKAPVARSSVGWDATEDLRISRTDSFSSMTSDSDTTSPTGQQPSDAFPEDSSKVPREKPGDWKMQSRKRTQTLPNRKCFLTSAFQGANSSKMEIFKNEFWSPSSEAKAGEGHRRTMSQDLRQLSDSQRTSTYDNVPSLPGSPGEEASALSSQACDSKGDTLASPNSETGPGKKNSGEEEIDSLQRMVQELRKEIETQKQMYEEQIKNLEKENYDVWAKVVRLNEELEKEKKKSAALEISLRNMERSREDVEKRNKALEEEVKEFVKSMKEPKTEA

SEQ ID NO: 73287 - protein, 814 aa, Homo sapiens
  Payload ID: 14514
  Gene Symbol: ARHGAP26
  Gene Name: Rho GTPase activating protein 26
  Uniprot ID: Q9UNA1
  ENSP ID: ENSP00000274498
MGLPALEFSDCCLDSPHFRETLKSHEAELDKTNKFIKELIKDGKSLISALKNLSSAKRKFADSLNEFKFQCIGDAETDDEMCIARSLQEFATVLRNLEDERIRMIENASEVLITPLEKFRKEQIGAAKEAKKKYDKETEKYCGILEKHLNLSSKKKESQLQEADSQVDLVRQHFYEVSLEYVFKVQEVQERKMFEFVEPLLAFLQGLFTFYHHGYELAKDFGDFKTQLTISIQNTRNRFEGTRSEVESLMKKMKENPLEHKTISPYTMEGYLYVQEKRHFGTSWVKHYCTYQRDSKQITMVPFDQKSGGKGGEDESVILKSCTRRKTDSIEKRFCFDVEAVDRPGVITMQALSEEDRRLWMEAMDGREPVYNSNKDSQSEGTAQLDSIGFSIIRKCIHAVETRGINEQGLYRIVGVNSRVQKLLSVLMDPKTASETETDICAEWEIKTITSALKTYLRMLPGPLMMYQFQRSFIKAAKLENQESRVSEIHSLVHRLPEKNRQMLQLLMNHLANVANNHKQNLMTVANLGVVFGPTLLRPQEETVAAIMDIKFQNIVIEILIENHEKIFNTVPDMPLTNAQLHLSRKKSSDSKPPSCSERPLTLFHTVQSTEKQEQRNSIINSSLESVSSNPNSILNSSSSLQPNMNSSDPDLAVVKPTRPNSLPPNPSPTSPLSPSWPMFSAPSSPMPTSSTSSDSSPVRSVAGFVWFSVAAVVLSLARSSLHAVFSLLVNFVPCHPNLHLLFDRPEEAVHEDSSTPFRKAKALYACKAEHDSELSFTAGTVFDNVHPSQEPGWLEGTLNGKTGLIPENYVEFL

SEQ ID NO: 73288 - protein, 759 aa, Homo sapiens
  Payload ID: 14514
  Gene Symbol: ARHGAP26
  Gene Name: Rho GTPase activating protein 26
  Uniprot ID: Q9UNA1
  ENSP ID: ENSP00000367243
MGLPALEFSDCCLDSPHFRETLKSHEAELDKTNKFIKELIKDGKSLISALKNLSSAKRKFADSLNEFKFQCIGDAETDDEMCIARSLQEFATVLRNLEDERIRMIENASEVLITPLEKFRKEQIGAAKEAKKKYDKETEKYCGILEKHLNLSSKKKESQLQEADSQVDLVRQHFYEVSLEYVFKVQEVQERKMFEFVEPLLAFLQGLFTFYHHGYELAKDFGDFKTQLTISIQNTRNRFEGTRSEVESLMKKMKENPLEHKTISPYTMEGYLYVQEKRHFGTSWVKHYCTYQRDSKQITMVPFDQKSGGKGGEDESVILKSCTRRKTDSIEKRFCFDVEAVDRPGVITMQALSEEDRRLWMEAMDGREPVYNSNKDSQSEGTAQLDSIGFSIIRKCIHAVETRGINEQGLYRIVGVNSRVQKLLSVLMDPKTASETETDICAEWEIKTITSALKTYLRMLPGPLMMYQFQRSFIKAAKLENQESRVSEIHSLVHRLPEKNRQMLQLLMNHLANVANNHKQNLMTVANLGVVFGPTLLRPQEETVAAIMDIKFQNIVIEILIENHEKIFNTVPDMPLTNAQLHLSRKKSSDSKPPSCSERPLTLFHTVQSTEKQEQRNSIINSSLESVSSNPNSILNSSSSLQPNMNSSDPDLAVVKPTRPNSLPPNPSPTSPLSPSWPMFSAPSSPMPTSSTSSDSSPVSTPFRKAKALYACKAEHDSELSFTAGTVFDNVHPSQEPGWLEGTLNGKTGLIPENYVEFL

SEQ ID NO: 73289 - protein, 166 aa, Homo sapiens
  Payload ID: 14514
  Gene Symbol: ARHGAP26
  Gene Name: Rho GTPase activating protein 26
  ENSP ID: ENSP00000367252
MEPLAPSPRIWTCVFYFGIESEEDLSSAKRKFADSLNEFKFQCIGDAETDDEMCIARSLQEFATVLRNLEDERIRMIENASEVLITPLEKFRKEQIGAAKEAKKKYDKETEKYCGILEKHLNLSSKKKESQLQEADSQVDLVRQHFYEVSLEYVFKVQEVQERKMF

SEQ ID NO: 73290 - protein, 154 aa, Homo sapiens
  Payload ID: 14514
  Gene Symbol: ARHGAP26
  Gene Name: Rho GTPase activating protein 26
  ENSP ID: ENSP00000389137
  MOD_RES (1)..(1): Any amino acid
XPPNPSPTSPLSPSWPMFSAPSSPMPTSSTSSDSSPVRSVAGFVWFSVAAVVLSLARSSLHAVFSLLVNFVPCHPNLHLLFDRPEEAVHEDSSTPFRKAKALYACKAEHDSELSFTAGTVFDNAECPSASTAIFTATPKLRAPPPLTWALPLAA

SEQ ID NO: 73291 - protein, 97 aa, Homo sapiens
  Payload ID: 14514
  Gene Symbol: ARHGAP26
  Gene Name: Rho GTPase activating protein 26
  ENSP ID: ENSP00000392186
AKLENQESRVSEIHSLVHRLPEKNRQMLQLLMNHLAKYAGGLGKKCVKCSLQWRTAANARWPSQRMLGKCSCNQATKQSFQGDFTYGDQGQIGVCCP

SEQ ID NO: 73292 - protein, 388 aa, Homo sapiens
  Payload ID: 14514
  Gene Symbol: ARHGAP26
  Gene Name: Rho GTPase activating protein 26
  ENSP ID: ENSP00000393276
  MOD_RES (1)..(1): Any amino acid
XAQLDSIGFSIIRKCIHAVETRGINEQGLYRIVGVNSRVQKLLSVLMDPKTASETETDICAEWEIKTITSALKTYLRMLPGPLMMYQFQRSFIKAAKLENQESRVSEIHSLVHRLPEKNRQMLQLLMNHLANVANNHKQNLMTVANLGVVFGPTLLRPQEETVAAIMDIKFQNIVIEILIENHEKIFNTVPDMPLTNAQLHLSRKKSSDSKPPSCSERPLTLFHTVQSTEKQEQRNSIINSSLESVSSNPNSILNSSSSLQPNMNSSDPDLAVVKPTRPNSLPPNPSPTSPLSPSWPMFSAPSSPMPTSSTSSDSSPVRPEEAVHEDSSTPFRKAKALYACKAEHDSELSFTAGTVFDNVHPSQEPGWLEGTLNGKTGLIPENYVEFL

SEQ ID NO: 73293 - protein, 127 aa, Homo sapiens
  Payload ID: 14514
  Gene Symbol: ARHGAP26
  Gene Name: Rho GTPase activating protein 26
  ENSP ID: ENSP00000400565
VIEILIENHEKIFNTVPDMPLTNAQLHLSRKKSSDSKPPSCSERPLTLFHTVQSTEKQEQRNSIINSSLESVSSNPNSILNSSSSLQPNMNSSDPDLAVVKPTRPNSLHWGFGMCLEGCTEVQSPAS

SEQ ID NO: 73294 - protein, 98 aa, Homo sapiens
  Payload ID: 14514
  Gene Symbol: ARHGAP26
  Gene Name: Rho GTPase activating protein 26
  ENSP ID: ENSP00000403388
  MOD_RES (1)..(1): Any amino acid
XPNPSPTSPLSPSWPMFSAPSSPMPTSSTSSDSSPVSTPFRKAKALYACKAEHDSELSFTAGTVFDNAECPSASTAIFTATPKLRAPPPLTWALPLAA

SEQ ID NO: 73295 - protein, 91 aa, Homo sapiens
  Payload ID: 14514
  Gene Symbol: ARHGAP26
  Gene Name: Rho GTPase activating protein 26
  ENSP ID: ENSP00000411571
MVPFDQKSGGKGGEDESVILKSCTRRKTDSIEKRFCFDVEAVDRPGVITMQALSEEDRRLWMEAMDGREPVYNSNKDSQSEGTAQLDSIGF

SEQ ID NO: 73296 - protein, 127 aa, Homo sapiens
  Payload ID: 14514
  Gene Symbol: ARHGAP26
  Gene Name: Rho GTPase activating protein 26
  ENSP ID: ENSP00000413283
IVIEILIENHEKIFNTVPDMPLTNAQLHLSRKKSSDSKPPSCSERPLTLFHTVQSTEKQEQRNSIINSSLESVSSNPNSILNSSSSLQPNMNSSDPDLAVVKPTRPNSLVQPPRQLCSLPSKPALAF

SEQ ID NO: 73297 - protein, 294 aa, Homo sapiens
  Payload ID: 14514
  Gene Symbol: ARHGAP26
  Gene Name: Rho GTPase activating protein 26
  ENSP ID: ENSP00000416889
  MOD_RES (1)..(1): Any amino acid
XPKTASETETDICAEWEIKTITSALKTYLRMLPGPLMMYQFQRSFIKAAKLENQESRVSEIHSLVHRLPEKNRQMLQLLMNHLANVANNHKQNLMTVANLGVVFGPTLLRPQEETVAAIMDIKFQNIVIEILIENHEKIFNTVPDMPLTNAQLHLSRKKSSDSKPPSCSERPLTLFHTVQSTEKQEQRNSIINSSLESVSSNPNSILNSSSSLQPNMNSSDPDLAVVKPTRPNSLTPFRKAKALYACKAEHDSELSFTAGTVFDNVHPSQEPGWLEGTLNGKTGLIPENYVEFL

SEQ ID NO: 73298 - protein, 263 aa, Homo sapiens
  Payload ID: 14515
  Gene Symbol: ARHGAP27
  Gene Name: Rho GTPase activating protein 27
  Uniprot ID: Q6ZUM4
  ENSP ID: ENSP00000290470
MAADVVGDVYVLVEHPFEYTGKDGRRVAIRPNERYRLLRRSTEHWWHVRREPGGRPFYLPAQYVRELPALGNPAAAAPPGPHPSPAAPEPLAYDYRFVSAAATAGPDGAPEESGGRASSLCGPAQRGAATQRSSLAPGLPACLYLRPAAPVRPAQSLNDLACAAVSPPAGLLGSSGSFKACSVAGSWVCPRPLARSDSENVYEVIQDLHVPPPEESAEQVPPRALGRGGGWRARDRARTEPGRKETRSAQRRARRPPLSEDFG

SEQ ID NO: 73299 - protein, 548 aa, Homo sapiens
  Payload ID: 14515
  Gene Symbol: ARHGAP27
  Gene Name: Rho GTPase activating protein 27
  Uniprot ID: Q6ZUM4
  ENSP ID: ENSP00000366121
MQPGLSPGSPGDPRPPTPETDYPESLTSYPEEDYSPVGSFGEPGPTSPLTTPPGWSCHVSQDKQMLYTNHFTQEQWVRLEDPHGKPYFYNPEDSSVRWELPQVPVPAPRSIHKSSQDGDTPAQASPPEEKVPAELDEVGSWEEVSPATAAVRTKTLDKAGVLHRTKTADKGKRLRKKHWSASWTVLEGGVLTFFKDSKTSAAGGLRQPSKFSTPEYTVELRGATLSWAPKDKSSRKNVLELRSRDGSEYLIQHDSEAIISTWHKAIAQGIQELSAELPPEESESSRVDFGSSERLGSWQEKEEDARPNAAAPALGPVGLESDLSKVRHKLRKFLQRRPTLQSLREKGYIKDQVFGCALAALCERERSRVPRFVQQCIRAVEARGLDIDGLYRISGNLATIQKLRYKVDHDERLDLDDGRWEDVHVITGALKLFFRELPEPLFPFSHFRQFIAAIKLQDQARRSRCVRDLVRSLPAPNHDTLRMLFQHLCRVIEHGEQNRMSVQSVAIVFGPTLLRPEVEETSMPMTMVFQNQVVELILQQCADIFPPH

SEQ ID NO: 73300 - protein, 889 aa, Homo sapiens
  Payload ID: 14515
  Gene Symbol: ARHGAP27
  Gene Name: Rho GTPase activating protein 27
  Uniprot ID: Q6ZUM4
  ENSP ID: ENSP00000403323
MAADVVGDVYVLVEHPFEYTGKDGRRVAIRPNERYRLLRRSTEHWWHVRREPGGRPFYLPAQYVRELPALGNPAAAAPPGPHPSPAAPEPLAYDYRFVSAAATAGPDGAPEESGGRASSLCGPAQRGAATQRSSLAPGLPACLYLRPAAPVRPAQSLNDLACAAVSPPAGLLGSSGSFKACSVAGSWVCPRPLARSDSENVYEVIQDLHVPPPEESAEQVDDPPEPVYANIERQPRATSPGAAAAPLPSPVWETHTDAGTGRPYYYNPDTGVTTWESPFEAAEGAASPATSPASVDSHVSLETEWGQYWDEESRRVFFYNPLTGETAWEDEAENEPEEELEMQPGLSPGSPGDPRPPTPETDYPESLTSYPEEDYSPVGSFGEPGPTSPLTTPPGWSCHVSQDKQMLYTNHFTQEQWVRLEDPHGKPYFYNPEDSSVRWELPQVPVPAPRSIHKSSQDGDTPAQASPPEEKVPAELDEVGSWEEVSPATAAVRTKTLDKAGVLHRTKTADKGKRLRKKHWSASWTVLEGGVLTFFKDSKTSAAGGLRQPSKFSTPEYTVELRGATLSWAPKDKSSRKNVLELRSRDGSEYLIQHDSEAIISTWHKAIAQGIQELSAELPPEESESSRVDFGSSERLGSWQEKEEDARPNAAAPALGPVGLESDLSKVRHKLRKFLQRRPTLQSLREKGYIKDQVFGCALAALCERERSRVPRFVQQCIRAVEARGLDIDGLYRISGNLATIQKLRYKVDHDERLDLDDGRWEDVHVITGALKLFFRELPEPLFPFSHFRQFIAAIKLQDQARRSRCVRDLVRSLPAPNHDTLRMLFQHLCRVIEHGEQNRMSVQSVAIVFGPTLLRPEVEETSMPMTMVFQNQVVELILQQCADIFPPH

SEQ ID NO: 73301 - protein, 521 aa, Homo sapiens
  Payload ID: 14515
  Gene Symbol: ARHGAP27
  Gene Name: Rho GTPase activating protein 27
  ENSP ID: ENSP00000431591
MQPGLSPGSPGDPRPPTPETDYPESLTSYPEEDYSPVGSFGEPGPTSPLTTPPGWSCHVSQDKQMLYTNHFTQEQVPVPAPRSIHKSSQDGDTPAQASPPEEKVPAELDEVGSWEEVSPATAAVRTKTLDKAGVLHRTKTADKGKRLRKKHWSASWTVLEGGVLTFFKDSKTSAAGGLRQPSKFSTPEYTVELRGATLSWAPKDKSSRKNVLELRSRDGSEYLIQHDSEAIISTWHKAIAQGIQELSAELPPEESESSRVDFGSSERLGSWQEKEEDARPNAAAPALGPVGLESDLSKVRHKLRKFLQRRPTLQSLREKGYIKDQVFGCALAALCERERSRVPRFVQQCIRAVEARGLDIDGLYRISGNLATIQKLRYKVDHDERLDLDDGRWEDVHVITGALKLFFRELPEPLFPFSHFRQFIAAIKLQDQARRSRCVRDLVRSLPAPNHDTLRMLFQHLCRVIEHGEQNRMSVQSVAIVFGPTLLRPEVEETSMPMTMVFQNQVVELILQQCADIFPPH

SEQ ID NO: 73302 - protein, 77 aa, Homo sapiens
  Payload ID: 14515
  Gene Symbol: ARHGAP27
  Gene Name: Rho GTPase activating protein 27
  ENSP ID: ENSP00000431722
MQPGLSPGSPGDPRPPTPETDYPESLTSYPEEDYSPVGSFVGEAGGPPREAILLQSRGLLCSMGAAPGPCPCPSKHP

SEQ ID NO: 73303 - protein, 667 aa, Homo sapiens
  Payload ID: 14515
  Gene Symbol: ARHGAP27
  Gene Name: Rho GTPase activating protein 27
  ENSP ID: ENSP00000432762
MVDIIAKVTRRQSRALPAQVDDPPEPVYANIERQPRATSPGAAAAPLPSPVWETHTDAGTGRPYYYNPDTGVTTWESPFEAAEGAASPATSPASVDSHVSLETEWGQYWDEESRRVFFYNPLTGETAWEDEAENEPEEELEMQPGLSPGSPGDPRPPTPETDYPESLTSYPEEDYSPVGSFGEPGPTSPLTTPPGWSCHVSQDKQMLYTNHFTQEQWVRLEDPHGKPYFYNPEDSSVRWELPQVPVPAPRSIHKSSQDGDTPAQASPPEEKTKTLDKAGVLHRTKTADKGKRLRKKHWSASWTVLEGGVLTFFKDSKTSAAGGLRQPSKFSTPEYTVELRGATLSWAPKDKSSRKNVLELRSRDGSEYLIQHDSEAIISTWHKAIAQGIQELSAELPPEESESSRVDFGSSERLGSWQEKEEDARPNAAAPALGPVGLESDLSKVRHKLRKFLQRRPTLQSLREKGYIKDQVFGCALAALCERERSRVPRFVQQCIRAVEARGLDIDGLYRISGNLATIQKLRYKVDHDERLDLDDGRWEDVHVITGALKLFFRELPEPLFPFSHFRQFIAAIKLQDQARRSRCVRDLVRSLPAPNHDTLRMLFQHLCRVIEHGEQNRMSVQSVAIVFGPTLLRPEVEETSMPMTMVFQNQVVELILQQCADIFPPH

SEQ ID NO: 73304 - protein, 867 aa, Homo sapiens
  Payload ID: 14515
  Gene Symbol: ARHGAP27
  Gene Name: Rho GTPase activating protein 27
  ENSP ID: ENSP00000433942
MAADVVGDVYVLVEHPFEYTGKDGRRVAIRPNERYRLLRRSTEHWWHVRREPGGRPFYLPAQYVRELPALGNPAAAAPPGPHPSPAAPEPLAYDYRFVSAAATAGPDGAPEESGGRASSLCGPAQRGAATQRSSLAPGLPACLYLRPAAPVRPAQSLNDLACAAVSPPAGLLGSSGSFKACSVAGSWVCPRPLARSDSENVYEVIQDLHVPPPEESAEQVDDPPEPVYANIERQPRATSPGAAAAPLPSPVWETHTDAGTGRPYYYNPDTGVTTWESPFEAAEGAASPATSPASVDSHVSLETEWGQYWDEESRRVFFYNPLTGETAWEDEAENEPEEELEMQPGLSPGSPGDPRPPTPETDYPESLTSYPEEDYSPVGSFGEPGPTSPLTTPPGWSCHVSQDKQMLYTNHFTQEQWVRLEDPHGKPYFYNPEDSSVRWELPQVPVPAPRSIHKSSQDGDTPAQASPPEEKTKTLDKAGVLHRTKTADKGKRLRKKHWSASWTVLEGGVLTFFKDSKTSAAGGLRQPSKFSTPEYTVELRGATLSWAPKDKSSRKNVLELRSRDGSEYLIQHDSEAIISTWHKAIAQGIQELSAELPPEESESSRVDFGSSERLGSWQEKEEDARPNAAAPALGPVGLESDLSKVRHKLRKFLQRRPTLQSLREKGYIKDQVFGCALAALCERERSRVPRFVQQCIRAVEARGLDIDGLYRISGNLATIQKLRYKVDHDERLDLDDGRWEDVHVITGALKLFFRELPEPLFPFSHFRQFIAAIKLQDQARRSRCVRDLVRSLPAPNHDTLRMLFQHLCRVIEHGEQNRMSVQSVAIVFGPTLLRPEVEETSMPMTMVFQNQVVELILQQCADIFPPH

SEQ ID NO: 73305 - protein, 263 aa, Homo sapiens; identical to SEQ ID NO: 73298
  Payload ID: 14515
  Gene Symbol: ARHGAP27
  Gene Name: Rho GTPase activating protein 27
  Uniprot ID: Q6ZUM4
  ENSP ID: ENSP00000436137

SEQ ID NO: 73306 - protein, 214 aa, Homo sapiens
  Payload ID: 14515
  Gene Symbol: ARHGAP27
  Gene Name: Rho GTPase activating protein 27
  ENSP ID: ENSP00000437100
MVDIIAKVTRRQSRALPAQVDDPPEPVYANIERQPRATSPGAAAAPLPSPVWETHTDAGTGRPYYYNPDTGVTTWESPFEAAEGAASPATSPASVDSHPPTPETDYPESLTSYPEEDYSPVGSFGEPGPTSPLTTPPGWSCHVSQDKQMLYTNHFTQEQWVRLEDPHGKPYFYNPEDSSVRWELPQVPVPAPRSIHKSSQDGDTPAQASPPEEK

SEQ ID NO: 73307 - protein, 889 aa, Homo sapiens; identical to SEQ ID NO: 73300
  Payload ID: 14515
  Gene Symbol: ARHGAP27
  Gene Name: Rho GTPase activating protein 27
  Uniprot ID: Q6ZUM4
  ENSP ID: ENSP00000477741

SEQ ID NO: 73308 - protein, 548 aa, Homo sapiens; identical to SEQ ID NO: 73299
  Payload ID: 14515
  Gene Symbol: ARHGAP27
  Gene Name: Rho GTPase activating protein 27
  Uniprot ID: Q6ZUM4
  ENSP ID: ENSP00000478738

SEQ ID NO: 73309 - protein, 548 aa, Homo sapiens; identical to SEQ ID NO: 73299
  Payload ID: 14515
  Gene Symbol: ARHGAP27
  Gene Name: Rho GTPase activating protein 27
  Uniprot ID: Q6ZUM4
  ENSP ID: ENSP00000480582

SEQ ID NO: 73310 - protein, 263 aa, Homo sapiens; identical to SEQ ID NO: 73298
  Payload ID: 14515
  Gene Symbol: ARHGAP27
  Gene Name: Rho GTPase activating protein 27
  Uniprot ID: Q6ZUM4
  ENSP ID: ENSP00000481302

SEQ ID NO: 73311 - protein, 889 aa, Homo sapiens
  Payload ID: 14515
  Gene Symbol: ARHGAP27
  Gene Name: Rho GTPase activating protein 27
  ENSP ID: ENSP00000482352
MAADVVGDVYVLVEHPFEYTGKDGRRVAIRPNERYRLLRRSTEHWWHVRREPGGRPFYLPAQYVRELPALGNPAAAAPPGPHPSPAAPEPLAYDYRFVSAAATAGPDGAPEESGGRTSSLCGPAQRGAATQRSSLAPGLPACLYLRPAAPVRPAQSLNDLACAAVSPPAGLLGSSGSFKACSVAGSWVCPRPLARSDSENVYEVIQDLHVPPREESAEQVDDPPEPVYANIERQPRATSPGAAAAPLPSPVWETHTDAGTGRPYYYNPDTGVTTWESPFEAAEGAASPATSPASVDSHVSLETEWGQYWDEESRRVFFYNPLTGETAWEDEAENEPEEELEMQPGLSPGSPGDPRPPTPETDYPESLTSYPEEDYSPVGSFGEPGPTSPLTTPPGWSCHVSQDKQMLYTNHFTQEQWVRLEDPHGKPYFYNPEDSSVRWELPQVPVPAPRSIHKSSQDGDTPAQASPPEEKVPAELDEVGSWEEVSPATAAVRTKTLDKAGVLHRTKTADKGKRLRKKHWSASWTVLEGGVLTFFKDSKTSAAGGLRQPSKFSTPEYTVELRGATLSWAPKDKSSRKNVLELRSRDGSEYLIQHDSEAIISTWHKAIAQGIQELSAELPPEESESSRVDFGSSERLGSWQEKEEDARPNAAAPALGPVGLESDLSKVRHKLRKFLQRRPTLQSLREKGYIKDQVFGCALAALCERERSRVPRFVQQCIRAVEARGLDIDGLYRISGNLATIQKLRYKVDHDERLDLDDGRWEDVHVITGALKLFFRELPEPLFPFSHFRQFIAAIKLQDQARRSRCVRDLVRSLPAPNHDTLRMLFQHLCRVIEHGEQNRMSVQSVAIVFGPTLLRPEVEETSMPMTMVFQNQVVELILQQCADIFPPH

SEQ ID NO: 73312 - protein, 263 aa, Homo sapiens
  Payload ID: 14515
  Gene Symbol: ARHGAP27
  Gene Name: Rho GTPase activating protein 27
  ENSP ID: ENSP00000482605
MAADVVGDVYVLVEHPFEYTGKDGRRVAIRPNERYRLLRRSTEHWWHVRREPGGRPFYLPAQYVRELPALGNPAAAAPPGPHPSPAAPEPLAYDYRFVSAAATAGPDGAPEESGGRTSSLCGPAQRGAATQRSSLAPGLPACLYLRPAAPVRPAQSLNDLACAAVSPPAGLLGSSGSFKACSVAGSWVCPRPLARSDSENVYEVIQDLHVPPREESAEQVPPRALGRGGGWRARDRARTEPGRKETRSAQRRARRPPLSEDFG

SEQ ID NO: 73313 - protein, 667 aa, Homo sapiens; identical to SEQ ID NO: 73303
  Payload ID: 14515
  Gene Symbol: ARHGAP27
  Gene Name: Rho GTPase activating protein 27
  ENSP ID: ENSP00000485742

SEQ ID NO: 73314 - protein, 77 aa, Homo sapiens; identical to SEQ ID NO: 73302
  Payload ID: 14515
  Gene Symbol: ARHGAP27
  Gene Name: Rho GTPase activating protein 27
  ENSP ID: ENSP00000485800

SEQ ID NO: 73315 - protein, 214 aa, Homo sapiens; identical to SEQ ID NO: 73306
  Payload ID: 14515
  Gene Symbol: ARHGAP27
  Gene Name: Rho GTPase activating protein 27
  ENSP ID: ENSP00000486620

SEQ ID NO: 73316 - protein, 867 aa, Homo sapiens
  Payload ID: 14515
  Gene Symbol: ARHGAP27
  Gene Name: Rho GTPase activating protein 27
  ENSP ID: ENSP00000486749
MAADVVGDVYVLVEHPFEYTGKDGRRVAIRPNERYRLLRRSTEHWWHVRREPGGRPFYLPAQYVRELPALGNPAAAAPPGPHPSPAAPEPLAYDYRFVSAAATAGPDGAPEESGGRTSSLCGPAQRGAATQRSSLAPGLPACLYLRPAAPVRPAQSLNDLACAAVSPPAGLLGSSGSFKACSVAGSWVCPRPLARSDSENVYEVIQDLHVPPREESAEQVDDPPEPVYANIERQPRATSPGAAAAPLPSPVWETHTDAGTGRPYYYNPDTGVTTWESPFEAAEGAASPATSPASVDSHVSLETEWGQYWDEESRRVFFYNPLTGETAWEDEAENEPEEELEMQPGLSPGSPGDPRPPTPETDYPESLTSYPEEDYSPVGSFGEPGPTSPLTTPPGWSCHVSQDKQMLYTNHFTQEQWVRLEDPHGKPYFYNPEDSSVRWELPQVPVPAPRSIHKSSQDGDTPAQASPPEEKTKTLDKAGVLHRTKTADKGKRLRKKHWSASWTVLEGGVLTFFKDSKTSAAGGLRQPSKFSTPEYTVELRGATLSWAPKDKSSRKNVLELRSRDGSEYLIQHDSEAIISTWHKAIAQGIQELSAELPPEESESSRVDFGSSERLGSWQEKEEDARPNAAAPALGPVGLESDLSKVRHKLRKFLQRRPTLQSLREKGYIKDQVFGCALAALCERERSRVPRFVQQCIRAVEARGLDIDGLYRISGNLATIQKLRYKVDHDERLDLDDGRWEDVHVITGALKLFFRELPEPLFPFSHFRQFIAAIKLQDQARRSRCVRDLVRSLPAPNHDTLRMLFQHLCRVIEHGEQNRMSVQSVAIVFGPTLLRPEVEETSMPMTMVFQNQVVELILQQCADIFPPH

SEQ ID NO: 73317 - protein, 521 aa, Homo sapiens; identical to SEQ ID NO: 73301
  Payload ID: 14515
  Gene Symbol: ARHGAP27
  Gene Name: Rho GTPase activating protein 27
  ENSP ID: ENSP00000487100

SEQ ID NO: 73318 - protein, 263 aa, Homo sapiens; identical to SEQ ID NO: 73312
  Payload ID: 14515
  Gene Symbol: ARHGAP27
  Gene Name: Rho GTPase activating protein 27
  ENSP ID: ENSP00000487172

SEQ ID NO: 73319 - protein, 77 aa, Homo sapiens; identical to SEQ ID NO: 73302
  Payload ID: 14515
  Gene Symbol: ARHGAP27
  Gene Name: Rho GTPase activating protein 27
  ENSP ID: ENSP00000487852

SEQ ID NO: 73320 - protein, 263 aa, Homo sapiens; identical to SEQ ID NO: 73298
  Payload ID: 14515
  Gene Symbol: ARHGAP27
  Gene Name: Rho GTPase activating protein 27
  Uniprot ID: Q6ZUM4
  ENSP ID: ENSP00000487991

SEQ ID NO: 73321 - protein, 667 aa, Homo sapiens; identical to SEQ ID NO: 73303
  Payload ID: 14515
  Gene Symbol: ARHGAP27
  Gene Name: Rho GTPase activating protein 27
  ENSP ID: ENSP00000488279

SEQ ID NO: 73322 - protein, 867 aa, Homo sapiens; identical to SEQ ID NO: 73304
  Payload ID: 14515
  Gene Symbol: ARHGAP27
  Gene Name: Rho GTPase activating protein 27
  ENSP ID: ENSP00000488330

SEQ ID NO: 73323 - protein, 214 aa, Homo sapiens; identical to SEQ ID NO: 73306
  Payload ID: 14515
  Gene Symbol: ARHGAP27
  Gene Name: Rho GTPase activating protein 27
  ENSP ID: ENSP00000488351

SEQ ID NO: 73324 - protein, 521 aa, Homo sapiens; identical to SEQ ID NO: 73301
  Payload ID: 14515
  Gene Symbol: ARHGAP27
  Gene Name: Rho GTPase activating protein 27
  ENSP ID: ENSP00000488767

SEQ ID NO: 73325 - protein, 670 aa, Homo sapiens
  Payload ID: 14516
  Gene Symbol: ARHGAP28
  Gene Name: Rho GTPase activating protein 28
  Uniprot ID: Q9P2N2
  ENSP ID: ENSP00000262227
MLSNESLHPPAFSRSNSEASVDSASMEDFWREIESIKDSSMGGQEEPPPAEVTPVDEGELEAEWLQDVGLSTLISGDEEEDGKALLSTLTRTQAAAVQKRYHTYTQTMRKKDKQSIRDVRDIFGVSESPPRDTCGNHTNQLDGTKEERELPRVIKTSGSMPDDASLNSTTLSDASQDKEGSFAVPRSDSVAILETIPVLPVHSNGSPEPGQPVQNAISDDDFLEKNIPPEAEELSFEVSYSEMVTEALKRNKLKKSEIKKEDYVLTKFNVQKTRFGLTEAGDLSAEDMKKIRHLSLIELTAFFDAFGIQLKRNKTEKVKGRDNGIFGVPLTVLLDGDRKKDPGVKVPLVLQKFFEKVEESGLESEGIFRLSGCTAKVKQYREELDAKFNADKFKWDKMCHREAAVMLKAFFRELPTSLFPVEYIPAFISLMERGPHVKVQFQALHLMVMALPDANRDAAQALMTFFNKVIANESKNRMSLWNISTVMAPNLFFSRSKHSDYEELLLANTAAHIIRLMLKYQKILWKVPSFLITQVRRMNEATMLLKKQLPSVRKLLRRKTLERETASPKTSKVLQKSPSARRMSDVPEGVIRVHAPLLSKVSMAIQLNNQTKAKDILAKFQYENRILHWQRAALSFLNGKWVKKEREESTETNRSPKHVFLFTIGLDIST

SEQ ID NO: 73326 - protein, 570 aa, Homo sapiens
  Payload ID: 14516
  Gene Symbol: ARHGAP28
  Gene Name: Rho GTPase activating protein 28
  Uniprot ID: Q9P2N2
  ENSP ID: ENSP00000313506
MRKKDKQSIRDVRDIFGVSESPPRDTCGNHTNQLDGTKEERELPRVIKTSGSMPDDASLNSTTLSDASQDKEGSFAVPRSDSVAILETIPVLPVHSNGSPEPGQPVQNAISDDDFLEKNIPPEAEELSFEVSYSEMVTEALKRNKLKKSEIKKEDYVLTKFNVQKTRFGLTEAGDLSAEDMKKIRHLSLIELTAFFDAFGIQLKRNKTEKVKGRDNGIFGVPLTVLLDGDRKKDPGVKVPLVLQKFFEKVEESGLESEGIFRLSGCTAKVKQYREELDAKFNADKFKWDKMCHREAAVMLKAFFRELPTSLFPVEYIPAFISLMERGPHVKVQFQALHLMVMALPDANRDAAQALMTFFNKVIANESKNRMSLWNISTVMAPNLFFSRSKHSDYEELLLANTAAHIIRLMLKYQKILWKVPSFLITQVRRMNEATMLLKKQLPSVRKLLRRKTLERETASPKTSKVLQKSPSARRMSDVPEGVIRVHAPLLSKVSMAIQLNNQTKAKDILAKFQYENSHGSSECIKIQNQRLYEIGGNIGEHCLDPDAYILDVYRINPQAEWVIKPQQSS

SEQ ID NO: 73327 - protein, 729 aa, Homo sapiens
  Payload ID: 14516
  Gene Symbol: ARHGAP28
  Gene Name: Rho GTPase activating protein 28
  Uniprot ID: Q9P2N2
  ENSP ID: ENSP00000372964
MEVEDSGGVVLTAYHSYARAQPPNAESRCAPRAAASHPLSRKSIPRCRRINRMLSNESLHPPAFSRSNSEASVDSASMEDFWREIESIKDSSMGGQEEPPPAEVTPVDEGELEAEWLQDVGLSTLISGDEEEDGKALLSTLTRTQAAAVQKRYHTYTQTMRKKDKQSIRDVRDIFGVSESPPRDTCGNHTNQLDGTKEERELPRVIKTSGSMPDDASLNSTTLSDASQDKEGSFAVPRSDSVAILETIPVLPVHSNGSPEPGQPVQNAISDDDFLEKNIPPEAEELSFEVSYSEMVTEALKRNKLKKSEIKKEDYVLTKFNVQKTRFGLTEAGDLSAEDMKKIRHLSLIELTAFFDAFGIQLKRNKTEKVKGRDNGIFGVPLTVLLDGDRKKDPGVKVPLVLQKFFEKVEESGLESEGIFRLSGCTAKVKQYREELDAKFNADKFKWDKMCHREAAVMLKAFFRELPTSLFPVEYIPAFISLMERGPHVKVQFQALHLMVMALPDANRDAAQALMTFFNKVIANESKNRMSLWNISTVMAPNLFFSRSKHSDYEELLLANTAAHIIRLMLKYQKILWKVPSFLITQVRRMNEATMLLKKQLPSVRKLLRRKTLERETASPKTSKVLQKSPSARRMSDVPEGVIRVHAPLLSKVSMAIQLNNQTKAKDILAKFQYENSHGSSECIKIQNQRLYEIGGNIGEHCLDPDAYILDVYRINPQAEWVIKPQQSS

SEQ ID NO: 73328 - protein, 570 aa, Homo sapiens; identical to SEQ ID NO: 73326
  Payload ID: 14516
  Gene Symbol: ARHGAP28
  Gene Name: Rho GTPase activating protein 28
  Uniprot ID: Q9P2N2
  ENSP ID: ENSP00000392660

SEQ ID NO: 73329 - protein, 117 aa, Homo sapiens
  Payload ID: 14516
  Gene Symbol: ARHGAP28
  Gene Name: Rho GTPase activating protein 28
  ENSP ID: ENSP00000433390
MLSNESLHPPAFSRSNSEASVDSASMEDFWREIESIKDSSMGGQEEPPPAEVTPVDEGELEAEWLQDVGLSTLISGDEEEDGKALLSTLTRTQAAAVQKRYHTYTQTMRKKDKQSIR

SEQ ID NO: 73330 - protein, 545 aa, Homo sapiens
  Payload ID: 14516
  Gene Symbol: ARHGAP28
  Gene Name: Rho GTPase activating protein 28
  Uniprot ID: Q9P2N2
  ENSP ID: ENSP00000435990
MNELPRDTCGNHTNQLDGTKEERELPRVIKTSGSMPDDASLNSTTLSDASQDKEGSFAVPRSDSVAILETIPVLPVHSNGSPEPGQPVQNAISDDDFLEKNIPPEAEELSFEVSYSEMVTEALKRNKLKKSEIKKEDYVLTKFNVQKTRFGLTEAGDLSAEDMKKIRHLSLIELTAFFDAFGIQLKRNKTEKVKGRDNGIFGVPLTVLLDGDRKKDPGVKVPLVLQKFFEKVEESGLESEGIFRLSGCTAKVKQYREELDAKFNADKFKWDKMCHREAAVMLKAFFRELPTSLFPVEYIPAFISLMERGPHVKVQFQALHLMVMALPDANRDAAQALMTFFNKVIANESKNRMSLWNISTVMAPNLFFSRSKHSDYEELLLANTAAHIIRLMLKYQKILWKVPSFLITQVRRMNEATMLLKKQLPSVRKLLRRKTLERETASPKTSKVLQKSPSARRMSDVPEGVIRVHAPLLSKVSMAIQLNNQTKAKDILAKFQYENRILHWQRAALSFLNGKWVKKEREESTETNRSPKHVFLFTIGLDIST

SEQ ID NO: 73331 - protein, 565 aa, Homo sapiens
  Payload ID: 14516
  Gene Symbol: ARHGAP28
  Gene Name: Rho GTPase activating protein 28
  ENSP ID: ENSP00000437262
MRKKDKQSIRDVRDIFGVSESPPRDTCGNHTNQLDGTKEERELPRVIKTNDASLNSTTLSDASQDKEGSFAVPRSDSVAILETIPVLPVHSNGSPEPGQPVQNAISDDDFLEKNIPPEAEELSFEVSYSEMVTEALKRNKLKKSEIKKEDYVLTKFNVQKTRFGLTEAGDLSAEDMKKIRHLSLIELTAFFDAFGIQLKRNKTEKVKGRDNGIFGVPLTVLLDGDRKKDPGVKVPLVLQKFFEKVEESGLESEGIFRLSGCTAKVKQYREELDAKFNADKFKWDKMCHREAAVMLKAFFRELPTSLFPVEYIPAFISLMERGPHVKVQFQALHLMVMALPDANRDAAQALMTFFNKVIANESKNRMSLWNISTVMAPNLFFSRSKHSDYEELLLANTAAHIIRLMLKYQKILWKVPSFLITQVRRMNEATMLLKKQLPSVRKLLRRKTLERETASPKTSKVLQKSPSARRMSDVPEGVIRVHAPLLSKVSMAIQLNNQTKAKDILAKFQYENSHGSSECIKIQNQRLYEIGGNIGEHCLDPDAYILDVYRINPQAEWVIKPQQSS

SEQ ID NO: 73332 - protein, 137 aa, Homo sapiens
  Payload ID: 14516
  Gene Symbol: ARHGAP28
  Gene Name: Rho GTPase activating protein 28
  ENSP ID: ENSP00000462831
MSEPGVLCIVFDWRKSIPRCRRINRMLSNESLHPPAFSRSNSEASVDSASMEDFWREIESDEEEDGKALLSTLTRTQAAAVQKRYHTYTQTMRKKDKQSIRDVRDIFGVSESPPRDTCGNHTNQLDGTKEERELPRV

SEQ ID NO: 73333 - protein, 111 aa, Homo sapiens
  Payload ID: 14516
  Gene Symbol: ARHGAP28
  Gene Name: Rho GTPase activating protein 28
  ENSP ID: ENSP00000462912
MRKKDKQSIRDVRDIFGVSESPPRDTCGNHTNQLDGTKEERELPRVIKTSGSMPDDASLNSTTLSDASQDKEGSFAVPRSDSVAILETIPVLPVHSNGSPEPGQPVQNAIS

SEQ ID NO: 73334 - protein, 202 aa, Homo sapiens
  Payload ID: 14516
  Gene Symbol: ARHGAP28
  Gene Name: Rho GTPase activating protein 28
  ENSP ID: ENSP00000463143
EDMKKIRHLSLIELTAFFDAFGIQLKRNKTEKVKGRDNGIFGVPLTVLLDGDRKKDPGVKVPLVLQKQYREELDAKFNADKFKWDKMCHREAAVMLKAFFRELPTSLFPVEYIPAFISLMERGPHVKVQFQALHLMVMALPDANRDAAQALMTFFNKVIANESKNRMSLWNISTVMAPNLFFSRSKHSDYEELLLANTAAHI

SEQ ID NO: 73335 - protein, 57 aa, Homo sapiens
  Payload ID: 14516
  Gene Symbol: ARHGAP28
  Gene Name: Rho GTPase activating protein 28
  ENSP ID: ENSP00000463672
MRKKDKQSIRDVRDIFGVSESPPRDTCGNHTNQLDGTKEERELPRVIKTSGSMYYPV

SEQ ID NO: 73336 - protein, 73 aa, Homo sapiens
  Payload ID: 14516
  Gene Symbol: ARHGAP28
  Gene Name: Rho GTPase activating protein 28
  ENSP ID: ENSP00000464141
MNLIQGKSIPRCRRINRMLSNESLHPPAFSRSNSEASVDSASMEDFWREIESIKDSSMGGQEEPPPAEVTPVD

SEQ ID NO: 73337 - protein, 57 aa, Homo sapiens; identical to SEQ ID NO: 73335
  Payload ID: 14516
  Gene Symbol: ARHGAP28
  Gene Name: Rho GTPase activating protein 28
  ENSP ID: ENSP00000464310

SEQ ID NO: 73338 - protein, 1261 aa, Homo sapiens
  Payload ID: 14517
  Gene Symbol: ARHGAP29
  Gene Name: Rho GTPase activating protein 29
  Uniprot ID: Q52LW3
  ENSP ID: ENSP00000260526
MIAHKQKKTKKKRAWASGQLSTDITTSEMGLKSLSSNSIFDPDYIKELVNDIRKFSHMLLYLKEAIFSDCFKEVIHIRLEELLRVLKSIMNKHQNLNSVDLQNAAEMLTAKVKAVNFTEVNEENKNDLFQEVFSSIETLAFTFGNILTNFLMGDVGNDSLLRLPVSRETKSFENVSVESVDSSSEKGNFSPLELDNVLLKNTDSIELALSYAKTWSKYTKNIVSWVEKKLNLELESTRNMVKLAEATRTNIGIQEFMPLQSLFTNALLNDIESSHLLQQTIAALQANKFVQPLLGRKNEMEKQRKEIKELWKQEQNKMLEAENALKKAKLLCMQRQDEYEKAKSSMFRAEEEHLSSSGGLAKNLNKQLEKKRRLEEEALQKVEEANELYKVCVTNVEERRNDLENTKREILAQLRTLVFQCDLTLKAVTVNLFHMQHLQAASLADSLQSLCDSAKLYDPGQEYSEFVKATNSTEEEKVDGNVNKHLNSSQPSGFGPANSLEDVVRLPDSSNKIEEDRCSNSADITGPSFIRSWTFGMFSDSESTGGSSESRSLDSESISPGDFHRKLPRTPSSGTMSSADDLDEREPPSPSETGPNSLGTFKKTLMSKAALTHKFRKLRSPTKCRDCEGIVVFQGVECEECLLVCHRKCLENLVIICGHQKLPGKIHLFGAEFTQVAKKEPDGIPFILKICASEIENRALCLQGIYRVCGNKIKTEKLCQALENGMHLVDISEFSSHDICDVLKLYLRQLPEPFILFRLYKEFIDLAKEIQHVNEEQETKKNSLEDKKWPNMCIEINRILLKSKDLLRQLPASNFNSLHFLIVHLKRVVDHAEENKMNSKNLGVIFGPSLIRPRPTTAPITISSLAEYSNQARLVEFLITYSQKIFDGSLQPQDVMCSIGVVDQGCFPKPLLSPEERDIERSMKSLFFSSKEDIHTSESESKIFERATSFEESERKQNALGKCDACLSDKAQLLLDQEAESASQKIEDGKTPKPLSLKSDRSTNNVERHTPRTKIRPVSLPVDRLLLASPPNERNGRNMGNVNLDKFCKNPAFEGVNRKDAATTVCSKFNGFDQQTLQKIQDKQYEQNSLTAKTTMIMPSALQEKGVTTSLQISGDHSINATQPSKPYAEPVRSVREASERRSSDSYPLAPVRAPRTLQPQHWTTFYKPHAPIISIRGNEEKPASPSAAVPPGTDHDPHGLVVKSMPDPDKASACPGQATGQPKEDSEELGLPDVNPMCQRPRLKRMQQFEDLEGEIPQFV

SEQ ID NO: 73339 - protein, 393 aa, Homo sapiens
  Payload ID: 14517
  Gene Symbol: ARHGAP29
  Gene Name: Rho GTPase activating protein 29
  Uniprot ID: Q52LW3
  ENSP ID: ENSP00000359237
MIAHKQKKTKKKRAWASGQLSTDITTSEMGLKSLSSNSIFDPDYIKELVNDIRKFSHMLLYLKEAIFSDCFKEVIHIRLEELLRVLKSIMNKHQNLNSVDLQNAAEMLTAKVKAVNFTEVNEENKNDLFQEVFSSIETLAFTFGNILTNFLMGDVGNDSLLRLPVSRETKSFENVSVESVDSSSEKGNFSPLELDNVLLKNTDSIELALSYAKTWSKYTKNIVSWVEKKLNLELESTRNMVKLAEATRTNIGIQEFMPLQSLFTNALLNDIESSHLLQQTIAALQANKFVQPLLGRKNEMEKQRKEIKELWKQEQNKMLEAENALKKAKLLCMQRQDEYEKAKSSMFRAEEEHLSSSGGLAKNLNKQLEKKRRLEEEALQKVTIFFFFICKLN

SEQ ID NO: 73340 - protein, 1035 aa, Homo sapiens
  Payload ID: 14517
  Gene Symbol: ARHGAP29
  Gene Name: Rho GTPase activating protein 29
  ENSP ID: ENSP00000449764
MIAHKQKKTKKKRAWASGQLSTDITTSEMGLKSLSSNSIFDPDYIKELVNDIRKFSHMLLYLKEAIFSDCFKEVIHIRLEELLRVLKSIMNKHQNLNSVDLQNAAEMLTAKVKAVNFTEVNEENKNDLFQEVFSSIETLAFTFGNILTNFLMGDVGNDSLLRLPVSRETKSFENVSVESVDSSSEKGNFSPLELDNVLLKNTDSIELALSYAKTWSKYTKNIVSWVEKKLNLELESTRNMVKLAEATRTNIGIQEFMPLQSLFTNALLNDIESSHLLQQTIAALQANKFVQPLLGRKNEMEKQRKEIKELWKQEQNKMLEAENALKKAKLLCMQRQDEYEKAKSSMFRAEEEHLSSSGGLAKNLNKQLEKKRRLEEEALQKVEEANELYKVCVTNVEERRNDLENTKREILAQLRTLVFQCDLTLKAVTVNLFHMQHLQAASLADSLQSLCDSAKLYDPGQEYSEFVKATNSTEEEKVDGNVNKHLNSSQPSGFGPANSLEDVVRLPDSSNKIEEDRCSNSADITGPSFIRSWTFGMFSDSESTGGSSESRSLDSESISPGDFHRKLPRTPSSGTMSSADDLDEREPPSPSETGPNSLGTFKKTLMSKAALTHKFRKLRSPTKCRDCEGIVVFQGVECEECLLVCHRKCLENLVIICGHQKLPGKIHLFGAEFTQVAKKEPDGIPFILKICASEIENRALCLQGIYRVCGNKIKTEKLCQALENGMHLVDISEFSSHDICDVLKLYLRQLPEPFILFRLYKEFIDLAKEIQHVNEEQETKKNSLEDKKWPNMCIEINRILLKSKDLLRQLPASNFNSLHFLIVHLKRVVDHAEENKMNSKNLGVIFGPSLIRPRPTTAPITISSLAEYSNQARLVEFLITYSQKIFDGSLQPQDVMCSIGVVDQGCFPKPLLSPEERDIERSMKSLFFSSKEDIHTSESESKIFERATSFEESERKQNALGKCDACLSDKAQLLLDQEAESASQKIEDGKTPKPLSLKSDRSTNNVERHTPRTKIRPETLIQNYRVLHLQYVFCC

SEQ ID NO: 73341 - protein, 1101 aa, Homo sapiens
  Payload ID: 14518
  Gene Symbol: ARHGAP30
  Gene Name: Rho GTPase activating protein 30
  Uniprot ID: Q7Z6I6
  ENSP ID: ENSP00000356992
MKSRQKGKKKGSAKERVFGCDLQEHLQHSGQEVPQVLKSCAEFVEEYGVVDGIYRLSGVSSNIQKLRQEFESERKPDLRRDVYLQDIHCVSSLCKAYFRELPDPLLTYRLYDKFAEAVGVQLEPERLVKILEVLRELPVPNYRTLEFLMRHLVHMASFSAQTNMHARNLAIVWAPNLLRSKDIEASGFNGTAAFMEVRVQSIVVEFILTHVDQLFGGAALSGGEVESGWRSLPGTRASGSPEDLMPRPLPYHLPSILQAGDGPPQMRPYHTIIEIAEHKRKGSLKVRKWRSIFNLGRSGHETKRKLPRGAEDREDKSNKGTLRPAKSMDSLSAAAGASDEPEGLVGPSSPRPSPLLPESLENDSIEAAEGEQEPEAEALGGTNSEPGTPRAGRSAIRAGGSSRAERCAGVHISDPYNVNLPLHITSILSVPPNIISNVSLARLTRGLECPALQHRPSPASGPGPGPGLGPGPPDEKLEASPASSPLADSGPDDLAPALEDSLSQEVQDSFSFLEDSSSSEPEWVGAEDGEVAQAEAAGAAFSPGEDDPGMGYLEELLGVGPQVEEFSVEPPLDDLSLDEAQFVLAPSCCSLDSAGPRPEVEEENGEEVFLSAYDDLSPLLGPKPPIWKGSGSLEGEAAGCGRQALGQGGEEQACWEVGEDKQAEPGGRLDIREEAEGSPETKVEAGKASEDRGEAGGSQETKVRLREGSREETEAKEEKSKGQKKADSMEAKGVEEPGGDEYTDEKEKEIEREEDEQREEAQVEAGRDLEQGAQEDQVAEEKWEVVQKQEAEGVREDEDKGQREKGYHEARKDQGDGEDSRSPEAATEGGAGEVSKERESGDGEAEGDQRAGGYYLEEDTLSEGSGVASLEVDCAKEGNPHSSEMEEVAPQPPQPEEMEPEGQPSPDGCLCPCSLGLGGVGMRLASTLVQVQQVRSVPVVPPKPQFAKMPSAMCSKIHVAPANPCPRPGRLDGTPGERAWGSRASRSSWRNGGSLSFDAAVALARDRQRTEAQGVRRTQTCTEGGDYCLIPRTSPCSMISAHSPRPLSCLELPSEGAEGSGSRSRLSLPPREPQVPDPLLSSQRRSYAFETQANPGKGEGL

SEQ ID NO: 73342 - protein, 924 aa, Homo sapiens
  Payload ID: 14518
  Gene Symbol: ARHGAP30
  Gene Name: Rho GTPase activating protein 30
  ENSP ID: ENSP00000356994
MKSKDIEASGFNGTAAFMEVRVQSIVVEFILTHVDQLFGGAALSGGEVESGWRSLPGTRASGSPEDLMPRPLPYHLPSILQAGDGPPQMRPYHTIIEIAEHKRKGSLKVRKWRSIFNLGRSGHETKRKLPRGAEDREDKSNKGTLRPAKSMDSLSAAAGASDEPEGLVGPSSPRPSPLLPESLENDSIEAAEGEQEPEAEALGGTNSEPGTPRAGRSAIRAGGSSRAERCAGVHISDPYNVNLPLHITSILSVPPNIISNVSLARLTRGLECPALQHRPSPASGPGPGPGLGPGPPDEKLEASPASSPLADSGPDDLAPALEDSLSQEVQDSFSFLEDSSSSEPEWVGAEDGEVAQAEAAGAAFSPGEDDPGMGYLEELLGVGPQVEEFSVEPPLDDLSLDEAQFVLAPSCCSLDSAGPRPEVEEENGEEVFLSAYDDLSPLLGPKPPIWKGSGSLEGEAAGCGRQALGQGGEEQACWEVGEDKQAEPGGRLDIREEAEGSPETKVEAGKASEDRGEAGGSQETKVRLREGSREETEAKEEKSKGQKKADSMEAKGVEEPGGDEYTDEKEKEIEREEDEQREEAQVEAGRDLEQGAQEDQVAEEKWEVVQKQEAEGVREDEDKGQREKGYHEARKDQGDGEDSRSPEAATEGGAGEVSKERESGDGEAEGDQRAGGYYLEEDTLSEGSGVASLEVDCAKEGNPHSSEMEEVAPQPPQPEEMEPEGQPSPDGCLCPCSLGLGGVGMRLASTLVQVQQVRSVPVVPPKPQFAKMPSAMCSKIHVAPANPCPRPGRLDGTPGERAWGSRASRSSWRNGGSLSFDAAVALARDRQRTEAQGVRRTQTCTEGGDYCLIPRTSPCSMISAHSPRPLSCLELPSEGAEGSGSRSRLSLPPREPQVPDPLLSSQRRSYAFETQANPGKGEGL

SEQ ID NO: 73343 - protein, 890 aa, Homo sapiens
  Payload ID: 14518
  Gene Symbol: ARHGAP30
  Gene Name: Rho GTPase activating protein 30
  ENSP ID: ENSP00000356995
MKSRQKGKKKGSAKERVFGCDLQEHLQHSGQEVPQVLKSCAEFVEEYGVVDGIYRLSGVSSNIQKLRQEFESERKPDLRRDVYLQDIHCVSSLCKAYFRELPDPLLTYRLYDKFAEAVGVQLEPERLVKILEVLRELPVPNYRTLEFLMRHLVHMASFSAQTNMHARNLAIVWAPNLLRSKDIEASGFNGTAAFMEVRVQSIVVEFILTHVDQLFGGAALSGGEVESGWRSLPGTRASGSPEDLMPRPLPYHLPSILQAGDGPPQMRPYHTIIEIAEHKRKGSLKVRKWRSIFNLGRSGHETKRKLPRGAEDREDKSNKGTLRPAKSMDSLSAAAGASDEPEGLVGPSSPRPSPLLPESLENDSIEAAEGEQEPEAEALGGTNSEPGTPRAGRSAIRAGGSSRAERCAGVHISDPYNVNLPLHITSILSVPPNIISNVSLARLTRGLECPALQHRPSPASGPGPGPGLGPGPPDEKLEASPASSPLADSGPDDLAPALEDSLSQEVQDSFSFLEDSSSSEPEWVGAEDGEVAQAEAAGAAFSPGEDDPGMGYLEELLGVGPQVEEFSVEPPLDDLSLDEAQFVLAPSCCSLDSAGPRPEVEEENGEEVFLSAYDDLSPLLGPKPPIWKGSGSLEGEAAGCGRQALGQGGEEQACWEVGEDKQAEPGGRLDIREEAEGTPQPPQPEEMEPEGQPSPDGCLCPCSLGLGGVGMRLASTLVQVQQVRSVPVVPPKPQFAKMPSAMCSKIHVAPANPCPRPGRLDGTPGERAWGSRASRSSWRNGGSLSFDAAVALARDRQRTEAQGVRRTQTCTEGGDYCLIPRTSPCSMISAHSPRPLSCLELPSEGAEGSGSRSRLSLPPREPQVPDPLLSSQRRSYAFETQANPGKGEGL

SEQ ID NO: 73344 - protein, 63 aa, Homo sapiens
  Payload ID: 14518
  Gene Symbol: ARHGAP30
  Gene Name: Rho GTPase activating protein 30
  ENSP ID: ENSP00000356997
MKSRQKGKKKGSAKERVFGCDLQEHLQHSGQEGSHSVTQQARVRLPAALASWAQVILPYQPPE

SEQ ID NO: 73345 - protein, 69 aa, Homo sapiens
  Payload ID: 14518
  Gene Symbol: ARHGAP30
  Gene Name: Rho GTPase activating protein 30
  ENSP ID: ENSP00000431291
MKSRQKGKKKGSAKERVFGCDLQEHLQHSGQEVPQVLKSCAEFVEEYGVVDGIYRLSGVSSNIQKLRRL

SEQ ID NO: 73346 - protein, 41 aa, Homo sapiens
  Payload ID: 14518
  Gene Symbol: ARHGAP30
  Gene Name: Rho GTPase activating protein 30
  ENSP ID: ENSP00000431387
MKSRQKGKKKGSAKERVFGCDLQEHLQHSGQEGGCRSAIGT

SEQ ID NO: 73347 - protein, 1444 aa, Homo sapiens
  Payload ID: 14519
  Gene Symbol: ARHGAP31
  Gene Name: Rho GTPase activating protein 31
  Uniprot ID: Q2M1Z3
  ENSP ID: ENSP00000264245
MKNKGAKQKLKRKGAASAFGCDLTEYLESSGQDVPYVLKSCAEFIETHGIVDGIYRLSGVTSNIQRLRQEFGSDQCPDLTREVYLQDIHCVGSLCKLYFRELPNPLLTYELYEKFTEAVSHCPEEGQLARIQNVIQELPPSHYRTLEYLIRHLAHIASFSSKTNMHARNLALVWAPNLLRSKEIEATGCNGDAAFLAVRVQQVVIEFILNHVDQIFNNGAPGSLENDENRPIMKSLTLPALSLPMKLVSLEEAQARSLATNHPARKERRENSLPEIVPPMGTLFHTVLELPDNKRKLSSKSKKWKSIFNLGRSGSDSKSKLSRNGSVFVRGQRLSVEKATIRPAKSMDSLCSVPVEGKETKGNFNRTVTTGGFFIPATKMHSTGTGSSCDLTKQEGEWGQEGMPPGAEGGFDVSSDRSHLQGAQARPPPEQLKVFRPVEDPESEQTAPKMLGMFYTSNDSPSKSVFTSSLFQMEPSPRNQRKALNISEPFAVSVPLRVSAVISTNSTPCRTPPKELQSLSSLEEFSFHGSESGGWPEEEKPLGAETSAASVPKKAGLEDAKAVPEAPGTVECSKGLSQEPGAHLEEKKTPESSLSSQHLNELEKRPNPEKVVEEGREAGEMESSTLQESPRARAEAVLLHEMDEDDLANALIWPEIQQELKIIESEEELSSLPPPALKTSPIQPILESSLGPFIPSEPPGSLPCGSFPAPVSTPLEVWTRDPANQSTQGASTAASREKPEPEQGLHPDLASLAPLEIVPFEKASPQATVEVGGPGNLSPPLPPAPPPPTPLEESTPVLLSKGGPEREDSSRKLRTDLYIDQLKSQDSPEISSLCQGEEATPRHSDKQNSKNAASEGKGCGFPSPTREVEIVSQEEEDVTHSVQEPSDCDEDDTVTDIAQHGLEMVEPWEEPQWVTSPLHSPTLKDAHKAQVQGLQGHQLEKRLSHRPSLRQSHSLDSKPTVKSQWTLEVPSSSSCANLETERNSDPLQPQAPRREITGWDEKALRSFREFSGLKGAEAPPNQKGPSGVQPNPAETSPISLAEGKELGTHLGHSSPQIRQGGVPGPESSKESSPSVQDSTSPGEHPAKLQLKSTECGPPKGKNRPSSLNLDPAIPIADLFWFENVASFSSPGMQVSEPGDPKVTWMTSSYCKADPWRVYSQDPQDLDIVAHALTGRRNSAPVSVSAVRTSFMVKMCQARAVPVIPPKIQYTQIPQPLPSQSSGENGVQPLERSQEGPSSTSGTTQKPAKDDSPSSLESSKEEKPKQDPGAIKSSPVDATAPCMCEGPTLSPEPGSSNLLSTQDAVVQCRKRMSETEPSGDNLLSSKLERPSGGSKPFHRSRPGRPQSLILFSPPFPIMDHLPPSSTVTDSKVLLSPIRSPTQTVSPGLLCGELAENTWVTPEGVTLRNKMTIPKNGQRLETSTSCFYQPQRRSVILDGRSGRQIE

SEQ ID NO: 73348 - protein, 165 aa, Homo sapiens
  Payload ID: 14519
  Gene Symbol: ARHGAP31
  Gene Name: Rho GTPase activating protein 31
  ENSP ID: ENSP00000418429
MCHLVPYVLKSCAEFIETHGIVDGIYRLSGVTSNIQRLRQEFGSDQCPDLTREVYLQDIHCVGSLCKLYFRELPNPLLTYELYEKFTEAVSHCPEEGQLARIQNVIQELPPSHYRTLEYLIRHLAHIASFSSKTNMHARNLALVWAPNLLRSKEIEATGCNGDAA

SEQ ID NO: 73349 - protein, 2087 aa, Homo sapiens
  Payload ID: 14520
  Gene Symbol: ARHGAP32
  Gene Name: Rho GTPase activating protein 32
  Uniprot ID: A7KAX9
  ENSP ID: ENSP00000310561
METESESSTLGDDSVFWLESEVIIQVTDCEEEEREEKFRKMKSSVHSEEDDFVPELHRNVHPRERPDWEETLSAMARGADVPEIPGDLTLKTCGSTASMKVKHVKKLPFTKGHFPKMAECAHFHYENVEFGSIQLSLSEEQNEVMKNGCESKELVYLVQIACQGKSWIVKRSYEDFRVLDKHLHLCIYDRRFSQLSELPRSDTLKDSPESVTQMLMAYLSRLSAIAGNKINCGPALTWMEIDNKGNHLLVHEESSINTPAVGAAHVIKRYTARAPDELTLEVGDIVSVIDMPPKVLSTWWRGKHGFQVGLFPGHCVELINQKVPQSVTNSVPKPVSKKHGKLITFLRTFMKSRPTKQKLKQRGILKERVFGCDLGEHLLNSGFEVPQVLQSCTAFIERYGIVDGIYRLSGVASNIQRLRHEFDSEHVPDLTKEPYVQDIHSVGSLCKLYFRELPNPLLTYQLYEKFSDAVSAATDEERLIKIHDVIQQLPPPHYRTLEFLMRHLSLLADYCSITNMHAKNLAIVWAPNLLRSKQIESACFSGTAAFMEVRIQSVVVEFILNHVDVLFSGRISMAMQEGAASLSRPKSLLVSSPSTKLLTLEEAQARTQAQVNSPIVTENKYIEVGEGPAALQGKFHTIIEFPLERKRPQNKMKKSPVGSWRSFFNLGKSSSVSKRKLQRNESEPSEMKAMALKGGRAEGTLRSAKSEESLTSLHAVDGDSKLFRPRRPRSSSDALSASFNGEMLGNRCNSYDNLPHDNESEEEGGLLHIPALMSPHSAEDVDLSPPDIGVASLDFDPMSFQCSPPKAESECLESGASFLDSPGYSKDKPSANKKDAETGSSQCQTPGSTASSEPVSPLQEKLSPFFTLDLSPTEDKSSKPSSFTEKVVYAFSPKIGRKLSKSPSMSISEPISVTLPPRVSEVIGTVSNTTAQNASSSTWDKCVEERDATNRSPTQIVKMKTNETVAQEAYESEVQPLDQVAAEEVELPGKEDQSVSSSQSKAVASGQTQTGAVTHDPPQDSVPVSSVSLIPPPPPPKNVARMLALALAESAQQASTQSLKRPGTSQAGYTNYGDIAVATTEDNLSSSYSAVALDKAYFQTDRPAEQFHLQNNAPGNCDHPLPETTATGDPTHSNTTESGEQHHQVDLTGNQPHQAYLSGDPEKARITSVPLDSEKSDDHVSFPEDQSGKNSMPTVSFLDQDQSPPRFYSGDQPPSYLGASVDKLHHPLEFADKSPTPPNLPSDKIYPPSGSPEENTSTATMTYMTTTPATAQMSTKEASWDVAEQPTTADFAAATLQRTHRTNRPLPPPPSQRSAEQPPVVGQVQAATNIGLNNSHKVQGVVPVPERPPEPRAMDDPASAFISDSGAAAAQCPMATAVQPGLPEKVRDGARVPLLHLRAESVPAHPCGFPAPLPPTRMMESKMIAAIHSSSADATSSSNYHSFVTASSTSVDDALPLPLPVPQPKHASQKTVYSSFARPDVTTEPFGPDNCLHFNMTPNCQYRPQSVPPHHNKLEQHQVYGARSEPPASMGLRYNTYVAPGRNASGHHSKPCSRVEYVSSLSSSVRNTCYPEDIPPYPTIRRVQSLHAPPSSMIRSVPISRTEVPPDDEPAYCPRPLYQYKPYQSSQARSDYHVTQLQPYFENGRVHYRYSPYSSSSSSYYSPDGALCDVDAYGTVQLRPLHRLPNRDFAFYNPRLQGKSLYSYAGLAPRPRANVTGYFSPNDHNVVSMPPAADVKHTYTSWDLEDMEKYRMQSIRRESRARQKVKGPVMSQYDNMTPAVQDDLGGIYVIHLRSKSDPGKTGLLSVAEGKESRHAAKAISPEGEDRFYRRHPEAEMDRAHHHGGHGSTQPEKPSLPQKQSSLRSRKLPDMGCSLPEHRAHQEASHRQFCESKNGPPYPQGAGQLDYGSKGIPDTSEPVSYHNSGVKYAASGQESLRLNHKEVRLSKEMERPWVRQPSAPEKHSRDCYKEEEHLTQSIVPPPKPERSHSLKLHHTQNVERDPSVLYQYQPHGKRQSSVTVVSQYDNLEDYHSLPQHQRGVFGGGGMGTYVPPGFPHPQSRTYATALGQGAFLPAELSLQHPETQIHAE

SEQ ID NO: 73350 - protein, 1738 aa, Homo sapiens
  Payload ID: 14520
  Gene Symbol: ARHGAP32
  Gene Name: Rho GTPase activating protein 32
  Uniprot ID: A7KAX9
  ENSP ID: ENSP00000376425
MKSRPTKQKLKQRGILKERVFGCDLGEHLLNSGFEVPQVLQSCTAFIERYGIVDGIYRLSGVASNIQRLRHEFDSEHVPDLTKEPYVQDIHSVGSLCKLYFRELPNPLLTYQLYEKFSDAVSAATDEERLIKIHDVIQQLPPPHYRTLEFLMRHLSLLADYCSITNMHAKNLAIVWAPNLLRSKQIESACFSGTAAFMEVRIQSVVVEFILNHVDVLFSGRISMAMQEGAASLSRPKSLLVSSPSTKLLTLEEAQARTQAQVNSPIVTENKYIEVGEGPAALQGKFHTIIEFPLERKRPQNKMKKSPVGSWRSFFNLGKSSSVSKRKLQRNESEPSEMKAMALKGGRAEGTLRSAKSEESLTSLHAVDGDSKLFRPRRPRSSSDALSASFNGEMLGNRCNSYDNLPHDNESEEEGGLLHIPALMSPHSAEDVDLSPPDIGVASLDFDPMSFQCSPPKAESECLESGASFLDSPGYSKDKPSANKKDAETGSSQCQTPGSTASSEPVSPLQEKLSPFFTLDLSPTEDKSSKPSSFTEKVVYAFSPKIGRKLSKSPSMSISEPISVTLPPRVSEVIGTVSNTTAQNASSSTWDKCVEERDATNRSPTQIVKMKTNETVAQEAYESEVQPLDQVAAEEVELPGKEDQSVSSSQSKAVASGQTQTGAVTHDPPQDSVPVSSVSLIPPPPPPKNVARMLALALAESAQQASTQSLKRPGTSQAGYTNYGDIAVATTEDNLSSSYSAVALDKAYFQTDRPAEQFHLQNNAPGNCDHPLPETTATGDPTHSNTTESGEQHHQVDLTGNQPHQAYLSGDPEKARITSVPLDSEKSDDHVSFPEDQSGKNSMPTVSFLDQDQSPPRFYSGDQPPSYLGASVDKLHHPLEFADKSPTPPNLPSDKIYPPSGSPEENTSTATMTYMTTTPATAQMSTKEASWDVAEQPTTADFAAATLQRTHRTNRPLPPPPSQRSAEQPPVVGQVQAATNIGLNNSHKVQGVVPVPERPPEPRAMDDPASAFISDSGAAAAQCPMATAVQPGLPEKVRDGARVPLLHLRAESVPAHPCGFPAPLPPTRMMESKMIAAIHSSSADATSSSNYHSFVTASSTSVDDALPLPLPVPQPKHASQKTVYSSFARPDVTTEPFGPDNCLHFNMTPNCQYRPQSVPPHHNKLEQHQVYGARSEPPASMGLRYNTYVAPGRNASGHHSKPCSRVEYVSSLSSSVRNTCYPEDIPPYPTIRRVQSLHAPPSSMIRSVPISRTEVPPDDEPAYCPRPLYQYKPYQSSQARSDYHVTQLQPYFENGRVHYRYSPYSSSSSSYYSPDGALCDVDAYGTVQLRPLHRLPNRDFAFYNPRLQGKSLYSYAGLAPRPRANVTGYFSPNDHNVVSMPPAADVKHTYTSWDLEDMEKYRMQSIRRESRARQKVKGPVMSQYDNMTPAVQDDLGGIYVIHLRSKSDPGKTGLLSVAEGKESRHAAKAISPEGEDRFYRRHPEAEMDRAHHHGGHGSTQPEKPSLPQKQSSLRSRKLPDMGCSLPEHRAHQEASHRQFCESKNGPPYPQGAGQLDYGSKGIPDTSEPVSYHNSGVKYAASGQESLRLNHKEVRLSKEMERPWVRQPSAPEKHSRDCYKEEEHLTQSIVPPPKPERSHSLKLHHTQNVERDPSVLYQYQPHGKRQSSVTVVSQYDNLEDYHSLPQHQRGVFGGGGMGTYVPPGFPHPQSRTYATALGQGAFLPAELSLQHPETQIHAE

SEQ ID NO: 73351 - protein, 178 aa, Homo sapiens
  Payload ID: 14520
  Gene Symbol: ARHGAP32
  Gene Name: Rho GTPase activating protein 32
  ENSP ID: ENSP00000432303
MKSSVHSEEDDFVPELHRNVHPRERPDWEETLSAMARGADVPEIPGDLTLKTCGSTASMKVKHVKKSTTPGLMGCDNIHRLPFTKGHFPKMAECAHFHYENVEFGSIQLSLSEEQNEVMKNGCESKELVYLVQIACQGKSWIVKRSYEDFRVLDKHLHLCIYDRRFSQLSELPRSDTL

SEQ ID NO: 73352 - protein, 946 aa, Homo sapiens
  Payload ID: 14520
  Gene Symbol: ARHGAP32
  Gene Name: Rho GTPase activating protein 32
  ENSP ID: ENSP00000432468
MARGADVPEIPGDLTLKTCGSTASMKVKHVKKLPFTKGHFPKMAECAHFHYENVEFGSIQLSLSEEQNEVMKNGCESKELVYLVQIACQGKSWIVKRSYEDFRVLDKHLHLCIYDRRFSQLSELPRSDTLKDSPESVTQMLMAYLSRLSAIAGNKINCGPALTWMEIDNKGNHLLVHEESSINTPAVGAAHVIKRYTARAPDELTLEVGDIVSVIDMPPKVLSTWWRGKHGFQVGLFPGHCVELINQKVPQSVTNSVPKPVSKKHGKLITFLRTFMKSRPTKQKLKQRGILKERVFGCDLGEHLLNSGFEVPQVLQSCTAFIERYGIVDGIYRLSGVASNIQRLRHEFDSEHVPDLTKEPYVQDIHSVGSLCKLYFRELPNPLLTYQLYEKFSDAVSAATDEERLIKIHDVIQQLPPPHYRTLEFLMRHLSLLADYCSITNMHAKNLAIVWAPNLLRSKQIESACFSGTAAFMEVRIQSVVVEFILNHVDVLFSGRISMAMQEGAASLSRPKSLLVSSPSTKLLTLEEAQARTQAQVNSPIVTENKYIEVGEGPAALQGKFHTIIEFPLERKRPQNKMKKSPVGSWRSFFNLGKSSSVSKRKLQRNESEPSEMKAMALKGGRAEGTLRSAKSEESLTSLHAVDGDSKLFRPRRPRSSSDALSASFNGEMLGNRCNSYDNLPHDNESEEEGGLLHIPALMSPHSAEDVDLSPPDIGVASLDFDPMSFQCSPPKAESECLESGASFLDSPGYSKDKPSANKKDAETGSSQCQTPGSTASSEPVSPLQEKLSPFFTLDLSPTEDKSSKPSSFTEKVVYAFSPKIGRKLSKSPSMSISEPISVTLPPRVSEVIGTVSNTTAQNASSSTWDKCVEERDATNRSPTQIVKMKTNETVAQEAYESEVQPLDQVAAEEVELPGKEDQSVSSSQSKAVASGQTQTGTVCFPPFFL

SEQ ID NO: 73353 - protein, 1738 aa, Homo sapiens; identical to SEQ ID NO: 73350
  Payload ID: 14520
  Gene Symbol: ARHGAP32
  Gene Name: Rho GTPase activating protein 32
  Uniprot ID: A7KAX9
  ENSP ID: ENSP00000432862

SEQ ID NO: 73354 - protein, 748 aa, Homo sapiens
  Payload ID: 14521
  Gene Symbol: ARHGAP33
  Gene Name: Rho GTPase activating protein 33
  ENSP ID: ENSP00000007510
MVARSTDSLDGPGEGSVQPLPTAGGPSVKGKPGKRLSAPRGPFPRLADCAHFHYENVDFGHIQLLLSPDREGPSLSGENELVFGVQVTCQGRSWPVLRSYDDFRSLDAHLHRCIFDRRFSCLPELPPPPEGARAAQMLVPLLLQYLETLSGLVDSNLNCGPVLTWMELDNHGRRLLLSEEASLNIPAVAAAHVIKRYTAQAPDELSFEVGDIVSVIDMPPTEDRSWWRGKRGFQVGFFPSECVELFTERPGPGLKADADGPPCGIPAPQGISSLTSAVPRPRGKLAGLLRTFMRSRPSRQRLRQRGILRQRVFGCDLGEHLSNSGQDVPQVLRCCSEFIEAHGVVDGIYRLSGVSSNIQRLRHEFDSERIPELSGPAFLQDIHSVSSLCKLYFRELPNPLLTYQLYGKFSEAMSVPGEEERLVRVHDVIQQLPPPHYRTLEYLLRHLARMARHSANTSMHARNLAIVWAPNLLRSMELESVGMGGAAAFREVRVQSVVVEFLLTHVDVLFSDTFTSAGLDPAGRCLLPRPKSLAGSCPSTRLLTLEEAQARTQGRLGTPTEPTTPKAPASPAERRKGERGEKQRKPGGSSWKTFFALGRGPSVPRKKPLPWLGGTRAPPQPSGSRPDTVTLRSAKSEESLSSQASGAGLQRLHRLRRPHSSSDAFPVGPAPAGSCESLSSSSSSESSSSESSSSSSESSAAGLGALSGSPSHRTSAWLDDGDELDFSPPRYPTPSWSLHSEGQTRSYC

SEQ ID NO: 73355 - protein, 1126 aa, Homo sapiens
  Payload ID: 14521
  Gene Symbol: ARHGAP33
  Gene Name: Rho GTPase activating protein 33
  Uniprot ID: O14559
  ENSP ID: ENSP00000320038
MVARSTDSLDGPGEGSVQPLPTAGGPSVKGKPGKRLSAPRGPFPRLADCAHFHYENVDFGHIQLLLSPDREGPSLSGENELVFGVQVTCQGRSWPVLRSYDDFRSLDAHLHRCIFDRRFSCLPELPPPPEGARAAQMLVPLLLQYLETLSGLVDSNLNCGPVLTWMELDNHGRRLLLSEEASLNIPAVAAAHVIKRYTAQAPDELSFEVGDIVSVIDMPPTEDRSWWRGKRGFQVGFFPSECVELFTERPGPGLKADADGPPCGIPAPQGISSLTSAVPRPRGKLAGLLRTFMRSRPSRQRLRQRGILRQRVFGCDLGEHLSNSGQDVPQVLRCCSEFIEAHGVVDGIYRLSGVSSNIQRLRHEFDSERIPELSGPAFLQDIHSVSSLCKLYFRELPNPLLTYQLYGKFSEAMSVPGEEERLVRVHDVIQQLPPPHYRTLEYLLRHLARMARHSANTSMHARNLAIVWAPNLLRSMELESVGMGGAAAFREVRVQSVVVEFLLTHVDVLFSDTFTSAGLDPAGRCLLPRPKSLAGSCPSTRLLTLEEAQARTQGRLGTPTEPTTPKAPASPAERRKGERGEKQRKPGGSSWKTFFALGRGPSVPRKKPLPWLGGTRAPPQPSGSRPDTVTLRSAKSEESLSSQASGAELLGAGGAPASATPTPALSPGRSLRPHLIPLLLRGAEAPLTDACQQEMCSKLRGAQGPLGPDMESPLPPPPLSLLRPGGAPPPPPKNPARLMALALAERAQQVAEQQSQQECGGTPPASQSPFHRSLSLEVGGEPLGTSGSGPPPNSLAHPGAWVPGPPPYLPRQQSDGSLLRSQRPMGTSRRGLRGPAQVSAQLRAGGGGRDAPEAAAQSPCSVPSQVPTPGFFSPAPRECLPPFLGVPKPGLYPLGPPSFQPSSPAPVWRSSLGPPAPLDRGENLYYEIGASEGSPYSGPTRSWSPFRSMPPDRLNASYGMLGQSPPLHRSPDFLLSYPPAPSCFPPDHLGYSAPQHPARRPTPPEPLYVNLALGPRGPSPASSSSSSPPAHPRSRSDPGPPVPRLPQKQRAPWGPRTPHRVPGPWGPPEPLLLYRAAPPAYGRGGELHRGSLYRNGGQRGEGAGPPPPYPTPSWSLHSEGQTRSYC

SEQ ID NO: 73356 - protein, 1123 aa, Homo sapiens
  Payload ID: 14521
  Gene Symbol: ARHGAP33
  Gene Name: Rho GTPase activating protein 33
  Uniprot ID: O14559
  ENSP ID: ENSP00000368227
MLVPLLLQYLETLSGLVDSNLNCGPVLTWMELDNHGRRLLLSEEASLNIPAVAAAHVIKRYTAQAPDELSFEVGDIVSVIDMPPTEDRSWWRGKRGFQVGFFPSECVELFTERPGPGLKADADGPPCGIPAPQGISSLTSAVPRPRGKLAGLLRTFMRSRPSRQRLRQRGILRQRVFGCDLGEHLSNSGQDVPQVLRCCSEFIEAHGVVDGIYRLSGVSSNIQRLRHEFDSERIPELSGPAFLQDIHSVSSLCKLYFRELPNPLLTYQLYGKFSEAMSVPGEEERLVRVHDVIQQLPPPHYRTLEYLLRHLARMARHSANTSMHARNLAIVWAPNLLRSMELESVGMGGAAAFREVRVQSVVVEFLLTHVDVLFSDTFTSAGLDPAGRCLLPRPKSLAGSCPSTRLLTLEEAQARTQGRLGTPTEPTTPKAPASPAERRKGERGEKQRKPGGSSWKTFFALGRGPSVPRKKPLPWLGGTRAPPQPSGSRPDTVTLRSAKSEESLSSQASGAGLQRLHRLRRPHSSSDAFPVGPAPAGSCESLSSSSSSESSSSESSSSSSESSAAGLGALSGSPSHRTSAWLDDGDELDFSPPRCLEGLRGLDFDPLTFRCSSPTPGDPAPPASPAPPAPASAFPPRVTPQAISPRGPTSPASPAALDISEPLAVSVPPAVLELLGAGGAPASATPTPALSPGRSLRPHLIPLLLRGAEAPLTDACQQEMCSKLRGAQGPLGPDMESPLPPPPLSLLRPGGAPPPPPKNPARLMALALAERAQQVAEQQSQQECGGTPPASQSPFHRSLSLEVGGEPLGTSGSGPPPNSLAHPGAWVPGPPPYLPRQQSDGSLLRSQRPMGTSRRGLRGPAQVPTPGFFSPAPRECLPPFLGVPKPGLYPLGPPSFQPSSPAPVWRSSLGPPAPLDRGENLYYEIGASEGSPYSGPTRSWSPFRSMPPDRLNASYGMLGQSPPLHRSPDFLLSYPPAPSCFPPDHLGYSAPQHPARRPTPPEPLYVNLALGPRGPSPASSSSSSPPAHPRSRSDPGPPVPRLPQKQRAPWGPRTPHRVPGPWGPPEPLLLYRAAPPAYGRGGELHRGSLYRNGGQRGEGAGPPPPYPTPSWSLHSEGQTRSYC

SEQ ID NO: 73357 - protein, 98 aa, Homo sapiens
  Payload ID: 14521
  Gene Symbol: ARHGAP33
  Gene Name: Rho GTPase activating protein 33
  ENSP ID: ENSP00000465411
MVARSTDSLDGPGEGSVQPLPTAGGPSVKGKPGKRLSAPRGPFPRLADCAHFHYENVDFGHIQLLLSPDREGPSLSGENELVFGVQVTCQCEIIKAAG

SEQ ID NO: 73358 - protein, 863 aa, Homo sapiens
  Payload ID: 14521
  Gene Symbol: ARHGAP33
  Gene Name: Rho GTPase activating protein 33
  ENSP ID: ENSP00000466443
  MOD_RES (1)..(1): Any amino acid
XHDVIQQLPPPHYRTLEYLLRHLARMARHSANTSMHARNLAIVWAPNLLRSMELESVGMGGAAAFREVRVQSVVVEFLLTHVDVLFSDTFTSAGLDPAGRCLLPRPKSLAGSCPSTRLLTLEEAQARTQGRLGTPTEPTTPKAPASPAERRKGERGEKQRKPGGSSWKTFFALGRGPSVPRKKPLPWLGGTRAPPQPSGSRPDTVTLRSAKSEESLSSQASGAGLQRLHRLRRPHSSSDAFPVGPAPAGSCESLSSSSSSESSSSESSSSSSESSAAGLGALSGSPSHRTSAWLDDGDELDFSPPRCLEGLRGLDFDPLTFRCSSPTPGDPAPPASPAPPAPASAFPPRVTPQAISPRGPTSPASPAALDISEPLAVSVPPAVLELLGAGGAPASATPTPALSPGRSLRPHLIPLLLRGAEAPLTDACQQEMCSKLRGAQGPLGPDMESPLPPPPLSLLRPGGAPPPPPKNPARLMALALAERAQQVAEQQSQQECGGTPPASQSPFHRSLSLEVGGEPLGTSGSGPPPNSLAHPGAWVPGPPPYLPRQQSDGSLLRSQRPMGTSRRGLRGPAQVSAQLRAGGGGRDAPEAAAQSPCSVPSQVPTPGFFSPAPRECLPPFLGVPKPGLYPLGPPSFQPSSPAPVWRSSLGPPAPLDRGENLYYEIGASEGSPYSGPTRSWSPFRSMPPDRLNASYGMLGQSPPLHRSPDFLLSYPPAPSCFPPDHLGYSAPQHPARRPTPPEPLYVNLALGPRGPSPASSSSSSPPAHPRSRSDPGPPVPRLPQKQRAPWGPRTPHRVPGPWGPPEPLLLYRAAPPAYGRGGELHRGSLYRNGGQRGEGAGPPPPYPTPSWSLHSEGQTRSYC

SEQ ID NO: 73359 - protein, 662 aa, Homo sapiens
  Payload ID: 14521
  Gene Symbol: ARHGAP33
  Gene Name: Rho GTPase activating protein 33
  ENSP ID: ENSP00000467844
  MOD_RES (1)..(1): Any amino acid
XHEFDSERIPELSGPAFLQDIHSVSSLCKLYFRELPNPLLTYQLYGKFSEAMSVPGEEERLVRVHDVIQQLPPPHYRTLEYLLRHLARMARHSANTSMHARNLAIVWAPNLLRSMELESVGMGGAAAFREVRVQSVVVEFLLTHVDVLFSDTFTSAGLDPAGRCLLPRPKSLAGSCPSTRLLTLEEAQARTQGRLGTPTEPTTPKAPASPAERRKGERGEKQRKPGGSSWKTFFALGRGPSVPRKKPLPWLGGTRAPPQPSGSRPDTVTLRSAKSEESLSSQASGAGLQRLHRLRRPHSSSDAFPVGPAPAGSCESLSSSSSSESSSSESSSSSSESSAAGLGALSGSPSHRTSAWLDDGDELDFSPPRCLEGLRGLDFDPLTFRCSSPTPGDPAPPASPAPPAPASAFPPRVTPQAISPRGPTSPASPAALDISEPLAVSVPPAVLELLGAGGAPASATPTPALSPGRSLRPHLIPLLLRGAEAPLTDACQQEMCSKLRGAQGPLGPDMESPLPPPPLSLLRPGGAPPPPPKNPARLMALALAERAQQVAEQQSQQECGGTPPASQSPFHRSLSLEVGGEPLGTSGSGPPPNSLAHPGAWVPGPPPYLPRQQSDGSLLRSQRPMGTSRRGLRGPAQEPPACPDLCTGMGGQLLPFFPHMPH

SEQ ID NO: 73360 - protein, 1499 aa, Homo sapiens
  Payload ID: 14522
  Gene Symbol: ARHGAP35
  Gene Name: Rho GTPase activating protein 35
  Uniprot ID: Q9NRY4
  ENSP ID: ENSP00000385720
MMMARKQDVRIPTYNISVVGLSGTEKEKGQCGIGKSCLCNRFVRPSADEFHLDHTSVLSTSDFGGRVVNNDHFLYWGEVSRSLEDCVECKMHIVEQTEFIDDQTFQPHRSTALQPYIKRAAATKLASAEKLMYFCTDQLGLEQDFEQKQMPDGKLLVDGFLLGIDVSRGMNRNFDDQLKFVSNLYNQLAKTKKPIVVVLTKCDEGVERYIRDAHTFALSKKNLQVVETSARSNVNVDLAFSTLVQLIDKSRGKTKIIPYFEALKQQSQQIATAKDKYEWLVSRIVKNHNENWLSVSRKMQASPEYQDYVYLEGTQKAKKLFLQHIHRLKHEHIERRRKLYLAALPLAFEALIPNLDEIDHLSCIKAKKLLETKPEFLKWFVVLEETPWDATSHIDNMENERIPFDLMDTVPAEQLYEAHLEKLRNERKRVEMRRAFKENLETSPFITPGKPWEEARSFIMNEDFYQWLEESVYMDIYGKHQKQIIDKAKEEFQELLLEYSELFYELELDAKPSKEKMGVIQDVLGEEQRFKALQKLQAERDALILKHIHFVYHPTKETCPSCPACVDAKIEHLISSRFIRPSDRNQKNSLSDPNIDRINLVILGKDGLARELANEIRALCTNDDKYVIDGKMYELSLRPIEGNVRLPVNSFQTPTFQPHGCLCLYNSKESLSYVVESIEKSRESTLGRRDNHLVHLPLTLILVNKRGDTSGETLHSLIQQGQQIASKLQCVFLDPASAGIGYGRNINEKQISQVLKGLLDSKRNLNLVSSTASIKDLADVDLRIVMCLMCGDPFSADDILFPVLQSQTCKSSHCGSNNSVLLELPIGLHKKRIELSVLSYHSSFSIRKSRLVHGYIVFYSAKRKASLAMLRAFLCEVQDIIPIQLVALTDGAVDVLDNDLSREQLTEGEEIAQEIDGRFTSIPCSQPQHKLEIFHPFFKDVVEKKNIIEATHMYDNAAEACSTTEEVFNSPRAGSPLCNSNLQDSEEDIEPSYSLFREDTSLPSLSKDHSKLSMELEGNDGLSFIMSNFESKLNNKVPPPVKPKPPVHFEITKGDLSYLDQGHRDGQRKSVSSSPWLPQDGFDPSDYAEPMDAVVKPRNEEENIYSVPHDSTQGKIITIRNINKAQSNGSGNGSDSEMDTSSLERGRKVSIVSKPVLYRTRCTRLGRFASYRTSFSVGSDDELGPIRKKEEDQASQGYKGDNAVIPYETDEDPRRRNILRSLRRNTKKPKPKPRPSITKATWESNYFGVPLTTVVTPEKPIPIFIERCIEYIEATGLSTEGIYRVSGNKSEMESLQRQFDQDHNLDLAEKDFTVNTVAGAMKSFFSELPDPLVPYNMQIDLVEAHKINDREQKLHALKEVLKKFPKENHEVFKYVISHLNKVSHNNKVNLMTSENLSICFWPTLMRPDFSTMDALTATRTYQTIIELFIQQCPFFFYNRPITEPPGARPSSPSAVASTVPFLTSTPVTSQPSPPQSPPPTPQSPMQPLLPSQLQAEHTL

SEQ ID NO: 73361 - protein, 749 aa, Homo sapiens
  Payload ID: 14522
  Gene Symbol: ARHGAP35
  Gene Name: Rho GTPase activating protein 35
  ENSP ID: ENSP00000479487
MMMARKQDVRIPTYNISVVGLSGTEKEKGQCGIGKSCLCNRFVRPSADEFHLDHTSVLSTSDFGGRVVNNDHFLYWGEVSRSLEDCVECKMHIVEQTEFIDDQTFQPHRSTALQPYIKRAAATKLASAEKLMYFCTDQLGLEQDFEQKQMPDGKLLVDGFLLGIDVSRGMNRNFDDQLKFVSNLYNQLAKTKKPIVVVLTKCDEGVERYIRDAHTFALSKKNLQVVETSARSNVNVDLAFSTLVQLIDKSRGKTKIIPYFEALKQQSQQIATAKDKYEWLVSRIVKNHNENWLSVSRKMQASPEYQDYVYLEGTQKAKKLFLQHIHRLKHEHIERRRKLYLAALPLAFEALIPNLDEIDHLSCIKAKKLLETKPEFLKWFVVLEETPWDATSHIDNMENERIPFDLMDTVPAEQLYEAHLEKLRNERKRVEMRRAFKENLETSPFITPGKPWEEARSFIMNEDFYQWLEESVYMDIYGKHQKQIIDKAKEEFQELLLEYSELFYELELDAKPSKEKMGVIQDVLGEEQRFKALQKLQAERDALILKHIHFVYHPTKETCPSCPACVDAKIEHLISSRFIRPSDRNQKNSLSDPNIDRINLVILGKDGLARELANEIRALCTNDDKYVIDGKMYELSLRPIEGNVRLPVNSFQTPTFQPHGCLCLYNSKESLSYVVESIEKSRESTLGRRDNHLVHLPLTLILVNKRGDTSGETLHSLIQQGQQIASKLQCVFLDPASAGAADLSWLGPI

SEQ ID NO: 73362 - protein, 1499 aa, Homo sapiens; identical to SEQ ID NO: 73360
  Payload ID: 14522
  Gene Symbol: ARHGAP35
  Gene Name: Rho GTPase activating protein 35
  Uniprot ID: Q9NRY4
  ENSP ID: ENSP00000483730

SEQ ID NO: 73363 - protein, 547 aa, Homo sapiens
  Payload ID: 14523
  Gene Symbol: ARHGAP36
  Gene Name: Rho GTPase activating protein 36
  Uniprot ID: Q6ZRI8
  ENSP ID: ENSP00000276211
MGGCIPFLKAARALCPRIMPPLLLLSAFIFLVSVLGGAPGHNPDRRTKMVSIHSLSELERLKLQETAYHELVARHFLSEFKPDRALPIDRPNTLDKWFLILRGQQRAVSHKTFGISLEEVLVNEFTRRKHLELTATMQVEEATGQAAGRRRGNVVRRVFGRIRRFFSRRRNEPTLPREFTRRGRRGAVSVDSLAELEDGALLLQTLQLSKISFPIGQRLLGSKRKMSLNPIAKQIPQVVEACCQFIEKHGLSAVGIFTLEYSVQRVRQLREEFDQGLDVVLDDNQNVHDVAALLKEFFRDMKDSLLPDDLYMSFLLTATLKPQDQLSALQLLVYLMPPCHSDTLERLLKALHKITENCEDSIGIDGQLVPGNRMTSTNLALVFGSALLKKGKFGKRESRKTKLGIDHYVASVNVVRAMIDNWDVLFQVPPHIQRQVAKRVWKSSPEALDFIRRRNLRKIQSARIKMEEDALLSDPVETSAEARAAVLAQSKPSDEGSSEEPAVPSGTARSHDDEEGAGNPPIPEQDRPLLRVPREKEAKTGVSYFFP

SEQ ID NO: 73364 - protein, 411 aa, Homo sapiens
  Payload ID: 14523
  Gene Symbol: ARHGAP36
  Gene Name: Rho GTPase activating protein 36
  Uniprot ID: Q6ZRI8
  ENSP ID: ENSP00000359959
MQVEEATGQAAGRRRGNVVRRVFGRIRRFFSRRRNEPTLPREFTRRGRRGAVSVDSLAELEDGALLLQTLQLSKISFPIGQRLLGSKRKMSLNPIAKQIPQVVEACCQFIEKHGLSAVGIFTLEYSVQRVRQLREEFDQGLDVVLDDNQNVHDVAALLKEFFRDMKDSLLPDDLYMSFLLTATLKPQDQLSALQLLVYLMPPCHSDTLERLLKALHKITENCEDSIGIDGQLVPGNRMTSTNLALVFGSALLKKGKFGKRESRKTKLGIDHYVASVNVVRAMIDNWDVLFQVPPHIQRQVAKRVWKSSPEALDFIRRRNLRKIQSARIKMEEDALLSDPVETSAEARAAVLAQSKPSDEGSSEEPAVPSGTARSHDDEEGAGNPPIPEQDRPLLRVPREKEAKTGVSYFFP

SEQ ID NO: 73365 - protein, 535 aa, Homo sapiens
  Payload ID: 14523
  Gene Symbol: ARHGAP36
  Gene Name: Rho GTPase activating protein 36
  Uniprot ID: Q6ZRI8
  ENSP ID: ENSP00000359960
MAWILDCLFASAFEPRPRRVSVLGGAPGHNPDRRTKMVSIHSLSELERLKLQETAYHELVARHFLSEFKPDRALPIDRPNTLDKWFLILRGQQRAVSHKTFGISLEEVLVNEFTRRKHLELTATMQVEEATGQAAGRRRGNVVRRVFGRIRRFFSRRRNEPTLPREFTRRGRRGAVSVDSLAELEDGALLLQTLQLSKISFPIGQRLLGSKRKMSLNPIAKQIPQVVEACCQFIEKHGLSAVGIFTLEYSVQRVRQLREEFDQGLDVVLDDNQNVHDVAALLKEFFRDMKDSLLPDDLYMSFLLTATLKPQDQLSALQLLVYLMPPCHSDTLERLLKALHKITENCEDSIGIDGQLVPGNRMTSTNLALVFGSALLKKGKFGKRESRKTKLGIDHYVASVNVVRAMIDNWDVLFQVPPHIQRQVAKRVWKSSPEALDFIRRRNLRKIQSARIKMEEDALLSDPVETSAEARAAVLAQSKPSDEGSSEEPAVPSGTARSHDDEEGAGNPPIPEQDRPLLRVPREKEAKTGVSYFFP

SEQ ID NO: 73366 - protein, 516 aa, Homo sapiens
  Payload ID: 14523
  Gene Symbol: ARHGAP36
  Gene Name: Rho GTPase activating protein 36
  Uniprot ID: Q6ZRI8
  ENSP ID: ENSP00000408515
MSVLGGAPGHNPDRRTKMVSIHSLSELERLKLQETAYHELVARHFLSEFKPDRALPIDRPNTLDKWFLILRGQQRAVSHKTFGISLEEVLVNEFTRRKHLELTATMQVEEATGQAAGRRRGNVVRRVFGRIRRFFSRRRNEPTLPREFTRRGRRGAVSVDSLAELEDGALLLQTLQLSKISFPIGQRLLGSKRKMSLNPIAKQIPQVVEACCQFIEKHGLSAVGIFTLEYSVQRVRQLREEFDQGLDVVLDDNQNVHDVAALLKEFFRDMKDSLLPDDLYMSFLLTATLKPQDQLSALQLLVYLMPPCHSDTLERLLKALHKITENCEDSIGIDGQLVPGNRMTSTNLALVFGSALLKKGKFGKRESRKTKLGIDHYVASVNVVRAMIDNWDVLFQVPPHIQRQVAKRVWKSSPEALDFIRRRNLRKIQSARIKMEEDALLSDPVETSAEARAAVLAQSKPSDEGSSEEPAVPSGTARSHDDEEGAGNPPIPEQDRPLLRVPREKEAKTGVSYFFP

SEQ ID NO: 73367 - protein, 218 aa, Homo sapiens
  Payload ID: 14523
  Gene Symbol: ARHGAP36
  Gene Name: Rho GTPase activating protein 36
  ENSP ID: ENSP00000409218
MVSIHSLSELERLKLQETAYHELVARHFLSEFKPDRALPIDRPNTLDKWFLILRGQQRAVSHKTFGISLEEVLVNEFTRRKHLELTATMQVEEATGQAAGRRRGNVVRRVFGRIRRFFSRRRNEPTLPREFTRRGRRGAVSVDSLAELEDGALLLQTLQLSKISFPIGQRLLGSKRKMSLNPIAKQIPQVVEACCQFIEKHGLSAVGIFTLEYSVQRV

SEQ ID NO: 73368 - protein, 1083 aa, Homo sapiens
  Payload ID: 14524
  Gene Symbol: ARHGAP39
  Gene Name: Rho GTPase activating protein 39
  Uniprot ID: Q9C0H5
  ENSP ID: ENSP00000276826
MSQTQDYECRSHNVDLPESRIPGSNTRLEWVEIIEPRTRERMYANLVTGECVWDPPAGVRIKRTSENQWWELFDPNTSRFYYYNASTQRTVWHRPQGCDIIPLAKLQTLKQNTESPRASAESSPGRGSSVSREGSTSSSLEPEPDTEKAQELPARAGRPAAFGTVKEDSGSSSPPGVFLEKDYEIYRDYSADGQLLHYRTSSLRWNSGAKERMLIKVADREPSFLAAQGNGYAPDGPPGVRSRRPSGSQHSPSLQTFAPEADGTIFFPERRPSPFLKRAELPGSSSPLLAQPRKPSGDSQPSSPRYGYEPPLYEEPPVEYQAPIYDEPPMDVQFEAGGGYQAGSPQRSPGRKPRPFLQPNKQGPPSPCQQLVLTKQKCPERFLSLEYSPAGKEYVRQLVYVEQAGSSPKLRAGPRHKYAPNPGGGSYSLQPSPCLLRDQRLGVKSGDYSTMEGPELRHSQPPTPLPQAQEDAMSWSSQQDTLSSTGYSPGTRKRKSRKPSLCQATSATPTEGPGDLLVEQPLAEEQPPCGTSLAPVKRAEGEAEGARGAAEPFLAQARLAWEAQQAHFHMKQRSSWDSQQDGSGYESDGALPLPMPGPVVRAFSEDEALAQQENRHWRRGTFEKLGFPQILLEKSVSVQTNLASPEPYLHPSQSEDLAACAQFESSRQSRSGVPSSSCVFPTFTLRKPSSETDIENWASKHFNKHTQGLFRRKVSIANMLAWSSESIKKPMIVTSDRHVKKEACELFKLIQMYMGDRRAKADPLHVALEVATKGWSVQGLRDELYIQLCRQTTENFRLESLARGWELMAICLAFFPPTPKFHSYLEGYIYRHMDPVNDTKGVAISTYAKYCYHKLQKAALTGAKKGLKKPNVEEIRHAKNAVFSPSMFGSALQEVMGMQRERYPERQLPWVQTRLSEEVLALNGDQTEGIFRVPGDIDEVNALKLQVDQWKVPTGLEDPHVPASLLKLWYRELEEPLIPHEFYEQCIAHYDSPEAAVAVVHALPRINRMVLCYLIRFLQVFVQPANVAVTKMDVSNLAMVMAPNCLRCQSDDPRVIFENTRKEMSFLRVLIQHLDTSFMEGVL

SEQ ID NO: 73369 - protein, 1114 aa, Homo sapiens
  Payload ID: 14524
  Gene Symbol: ARHGAP39
  Gene Name: Rho GTPase activating protein 39
  Uniprot ID: Q9C0H5
  ENSP ID: ENSP00000366522
MSQTQDYECRSHNVDLPESRIPGSNTRLEWVEIIEPRTRERMYANLVTGECVWDPPAGVRIKRTSENQWWELFDPNTSRFYYYNASTQRTVWHRPQGCDIIPLAKLQTLKQNTESPRASAESSPGRGSSVSREGSTSSSLEPEPDTEKAQELPARAGRPAAFGTVKEDSGSSSPPGVFLEKDYEIYRDYSADGQLLHYRTSSLRWNSGAKERMLIKVADREPSFLAAQGNGYAPDGPPGVRSRRPSGSQHSPSLQTFAPEADGTIFFPERRPSPFLKRAELPGSSSPLLAQPRKPSGDSQPSSPRYGYEPPLYEEPPVEYQAPIYDEPPMDVQFEAGGGYQAGSPQRSPGRKPRPFLQPNKQGPPSPCQQLVLTKQKCPERFLSLEYSPAGKEYVRQLVYVEQAGSSPKLRAGPRHKYAPNPGGGSYSLQPSPCLLRDQRLGVKSGDYSTMEGPELRHSQPPTPLPQAQEDAMSWSSQQDTLSSTGYSPGTRKRKSRKPSLCQATSATPTEGPGDLLVEQPLAEEQPPCGTSLAPVKRAEGEAEGARGAAEPFLAQARLAWEAQQAHFHMKQRSSWDSQQDGSGYESDGALPLPMPGPVVRAFSEDEALAQQENRHWRRGTFEKLGFPQILLEKSVSVQTNLASPEPYLHPSQSEDLAACAQFESSRQSRSGVPSSSCVFPTFTLRKPSSETDIENWASKHFNKHTQGLFRRKVSIANMLAWSSESIKKPMIVTSDRHVKKEACELFKLIQMYMGDRRAKADPLHVALEVATKGWSVQGLRDELYIQLCRQTTENFRLESLARGWELMAICLAFFPPTPKFHSYLEGYIYRHMDPVNDTKVTQHIKELLERNTKKKSKLRKKPKPYVEEPDGVAISTYAKYCYHKLQKAALTGAKKGLKKPNVEEIRHAKNAVFSPSMFGSALQEVMGMQRERYPERQLPWVQTRLSEEVLALNGDQTEGIFRVPGDIDEVNALKLQVDQWKVPTGLEDPHVPASLLKLWYRELEEPLIPHEFYEQCIAHYDSPEAAVAVVHALPRINRMVLCYLIRFLQVFVQPANVAVTKMDVSNLAMVMAPNCLRCQSDDPRVIFENTRKEMSFLRVLIQHLDTSFMEGVL

SEQ ID NO: 73370 - protein, 946 aa, Homo sapiens
  Payload ID: 14525
  Gene Symbol: ARHGAP4
  Gene Name: Rho GTPase activating protein 4
  Uniprot ID: P98171
  ENSP ID: ENSP00000203786
MAAHGKLRRERGLQAEYETQVKEMRWQLSEQLRCLELQGELRRELLQELAEFMRRRAEVELEYSRGLEKLAERFSSRGGRLGSSREHQSFRKEPSLLSPLHCWAVLLQHTRQQSRESAALSEVLAGPLAQRLSHIAEDVGRLVKKSRDLEQQLQDELLEVVSELQTAKKTYQAYHMESVNAEAKLREAERQEEKRAGRSVPTTTAGATEAGPLRKSSLKKGGRLVEKRQAKFMEHKLKCTKARNEYLLSLASVNAAVSNYYLHDVLDLMDCCDTGFHLALGQVLRSYTAAESRTQASQVQGLGSLEEAVEALDPPGDKAKVLEVHATVFCPPLRFDYHPHDGDEVAEICVEMELRDEILPRAQNIQSRLDRQTIETEEVNKTLKATLQALLEVVASDDGDVLDSFQTSPSTESLKSTSSDPGSRQAGRRRGQQQETETFYLTKLQEYLSGRSILAKLQAKHEKLQEALQRGDKEEQEVSWTQYTQRKFQKSRQPRPSSQYNQRLFGGDMEKFIQSSGQPVPLVVESCIRFINLNGLQHEGIFRVSGAQLRVSEIRDAFERGEDPLVEGCTAHDLDSVAGVLKLYFRSLEPPLFPPDLFGELLASSELEATAERVEHVSRLLWRLPAPVLVVLRYLFTFLNHLAQYSDENMMDPYNLAVCFGPTLLPVPAGQDPVALQGRVNQLVQTLIVQPDRVFPPLTSLPGPVYEKCMAPPSASCLGDAQLESLGADNEPELEAEMPAQEDDLEGVVEAVACFAYTGRTAQELSFRRGDVLRLHERASSDWWRGEHNGMRGLIPHKYITLPAGTEKQVVGAGLQTAGESGSSPEGLLASELVHRPEPCTSPEAMGPSGHRRRCLVPASPEQHVEVDKAVAQNMDSVFKELLGKTSVRQGLGPASTTSPSPGPRSPKAPPSSRLGRNKGFSRGPGAPASPSASHPQGLDTTPKPH

SEQ ID NO: 73371 - protein, 925 aa, Homo sapiens
  Payload ID: 14525
  Gene Symbol: ARHGAP4
  Gene Name: Rho GTPase activating protein 4
  ENSP ID: ENSP00000359033
MAAHGKLRRERGLQAEYETQVKEMRWQLSEQLRCLELQGELRRELLQELAEFMRRRAEVELEYSRGLEKLAERFSSRGGRLGSSREHQSFRKEPSLLSPLHCWAVLLQHTRQQSRESAALSEVLAGPLAQRLSHIAEDVGRLVKKAKKTYQAYHMESVNAEAKLREAERQEEKRAGRSVPTTTAGATEAGPLRKSSLKKGGRLVEKRQAKFMEHKLKCTKARNEYLLSLASVNAAVSNYYLHDVLDLMDCCDTGFHLALGQVLRSYTAAESRTQASQVQGLGSLEEAVEALDPPGDKAKVLEVHATVFCPPLRFDYHPHDGDEVAEICVEMELRDEILPRAQNIQSRLDRQTIETEEVNKTLKATLQALLEVVASDDGDVLDSFQTSPSTESLKSTSSDPGSRQAGRRRGQQQETETFYLTKLQEYLSGRSILAKLQAKHEKLQEALQRGDKEEQEVSWTQYTQRKFQKSRQPRPSSQYNQRLFGGDMEKFIQSSGQPVPLVVESCIRFINLNGLQHEGIFRVSGAQLRVSEIRDAFERGEDPLVEGCTAHDLDSVAGVLKLYFRSLEPPLFPPDLFGELLASSELEATAERVEHVSRLLWRLPAPVLVVLRYLFTFLNHLAQYSDENMMDPYNLAVCFGPTLLPVPAGQDPVALQGRVNQLVQTLIVQPDRVFPPLTSLPGPVYEKCMAPPSASCLGDAQLESLGADNEPELEAEMPAQEDDLEGVVEAVACFAYTGRTAQELSFRRGDVLRLHERASSDWWRGEHNGMRGLIPHKYITLPAGTEKQVVGAGLQTAGESGSSPEGLLASELVHRPEPCTSPEAMGPSGHRRRCLVPASPEQHVEVDKAVAQNMDSVFKELLGKTSVRQGLGPASTTSPSPGPRSPKAPPSSRLGRNKGFSRGPGAPASPSASHPQGLDTTPKPH

SEQ ID NO: 73372 - protein, 986 aa, Homo sapiens
  Payload ID: 14525
  Gene Symbol: ARHGAP4
  Gene Name: Rho GTPase activating protein 4
  Uniprot ID: P98171
  ENSP ID: ENSP00000359045
MAAHGKLRRERGLQAEYETQVKEMRWQLSEQLRCLELQGELRRELLQELAEFMRRRAEVELEYSRGLEKLAERFSSRGGRLGSSREHQSFRKEPSLLSPLHCWAVLLQHTRQQSRESAALSEVLAGPLAQRLSHIAEDVGRLVKKSRDLEQQLQDELLEVVSELQTAKKTYQAYHMESVNAEAKLREAERQEEKRAGRSVPTTTAGATEAGPLRKSSLKKGGRLVEKLWPPQRPVAASSCAPVCWLQAGFLVHPPWWGAMCAPSTHQRQAKFMEHKLKCTKARNEYLLSLASVNAAVSNYYLHDVLDLMDCCDTGFHLALGQVLRSYTAAESRTQASQVQGLGSLEEAVEALDPPGDKAKVLEVHATVFCPPLRFDYHPHDGDEVAEICVEMELRDEILPRAQNIQSRLDRQTIETEEVNKTLKATLQALLEVVASDDGDVLDSFQTSPSTESLKSTSSDPGSRQAGRRRGQQQETETFYLTKLQEYLSGRSILAKLQAKHEKLQEALQRGDKEEQEVSWTQYTQRKFQKSRQPRPSSQYNQRLFGGDMEKFIQSSGQPVPLVVESCIRFINLNGLQHEGIFRVSGAQLRVSEIRDAFERGEDPLVEGCTAHDLDSVAGVLKLYFRSLEPPLFPPDLFGELLASSELEATAERVEHVSRLLWRLPAPVLVVLRYLFTFLNHLAQYSDENMMDPYNLAVCFGPTLLPVPAGQDPVALQGRVNQLVQTLIVQPDRVFPPLTSLPGPVYEKCMAPPSASCLGDAQLESLGADNEPELEAEMPAQEDDLEGVVEAVACFAYTGRTAQELSFRRGDVLRLHERASSDWWRGEHNGMRGLIPHKYITLPAGTEKQVVGAGLQTAGESGSSPEGLLASELVHRPEPCTSPEAMGPSGHRRRCLVPASPEQHVEVDKAVAQNMDSVFKELLGKTSVRQGLGPASTTSPSPGPRSPKAPPSSRLGRNKGFSRGPGAPASPSASHPQGLDTTPKPH

SEQ ID NO: 73373 - protein, 768 aa, Homo sapiens
  Payload ID: 14525
  Gene Symbol: ARHGAP4
  Gene Name: Rho GTPase activating protein 4
  ENSP ID: ENSP00000377322
MAAHGKLRRERGLQAEYETQVKEMRWQLSEQLRCLELQGELRRELLQELAEFMRRRAEVELEYSRGLEKLAERFSSRGGRLGSSREHQSFRKEPSLLSPLHCWAVLLQHTRQQSRESAALSEVLAGPLAQRLSHIAEDVGRLVKKSRDLEQQLQDELLEVVSELQTVAEICVEMELRDEILPRAQNIQSRLDRQTIETEEVNKTLKATLQALLEVVASDDGDVLDSFQTSPSTESLKSTSSDPGSRQAGRRRGQQQETETFYLTKLQEYLSGRSILAKLQAKHEKLQEALQRGDKEEQEVSWTQYTQRKFQKSRQPRPSSQYNQRLFGGDMEKFIQSSGQPVPLVVESCIRFINLNGLQHEGIFRVSGAQLRVSEIRDAFERGEDPLVEGCTAHDLDSVAGVLKLYFRSLEPPLFPPDLFGELLASSELEATAERVEHVSRLLWRLPAPVLVVLRYLFTFLNHLAQYSDENMMDPYNLAVCFGPTLLPVPAGQDPVALQGRVNQLVQTLIVQPDRVFPPLTSLPGPVYEKCMAPPSASCLGDAQLESLGADNEPELEAEMPAQEDDLEGVVEAVACFAYTGRTAQELSFRRGDVLRLHERASSDWWRGEHNGMRGLIPHKYITLPAGTEKQVVGAGLQTAGESGSSPEGLLASELVHRPEPCTSPEAMGPSGHRRRCLVPASPEQHVEVDKAVAQNMDSVFKELLGKTSVRQGLGPASTTSPSPGPRSPKAPPSSRLGRNKGFSRGPGAPASPSASHPQGLDTTPKPH

SEQ ID NO: 73374 - protein, 217 aa, Homo sapiens
  Payload ID: 14525
  Gene Symbol: ARHGAP4
  Gene Name: Rho GTPase activating protein 4
  ENSP ID: ENSP00000385042
MAAHGKLRRERGLQAEYETQVKEMRWQLSEQLRCLELQGELRRELLQELAEFMRRRAEVELEYSRGLEKLAERFSSRGGRLGSSREHQSFRKEPSLLSPLHCWAVLLQHTRQQSRESAALSEVLAGPLAQRLSHIAEDVGRLVKKSRDLEQQLQDELLEVVSELQTHHLALGLPAGQEDVPGISHGERECRGQAPGGRAAGGEAGRPECPHHHRWCH

SEQ ID NO: 73375 - protein, 625 aa, Homo sapiens
  Payload ID: 14525
  Gene Symbol: ARHGAP4
  Gene Name: Rho GTPase activating protein 4
  ENSP ID: ENSP00000397533
MAAHGKLRRERGLQAEYETQVKEMRWQLSEQLRCLELQGELRRELLQELAEFMRRRAEVELEYSRGLEKLAERFSSRGGRLGSSREHQSFRKEPSLLSPLHCWAVLLQHTRQQSRESAALSEVLAGPLAQRLSHIAEDVGRLVKKSRDLEQQLQDELLEVVSELQTAKKTYQAYHMESVNAEAKLREAERQEEKRAGRSVPTTTAGATEAGPLRKSSLKKGGRLVEKRQAKFMEHKLKCTKARNEYLLSLASVNAAVSNYYLHDVLDLMDCCDTGFHLALGQVLRSYTAAESRTQASQVQGLGSLEEAVEALDPPGDKAKVLEVHATVFCPPLRFDYHPHDGDEVAEICVEMELRDEILPRAQNIQSRLDRQTIETEEVNKTLKATLQALLEVVASDDGDVLDSFQTSPSTESLKSTSSDPGSRQAGRRRGQQQETETFYLTKLQEYLSGRSILAKLQAKHEKLQEALQRGDKEEQEVSWTQYTQRKFQKSRQPRPSSQYNQRLFGGDMEKFIQSSGQPVPLVVESCIRFINLNGEDPLVEGCTAHDLDSVAGVLKLYFRSLEPPLFPPDLFGELLASSGTPSWRAWGRTMSRSWKPRCPHRRMTWRGSWRLWPALPTRAAQPRS

SEQ ID NO: 73376 - protein, 214 aa, Homo sapiens
  Payload ID: 14525
  Gene Symbol: ARHGAP4
  Gene Name: Rho GTPase activating protein 4
  ENSP ID: ENSP00000398019
EKRQAKFMEHKLKCTKARNEYLLSLASVNAAVSNYYLHDVLDLMDCCDTGFHLALGQVLRSYTAAESRTQASQVQGLGSLEEAVEALDPPGDKAKVLEVHATVFCPPLRFDYHPHDGDEVAEICVEMELRDEILPRAQNIQSRLDRQTIETEETSPSTESLKSTSSDPGSRQAGRRRGQQQETETFYLTKLQEYLSGRSILAKLQAKHEKLQEA

SEQ ID NO: 73377 - protein, 176 aa, Homo sapiens
  Payload ID: 14525
  Gene Symbol: ARHGAP4
  Gene Name: Rho GTPase activating protein 4
  ENSP ID: ENSP00000398259
MRWQLSEQLRCLELQGELRRELLQELAEFMRRRAEVELEYSRGLEKLAERFSSRGGRLGSSREHQSFRKEPSLLSPLHCWAVLLQHTRQQSRESAALSEVLAGPLAQRLSHIAEDVGRLVKKSRDLEQQLQDELLEVVSELQTAKKTYQAYHMESVNAEAKLREAERQEEKRAGRS

SEQ ID NO: 73378 - protein, 293 aa, Homo sapiens
  Payload ID: 14525
  Gene Symbol: ARHGAP4
  Gene Name: Rho GTPase activating protein 4
  ENSP ID: ENSP00000408656
  MOD_RES (1)..(1): Any amino acid
XKFQKSRQPRPSSQYNQRLFGGDMEKFIQSSGQPVPLVVESCIRFINLNGEDPLVEGCTAHDLDSVAGVLKLYFRSLEPPLFPPDLFGELLASSELEATAERVEHVSRLLWRLPAPVLVVLRYLFTFLNHLAQYSDENMMDPYNLAVCFGPTLLPVPAGQDPVALQGRVNQLVQTLIVQPDRVFPPLTSLPGPVYEKCMAPPSASCLGDAQLESLGADNEPELEAEMPAQEDDLEGVVEAVACFAYTGRTAQELSFRRGDVLRLHERASSDWWRGEHNGMRGLIPHKYITLPA

SEQ ID NO: 73379 - protein, 196 aa, Homo sapiens
  Payload ID: 14525
  Gene Symbol: ARHGAP4
  Gene Name: Rho GTPase activating protein 4
  ENSP ID: ENSP00000411712
  MOD_RES (1)..(1): Any amino acid
XSHIAEDVGRLVKKAKKTYQAYHMESVNAEAKLREAERQEEKRAGRSVPTTTAGATEAGPLRKSSLKKGGRLVEKLWPPQRPVAASSCAPVCWLQAGFLVHPPWWGAMCAPSTHQRQAKFMEHKLKCTKARNEYLLSLASVNAAVSNYYLHDVLDLMDCCDTGFHLALGQVLRSYTAAESRTQASQVQGLGSLEEA

SEQ ID NO: 73380 - protein, 249 aa, Homo sapiens
  Payload ID: 14525
  Gene Symbol: ARHGAP4
  Gene Name: Rho GTPase activating protein 4
  ENSP ID: ENSP00000412437
  MOD_RES (1)..(1): Any amino acid
XLAPSTQFPAPGMGGHPGGAGEDAQCPPAPCPPTGLQHEGIFRVSGAQLRVSEIRDAFERGEDPLVEGCTAHDLDSVAGVLKLYFRSLEPPLFPPDLFGELLASSELEATAERVEHVSRLLWRLPAPVLVVLRYLFTFLNQDAQLESLGADNEPELEAEMPAQEDDLEGVVEAVACFAYTGRTAQELSFRRGDVLRLHERASSDWWRGEHNGMRGLIPHKYITLPAGTEKQVVGAGLQTAGESGSSPEG

SEQ ID NO: 73381 - protein, 174 aa, Homo sapiens
  Payload ID: 14525
  Gene Symbol: ARHGAP4
  Gene Name: Rho GTPase activating protein 4
  ENSP ID: ENSP00000413782
MRWQLSEQLRCLELQGELRRELLQELAEFMRRRAEVELEYSRGLEKLAERFSSRGGRLGSSREHQSFRKEPSLLSPLHCWAVLLQHTRQQSRESAALSEVLAGPLAQRLSHIAEDVGRLVKKSRDLEQQLQDELLEVVSELQTAKKTYQAYHMESVNAEAKLREAERQEEKRAG

SEQ ID NO: 73382 - protein, 317 aa, Homo sapiens
  Payload ID: 14525
  Gene Symbol: ARHGAP4
  Gene Name: Rho GTPase activating protein 4
  ENSP ID: ENSP00000473840
MRWQLSEQLRCLELQGELRRELLQELAEFMRRRAEVELEYSRGLEKLAERFSSRGGRLGSSREHQSFRKEPSLLSPLHCWAVLLQHTRQQSRESAALSEVLAGPLAQRLSHIAEDVGRLVKKSRDLEQQLQDELLEVVSELQTAKKTYQAYHMESVNAEAKLREAERQEEKRAGRSVPTTTAGATEAGPLRKSSLKKGGRLVEKRQAKFMEHKLKCTKARNEYLLSLASVNAAVSNYYLHDVLDLMDCCDTGFHLALGQVLRSYTAAESRTQASQVQGLGSLEEAVEALDPPGDKAKVLEVHATVFCPPLRFDYHPH

SEQ ID NO: 73383 - protein, 277 aa, Homo sapiens
  Payload ID: 14525
  Gene Symbol: ARHGAP4
  Gene Name: Rho GTPase activating protein 4
  ENSP ID: ENSP00000473936
MRWQLSEQLRCLELQGELRRELLQELAEFMRRRAEVELEYSRGLEKLAERFSSRGGRLGSSREHQSFRKEPSLLSPLHCWAVLLQHTRQQSRESAALSEVLAGPLAQRLSHIAEDVGRLVKKSRDLEQQLQDELLEVVSELQTAKKTYQAYHMESVNAEAKLREAERQEEKRAGRSVPTTTAGATEAGPLRKSSLKKGGRLVEKRQAKFMEHKLKCTKARNEYLLSLASVNAAVSNYYLHDVLDLMDCCDTGFHLALGQVLRSYTAAESRTQASQVQ

SEQ ID NO: 73384 - protein, 592 aa, Homo sapiens
  Payload ID: 14526
  Gene Symbol: ARHGAP40
  Gene Name: Rho GTPase activating protein 40
  ENSP ID: ENSP00000243967
  MOD_RES (1)..(1): Any amino acid
XGEAESQWLQDTGLSGLLGGLGLDGDHQELLSTLTQTQVAAVCRRLDIYARSVRRQHKTPVRDVRDVFGVFNSGKMSSENGDSGMKGAQLSSGASKFPPAAEPGGLQEQAGREEAFNMDSAYSEQAAVLLQRSRPSRGGTSAWGKCSLPKFTVPKGRLGVTRIGDLSLQDMRKVPSLALIELTALCDILGLDLKRSKAGKWKAAETRLFGVPLDSLLEADHKVLPSTQVPLVLQALLSCLEKRGLDMEGILRVPGSQARVKGLEQKLERDFYAGLFSWDEVHHNDASDLLKRFIRKLPTPLLTAEYLPAFAVVPNIPNLKQRLQVLHLLILILPEPNRNALKALLEFLRKVVAREQHNKMTLRNVSTVMAPNLFLHQGRPPKLPKGKEKQLAEGAAEVVQIMVHYQDLLWTVASFLVAQVRKLNDSSSRRPQLCDAGLKTWLRRMHADRDKAGDGLEATPKVAKIQVVWPIKDPLKVPLTPSTKVAHVLRQFTEHLSPGSKGQEDSEDMDSLLLHHRSMESANILLYEVGGNINEHRLDPDAYLLDLYRANPHGKIVSKVALQCVVAAAPETKPGELCDLGQAPCPLRILSG

SEQ ID NO: 73385 - protein, 622 aa, Homo sapiens
  Payload ID: 14526
  Gene Symbol: ARHGAP40
  Gene Name: Rho GTPase activating protein 40
  Uniprot ID: Q5TG30
  ENSP ID: ENSP00000362442
MDQLPQKNLLRLHPAGSAGCSTGVESSSMDGFWMEVEQIQQRDELREEDSGGNEGQLPEEGEAESQWLQDTGLSGLLGGLGLDGDHQELLSTLTQTQVAAVCRRLDIYARSVRRQHKTPVRDVRDVFGVFNSGKMSSENGDSGMKGAQLSSGASKFPPAAEPGGLQEQAGREEAFNMDSAYSEQAAVLLQRSRPSRGGTSAWGKCSLPKFTVPKGRLGVTRIGDLSLQDMRKVPSLALIELTALCDILGLDLKRSKAGKWKAAETRLFGVPLDSLLEADHKVLPSTQVPLVLQALLSCLEKRGLDMEGILRVPGSQARVKGLEQKLERDFYAGLFSWDEVHHNDASDLLKRFIRKLPTPLLTAEYLPAFAVVPNIPNLKQRLQVLHLLILILPEPNRNALKALLEFLRKVVAREQHNKMTLRNVSTVMAPNLFLHQGRPPKLPKGKEKQLAEGAAEVVQIMVHYQDLLWTVASFLVAQVRKLNDSSSRRPQLCDAGLKTWLRRMHADRDKAGDGLEATPKVAKIQVVWPIKDPLKVPLTPSTKVAHVLRQFTEHLSPGSKGQEDSEDMDSLLLHHRSMESANILLYEVGGNINEHRLDPDAYLLDLYRANPHGEWVLKQNPT

SEQ ID NO: 73386 - protein, 154 aa, Homo sapiens
  Payload ID: 14526
  Gene Symbol: ARHGAP40
  Gene Name: Rho GTPase activating protein 40
  ENSP ID: ENSP00000362443
  MOD_RES (1)..(1): Any amino acid
XTVASFLVAQVRKLNDSSSRRPQLCDAGLKTWLRRMHADRDKAGDGLEATPKVAKIQVVWPIKDPLKVPLTPSTKVAHVLRQFTEHLSPGSKGQEDSEDMDSLLLHHRSMESANILLYEVGGNINEHRLDPDAYLLDLYRANPHGEWVLKQNPT

SEQ ID NO: 73387 - protein, 72 aa, Homo sapiens
  Payload ID: 14526
  Gene Symbol: ARHGAP40
  Gene Name: Rho GTPase activating protein 40
  ENSP ID: ENSP00000414822
  MOD_RES (1)..(1): Any amino acid
XHLSPGSKGQEDSEDMDSLLLHHRSMESANILLYEVGGNINEHRLDPDAYLLDLYRANPHVQCSVGVVLPAS

SEQ ID NO: 73388 - protein, 874 aa, Homo sapiens
  Payload ID: 14527
  Gene Symbol: ARHGAP42
  Gene Name: Rho GTPase activating protein 42
  Uniprot ID: A6NI28
  ENSP ID: ENSP00000298815
MGLPTLEFSDSYLDSPDFRERLQCHEIELERTNKFIKELIKDGSLLIGALRNLSMAVQKFSQSLQDFQFECIGDAETDDEISIAQSLKEFARLLIAVEEERRRLIQNANDVLIAPLEKFRKEQIGAAKDGKKKFDKESEKYYSILEKHLNLSAKKKESHLQEADTQIDREHQNFYEASLEYVFKIQEVQEKKKFEFVEPLLSFLQGLFTFYHEGYELAQEFAPYKQQLQFNLQNTRNNFESTRQEVERLMQRMKSANQDYRPPSQWTMEGYLYVQEKRPLGFTWIKHYCTYDKGSKTFTMSVSEMKSSGKMNGLVTSSPEMFKLKSCIRRKTDSIDKRFCFDIEVVERHGIITLQAFSEANRKLWLEAMDGKEPIYTLPAIISKKEEMYLNEAGFNFVRKCIQAVETRGITILGLYRIGGVNSKVQKLMNTTFSPKSPPDIDIDIELWDNKTITSGLKNYLRCLAEPLMTYKLHKDFIIAVKSDDQNYRVEAVHALVHKLPEKNREMLDILIKHLVKVSLHSQQNLMTVSNLGVIFGPTLMRAQEETVAAMMNIKFQNIVVEILIEHYEKIFHTAPDPSIPLPQPQSRSGSRRTRAICLSTGSRKPRGRYTPCLAEPDSDSYSSSPDSTPMGSIESLSSHSSEQNSTTKSASCQPREKSGGIPWIATPSSSNGQKSLGLWTTSPESSSREDATKTDAESDCQSVASVTSPGDVSPPIDLVKKEPYGLSGLKRASASSLRSISAAEGNKSYSGSIQSLTSVGSKETPKASPNPDLPPKMCRRLRLDTASSNGYQRPGSVVAAKAQLFENVGSPKPVSSGRQAKAMYSCKAEHSHELSFPQGAIFSNVYPSVEPGWLKATYEGKTGLVPENYVVFL

SEQ ID NO: 73389 - protein, 840 aa, Homo sapiens
  Payload ID: 14527
  Gene Symbol: ARHGAP42
  Gene Name: Rho GTPase activating protein 42
  ENSP ID: ENSP00000431776
MGLPTLEFSDSYLDSPDFRERLQCHEIELERTNKFIKELIKDGSLLIGALRNLSMAVQKFSQSLQDFQFECIGDAETDDEISIAQSLKEFARLLIAVEEERRRLIQNANDVLIAPLEKFRKEQIGAAKADTQIDREHQNFYEASLEYVFKIQEVQEKKKFEFVEPLLSFLQGLFTFYHEGYELAQEFAPYKQQLQFNLQNTRNNFESTRQEVERLMQRMKSANQDYRPPSQWTMEGYLYVQEKRPLGFTWIKHYCTYDKGSKTFTMSVSEMKSSGKMNGLVTSSPEMFKLKSCIRRKTDSIDKRFCFDIEVVERHGIITLQAFSEANRKLWLEAMDGKEPIYTLPAIISKKEEMYLNEAGFNFVRKCIQAVETRGITILGLYRIGGVNSKVQKLMNTTFSPKSPPDIDIDIELWDNKTITSGLKNYLRCLAEPLMTYKLHKDFIIAVKSDDQNYRVEAVHALVHKLPEKNREMLDILIKHLVKVSLHSQQNLMTVSNLGVIFGPTLMRAQEETVAAMMNIKFQNIVVEILIEHYEKIFHTAPDPSIPLPQPQSRSGSRRTRAICLSTGSRKPRGRYTPCLAEPDSDSYSSSPDSTPMGSIESLSSHSSEQNSTTKSASCQPREKSGGIPWIATPSSSNGQKSLGLWTTSPESSSREDATKTDAESDCQSVASVTSPGDVSPPIDLVKKEPYGLSGLKRASASSLRSISAAEGNKSYSGSIQSLTSVGSKETPKASPNPDLPPKMCRRLRLDTASSNGYQRPGSVVAAKAQLFENVGSPKPVSSGRQAKAMYSCKAEHSHELSFPQGAIFSNVYPSVEPGWLKATYEGKTGLVPENYVVFL

SEQ ID NO: 73390 - protein, 230 aa, Homo sapiens
  Payload ID: 14527
  Gene Symbol: ARHGAP42
  Gene Name: Rho GTPase activating protein 42
  ENSP ID: ENSP00000434304
LEKHLNLSAKKKESHLQEADTQIDREHQNFYEASLEYVFKIQEVQEKKKFEFVEPLLSFLQGLFTFYHEGYELAQEFAPYKQQLQFNLQNTRNNFESTRQEVERLMQRMKSANQDYRPPSQWTMEGYLYVQEKRPLGFTWIKHYCTYDKGSKTFTMSVSEMKSSGKMNGLVTSSPEMFKLKSCIRRKTDSIDKRFCFDIEVVERHGIITLQAFSEANRKLWLEAMDGKEP

SEQ ID NO: 73391 - protein, 443 aa, Homo sapiens
  Payload ID: 14527
  Gene Symbol: ARHGAP42
  Gene Name: Rho GTPase activating protein 42
  ENSP ID: ENSP00000435961
  MOD_RES (1)..(1): Any amino acid
XTPNAISLLFSVYLNEAGFNFVRKCIQAVETRGITILGLYRIGGVNSKVQKLMNTTFSPKSPPDIDIDIELWDNKTITSGLKNYLRCLAEPLMTYKLHKDFIIAVKSDDQNYRVEAVHALVHKLPEKNREMLDILIKHLVKVSLHSQQNLMTVSNLGVIFGPTLMRAQEETVAAMMNIKFQNIVVEILIEHYEKIFHTAPDPSIPLPQPQSRSGSRRTRAICLSTGSRKPRGRYTPCLAEPDSDSYSSSPDSTPMGSIESLSSHSSEQNSTTKSASCQPREKSGGIPWIATPSSSNGQKSLGLWTTSPESSSREDATKTDAESDCQSVASVTSPGDVSPPIDLVKKEPYGLSGLKRASASSLRSISAAEGNKSYSGSIQSLTSVGSKETPKASPNPDLPPKMCRRLRLDTASSNGYQRPGSVVAAKAQLFENVGSPKPVSSGR

SEQ ID NO: 73392 - protein, 774 aa, Homo sapiens
  Payload ID: 14528
  Gene Symbol: ARHGAP44
  Gene Name: Rho GTPase activating protein 44
  ENSP ID: ENSP00000262444
MKKQFNRMRQLANQTVGRAEKTEVLSEDLLQVEKRLELVKQVSHSTHKKLTACLQGQQGAEADKRSKKLPLTTLAQCLMEGSAILGDDTLLGKMLKLCGETEDKLAQELIHFELQVERDVIEPLFLLAEVEIPNIQKQRKHLAKLVLDMDSSRTRWQQTSKSSGLSSSLQPAGAKADALREEMEEAANRVEICRDQLSADMYSFVAKEIDYANYFQTLIEVQAEYHRKSLTLLQAVLPQIKAQQEAWVEKPSFGKPLEEHLTISGREIAFPIEACVTMLLECGMQEEGLFRVAPSASKLKKLKAALDCCVVDVQEYSADPHAIAGALKSYLRELPEPLMTFELYDEWIQASNVQEQDKKLQALWNACEKLPKANHNNIRYLIKFLSKLSEYQDVNKMTPSNMAIVLGPNLLWPQAEGNITEMMTTVSLQIVGIIEPIIQHADWFFPGEIEFNITGNYGSPVHVNHNANYSSMPSPDMDPADRRQPEQARRPLSVATDNMMLEFYKKDGLRKIQSMGVRVMDTNWVARRGSSAGRKVSCAPPSMQPPAPPAELAAPLPSPLPEQPLDSPAAPALSPSGLGLQPGPERTSTTKSKELSPGSAQKGSPGSSQGTACAGTQPGAQPGAQPGASPSPSQPPADQSPHTLRKVSKKLAPIPPKVPFGQPGAMADQSAGQPSPVSLSPTPPSTPSPYGLSYPQGYSLASGQLSPAAAPPLASPSVFTSTLSKSRPTPKPRQRPTLPPPQPPTVNLSASSPQSTEAPMLDGMSPGESMSTAV

SEQ ID NO: 73393 - protein, 812 aa, Homo sapiens
  Payload ID: 14528
  Gene Symbol: ARHGAP44
  Gene Name: Rho GTPase activating protein 44
  Uniprot ID: Q17R89
  ENSP ID: ENSP00000342566
MKKQFNRMRQLANQTVGRAEKTEVLSEDLLQVEKRLELVKQVSHSTHKKLTACLQGQQGAEADKRSKKLPLTTLAQCLMEGSAILGDDTLLGKMLKLCGETEDKLAQELIHFELQVERDVIEPLFLLAEVEIPNIQKQRKHLAKLVLDMDSSRTRWQQTSKSSGLSSSLQPAGAKADALREEMEEAANRVEICRDQLSADMYSFVAKEIDYANYFQTLIEVQAEYHRKSLTLLQAVLPQIKAQQEAWVEKPSFGKPLEEHLTISGREIAFPIEACVTMLLECGMQEEGLFRVAPSASKLKKLKAALDCCVVDVQEYSADPHAIAGALKSYLRELPEPLMTFELYDEWIQASNVQEQDKKLQALWNACEKLPKANHNNIRYLIKFLSKLSEYQDVNKMTPSNMAIVLGPNLLWPQAEGNITEMMTTVSLQIVGIIEPIIQHADWFFPGEIEFNITGNYGSPVHVNHNANYSSMPSPDMDPADRRQPEQARRPLSVATDNMMLEFYKKDGMGVRVMDTNWVARRGSSAGRKVSCAPPSMQPPAPPAELAAPLPSPLPEQPLDSPAAPALSPSGLGLQPGPERTSTTKSKELSPGSAQKGSPGSSQGTACAGTQPGAQPGAQPGASPSPSQPPADQSPHTLRKVSKKLAPIPPKVPFGQPGAMADQSAGQPSPVSLSPTPPSTPSPYGLSYPQGYSLASGQLSPAAAPPLASPSVFTSTLSKSRPTPKPRQRPTLPPPQPPTVNLSASSPQSTEAPMLDGMSPGESMSTDLVHFDIPSIHIELGSTLRLSPLEHMRRHSVTDKRDSEEESESTAL

SEQ ID NO: 73394 - protein, 818 aa, Homo sapiens
  Payload ID: 14528
  Gene Symbol: ARHGAP44
  Gene Name: Rho GTPase activating protein 44
  Uniprot ID: Q17R89
  ENSP ID: ENSP00000368994
MKKQFNRMRQLANQTVGRAEKTEVLSEDLLQVEKRLELVKQVSHSTHKKLTACLQGQQGAEADKRSKKLPLTTLAQCLMEGSAILGDDTLLGKMLKLCGETEDKLAQELIHFELQVERDVIEPLFLLAEVEIPNIQKQRKHLAKLVLDMDSSRTRWQQTSKSSGLSSSLQPAGAKADALREEMEEAANRVEICRDQLSADMYSFVAKEIDYANYFQTLIEVQAEYHRKSLTLLQAVLPQIKAQQEAWVEKPSFGKPLEEHLTISGREIAFPIEACVTMLLECGMQEEGLFRVAPSASKLKKLKAALDCCVVDVQEYSADPHAIAGALKSYLRELPEPLMTFELYDEWIQASNVQEQDKKLQALWNACEKLPKANHNNIRYLIKFLSKLSEYQDVNKMTPSNMAIVLGPNLLWPQAEGNITEMMTTVSLQIVGIIEPIIQHADWFFPGEIEFNITGNYGSPVHVNHNANYSSMPSPDMDPADRRQPEQARRPLSVATDNMMLEFYKKDGLRKIQSMGVRVMDTNWVARRGSSAGRKVSCAPPSMQPPAPPAELAAPLPSPLPEQPLDSPAAPALSPSGLGLQPGPERTSTTKSKELSPGSAQKGSPGSSQGTACAGTQPGAQPGAQPGASPSPSQPPADQSPHTLRKVSKKLAPIPPKVPFGQPGAMADQSAGQPSPVSLSPTPPSTPSPYGLSYPQGYSLASGQLSPAAAPPLASPSVFTSTLSKSRPTPKPRQRPTLPPPQPPTVNLSASSPQSTEAPMLDGMSPGESMSTDLVHFDIPSIHIELGSTLRLSPLEHMRRHSVTDKRDSEEESESTAL

SEQ ID NO: 73395 - protein, 591 aa, Homo sapiens
  Payload ID: 14528
  Gene Symbol: ARHGAP44
  Gene Name: Rho GTPase activating protein 44
  ENSP ID: ENSP00000437542
MKKQFNRMRQLANQTVGRAEKTEVLSEDLLQVEKRLELVKQVSHSTHKKLTACLQGQQGAEADKRSKKLPLTTLAQCLMEGSAILGDDTLLGKMLKLCGETEDKLAQELIHFELQVERDVIEPLFLLAEVEIPNIQKQRKHLAKLVLDMDSSRTRWQQTSKSSGLSSSLQPAGAKADALREEMEEAANRVEICRDQLSADMYSFVAKEIDYANYFQTLIEVQAEYHRKSLTLLQAVLPQIKAQQEAWVEKPSFGKPLEEHLTISGREIAFPIEACVTMLLECGMQEEGLFRVAPSASKLKKLKAALDCCVVDVQEYSADPHAIAGALKSYLRELPEPLMTFELYDEWIQASNVQEQDKKLQALWNACEKLPKANHNNIRYLIKFLSKLSEYQDVNKMTPSNMAIVLGPNLLWPQAEGNITEMMTTVSLQIVGIIEPIIQHADWFFPGEIEFNITGNYGSPVHVNHNANYSSMPSPDMDPADRRQPEQARRPLSVATDNMMLEFYKKDGFKEAGTDSTQGPLWPAGGYGRPVRWPAVPSQPVPHPAQHPVTLWTELPSGVLLGLGPALPSCSSSPGLSFCLYKHFEQIAAHS

SEQ ID NO: 73396 - protein, 178 aa, Homo sapiens
  Payload ID: 14528
  Gene Symbol: ARHGAP44
  Gene Name: Rho GTPase activating protein 44
  ENSP ID: ENSP00000462141
MKKQFNRMRQLANQTVGRAEKTEVLSEDLLQVEKRLELVKQVSHSTHKKLTACLQGQQGAEADKRSKKLPLTTLAQCLMEGSAILGDDTLLGKMLKLCGETEDKLAQELIHFELQVERDVIEPLFLLAEVEIPNIQKQRKHLAKLVLDMDSSRTRTSSQLICTVLWPKKLTMQTTFKR

SEQ ID NO: 73397 - protein, 191 aa, Homo sapiens
  Payload ID: 14528
  Gene Symbol: ARHGAP44
  Gene Name: Rho GTPase activating protein 44
  ENSP ID: ENSP00000463905
MTPSNMAIVLGPNLLWPQAEGNITEMMTTVSLQIVGIIEPIIQHADWFFPGEIEFNITGNYGSPVHVNHNANYSSMPSPDMDPADRRQPEQARRPLSVATDNMMLEFYKKDGLRKIQSMGVRVMDTNWVARRGSSAGRKVSCAPPSMQPPAPPAELAAPLPSPLPEQPLDSPAAPALSPSGLGLQPGPERT

SEQ ID NO: 73398 - protein, 182 aa, Homo sapiens
  Payload ID: 14528
  Gene Symbol: ARHGAP44
  Gene Name: Rho GTPase activating protein 44
  ENSP ID: ENSP00000465509
  MOD_RES (1)..(1): Any amino acid
XGSSQGTACAGTQPGAQPGAQPGASPSPSQPPADQSPHTLRKVSKKLAPIPPKVPFGQPGAMADQSAGQPSPVSLSPTPPSTPSPYGLSYPQGYSLASGQLSPAAAPPLASPSVFTSTLSKSRPTPKPRQRPTLPPPQPPTVNLSASSPQSTEAPMLDGMSPGESMSTGNQATGSLTFFYEL

SEQ ID NO: 73399 - protein, 116 aa, Homo sapiens
  Payload ID: 14528
  Gene Symbol: ARHGAP44
  Gene Name: Rho GTPase activating protein 44
  ENSP ID: ENSP00000482851
MLLECGMQEEGLFRVAPSASKLKKLKAALDCCVVDVQEYSADPHAIAGALKSYLRELPEPLMTFELYDEWIQASNVQEQDKKLQALWNACEKLPKANHNNIRYLIKFYPSCQNIKM

SEQ ID NO: 73400 - protein, 1502 aa, Homo sapiens
  Payload ID: 14529
  Gene Symbol: ARHGAP5
  Gene Name: Rho GTPase activating protein 5
  Uniprot ID: Q13017
  ENSP ID: ENSP00000371897
MMAKNKEPRPPSYTISIVGLSGTEKDKGNCGVGKSCLCNRFVRSKADEYYPEHTSVLSTIDFGGRVVNNDHFLYWGDIIQNSEDGVECKIHVIEQTEFIDDQTFLPHRSTNLQPYIKRAAASKLQSAEKLMYICTDQLGLEQDFEQKQMPEGKLNVDGFLLCIDVSQGCNRKFDDQLKFVNNLFVQLSKSKKPVIIAATKCDECVDHYLREVQAFASNKKNLLVVETSARFNVNIETCFTALVQMLDKTRSKPKIIPYLDAYKTQRQLVVTATDKFEKLVQTVRDYHATWKTVSNKLKNHPDYEEYINLEGTRKARNTFSKHIEQLKQEHIRKRREEYINTLPRAFNTLLPNLEEIEHLNWSEALKLMEKRADFQLCFVVLEKTPWDETDHIDKINDRRIPFDLLSTLEAEKVYQNHVQHLISEKRRVEMKEKFKKTLEKIQFISPGQPWEEVMCFVMEDEAYKYITEADSKEVYGRHQREIVEKAKEEFQEMLFEHSELFYDLDLNATPSSDKMSEIHTVLSEEPRYKALQKLAPDRESLLLKHIGFVYHPTKETCLSGQNCTDIKVEQLLASSLLQLDHGRLRLYHDSTNIDKVNLFILGKDGLAQELANEIRTQSTDDEYALDGKIYELDLRPVDAKSPYFLSQLWTAAFKPHGCFCVFNSIESLSFIGEFIGKIRTEASQIRKDKYMANLPFTLILANQRDSISKNLPILRHQGQQLANKLQCPFVDVPAGTYPRKFNETQIKQALRGVLESVKHNLDVVSPIPANKDLSEADLRIVMCAMCGDPFSVDLILSPFLDSHSCSAAQAGQNNSLMLDKIIGEKRRRIQITILSYHSSIGVRKDELVHGYILVYSAKRKASMGMLRAFLSEVQDTIPVQLVAVTDSQADFFENEAIKELMTEGEHIATEITAKFTALYSLSQYHRQTEVFTLFFSDVLEKKNMIENSYLSDNTRESTHQSEDVFLPSPRDCFPYNNYPDSDDDTEAPPPYSPIGDDVQLLPTPSDRSRYRLDLEGNEYPIHSTPNCHDHERNHKVPPPIKPKPVVPKTNVKKLDPNLLKTIEAGIGKNPRKQTSRVPLAHPEDMDPSDNYAEPIDTIFKQKGYSDEIYVVPDDSQNRIKIRNSFVNNTQGDEENGFSDRTSKSHGERRPSKYKYKSKTLFSKAKSYYRRTHSDASDDEAFTTSKTKRKGRHRGSEEDPLLSPVETWKGGIDNPAITSDQELDDKKMKKKTHKVKEDKKQKKKTKNFNPPTRRNWESNYFGMPLQDLVTAEKPIPLFVEKCVEFIEDTGLCTEGLYRVSGNKTDQDNIQKQFDQDHNINLVSMEVTVNAVAGALKAFFADLPDPLIPYSLHPELLEAAKIPDKTERLHALKEIVKKFHPVNYDVFRYVITHLNRVSQQHKINLMTADNLSICFWPTLMRPDFENREFLSTTKIHQSVVETFIQQCQFFFYNGEIVETTNIVAPPPPSNPGQLVEPMVPLQLPPPLQPQLIQPQLQTDPLGII

SEQ ID NO: 73401 - protein, 237 aa, Homo sapiens
  Payload ID: 14529
  Gene Symbol: ARHGAP5
  Gene Name: Rho GTPase activating protein 5
  Uniprot ID: Q13017
  ENSP ID: ENSP00000379827
MSLPPPPPGPLPLRRRRRRPTLLGLCTEGLYRVSGNKTDQDNIQKQFDQDHNINLVSMEVTVNAVAGALKAFFADLPDPLIPYSLHPELLEAAKIPDKTERLHALKEIVKKFHPVNYDVFRYVITHLNRVSQQHKINLMTADNLSICFWPTLMRPDFENREFLSTTKIHQSVVETFIQQCQFFFYNGEIVETTNIVAPPPPSNPGQLVEPMVPLQLPPPLQPQLIQPQLQTDPLGII

SEQ ID NO: 73402 - protein, 1498 aa, Homo sapiens [sequence omitted]

SEQ ID NO: 73403 - protein, 241 aa, Homo sapiens
  Payload ID: 14529
  Gene Symbol: ARHGAP5
  Gene Name: Rho GTPase activating protein 5
  Uniprot ID: Q13017
  ENSP ID: ENSP00000407395
MPLQDLVTAEKPIPLFVEKCVEFIEDTGLCTEGLYRVSGNKTDQDNIQKQFDQDHNINLVSMEVTVNAVAGALKAFFADLPDPLIPYSLHPELLEAAKIPDKTERLHALKEIVKKFHPVNYDVFRYVITHLNRVSQQHKINLMTADNLSICFWPTLMRPDFENREFLSTTKIHQSVVETFIQQCQFFFYNGEIVETTNIVAPPPPSNPGQLVEPMVPLQLPPPLQPQLIQPQLQTDPLGII

SEQ ID NO: 73404 - protein, 1502 aa, Homo sapiens; identical to SEQ ID NO: 73400
  Payload ID: 14529
  Gene Symbol: ARHGAP5
  Gene Name: Rho GTPase activating protein 5
  Uniprot ID: Q13017
  ENSP ID: ENSP00000441692

SEQ ID NO: 73405 - protein, 137 aa, Homo sapiens
  Payload ID: 14529
  Gene Symbol: ARHGAP5
  Gene Name: Rho GTPase activating protein 5
  ENSP ID: ENSP00000451061
MPLQDLVTAEKPIPLFVEKCVEFIEDTGLCTEGLYRVSGNKTDQDNIQKQFDQDHNINLVSMEVTVNAVAGALKAFFADLPDPLIPYSLHPELLEAAKIPDKTERLHALKEIVKKFHPVNYDVFRYVITHLNRVSQQ

SEQ ID NO: 73406 - protein, 140 aa, Homo sapiens
  Payload ID: 14529
  Gene Symbol: ARHGAP5
  Gene Name: Rho GTPase activating protein 5
  ENSP ID: ENSP00000451579
MMAKNKEPRPPSYTISIVGLSGTEKDKGNCGVGKSCLCNRFVRSKADEYYPEHTSVLSTIDFGGRVVNNDHFLYWGDIIQNSEDGVECKIHVIEQTEFIDDQTFLPHRSTNLQPYIKRAAASKLQSAEKLMYICTDQLGL

SEQ ID NO: 73407 - protein, 1501 aa, Homo sapiens
  Payload ID: 14529
  Gene Symbol: ARHGAP5
  Gene Name: Rho GTPase activating protein 5
  Uniprot ID: Q13017
  ENSP ID: ENSP00000452222
MMAKNKEPRPPSYTISIVGLSGTEKDKGNCGVGKSCLCNRFVRSKADEYYPEHTSVLSTIDFGGRVVNNDHFLYWGDIIQNSEDGVECKIHVIEQTEFIDDQTFLPHRSTNLQPYIKRAAASKLQSAEKLMYICTDQLGLEQDFEQKQMPEGKLNVDGFLLCIDVSQGCNRKFDDQLKFVNNLFVQLSKSKKPVIIAATKCDECVDHYLREVQAFASNKKNLLVVETSARFNVNIETCFTALVQMLDKTRSKPKIIPYLDAYKTQRQLVVTATDKFEKLVQTVRDYHATWKTVSNKLKNHPDYEEYINLEGTRKARNTFSKHIEQLKQEHIRKRREEYINTLPRAFNTLLPNLEEIEHLNWSEALKLMEKRADFQLCFVVLEKTPWDETDHIDKINDRRIPFDLLSTLEAEKVYQNHVQHLISEKRRVEMKEKFKKTLEKIQFISPGQPWEEVMCFVMEDEAYKYITEADSKEVYGRHQREIVEKAKEEFQEMLFEHSELFYDLDLNATPSSDKMSEIHTVLSEEPRYKALQKLAPDRESLLLKHIGFVYHPTKETCLSGQNCTDIKVEQLLASSLLQLDHGRLRLYHDSTNIDKVNLFILGKDGLAQELANEIRTQSTDDEYALDGKIYELDLRPVDAKSPYFLSQLWTAAFKPHGCFCVFNSIESLSFIGEFIGKIRTEASQIRKDKYMANLPFTLILANQRDSISKNLPILRHQGQQLANKLQCPFVDVPAGTYPRKFNETQIKQALRGVLESVKHNLDVVSPIPANKDLSEADLRIVMCAMCGDPFSVDLILSPFLDSHSCSAAQAGQNNSLMLDKIIGEKRRRIQITILSYHSSIGVRKDELVHGYILVYSAKRKASMGMLRAFLSEVQDTIPVQLVAVTDSQADFFENEAIKELMTEGEHIATEITAKFTALYSLSQYHRQTEVFTLFFSDVLEKKNMIENSYLSDNTRESTHQSEDVFLPSPRDCFPYNNYPDSDDDTEAPPPYSPIGDDVQLLPTPSDRSRYRLDLEGNEYPIHSTPNCHDHERNHKVPPPIKPKPVVPKTNVKKLDPNLLKTIEAGIGKNPRKQTSRVPLAHPEDMDPSDNYAEPIDTIFKQKGYSDEIYVVPDDSQNRIKIRNSFVNNTQGDEENGFSDRTSKSHGERRPSKYKYKSKTLFSKAKSYYRRTHSDASDDEAFTTSKTKRKGRHRGSEEDPLLSPVETWKGGIDNPAITSDQELDDKKMKKKTHKVKEDKKKKKTKNFNPPTRRNWESNYFGMPLQDLVTAEKPIPLFVEKCVEFIEDTGLCTEGLYRVSGNKTDQDNIQKQFDQDHNINLVSMEVTVNAVAGALKAFFADLPDPLIPYSLHPELLEAAKIPDKTERLHALKEIVKKFHPVNYDVFRYVITHLNRVSQQHKINLMTADNLSICFWPTLMRPDFENREFLSTTKIHQSVVETFIQQCQFFFYNGEIVETTNIVAPPPPSNPGQLVEPMVPLQLPPPLQPQLIQPQLQTDPLGII

SEQ ID NO: 73408 - protein, 37 aa, Homo sapiens
  Payload ID: 14529
  Gene Symbol: ARHGAP5
  Gene Name: Rho GTPase activating protein 5
  ENSP ID: ENSP00000452372
MMAKNKEPRPPSYTISIVGLSGTEKDKGNCGVGKSCL

SEQ ID NO: 73409 - protein, 148 aa, Homo sapiens
  Payload ID: 14529
  Gene Symbol: ARHGAP5
  Gene Name: Rho GTPase activating protein 5
  ENSP ID: ENSP00000452606
  MOD_RES (1)..(1): Any amino acid
XSFVNNTQGDEENGFSDRTSKSHGERRPSKYKYKSKTLFSKAKSYYRRTHSDASDDEAFTTSKTKRKGRHRGSEEDPLLSPVETWKGGIDNPAITSDQELDDKKMKKKTHKVKEDKKGYVPKDSTVSAGIKLTKTIFKSSLIKIIISI

SEQ ID NO: 73410 - protein, 771 aa, Homo sapiens
  Payload ID: 14530
  Gene Symbol: ARHGAP6
  Gene Name: Rho GTPase activating protein 6
  Uniprot ID: O43182
  ENSP ID: ENSP00000302312
MSGRSVRLRSVPIQSLSELERARLQEVAFYQLQQDCDLSCQITIPKDGQKRKKSLRKKLDSLGKEKNKDKEFIPQAFGMPLSQVIANDRAYKLKQDLQRDEQKDASDFVASLLPFGNKRQNKELSSSNSSLSSTSETPNESTSPNTPEPAPRARRRGAMSVDSITDLDDNQSRLLEALQLSLPAEAQSKKEKARDKKLSLNPIYRQVPRLVDSCCQHLEKHGLQTVGIFRVGSSKKRVRQLREEFDRGIDVSLEEEHSVHDVAALLKEFLRDMPDPLLTRELYTAFINTLLLEPEEQLGTLQLLIYLLPPCNCDTLHRLLQFLSIVARHADDNISKDGQEVTGNKMTSLNLATIFGPNLLHKQKSSDKEFSVQSSARAEESTAIIAVVQKMIENYEALFMVPPDLQNEVLISLLETDPDVVDYLLRRKASQSSSPDMLQSEVSFSVGGRHSSTDSNKASSGDISPYDNNSPVLSERSLLAMQEDAAPGGSEKLYRVPGQFMLVGHLSSSKSRESSPGPRLGKDLSEEPFDIWGTWHSTLKSGSKDPGMTGSSGDIFESSSLRAGPCSLSQGNLSPNWPRWQGSPAELDSDTQGARRTQAAAPATEGRAHPAVSRACSTPHVQVAGKAERPTARSEQYLTLSGAHDLSESELDVAGLQSRATPQCQRPHGSGRDDKRPPPPYPGPGKPAAAAAWIQGPPEGVETPTDQGGQAAEREQQVTQKKLSSANSLPAGEQDSPRLGDAGWLDWQRERWQIWELLSTDNPDALPETLV

SEQ ID NO: 73411 - protein, 974 aa, Homo sapiens
  Payload ID: 14530
  Gene Symbol: ARHGAP6
  Gene Name: Rho GTPase activating protein 6
  Uniprot ID: O43182
  ENSP ID: ENSP00000338967
MSAQSLLHSVFSCSSPASSSAASAKGFSKRKLRQTRSLDPALIGGCGSDEAGAEGSARGATAGRLYSPSLPAESLGPRLASSSRGPPPRATRLPPPGPLCSSFSTPSTPQEKSPSGSFHFDYEVPLGRGGLKKSMAWDLPSVLAGPASSRSASSILCSSGGGPNGIFASPRRWLQQRKFQSPPDSRGHPYVVWKSEGDFTWNSMSGRSVRLRSVPIQSLSELERARLQEVAFYQLQQDCDLSCQITIPKDGQKRKKSLRKKLDSLGKEKNKDKEFIPQAFGMPLSQVIANDRAYKLKQDLQRDEQKDASDFVASLLPFGNKRQNKELSSSNSSLSSTSETPNESTSPNTPEPAPRARRRGAMSVDSITDLDDNQSRLLEALQLSLPAEAQSKKEKARDKKLSLNPIYRQVPRLVDSCCQHLEKHGLQTVGIFRVGSSKKRVRQLREEFDRGIDVSLEEEHSVHDVAALLKEFLRDMPDPLLTRELYTAFINTLLLEPEEQLGTLQLLIYLLPPCNCDTLHRLLQFLSIVARHADDNISKDGQEVTGNKMTSLNLATIFGPNLLHKQKSSDKEFSVQSSARAEESTAIIAVVQKMIENYEALFMVPPDLQNEVLISLLETDPDVVDYLLRRKASQSSSPDMLQSEVSFSVGGRHSSTDSNKASSGDISPYDNNSPVLSERSLLAMQEDAAPGGSEKLYRVPGQFMLVGHLSSSKSRESSPGPRLGKDLSEEPFDIWGTWHSTLKSGSKDPGMTGSSGDIFESSSLRAGPCSLSQGNLSPNWPRWQGSPAELDSDTQGARRTQAAAPATEGRAHPAVSRACSTPHVQVAGKAERPTARSEQYLTLSGAHDLSESELDVAGLQSRATPQCQRPHGSGRDDKRPPPPYPGPGKPAAAAAWIQGPPEGVETPTDQGGQAAEREQQVTQKKLSSANSLPAGEQDSPRLGDAGWLDWQRERWQIWELLSTDNPDALPETLV

SEQ ID NO: 73412 - protein, 601 aa, Homo sapiens
  Payload ID: 14530
  Gene Symbol: ARHGAP6
  Gene Name: Rho GTPase activating protein 6
  ENSP ID: ENSP00000370093
LELYDLQILGTKPPMNSDTHRNFDPTATLRNQGDFTWNSMSGRSVRLRSVPIQSLSELERARLQEVAFYQLQQDCDLSCQITIPKDGQKRKKSLRKKLDSLGKEKNKDKEFIPQAFGMPLSQVIANDRAYKLKQDLQRDEQKDASDFVASLLPFGNKRQNKELSSSNSSLSSTSETPNESTSPNTPEPAPRARRRGAMSVDSITDLDDNQSRLLEALQLSLPAEAQSKKEKARDKKLSLNPIYRQVPRLVDSCCQHLEKHGLQTVGIFRVGSSKKRVRQLREEFDRGIDVSLEEEHSVHDVAALLKEFLRDMPDPLLTRELYTAFINTLLLEPEEQLGTLQLLIYLLPPCNCDTLHRLLQFLSIVARHADDNISKDGQEVTGNKMTSLNLATIFGPNLLHKQKSSDKEFSVQSSARAEESTAIIAVVQKMIENYEALFMVPPDLQNEVLISLLETDPDVVDYLLRRKASQSSSPDMLQSEVSFSVGGRHSSTDSNKASSGDISPYDNNSPVLSERSLLAMQEDAAPGGSEKLYRVPGQFMLVGHLSSSKSRESSPGPRLGKGNWSLASRRWPKQATLLLLHVAWCGALRTFSSSLPYLMFL

SEQ ID NO: 73413 - protein, 765 aa, Homo sapiens
  Payload ID: 14530
  Gene Symbol: ARHGAP6
  Gene Name: Rho GTPase activating protein 6
  Uniprot ID: O43182
  ENSP ID: ENSP00000370094
MSAQSLLHSVFSCSSPASSSAASAKGFSKRKLRQTRSLDPALIGGCGSDEAGAEGSARGATAGRLYSPSLPAESLGPRLASSSRGPPPRATRLPPPGPLCSSFSTPSTPQEKSPSGSFHFDYEVPLGRGGLKKSMAWDLPSVLAGPASSRSASSILCSSGGGPNGIFASPRRWLQQRKFQSPPDSRGHPYVVWKSEGDFTWNSMSGRSVRLRSVPIQSLSELERARLQEVAFYQLQQDCDLSCQITIPKDGQKRKKSLRKKLDSLGKEKNKDKEFIPQAFGMPLSQVIANDRAYKLKQDLQRDEQKDASDFVASLLPFGNKRQNKELSSSNSSLSSTSETPNESTSPNTPEPAPRARRRGAMSVDSITDLDDNQSRLLEALQLSLPAEAQSKKEKARDKKLSLNPIYRQVPRLVDSCCQHLEKHGLQTVGIFRVGSSKKRVRQLREEFDRGIDVSLEEEHSVHDVAALLKEFLRDMPDPLLTRELYTAFINTLLLEPEEQLGTLQLLIYLLPPCNCDTLHRLLQFLSIVARHADDNISKDGQEVTGNKMTSLNLATIFGPNLLHKQKSSDKEFSVQSSARAEESTAIIAVVQKMIENYEALFMVPPDLQNEVLISLLETDPDVVDYLLRRKASQSSSPDMLQSEVSFSVGGRHSSTDSNKASSGDISPYDNNSPVLSERSLLAMQEDAAPGGSEKLYRVPGQFMLVGHLSSSKSRESSPGPRLGKGNWSLASRRWPKQATLLLLHVAWCGALRTFSSSLPYLMFL

SEQ ID NO: 73414 - protein, 771 aa, Homo sapiens; identical to SEQ ID NO: 73410
  Payload ID: 14530
  Gene Symbol: ARHGAP6
  Gene Name: Rho GTPase activating protein 6
  Uniprot ID: O43182
  ENSP ID: ENSP00000370112

SEQ ID NO: 73415 - protein, 690 aa, Homo sapiens
  Payload ID: 14530
  Gene Symbol: ARHGAP6
  Gene Name: Rho GTPase activating protein 6
  Uniprot ID: O43182
  ENSP ID: ENSP00000435767
MSAQSLLHSVFSCSSPASSSAASAKGFSKRKLRQTRSLDPALIGGCGSDEAGAEGSARGATAGRLYSPSLPAESLGPRLASSSRGPPPRATRLPPPGPLCSSFSTPSTPQEKSPSGSFHFDYEVPLGRGGLKKSMAWDLPSVLAGPASSRSASSILCSSGGGPNGIFASPRRWLQQRKFQSPPDSRGHPYVVWKSELELYDLQILGTKPPMNSDTHRNFDPTATLRNQGDFTWNSMSGRSVRLRSVPIQSLSELERARLQEVAFYQLQQDCDLSCQITIPKDGQKRKKSLRKKLDSLGKEKNKDKEFIPQAFGMPLSQVIANDRAYKLKQDLQRDEQKDASDFVASLLPFGNKRQNKELSSSNSSLSSTSETPNESTSPNTPEPAPRARRRGAMSVDSITDLDDNQSRLLEALQLSLPAEAQSKKEKARDKKLSLNPIYRQVPRLVDSCCQHLEKHGLQTVGIFRVGSSKKRVRQLREEFDRGIDVSLEEEHSVHDVAALLKEFLRDMPDPLLTRELYTAFINTLLLEPEEQLGTLQLLIYLLPPCNCDTLHRLLQFLSIVARHADDNISKDGQEVTGNKMTSLNLATIFGPNLLHKQKSSDKEFSVQSSARAEESTAIIAVVQKMIENYEALFMVPPDLQNEVLISLLETDPDVVDYLLRRKASQSSTSSVLPAAVQACPQYPASMFTP

SEQ ID NO: 73416 - protein, 305 aa, Homo sapiens
  Payload ID: 14531
  Gene Symbol: ARHGAP8
  Gene Name: Rho GTPase activating protein 8
  Uniprot ID: P85298
  ENSP ID: ENSP00000337287
MAGQDPALSTSHPFYDVARHGILQVAGDDRFGRRVVTFSCCRMPPSHELDHQRLLEYLKYTLDQYVENDYTIVYFHYGLNSRNKPSLGWLQSAYKEFDRKYKKNLKALYVVHPTSFIKVLWNILKPLISHKFGKKVIYFNYLSELHEHLKYDQLVIPPEVLRYDEKLQSLHEGRTPPPTKTPPPRPPLPTQQFGVSLQYLKDKNQGELIPPVLRFTVTYLREKGLRTEGLFRRSASVQTVREIQRLYNQGKPVNFDDYGDIHIPAVILKTFLRELPQPLLTFQAYEQILGITCVPGEHLQQNEQL

SEQ ID NO: 73417 - protein, 433 aa, Homo sapiens
  Payload ID: 14531
  Gene Symbol: ARHGAP8
  Gene Name: Rho GTPase activating protein 8
  Uniprot ID: P85298
  ENSP ID: ENSP00000348407
MAGQDPALSTSHPFYDVARHGILQVAGDDRFGRRVVTFSCCRMPPSHELDHQRLLEYLKYTLDQYVENDYTIVYFHYGLNSRNKPSLGWLQSAYKEFDRKYKKNLKALYVVHPTSFIKVLWNILKPLISHKFGKKVIYFNYLSELHEHLKYDQLVIPPEVLRYDEKLQSLHEGRTPPPTKTPPPRPPLPTQQFGVSLQYLKDKNQGELIPPVLRFTVTYLREKGLRTEGLFRRSASVQTVREIQRLYNQGKPVNFDDYGDIHIPAVILKTFLRELPQPLLTFQAYEQILGITCVESSLRVTGCRQILRSLPEHNYVVLRYLMGFLHAVSRESIFNKMNSSNLACVFGLNLIWPSQGVSSLSALVPLNMFTELLIEYYEKIFSTPEAPGEHGLAPWEQGSRAAPLQEAVPRTQATGLTKPTLPPSPLMAARRRL

SEQ ID NO: 73418 - protein, 28 aa, Homo sapiens
  Payload ID: 14531
  Gene Symbol: ARHGAP8
  Gene Name: Rho GTPase activating protein 8
  ENSP ID: ENSP00000374422
MAGQDPALSTSHPFYDVARHGILQVAGI

SEQ ID NO: 73419 - protein, 464 aa, Homo sapiens
  Payload ID: 14531
  Gene Symbol: ARHGAP8
  Gene Name: Rho GTPase activating protein 8
  Uniprot ID: P85298
  ENSP ID: ENSP00000374424
MAGQDPALSTSHPFYDVARHGILQVAGDDRFGRRVVTFSCCRMPPSHELDHQRLLEYLKYTLDQYVENDYTIVYFHYGLNSRNKPSLGWLQSAYKEFDRKDGDLTMWPRLVSNSKLKRSSHLSLPKYWDYRYKKNLKALYVVHPTSFIKVLWNILKPLISHKFGKKVIYFNYLSELHEHLKYDQLVIPPEVLRYDEKLQSLHEGRTPPPTKTPPPRPPLPTQQFGVSLQYLKDKNQGELIPPVLRFTVTYLREKGLRTEGLFRRSASVQTVREIQRLYNQGKPVNFDDYGDIHIPAVILKTFLRELPQPLLTFQAYEQILGITCVESSLRVTGCRQILRSLPEHNYVVLRYLMGFLHAVSRESIFNKMNSSNLACVFGLNLIWPSQGVSSLSALVPLNMFTELLIEYYEKIFSTPEAPGEHGLAPWEQGSRAAPLQEAVPRTQATGLTKPTLPPSPLMAARRRL

SEQ ID NO: 73420 - protein, 130 aa, Homo sapiens
  Payload ID: 14531
  Gene Symbol: ARHGAP8
  Gene Name: Rho GTPase activating protein 8
  ENSP ID: ENSP00000379425
MAGQDPALSTSHPFYDVARHGILQVAGDDRFGRRVVTFSCCRMPPSHELDHQRLLEYLKYTLDQYVENDYTIVYFHYGLNSRNKPSLGWLQSAYKEFDRKDGDLTMWPRLVSNSKLKRSSHLSLPKYWDY

SEQ ID NO: 73421 - protein, 115 aa, Homo sapiens
  Payload ID: 14531
  Gene Symbol: ARHGAP8
  Gene Name: Rho GTPase activating protein 8
  ENSP ID: ENSP00000402775
MAGQDPALSTSHPFYDVARHGILQVAGDDRFGRRVVTFSCCRMPPSHELDHQRLLEYLKYTLDQYVENDYTIVYFHYGLNSRNKPSLGWLQSAYKEFDRKYKKNLKALYVVHPTS

SEQ ID NO: 73422 - protein, 163 aa, Homo sapiens
  Payload ID: 14531
  Gene Symbol: ARHGAP8
  Gene Name: Rho GTPase activating protein 8
  ENSP ID: ENSP00000403618
MAGQDPALSTSHPFYDVARHGILQVAGDDRFGRRVVTFSCCRMPPSHELDHQRLLEYLKYTLDQYVENDYTIVYFHYGLNSRNKPSLGWLQSAYKEFDRKDGLTQPPWLTPVIPVLWEAKVQEELEGPLRGAPHQLHQGPVEHLEAPHQSQVWEESHLFQLPE

SEQ ID NO: 73423 - protein, 731 aa, Homo sapiens
  Payload ID: 14532
  Gene Symbol: ARHGAP9
  Gene Name: Rho GTPase activating protein 9
  Uniprot ID: Q9BRR9
  ENSP ID: ENSP00000377380
MLSSRWWPSSWGILGLGPRSPPRGSQLCALYAFTYTGADGQQVSLAEGDRFLLLRKTNSDWWLARRLEAPSTSRPIFVPAAYMIEESIPSQSPTTVIPGQLLWTPGPKLFHGSLEELSQALPSRAQASSEQPPPLPRKMCRSVSTDNLSPSLLKPFQEGPSGRSLSQEDLPSEASASTAGPQPLMSEPPVYCNLVDLRRCPRSPPPGPACPLLQRLDAWEQHLDPNSGRCFYINSLTGCKSWKPPRRSRSETNPGSMEGTQTLKRNNDVLQPQAKGFRSDTGTPEPLDPQGSLSLSQRTSQLDPPALQAPRPLPQLLDDPHEVEKSGLLNMTKIAQGGRKLRKNWGPSWVVLTGNSLVFYREPPPTAPSSGWGPAGSRPESSVDLRGAALAHGRHLSSRRNVLHIRTIPGHEFLLQSDHETELRAWHRALRTVIERLDRENPLELRLSGSGPAELSAGEDEEEESELVSKPLLRLSSRRSSIRGPEGTEQNRVRNKLKRLIAKRPPLQSLQERGLLRDQVFGCQLESLCQREGDTVPSFLRLCIAAVDKRGLDVDGIYRVSGNLAVVQKLRFLVDRERAVTSDGRYVFPEQPGQEGRLDLDSTEWDDIHVVTGALKLFLRELPQPLVPPLLLPHFRAALALSESEQCLSQIQELIGSMPKPNHDTLRYLLEHLCRVIAHSDKNRMTPHNLGIVFGPTLFRPEQETSDPAAHALYPGQLVQLMLTNFTSLFP

SEQ ID NO: 73424 - protein, 821 aa, Homo sapiens
  Payload ID: 14532
  Gene Symbol: ARHGAP9
  Gene Name: Rho GTPase activating protein 9
  ENSP ID: ENSP00000377386
MRRGSSDSCASGSQVAGTTVAGPAHPESLTLCSGEAERRGKEEWPDSHHYPGPTPAPESSDGPHKVTVLATMLSSRWWPSSWGILGLGPRSPPRGSQLCALYAFTYTGADGQQVSLAEGDRFLLLRKTNSDWWLARRLEAPSTSRPIFVPAAYMIEESIPSQSPTTVIPGQLLWTPGPKLFHGSLEELSQALPSRAQASSEQPPPLPRKMCRSVSTDNLSPSLLKPFQEGPSGRSLSQEDLPSEASASTAGPQPLMSEPPVYCNLVDLRRCPRSPPPGPACPLLQRLDAWEQHLDPNSGRCFYINSLTGCKSWKPPRRSRSETNPGSMEGTQTLKRNNDVLQPQAKGFRSDTGTPEPLDPQGSLSLSQRTSQLDPPALQAPRPLPQLLDDPHEVEKSGLLNMTKIAQGGRKLRKNWGPSWVVLTGNSLVFYREPPPTAPSSGWGPAGSRPESSVDLRGAALAHGRHLSSRRNVLHIRTIPGHEFLLQSDHETELRAWHRALRTVIERLVRWVEARREAPTGRDQGSGDRENPLELRLSGSGPAELSAGEDEEEESELVSKPLLRLSSRRSSIRGPEGTEQNRVRNKLKRLIAKRPPLQSLQERGLLRDQVFGCQLESLCQREGDTVPSFLRLCIAAVDKRGLDVDGIYRVSGNLAVVQKLRFLVDRERAVTSDGRYVFPEQPGQEGRLDLDSTEWDDIHVVTGALKLFLRELPQPLVPPLLLPHFRAALALSESEQCLSQIQELIGSMPKPNHDTLRYLLEHLCRVIAHSDKNRMTPHNLGIVFGPTLFRPEQETSDPAAHALYPGQLVQLMLTNFTSLFP

SEQ ID NO: 73425 - protein, 640 aa, Homo sapiens
  Payload ID: 14532
  Gene Symbol: ARHGAP9
  Gene Name: Rho GTPase activating protein 9
  Uniprot ID: Q9BRR9
  ENSP ID: ENSP00000394307
MLSSRWWPSSWGILGLGPRSPPRGSQLCALYAFTYTGADGQQVSLAEGDRFLLLRKTNSDWWLARRLEAPSTSRPIFVPAAYMIEESIPSQSPTTVIPGQLLWTPGPKLFHGSLEELSQALPSRAQASSEQPPPLPRKMCRSVSTDNLSPSLLKPFQEGPSGRSLSQEDLPSEASASTAGPQPLMSEPPVYCNLVDLRRCPRSPPPGPACPLLQRLDAWEQHLDPNSGRCFYINSLTGCKSWKPPRRSRSETNPGSMEGTQTLKRNNDVLQPQAKGFRSDTGTPEPLDPQGSLSLSQRTSQLDPPALQAPRPLPQLLDDPHEVEKSGLLNMTKIAQGGRKLRKNWGPSWVVLTGNSLVFYREPPPTAPSSGWGPAGSRPESSVDLRGAALAHGRHLSSRRNVLHIRTIPGHEFLLQSDHETELRAWHRALRTVIERLDRENPLELRLSGSGPAELSAGEDEEEESELVSKPLLRLSSRRSSIRGPEGTEQNRVRNKLKRLIAKRPPLQSLQERGLLRDQVFGCQLESLCQREGDTVPSFLRLCIAAVDKRGLDVDGIYRVSGNLAVVQKLRFLVDRERAVTSDGRYVFPEQPGQEGRLDLDSTEWDDIHVVTGALKLFLRELPQPLVPPLLLPHFRAALG

SEQ ID NO: 73426 - protein, 547 aa, Homo sapiens
  Payload ID: 14532
  Gene Symbol: ARHGAP9
  Gene Name: Rho GTPase activating protein 9
  Uniprot ID: Q9BRR9
  ENSP ID: ENSP00000397950
MSEPPVYCNLVDLRRCPRSPPPGPACPLLQRLDAWEQHLDPNSGRCFYINSLTGCKSWKPPRRSRSETNPGSMEGTQTLKRNNDVLQPQAKGFRSDTGTPEPLDPQGSLSLSQRTSQLDPPALQAPRPLPQLLDDPHEVEKSGLLNMTKIAQGGRKLRKNWGPSWVVLTGNSLVFYREPPPTAPSSGWGPAGSRPESSVDLRGAALAHGRHLSSRRNVLHIRTIPGHEFLLQSDHETELRAWHRALRTVIERLDRENPLELRLSGSGPAELSAGEDEEEESELVSKPLLRLSSRRSSIRGPEGTEQNRVRNKLKRLIAKRPPLQSLQERGLLRDQVFGCQLESLCQREGDTVPSFLRLCIAAVDKRGLDVDGIYRVSGNLAVVQKLRFLVDRERAVTSDGRYVFPEQPGQEGRLDLDSTEWDDIHVVTGALKLFLRELPQPLVPPLLLPHFRAALALSESEQCLSQIQELIGSMPKPNHDTLRYLLEHLCRVIAHSDKNRMTPHNLGIVFGPTLFRPEQETSDPAAHALYPGQLVQLMLTNFTSLFP

SEQ ID NO: 73427 - protein, 174 aa, Homo sapiens
  Payload ID: 14532
  Gene Symbol: ARHGAP9
  Gene Name: Rho GTPase activating protein 9
  ENSP ID: ENSP00000446932
MGEGAGGGKAKRSMGRATGRMTTSFFPLFWQAGPQPLMSEPPVYCNLVDLRRCPRSPPPGPACPLLQRLDAWEQHLDPNSGRCFYINSLTGCKSWKPPRRSRSETNPGSMEGTQTLKRNNDVLQPQAKGFRSDTGTPEPLDPQGSLSLSQRTSQLDPPALQAPRPLPQLLDDPH

SEQ ID NO: 73428 - protein, 142 aa, Homo sapiens
  Payload ID: 14532
  Gene Symbol: ARHGAP9
  Gene Name: Rho GTPase activating protein 9
  ENSP ID: ENSP00000448358
MIEESIPSQSPTTVIPGQLLWTPGPKLFHGSLEELSQALPSRAQASSEQPPPLPRKMCRSVSTDNLSPSLLKPFQEGPSGRSLSQEDLPSEASASTAGPQPLMSEPPVYCNLVDLRRCPRSPPPGPACPLLQRLDAWEQHLD

SEQ ID NO: 73429 - protein, 156 aa, Homo sapiens
  Payload ID: 14532
  Gene Symbol: ARHGAP9
  Gene Name: Rho GTPase activating protein 9
  ENSP ID: ENSP00000448404
  MOD_RES (1)..(1): Any amino acid
XEGDTVPSFLRLCIAAVDKRGLDVDGIYRVSGNLAVVQKLRFLVDRERAVTSDGRYVFPEQPGQALSESEQCLSQIQELIGSMPKPNHDTLRYLLEHLCRVIAHSDKNRMTPHNLGIVFGPTLFRPEQETSDPAAHALYPGQLVQLMLTNFTSLFP

SEQ ID NO: 73430 - protein, 168 aa, Homo sapiens
  Payload ID: 14532
  Gene Symbol: ARHGAP9
  Gene Name: Rho GTPase activating protein 9
  ENSP ID: ENSP00000448423
RNKLKRLIAKRPPLQSLQERGLLRDQVFGCQLESLCQREGDTVPSFLRLCIAAVDKRGLDVDGIYRVSGNLAVVQKLRFLVDREGRLDLDSTEWDDIHVVTGALKLFLRELPQPLVPPLLLPHFRAALALSESEQCLSQIQELIGSMPKPNHDTLRYLLEHLCRVIAH

SEQ ID NO: 73431 - protein, 131 aa, Homo sapiens
  Payload ID: 14532
  Gene Symbol: ARHGAP9
  Gene Name: Rho GTPase activating protein 9
  ENSP ID: ENSP00000448424
MSEPPVYCNLVDLRRCPRSPPPGPACPLLQRLDAWEQHLDPNSGRCFYINSLTGCKSWKPPRRSRSETNPGSMEGTQTLKRNNDVLQPQAKGFRSDTGTPEPLDPQGSLSLSQRTSQLDPPALQAPRPLPQ

SEQ ID NO: 73432 - protein, 296 aa, Homo sapiens
  Payload ID: 14532
  Gene Symbol: ARHGAP9
  Gene Name: Rho GTPase activating protein 9
  ENSP ID: ENSP00000449829
MSEPPVYCNLVDLRRCPRSPPPGPACPLLQRLDAWEQHLDPNSGRCFYINSLTGCKSWKPPRRSRSETNPGSMEGTQTLKRNNDVLQPQAKGFRSDTGTPEPLDPQGSLSLSQRTSQLDPPALQAPRPLPQLLDDPHEVEKSGLLNMTKIAQGGRKLRKNWGPSWVVLTGNSLVFYREPPPTAPSSGWGPAGSRPESSVDLRGAALAHGRHLSSRRNVLHIRTIPGHEFLLQSDHETELRAWHRALRTVIERLDRENPLELRLSGSGPAELSAGEDEEEESELVSKPLLRLSSRRS

SEQ ID NO: 73433 - protein, 61 aa, Homo sapiens
  Payload ID: 14532
  Gene Symbol: ARHGAP9
  Gene Name: Rho GTPase activating protein 9
  ENSP ID: ENSP00000450223
MSEPPVYCNLVDLRRCPRSPPPGPACPLLQRLDAWEQHLDPNSGRCFYINSLTGCKSWKPP

SEQ ID NO: 73434 - protein, 152 aa, Homo sapiens
  Payload ID: 14532
  Gene Symbol: ARHGAP9
  Gene Name: Rho GTPase activating protein 9
  ENSP ID: ENSP00000450256
MSEPPVYCNLVDLRRCPRSPPPGPACPLLQRLDAWEQHLDPNSGRCFYINSLTGCKSWKPPRRSRSETNPGSMEGTQTLKRNNDVLQPQAKGFRSDTGTPEPLDPQEVEKSGLLNMTKIAQGGRKLRKNWGPSWVVLTGNSLVFYREPPPTA

SEQ ID NO: 73435 - protein, 736 aa, Homo sapiens
  Payload ID: 14532
  Gene Symbol: ARHGAP9
  Gene Name: Rho GTPase activating protein 9
  ENSP ID: ENSP00000473445
MISAQCNLCLPGSSDSCASGSQVAGTTVAGPAHPESLTLCSGEAERRGKEEWPDSHHYPGPTPAPESSDGPHKVTVLATMLSSRWWPSSWGILGLGPRSPPRGSQLCALYAFTYTGADGQQVSLAEGDRFLLLRKTNSDWWLARRLEAPSTSRPIFVPAAYMIEESIPSQSPTTVIPGQLLWTPGPKLFHGSLEELSQALPSRAQASSEQPPPLPRKMCRSVSTDNLSPSLLKPFQEGPSGRSLSQEDLPSEASASTAGPQPLMSEPPVYCNLVDLRRCPRSPPPGPACPLLQRLDAWEQHLDPNSGRCFYINSLTGCKSWKPPRRSRSETNPGSMEGTQTLKRNNDVLQPQAKGFRSDTGTPEPLDPQGSLSLSQRTSQLDPPALQAPRPLPQLLDDPHEVEKSGLLNMTKIAQGGRKLRKNWGPSWVVLTGNSLVFYREPPPTAPSSGWGPAGSRPESSVDLRGAALAHGRHLSSRRNVLHIRTIPGHEFLLQSDHETELRAWHRALRTVIERLDRENPLELRLSGSGPAELSAGEDEEEESELVSKPLLRLSSRRSSIRGPEGTEQNRVRNKLKRLIAKRPPLQSLQERGLLRDQVFGCQLESLCQREGDTVPSFLRLCIAAVDKRGLDVDGIYRVSGNLAVVQKLRFLVDRERAVTSDGRYVFPEQPGQEGRLDLDSTEWDDIHVVTGALKLFLRELPQPLVPPLLLPHFRAALAVPLSDTRINRLNAKAQP

SEQ ID NO: 73436 - protein, 927 aa, Homo sapiens
  Payload ID: 14533
  Gene Symbol: ARHGEF1
  Gene Name: Rho guanine nucleotide exchange factor (GEF) 1
  Uniprot ID: Q92888
  ENSP ID: ENSP00000337261
MASLSTWSSPAEPREMEDFARGAASPGPSRPGLVPVSIIGAEDEDFENELETNSEEQNSQFQSLEQVKRRPAHLMALLQHVALQFEPGPLLCCLHADMLGSLGPKEAKKAFLDFYHSFLEKTAVLRVPVPPNVAFELDRTRADLISEDVQRRFVQEVVQSQQVAVGRQLEDFRSKRLMGMTPWEQELAQLEAWVGRDRASYEARERHVAERLLMHLEEMQHTISTDEEKSAAVVNAIGLYMRHLGVRTKSGDKKSGRNFFRKKVMGNRRSDEPAKTKKGLSSILDAARWNRGEPQVPDFRHLKAEVDAEKPGATDRKGGVGMPSRDRNIGAPGQDTPGVSLHPLSLDSPDREPGADAPLELGDSSPQGPMSLESLAPPESTDEGAETESPEPGDEGEPGRSGLELEPEEPPGWRELVPPDTLHSLPKSQVKRQEVISELLVTEAAHVRMLRVLHDLFFQPMAECLFFPLEELQNIFPSLDELIEVHSLFLDRLMKRRQESGYLIEEIGDVLLARFDGAEGSWFQKISSRFCSRQSFALEQLKAKQRKDPRFCAFVQEAESRPRCRRLQLKDMIPTEMQRLTKYPLLLQSIGQNTEEPTEREKVELAAECCREILHHVNQAVRDMEDLLRLKDYQRRLDLSHLRQSSDPMLSEFKNLDITKKKLVHEGPLTWRVTKDKAVEVHVLLLDDLLLLLQRQDERLLLKSHSRTLTPTPDGKTMLRPVLRLTSAMTREVATDHKAFYVLFTWDQEAQIYELVAQTVSERKNWCALITETAGSLKVPAPASRPKPRPSPSSTREPLLSSSENGNGGRETSPADARTERILSDLLPFCRPGPEGQLAATALRKVLSLKQLLFPAEEDNGAGPPRDGDGVPGGGPLSPARTQEIQENLLSLEETMKQLEELEEEFCRLRPLLSQLGGNSVPQPGCT

SEQ ID NO: 73437 - protein, 879 aa, Homo sapiens
  Payload ID: 14533
  Gene Symbol: ARHGEF1
  Gene Name: Rho guanine nucleotide exchange factor (GEF) 1
  Uniprot ID: Q92888
  ENSP ID: ENSP00000344429
MEDFARGAASPGPSRPGLVPVSIIGAEDEDFENELETNSEEQNSQFQSLEQVKRRPAHLMALLQHVALQFEPGPLVLRVPVPPNVAFELDRTRADLISEDVQRRFVQEVVQSQQVAVGRQLEDFRSKRLMGMTPWEQELAQLEAWVGRDRASYEARERHVAERLLMHLEEMQHTISTDEEKSAAVVNAIGLYMRHLGVRTKSGDKKSGRNFFRKKVMGNRRSDEPAKTKKGLSSILDAARWNRGEPQVPDFRHLKAEVDAEKPGATDRKGGVGMPSRDRNIGAPGQDTPGVSLHPLSLDSPDREPGADAPLELGDSSPQGPMSLESLAPPESTDEGAETESPEPGDEGEPGRSGLELEPEEPPGWRELVPPDTLHSLPKSQVKRQEVISELLVTEAAHVRMLRVLHDLFFQPMAECLFFPLEELQNIFPSLDELIEVHSLFLDRLMKRRQESGYLIEEIGDVLLARFDGAEGSWFQKISSRFCSRQSFALEQLKAKQRKDPRFCAFVQEAESRPRCRRLQLKDMIPTEMQRLTKYPLLLQSIGQNTEEPTEREKVELAAECCREILHHVNQAVRDMEDLLRLKDYQRRLDLSHLRQSSDPMLSEFKNLDITKKKLVHEGPLTWRVTKDKAVEVHVLLLDDLLLLLQRQDERLLLKSHSRTLTPTPDGKTMLRPVLRLTSAMTREVATDHKAFYVLFTWDQEAQIYELVAQTVSERKNWCALITETAGSLKVPAPASRPKPRPSPSSTREPLLSSSENGNGGRETSPADARTERILSDLLPFCRPGPEGQLAATALRKVLSLKQLLFPAEEDNGAGPPRDGDGVPGGGPLSPARTQEIQENLLSLEETMKQLEELEEEFCRLRPLLSQLGGNSVPQPGCT

SEQ ID NO: 73438 - protein, 912 aa, Homo sapiens
  Payload ID: 14533
  Gene Symbol: ARHGEF1
  Gene Name: Rho guanine nucleotide exchange factor (GEF) 1
  Uniprot ID: Q92888
  ENSP ID: ENSP00000346532
MEDFARGAASPGPSRPGLVPVSIIGAEDEDFENELETNSEEQNSQFQSLEQVKRRPAHLMALLQHVALQFEPGPLLCCLHADMLGSLGPKEAKKAFLDFYHSFLEKTAVLRVPVPPNVAFELDRTRADLISEDVQRRFVQEVVQSQQVAVGRQLEDFRSKRLMGMTPWEQELAQLEAWVGRDRASYEARERHVAERLLMHLEEMQHTISTDEEKSAAVVNAIGLYMRHLGVRTKSGDKKSGRNFFRKKVMGNRRSDEPAKTKKGLSSILDAARWNRGEPQVPDFRHLKAEVDAEKPGATDRKGGVGMPSRDRNIGAPGQDTPGVSLHPLSLDSPDREPGADAPLELGDSSPQGPMSLESLAPPESTDEGAETESPEPGDEGEPGRSGLELEPEEPPGWRELVPPDTLHSLPKSQVKRQEVISELLVTEAAHVRMLRVLHDLFFQPMAECLFFPLEELQNIFPSLDELIEVHSLFLDRLMKRRQESGYLIEEIGDVLLARFDGAEGSWFQKISSRFCSRQSFALEQLKAKQRKDPRFCAFVQEAESRPRCRRLQLKDMIPTEMQRLTKYPLLLQSIGQNTEEPTEREKVELAAECCREILHHVNQAVRDMEDLLRLKDYQRRLDLSHLRQSSDPMLSEFKNLDITKKKLVHEGPLTWRVTKDKAVEVHVLLLDDLLLLLQRQDERLLLKSHSRTLTPTPDGKTMLRPVLRLTSAMTREVATDHKAFYVLFTWDQEAQIYELVAQTVSERKNWCALITETAGSLKVPAPASRPKPRPSPSSTREPLLSSSENGNGGRETSPADARTERILSDLLPFCRPGPEGQLAATALRKVLSLKQLLFPAEEDNGAGPPRDGDGVPGGGPLSPARTQEIQENLLSLEETMKQLEELEEEFCRLRPLLSQLGGNSVPQPGCT

SEQ ID NO: 73439 - protein, 948 aa, Homo sapiens
  Payload ID: 14533
  Gene Symbol: ARHGEF1
  Gene Name: Rho guanine nucleotide exchange factor (GEF) 1
  Uniprot ID: Q92888
  ENSP ID: ENSP00000367394
MASLSTWSSPAEPREMEDFARGAASPGPSRPGLVPVSIIGAEDEDFENELETNSEEQNSQFQSLEQVKRRPAHLMALLQHVALQFEPGPLVLRVPVPPNVAFELDRTRADLISEDVQRRFVQEVVQSQQVAVGRQLEDFRSKRLMGMTPWEQELAQLEAWVGRDRASYEARERHVAERLLMHLEEMQHTISTDEEKSAAVVNAIGLYMRHLGVRTKSGDKKSGRNFFRKKVMGNRRSDEPAKTKKGLSSILDAARWNRGEPQVPDFRHLKAEVDAEKPGATDRKGGVGMPSRDRNIGAPGQDTPGVSLHPLSLDSPDREPGADAPLELGDSSPQGPMSLESLAPPESTDEGAETESPEPGDEGEPGRSGLELEPEEPPGWRELVPPDTLHSLPKSQVKRQEVISELLVTEAAHVRMLRVLHDLFFQPMAECLFFPLEELQNIFPSLDELIEVHSLFLDRLMKRRQESGYLIEEIGDVLLARFDGAEGSWFQKISSRFCSRQSFALEQLKAKQRKDPRFCAFVQEAESRPRCRRLQLKDMIPTEMQRLTKYPLLLQSIGQNTEEPTEREKVELAAECCREILHHVNQAVRDMEDLLRLKDYQRRLDLSHLRQSSDPMLSEFKNLDITKKKLVHEGPLTWRVTKDKAVEVHVLLLDDLLLLLQRQDERLLLKSHSRTLTPTPDGKTMLRPVLRLTSAMTREVATDHKAFYVLFTWDQEAQIYELVAQTVSERKNWCALITETAGSLKVPAPASRPKPRPSPSSTREPLLSSSENGNGGRETSPADARTERILSDLLPFCRPGPEGQLAATALRKGVGGGILPPETPPVSAWGELCPPAWLHLRFPPRKAFCKKERNGGEDVRDHPHPHSCRSISHPEGLRRGSCGPRLGGAQLGLLAPHEPRPSLPPALCLGDSGLHSGGHHGDPGHLSIACGGHPSTPTPKCLRSVFIP

SEQ ID NO: 73440 - protein, 68 aa, Homo sapiens
  Payload ID: 14533
  Gene Symbol: ARHGEF1
  Gene Name: Rho guanine nucleotide exchange factor (GEF) 1
  ENSP ID: ENSP00000469409
  MOD_RES (1)..(1): Any amino acid
XVHVLLLDDLLLLLQRQDERLLLKSHSRTLTPTPDGKTMLRPVLRLTSAMTREVATAGVLSSLRLPDP

SEQ ID NO: 73441 - protein, 702 aa, Homo sapiens
  Payload ID: 14533
  Gene Symbol: ARHGEF1
  Gene Name: Rho guanine nucleotide exchange factor (GEF) 1
  ENSP ID: ENSP00000469735
  MOD_RES (1)..(1): Any amino acid
XGVGMPSRDRNIGAPGQDTPGVSLHPLSLDSPDREPGADAPLELGDSSPQGPMSLESLAPPESTDEGAETERRWKRLSGRLGRSESLRVSDRRRPSRGSLGAKGRGGGRSRSDVDMDPSSATAVLGPARRATPEPGDEGEPGRSGLELEPEEPPGWRELVPPDTLHSLPKSQVKRQEVISELLVTEAAHVRMLRVLHDLFFQPMAECLFFPLEELQNIFPSLDELIEVHSLFLDRLMKRRQESGYLIEEIGDVLLARFDGAEGSWFQKISSRFCSRQSFALEQLKAKQRKDPRFCAFVQEAESRPRCRRLQLKDMIPTEMQRLTKYPLLLQSIGQNTEEPTEREKVELAAECCREILHHVNQAVRDMEDLLRLKDYQRRLDLSHLRQSSDPMLSEFKNLDITKKKLVHEGPLTWRVTKDKAVEVHVLLLDDLLLLLQRQDERLLLKSHSRTLTPTPDGKTMLRPVLRLTSAMTREVATDHKAFYVLFTWDQEAQIYELVAQTVSERKNWCALITETAGSLKVPAPASRPKPRPSPSSTREPLLSSSENGNGGRETSPADARTERILSDLLPFCRPGPEGQLAATALRKGVGGGILPPETPPVSAWGELCPPAWLHLRFPPRKHPILTTTCEVGTAMMDAHFTDVETEVLTGKVTWPKSHRDEVSLDLNAGARWRWRRCVQDPCWTRKPGPGLEHGPAHTQPG

SEQ ID NO: 73442 - protein, 307 aa, Homo sapiens
  Payload ID: 14533
  Gene Symbol: ARHGEF1
  Gene Name: Rho guanine nucleotide exchange factor (GEF) 1
  ENSP ID: ENSP00000470042
  MOD_RES (1)..(1): Any amino acid
XTSVPALVSPRLCPCPGFSSSLFLSWSLLVSVPGICLTLSLASGSRLSGRLGRSESLRVSDRRRPSRGSLGAKGRGGGRSRSDVDMDPSSATAVLGPARRATPEPGDEGEPGRSGLELEPEEPPGWRELVPPDTLHSLPKSQVKRQEVISELLVTEAAHVRMLRVLHDLFFQPMAECLFFPLEELQNIFPSLDELIEVHSLFLDRLMKRRQESGYLIEEIGDVLLARFDGAEGSWFQKISSRFCSRQSFALEQLKAKQRKDPRFCAFVQEAESRPRCRRLQLKDMIPTEMQRLTKYPLLLQSIGQNT

SEQ ID NO: 73443 - protein, 275 aa, Homo sapiens
  Payload ID: 14533
  Gene Symbol: ARHGEF1
  Gene Name: Rho guanine nucleotide exchange factor (GEF) 1
  ENSP ID: ENSP00000470557
FFRKKVMGNRRSDEPAKTKKGLSSILDAARWNRGEPQAEKPGATDRKGGVGMPSRDRNIGAPGQDTPGVSLHPLSLDSPDREPGADAPLELGDSSPQGPMSLESLAPPESTDEGAETERRWKRLSGRLGRSESLRVSDRRRPSRGSLGAKGRGGGRSRSDVDMDPSSATAVLGPARRATPEPGDEGEPGRSGLELEPEEPPGWRELVPPDTLHSLPKSQVKRQEVISELLVTEAAHVRMLRVLHDLFFQPMAECLFFPLEELQNIFPSLDELIEV

SEQ ID NO: 73444 - protein, 968 aa, Homo sapiens
  Payload ID: 14533
  Gene Symbol: ARHGEF1
  Gene Name: Rho guanine nucleotide exchange factor (GEF) 1
  ENSP ID: ENSP00000470715
MEDFARGAASPGPSRPGLVPVSIIGAEDEDFENELETNSEEQNSQFQSLEQVKRRPAHLMALLQHVALQFEPGPLLCCLHADMLGSLGPKEAKKAFLDFYHSFLEKTAVLRVPVPPNVAFELDRTRADLISEDVQRRFVQEVVQSQQVAVGRQLEDFRSKRLMGMTPWEQELAQLEAWVGRDRASYEARERHVAERLLMHLEEMQHTISTDEEKSAAVVNAIGLYMRHLGVRTKSGDKKSGRNFFRKKVMGNRRSDEPAKTKKGLSSILDAARWNRGEPQVPDFRHLKAEVDAEKPGATDRKGGVGMPSRDRNIGAPGQDTPGVSLHPLSLDSPDREPGADAPLELGDSSPQGPMSLESLAPPESTDEGAETERLSGRLGRSESLRVSDRRRPSRGSLGAKGRGGGRSRSDVDMDPSSATAVLGPARRATPEPGDEGEPGRSGLELEPEEPPGWRELVPPDTLHSLPKSQVKRQEVISELLVTEAAHVRMLRVLHDLFFQPMAECLFFPLEELQNIFPSLDELIEVHSLFLDRLMKRRQESGYLIEEIGDVLLARFDGAEGSWFQKISSRFCSRQSFALEQLKAKQRKDPRFCAFVQEAESRPRCRRLQLKDMIPTEMQRLTKYPLLLQSIGQNTEEPTEREKVELAAECCREILHHVNQAVRDMEDLLRLKDYQRRLDLSHLRQSSDPMLSEFKNLDITKKKLVHEGPLTWRVTKDKAVEVHVLLLDDLLLLLQRQDERLLLKSHSRTLTPTPDGKTMLRPVLRLTSAMTREVATDHKAFYVLFTWDQEAQIYELVAQTVSERKNWCALITETAGSLKVPAPASRPKPRPSPSSTREPLLSSSENGNGGRETSPADARTERILSDLLPFCRPGPEGQLAATALRKVLSLKQLLFPAEEDNGAGPPRDGDGVPGGGPLSPARTQEIQENLLSLEETMKQLEELEEEFCRLRPLLSQLGGNSVPQPGCT

SEQ ID NO: 73445 - protein, 128 aa, Homo sapiens
  Payload ID: 14533
  Gene Symbol: ARHGEF1
  Gene Name: Rho guanine nucleotide exchange factor (GEF) 1
  ENSP ID: ENSP00000471942
  MOD_RES (1)..(1): Any amino acid
XPILTTTCEVGTAMMDAHFTDVETEVLTGKVTWPKSHRDEVSLDLNAVDARTNGQARGGGGDDASRTPAGHASLDRDWNTDPHTRSLDRRYTDRGTYGYSQAPPRQVPHHLLWGKAALTWAAPGGFYP

SEQ ID NO: 73446 - protein, 291 aa, Homo sapiens
  Payload ID: 14533
  Gene Symbol: ARHGEF1
  Gene Name: Rho guanine nucleotide exchange factor (GEF) 1
  ENSP ID: ENSP00000472466
  MOD_RES (1)..(1): Any amino acid
XPRCRRLQLKDMIPTEMQRLTKYPLLLQSIGQNTEEPTEREKVELAAECCREILHHVNQAVRDMEDLLRLKDYQRRLDLSHLRQSSDPMLSEFKNLDITKKKLVHEGPLTWRVTKDKAVEVHVLLLDDLLLLLQRQDERLLLKSHSRTLTPTPDGKTMLRPVLRLTSAMTREVATDHKAFYVLFTWDQEAQIYELVAQTVSERKNTREPLLSSSENGNGGRETSPADARTERILSDLLPFCRPGPEGQLAATALRKVLSLKQLLFPAEEDNGAGPPRDGDGVPGGGPLSPA

SEQ ID NO: 73447 - protein, 88 aa, Homo sapiens
  Payload ID: 14533
  Gene Symbol: ARHGEF1
  Gene Name: Rho guanine nucleotide exchange factor (GEF) 1
  ENSP ID: ENSP00000473229
  MOD_RES (1)..(1): Any amino acid
XVQRRFVQEVVQSQQVAVGRQLEDFRSKRLMGMTPWEQELAQLEAWVGRDRASYEARERHVAERLLMHLEEMQTATLRCILGGWGPQA

SEQ ID NO: 73448 - protein, 1344 aa, Homo sapiens
  Payload ID: 14534
  Gene Symbol: ARHGEF10
  Gene Name: Rho guanine nucleotide exchange factor (GEF) 10
  Uniprot ID: O15013
  ENSP ID: ENSP00000340297
MDQREPLPPAPAENEMKYDTNNNEEEEGEQFDFDSGDEIPEADRQAPSAPETGGAGASEAPAPTGGEDGAGAETTPVAEPTKLVLPMKVNPYSVIDITPFQEDQPPTPVPSAEEENVGLHVPCGYLVPVPCGYAVPSNLPLLLPAYSSPVIICATSLDEEETPEVTEDRQPNSLSSEEPPTSEDQVGREDSALARWAADPANTAWMENPEEAIYDDVPRENSDSEPDEMIYDDVENGDEGGNSSLEYGWSSSEFESYEEQSDSECKNGIPRSFLRSNHKKQLSHDLTRLKEHYEKKMRDLMASTVGVVEIQQLRQKHELKMQKLVKAAKDGTKDGLERTRAAVKRGRSFIRTKSLIAQDHRSSLEEEQNLFIDVDCKHPEAILTPMPEGLSQQQVVRRYILGSVVDSEKNYVDALKRILEQYEKPLSEMEPKVLSERKLKTVFYRVKEILQCHSLFQIALASRVSEWDSVEMIGDVFVASFSKSMVLDAYSEYVNNFSTAVAVLKKTCATKPAFLEFLKQEQEASPDRTTLYSLMMKPIQRFPQFILLLQDMLKNTSKGHPDRLPLQMALTELETLAEKLNERKRDADQRCEVKQIAKAINERYLNKLLSSGSRYLIRSDDMIETVYNDRGEIVKTKERRVFMLNDVLMCATVSSRPSHDSRVMSSQRYLLKWSVPLGHVDAIEYGSSAGTGEHSRHLAVHPPESLAVVANAKPNKVYMGPGQLYQDLQNLLHDLNVIGQITQLIGNLKGNYQNLNQSVAHDWTSGLQRLILKKEDEIRAADCCRIQLQLPGKQDKSGRPTFFTAVFNTFTPAIKESWVNSLQMAKLALEEENHMGWFCVEDDGNHIKKEKHPLLVGHMPVMVAKQQEFKIECAAYNPEPYLNNESQPDSFSTAHGFLWIGSCTHQMGQIAIVSFQNSTPKVIECFNVESRILCMLYVPVEEKRREPGAPPDPETPAVRASDVPTICVGTEEGSISIYKSSQGSKKVRLQHFFTPEKSTVMSLACTSQSLYAGLVNGAVASYARAPDGSWDSEPQKVIKLGVLPVRSLLMMEDTLWAASGGQVFIISVETHAVEGQLEAHQEEGMVISHMAVSGVGIWIAFTSGSTLRLFHTETLKHLQDINIATPVHNMLPGHQRLSVTSLLVCHGLLMVGTSLGVLVALPVPRLQGIPKVTGRGMVSYHAHNSPVKFIVLATALHEKDKDKSRDSLAPGPEPQDEDQKDALPSGGAGSSLSQGDPDAAIWLGDSLGSMTQKSDLSSSSGSLSLSHGSSSLEHRSEDSTIYDLLKDPVSLRSKARRAKKAKASSALVVCGGQGHRRVHRKARQPHQEELAPTVMVWQIPLLNI

SEQ ID NO: 73449 - protein, 380 aa, Homo sapiens
  Payload ID: 14534
  Gene Symbol: ARHGEF10
  Gene Name: Rho guanine nucleotide exchange factor (GEF) 10
  ENSP ID: ENSP00000381568
MENPEEAIYDDVPRENSDSEPDEMIYDDVENGDEGGNSSLEYGWSSSEFESYEEQSDSECKNGIPRSFLRSNHKKQMQKLVKAAKDGTKDGLERTRAAVKRGRSFIRTKSLIAQDHRSSLEEEQNLFIDVDCKHPEAILTPMPEGLSQQQVVRRYILGSVVDSEKNYVDALKRILEQYEKPLSEMEPKVLSERKLKTVFYRVKEILQCHSLFQIALASRVSEWDSVEMIGDVFVASFSKSMVLDAYSEYVNNFSTAVAVLKKTCATKPAFLEFLKQEQEASPDRTTLYSLMMKPIQRFPQFILLLQDMLKNTSKGHPDRLPLQMALTELETLAEKLNERKRDADQRCEVKQIAKAINERYLNKVERGFLQLYSKIIFALC

SEQ ID NO: 73450 - protein, 1369 aa, Homo sapiens
  Payload ID: 14534
  Gene Symbol: ARHGEF10
  Gene Name: Rho guanine nucleotide exchange factor (GEF) 10
  Uniprot ID: O15013
  ENSP ID: ENSP00000381571
MRPPGFLSRAPSLNRAERGIWSCSMDQREPLPPAPAENEMKYDTNNNEEEEGEQFDFDSGDEIPEADRQAPSAPETGGAGASEAPAPTGGEDGAGAETTPVAEPTKLVLPMKVNPYSVIDITPFQEDQPPTPVPSAEEENVGLHVPCGYLVPVPCGYAVPSNLPLLLPAYSSPVIICATSLDEEAETPEVTEDRQPNSLSSEEPPTSEDQVGREDSALARWAADPANTAWMENPEEAIYDDVPRENSDSEPDEMIYDDVENGDEGGNSSLEYGWSSSEFESYEEQSDSECKNGIPRSFLRSNHKKQLSHDLTRLKEHYEKKMRDLMASTVGVVEIQQLRQKHELKMQKLVKAAKDGTKDGLERTRAAVKRGRSFIRTKSLIAQDHRSSLEEEQNLFIDVDCKHPEAILTPMPEGLSQQQVVRRYILGSVVDSEKNYVDALKRILEQYEKPLSEMEPKVLSERKLKTVFYRVKEILQCHSLFQIALASRVSEWDSVEMIGDVFVASFSKSMVLDAYSEYVNNFSTAVAVLKKTCATKPAFLEFLKQEQEASPDRTTLYSLMMKPIQRFPQFILLLQDMLKNTSKGHPDRLPLQMALTELETLAEKLNERKRDADQRCEVKQIAKAINERYLNKLLSSGSRYLIRSDDMIETVYNDRGEIVKTKERRVFMLNDVLMCATVSSRPSHDSRVMSSQRYLLKWSVPLGHVDAIEYGSSAGTGEHSRHLAVHPPESLAVVANAKPNKVYMGPGQLYQDLQNLLHDLNVIGQITQLIGNLKGNYQNLNQSVAHDWTSGLQRLILKKEDEIRAADCCRIQLQLPGKQDKSGRPTFFTAVFNTFTPAIKESWVNSLQMAKLALEEENHMGWFCVEDDGNHIKKEKHPLLVGHMPVMVAKQQEFKIECAAYNPEPYLNNESQPDSFSTAHGFLWIGSCTHQMGQIAIVSFQNSTPKVIECFNVESRILCMLYVPVEEKRREPGAPPDPETPAVRASDVPTICVGTEEGSISIYKSSQGSKKVRLQHFFTPEKSTVMSLACTSQSLYAGLVNGAVASYARAPDGSWDSEPQKVIKLGVLPVRSLLMMEDTLWAASGGQVFIISVETHAVEGQLEAHQEEGMVISHMAVSGVGIWIAFTSGSTLRLFHTETLKHLQDINIATPVHNMLPGHQRLSVTSLLVCHGLLMVGTSLGVLVALPVPRLQGIPKVTGRGMVSYHAHNSPVKFIVLATALHEKDKDKSRDSLAPGPEPQDEDQKDALPSGGAGSSLSQGDPDAAIWLGDSLGSMTQKSDLSSSSGSLSLSHGSSSLEHRSEDSTIYDLLKDPVSLRSKARRAKKAKASSALVVCGGQGHRRVHRKARQPHQEELAPTVMVWQIPLLNI

SEQ ID NO: 73451 - protein, 988 aa, Homo sapiens
  Payload ID: 14534
  Gene Symbol: ARHGEF10
  Gene Name: Rho guanine nucleotide exchange factor (GEF) 10
  ENSP ID: ENSP00000427768
AKDGTKDGLERTRAAVKRGRSFIRTKSLIAQDHRSSLEEEQNLFIDVDCKHPEAILTPMPEGLSQQQVVRRYILGSVVDSEKNYVDALKRILEQYEKPLSEMEPKVLSERKLKTVFYRVKEILQCHSLFQIALASRVSEWDSVEMIGDVFVASFSKSMVLDAYSEYVNNFSTAVAVLKKTCATKPAFLEFLKQEQEASPDRTTLYSLMMKPIQRFPQFILLLQDMLKNTSKGHPDRLPLQMALTELETLAEKLNERKRDADQRCEVKQIAKAINERYLNKLLSSGSRYLIRSDDMIETVYNDRGEIVKTKERRVFMLNDVLMCATVSSRPSHDSRVMSSQRYLLKWSVPLGHVDAIEYGSSAGTGEHSRHLAVHPPESLAVVANAKPNKVYMGPGQLYQDLQNLLHDLNVIGQITQLIGNLKGNYQNLNQSVAHDWTSGLQRLILKKEDEIRAADCCRIQLQLPGKQDKSGRPTFFTAVFNTFTPAIKESWVNSLQMAKLALEEENHMGWFCVEDDGNHIKKEKHPLLVGHMPVMVAKQQEFKIGSCTHQMGQIAIVSFQNSTPKVIECFNVESRILCMLYVPVEEKRREPGAPPDPETPAVRASDVPTICVGTEEGSISIYKSSQGSKKVRLQHFFTPEKSTVMSLACTSQSLYAGLVNGAVASYARAPDGSWDSEPQKVIKLGVLPVRSLLMMEDTLWAASGGQVFIISVETHAVEGQLEAHQEEGMVISHMAVSGVGIWIAFTSGSTLRLFHTETLKHLQDINIATPVHNMLPGHQRLSVTSLLVCHGLLMVGTSLGVLVALPVPRLQGIPKVTGRGMVSYHAHNSPVKFIVLATALHEKDKDKSRDSLAPGPEPQDEDQKDALPSGGAGSSLSQGDPDAAIWLGDSLGSMTQKSDLSSSSGSLSLSHGSSSLEHRSEDSTIYDLLKDPVSLRSKARRAKKAKASSALVVCGGQGHRRVHRKARQPHQEELAPTVMVWQIPLLNI

SEQ ID NO: 73452 - protein, 1306 aa, Homo sapiens
  Payload ID: 14534
  Gene Symbol: ARHGEF10
  Gene Name: Rho guanine nucleotide exchange factor (GEF) 10
  Uniprot ID: O15013
  ENSP ID: ENSP00000427909
MDQREPLPPAPAENEMKYDTNNNEEEEGEQFDFDSGDEIPEADRQAPSAPETGGAGASEAPAPTGGEDGAGAETTPVAEPTKLVLPMKVNPYSVIDITPFQEDQPPTPVPSAEEENVGLHVPCGYLVPVPCGYAVPSNLPLLLPAYSSPVIICATSLDEEAETPEVTEDRQPNSLSSEEPPTSEDQVGREDSALARWAADPANTAWMENPEEAIYDDVPRENSDSEPDEMIYDDVENGDEGGNSSLEYGWSSSEFESYEEQSDSECKNGIPRSFLRSNHKKQMQKLVKAAKDGTKDGLERTRAAVKRGRSFIRTKSLIAQDHRSSLEEEQNLFIDVDCKHPEAILTPMPEGLSQQQVVRRYILGSVVDSEKNYVDALKRILEQYEKPLSEMEPKVLSERKLKTVFYRVKEILQCHSLFQIALASRVSEWDSVEMIGDVFVASFSKSMVLDAYSEYVNNFSTAVAVLKKTCATKPAFLEFLKQEQEASPDRTTLYSLMMKPIQRFPQFILLLQDMLKNTSKGHPDRLPLQMALTELETLAEKLNERKRDADQRCEVKQIAKAINERYLNKLLSSGSRYLIRSDDMIETVYNDRGEIVKTKERRVFMLNDVLMCATVSSRPSHDSRVMSSQRYLLKWSVPLGHVDAIEYGSSAGTGEHSRHLAVHPPESLAVVANAKPNKVYMGPGQLYQDLQNLLHDLNVIGQITQLIGNLKGNYQNLNQSVAHDWTSGLQRLILKKEDEIRAADCCRIQLQLPGKQDKSGRPTFFTAVFNTFTPAIKESWVNSLQMAKLALEEENHMGWFCVEDDGNHIKKEKHPLLVGHMPVMVAKQQEFKIECAAYNPEPYLNNESQPDSFSTAHGFLWIGSCTHQMGQIAIVSFQNSTPKVIECFNVESRILCMLYVPVEEKRREPGAPPDPETPAVRASDVPTICVGTEEGSISIYKSSQGSKKVRLQHFFTPEKSTVMSLACTSQSLYAGLVNGAVASYARAPDGSWDSEPQKVIKLGVLPVRSLLMMEDTLWAASGGQVFIISVETHAVEGQLEAHQEEGMVISHMAVSGVGIWIAFTSGSTLRLFHTETLKHLQDINIATPVHNMLPGHQRLSVTSLLVCHGLLMVGTSLGVLVALPVPRLQGIPKVTGRGMVSYHAHNSPVKFIVLATALHEKDKDKSRDSLAPGPEPQDEDQKDALPSGGAGSSLSQGDPDAAIWLGDSLGSMTQKSDLSSSSGSLSLSHGSSSLEHRSEDSTIYDLLKDPVSLRSKARRAKKAKASSALVVCGGQGHRRVHRKARQPHQEELAPTVMVWQIPLLNI

SEQ ID NO: 73453 - protein, 1368 aa, Homo sapiens
  Payload ID: 14534
  Gene Symbol: ARHGEF10
  Gene Name: Rho guanine nucleotide exchange factor (GEF) 10
  Uniprot ID: O15013
  ENSP ID: ENSP00000431012
MRPPGFLSRAPSLNRAERGIWSCSMDQREPLPPAPAENEMKYDTNNNEEEEGEQFDFDSGDEIPEADRQAPSAPETGGAGASEAPAPTGGEDGAGAETTPVAEPTKLVLPMKVNPYSVIDITPFQEDQPPTPVPSAEEENVGLHVPCGYLVPVPCGYAVPSNLPLLLPAYSSPVIICATSLDEEAETPEVTEDRQPNSLSSEEPPTSEDQVGREDSALARWAADPANTAWMENPEEAIYDDVPRENSDSEPDEMIYDDVENGDEGGNSSLEYGWSSSEFESYEEQSDSECKNGIPRSFLRSNHKKQLSHDLTRLKEHYEKKMRDLMASTVGVVEIQQLRQKHELKMQKLVKAAKDGTKDGLERTRAAVKRGRSFIRTKSLIAQDHRSSLEEEQNLFIDVDCKHPEAILTPMPEGLSQQQVVRRYILGSVVDSEKNYVDALKRILEQYEKPLSEMEPKVLSERKLKTVFYRVKEILQCHSLFQIALASRVSEWDSVEMIGDVFVASFSKSMVLDAYSEYVNNFSTAVAVLKKTCATKPAFLEFLKEQEASPDRTTLYSLMMKPIQRFPQFILLLQDMLKNTSKGHPDRLPLQMALTELETLAEKLNERKRDADQRCEVKQIAKAINERYLNKLLSSGSRYLIRSDDMIETVYNDRGEIVKTKERRVFMLNDVLMCATVSSRPSHDSRVMSSQRYLLKWSVPLGHVDAIEYGSSAGTGEHSRHLAVHPPESLAVVANAKPNKVYMGPGQLYQDLQNLLHDLNVIGQITQLIGNLKGNYQNLNQSVAHDWTSGLQRLILKKEDEIRAADCCRIQLQLPGKQDKSGRPTFFTAVFNTFTPAIKESWVNSLQMAKLALEEENHMGWFCVEDDGNHIKKEKHPLLVGHMPVMVAKQQEFKIECAAYNPEPYLNNESQPDSFSTAHGFLWIGSCTHQMGQIAIVSFQNSTPKVIECFNVESRILCMLYVPVEEKRREPGAPPDPETPAVRASDVPTICVGTEEGSISIYKSSQGSKKVRLQHFFTPEKSTVMSLACTSQSLYAGLVNGAVASYARAPDGSWDSEPQKVIKLGVLPVRSLLMMEDTLWAASGGQVFIISVETHAVEGQLEAHQEEGMVISHMAVSGVGIWIAFTSGSTLRLFHTETLKHLQDINIATPVHNMLPGHQRLSVTSLLVCHGLLMVGTSLGVLVALPVPRLQGIPKVTGRGMVSYHAHNSPVKFIVLATALHEKDKDKSRDSLAPGPEPQDEDQKDALPSGGAGSSLSQGDPDAAIWLGDSLGSMTQKSDLSSSSGSLSLSHGSSSLEHRSEDSTIYDLLKDPVSLRSKARRAKKAKASSALVVCGGQGHRRVHRKARQPHQEELAPTVMVWQIPLLNI

SEQ ID NO: 73454 - protein, 380 aa, Homo sapiens; identical to SEQ ID NO: 73449
  Payload ID: 14534
  Gene Symbol: ARHGEF10
  Gene Name: Rho guanine nucleotide exchange factor (GEF) 10
  ENSP ID: ENSP00000477521

SEQ ID NO: 73455 - protein, 1344 aa, Homo sapiens; identical to SEQ ID NO: 73448
  Payload ID: 14534
  Gene Symbol: ARHGEF10
  Gene Name: Rho guanine nucleotide exchange factor (GEF) 10
  Uniprot ID: O15013
  ENSP ID: ENSP00000477988

SEQ ID NO: 73456 - protein, 1369 aa, Homo sapiens; identical to SEQ ID NO: 73450
  Payload ID: 14534
  Gene Symbol: ARHGEF10
  Gene Name: Rho guanine nucleotide exchange factor (GEF) 10
  Uniprot ID: O15013
  ENSP ID: ENSP00000481974

SEQ ID NO: 73457 - protein, 1306 aa, Homo sapiens; identical to SEQ ID NO: 73452
  Payload ID: 14534
  Gene Symbol: ARHGEF10
  Gene Name: Rho guanine nucleotide exchange factor (GEF) 10
  Uniprot ID: O15013
  ENSP ID: ENSP00000488343

SEQ ID NO: 73458 - protein, 988 aa, Homo sapiens; identical to SEQ ID NO: 73451
  Payload ID: 14534
  Gene Symbol: ARHGEF10
  Gene Name: Rho guanine nucleotide exchange factor (GEF) 10
  ENSP ID: ENSP00000488344

SEQ ID NO: 73459 - protein, 1368 aa, Homo sapiens; identical to SEQ ID NO: 73453
  Payload ID: 14534
  Gene Symbol: ARHGEF10
  Gene Name: Rho guanine nucleotide exchange factor (GEF) 10
  Uniprot ID: O15013
  ENSP ID: ENSP00000488463

SEQ ID NO: 73460 - protein, 611 aa, Homo sapiens
  Payload ID: 14535
  Gene Symbol: ARHGEF10L
  Gene Name: Rho guanine nucleotide exchange factor (GEF) 10-like
  Uniprot ID: Q9HCE6
  ENSP ID: ENSP00000167825
KPIQRFPQFILLLQDMLKNTPRGHPDRLSLQLALTELETLAEKLNEQKRLADQVAEIQQLTKSVSDRSSLNKLLTSGQRQLLLCETLTETVYGDRGQLIKSKERRVFLLNDMLVCANINFKGQLEISSLVPLGPKYVVKWNTALPQVQVVEVGQDGGTYDKDNVLIQHSGAKKASASGQAQNKVYLGPPRLFQELQDLQKDLAVVEQITLLISTLHGTYQNLNMTVAQDWCLALQRLMRVKEEEIHSANKCRLRLLLPGKPDKSGRPISFMVVFITPNPLSKISWVNRLHLAKIGLREENQPGWLCPDEDKKSKAPFWCPILACCIPAFSSRALSLQLGALVHSPVNCPLLGFSAVSTSLPQGYLWVGGGQEGAGGQVEIFSLNRPSPRTVKSFPLAAPVLCMEYIPELEEEAESRDESPTVADPSATVHPTICLGLQDGSILLYSSVDTGTQCLVSCRSPGLQPVLCLRHSPFHLLAGLQDGTLAAYPRTSGGVLWDLESPPVCLTVGPGPVRTLLSLEDAVWASCGPRVTVLEATTLQPQQSFEAHQDEAVSVTHMVKAGSGVWMAFSSGTSIRLFHTETLEHLQEINIATRTTFLLPDRSLIKCSPRA

SEQ ID NO: 73461 - protein, 1279 aa, Homo sapiens
  Payload ID: 14535
  Gene Symbol: ARHGEF10L
  Gene Name: Rho guanine nucleotide exchange factor (GEF) 10-like
  Uniprot ID: Q9HCE6
  ENSP ID: ENSP00000355060
MASSNPPPQPAIGDQLVPGVPGPSSEAEDDPGEAFEFDDSDDEEDTSAALGVPSLAPERDTDPPLIHLDSIPVTDPDPAAAPPGTGVPAWVSNGDAADAAFSGARHSSWKRKSSRRIDRFTFPALEEDVIYDDVPCESPDAHQPGAERNLLYEDAHRAGAPRQAEDLGWSSSEFESYSEDSGEEAKPEVEVEPAKHRVSFQPKLSPDLTRLKERYARTKRDILALRVGGRDMQELKHKYDCKMTQLMKAAKSGTKDGLEKTRMAVMRKVSFLHRKDVLGDSEEEDMGLLEVSVSDIKPPAPELGPMPEGLSPQQVVRRHILGSIVQSEGSYVESLKRILQDYRNPLMEMEPKALSARKCQVVFFRVKEILHCHSMFQIALSSRVAEWDSTEKIGDLFVASFSKSMVLDVYSDYVNNFTSAMSIIKKACLTKPAFLEFLKRRQVCSPDRVTLYGLMVKPIQRFPQFILLLQDMLKNTPRGHPDRLSLQLALTELETLAEKLNEQKRLADQVAEIQQLTKSVSDRSSLNKLLTSGQRQLLLCETLTETVYGDRGQLIKSKERRVFLLNDMLVCANINFKPANHRGQLEISSLVPLGPKYVVKWNTALPQVQVVEVGQDGGTYDKDNVLIQHSGAKKASASGQAQNKVYLGPPRLFQELQDLQKDLAVVEQITLLISTLHGTYQNLNMTVAQDWCLALQRLMRVKEEEIHSANKCRLRLLLPGKPDKSGRPISFMVVFITPNPLSKISWVNRLHLAKIGLREENQPGWLCPDEDKKSKAPFWCPILACCIPAFSSRALSLQLGALVHSPVNCPLLGFSAVSTSLPQGYLWVGGGQEGAGGQVEIFSLNRPSPRTVKSFPLAAPVLCMEYIPELEEEAESRDESPTVADPSATVHPTICLGLQDGSILLYSSVDTGTQCLVSCRSPGLQPVLCLRHSPFHLLAGLQDGTLAAYPRTSGGVLWDLESPPVCLTVGPGPVRTLLSLEDAVWASCGPRVTVLEATTLQPQQSFEAHQDEAVSVTHMVKAGSGVWMAFSSGTSIRLFHTETLEHLQEINIATRTTFLLPGQKHLCVTSLLICQGLLWVGTDQGVIVLLPVPRLEGIPKITGKGMVSLNGHCGPVAFLAVATSILAPDILRSDQEEAEGPRAEEDKPDGQAHEPMPDSHVGRELTRKKGILLQYRLRSTAHLPGPLLSMREPAPADGAALEHSEEDGSIYEMADDPDIWVRSRPCARDAHRKEICSVAIISGGQGYRNFGSALGSSGRQAPCGETDSTLLIWQVPLML

SEQ ID NO: 73462 - protein, 1052 aa, Homo sapiens
  Payload ID: 14535
  Gene Symbol: ARHGEF10L
  Gene Name: Rho guanine nucleotide exchange factor (GEF) 10-like
  ENSP ID: ENSP00000364557
MLPSSSWGKRKLRGRLGWVRSDARGVMWARQEGLHHPHPHAVIRCPSSSSSSVSCSGDSEEEDMGLLEVSVSDIKPPAPELGPMPEGLSPQQVVRRHILGSIVQSEGSYVESLKRILQDYRNPLMEMEPKALSARKCQVVFFRVKEILHCHSMFQIALSSRVAEWDSTEKIGDLFVASFSKSMVLDVYSDYVNNFTSAMSIIKKACLTKPAFLEFLKRRQVCSPDRVTLYGLMVKPIQRFPQFILLLQDMLKNTPRGHPDRLSLQLALTELETLAEKLNEQKRLADQVAEIQQLTKSVSDRSSLNKLLTSGQRQLLLCETLTETVYGDRGQLIKSKERRVFLLNDMLVCANINFKGQLEISSLVPLGPKYVVKWNTALPQVQVVEVGQDGGTYDKDNVLIQHSGAKKASASGQAQNKVYLGPPRLFQELQDLQKDLAVVEQITLLISTLHGTYQNLNMTVAQDWCLALQRLMRVKEEEIHSANKCRLRLLLPGKPDKSGRPISFMVVFITPNPLSKISWVNRLHLAKIGLREENQPGWLCPDEDKKSKAPFWCPILACCIPAFSSRALSLQLGALVHSPVNCPLLGFSAVSTSLPQGYLWVGGGQEGAGGQVEIFSLNRPSPRTVKSFPLAAPVLCMEYIPELEEEAESRDESPTVADPSATVHPTICLGLQDGSILLYSSVDTGTQCLVSCRSPGLQPVLCLRHSPFHLLAGLQDGTLAAYPRTSGGVLWDLESPPVCLTVGPGPVRTLLSLEDAVWASCGPRVTVLEATTLQPQQSFEAHQDEAVSVTHMVKAGSGVWMAFSSGTSIRLFHTETLEHLQEINIATRTTFLLPGQKHLCVTSLLICQGLLWVGTDQGVIVLLPVPRLEGIPKITGKGMVSLNGHCGPVAFLAVATSILAPDILRSDQEEAEGPRAEEDKPDGQAHEPMPDSHVGRELTRKKGILLQYRLRSTAHLPGPLLSMREPAPADGAALEHSEEDGSIYEMADDPDIWVRSRPCARDAHRKEICSVAIISGGQGYRNFGSALGSSGRQAPCGETDSTLLIWQVPLML

SEQ ID NO: 73463 - protein, 1240 aa, Homo sapiens
  Payload ID: 14535
  Gene Symbol: ARHGEF10L
  Gene Name: Rho guanine nucleotide exchange factor (GEF) 10-like
  Uniprot ID: Q9HCE6
  ENSP ID: ENSP00000364564
MASSNPPPQPAIGDQLVPGVPGPSSEAEDDPGEAFEFDDSDDEEDTSAALGVPSLAPERDTDPPLIHLDSIPVTDPDPAAAPPGTGVPAWVSNGDAADAAFSGARHSSWKRKSSRRIDRFTFPALEEDVIYDDVPCESPDAHQPGAERNLLYEDAHRAGAPRQAEDLGWSSSEFESYSEDSGEEAKPEVEVEPAKHRVSFQPKMTQLMKAAKSGTKDGLEKTRMAVMRKVSFLHRKDVLGDSEEEDMGLLEVSVSDIKPPAPELGPMPEGLSPQQVVRRHILGSIVQSEGSYVESLKRILQDYRNPLMEMEPKALSARKCQVVFFRVKEILHCHSMFQIALSSRVAEWDSTEKIGDLFVASFSKSMVLDVYSDYVNNFTSAMSIIKKACLTKPAFLEFLKRRQVCSPDRVTLYGLMVKPIQRFPQFILLLQDMLKNTPRGHPDRLSLQLALTELETLAEKLNEQKRLADQVAEIQQLTKSVSDRSSLNKLLTSGQRQLLLCETLTETVYGDRGQLIKSKERRVFLLNDMLVCANINFKPANHRGQLEISSLVPLGPKYVVKWNTALPQVQVVEVGQDGGTYDKDNVLIQHSGAKKASASGQAQNKVYLGPPRLFQELQDLQKDLAVVEQITLLISTLHGTYQNLNMTVAQDWCLALQRLMRVKEEEIHSANKCRLRLLLPGKPDKSGRPISFMVVFITPNPLSKISWVNRLHLAKIGLREENQPGWLCPDEDKKSKAPFWCPILACCIPAFSSRALSLQLGALVHSPVNCPLLGFSAVSTSLPQGYLWVGGGQEGAGGQVEIFSLNRPSPRTVKSFPLAAPVLCMEYIPELEEEAESRDESPTVADPSATVHPTICLGLQDGSILLYSSVDTGTQCLVSCRSPGLQPVLCLRHSPFHLLAGLQDGTLAAYPRTSGGVLWDLESPPVCLTVGPGPVRTLLSLEDAVWASCGPRVTVLEATTLQPQQSFEAHQDEAVSVTHMVKAGSGVWMAFSSGTSIRLFHTETLEHLQEINIATRTTFLLPGQKHLCVTSLLICQGLLWVGTDQGVIVLLPVPRLEGIPKITGKGMVSLNGHCGPVAFLAVATSILAPDILRSDQEEAEGPRAEEDKPDGQAHEPMPDSHVGRELTRKKGILLQYRLRSTAHLPGPLLSMREPAPADGAALEHSEEDGSIYEMADDPDIWVRSRPCARDAHRKEICSVAIISGGQGYRNFGSALGSSGRQAPCGETDSTLLIWQVPLML

SEQ ID NO: 73464 - protein, 1522 aa, Homo sapiens
  Payload ID: 14536
  Gene Symbol: ARHGEF11
  Gene Name: Rho guanine nucleotide exchange factor (GEF) 11
  Uniprot ID: O15085
  ENSP ID: ENSP00000354644
MSVRLPQSIDRLSSLSSLGDSAPERKSPSHHRQPSDASETTGLVQRCVIIQKDQHGFGFTVSGDRIVLVQSVRPGGAAMKAGVKEGDRIIKVNGTMVTNSSHLEVVKLIKSGAYVALTLLGSSPSSMGISGLQQDPSPAGAPRITSVIPSPPPPPPLPPPQRITGPKPLQDPEVQKHATQILRNMLRQEEKELQDILPLYGDTSQRPSEGRLSLDSQEGDSGLDSGTERFPSLSESLMNRNSVLSDPGLDSPRTSPVIMARVAQHHRRQGSDAAVPSTGDQGVDQSPKPLIIGPEEDYDPGYFNNESDIIFQDLEKLKSRPAHLGVFLRYIFSQADPSPLLFYLCAEVYQQASPKDSRSLGKDIWNIFLEKNAPLRVKIPEMLQAEIDSRLRNSEDARGVLCEAQEAAMPEIQEQIHDYRTKRTLGLGSLYGENDLLDLDGDPLRERQVAEKQLAALGDILSKYEEDRSAPMDFALNTYMSHAGIRLREARPSNTAEKAQSAPDKDKWLPFFPKTKKSSNSKKEKDALEDKKRNPILKYIGKPKSSSQSTFHIPLSPVEVKPGNVRNIIQHFENNQQYDAPEPGTQRLSTGSFPEDLLESDSSRSEIRLGRSESLKGREEMKRSRKAENVPRSRSDVDMDAAAEATRLHQSASSSTSSLSTRSLENPTPPFTPKMGRRSIESPSLGFCTDTLLPHLLEDDLGQLSDLEPEPDAQNWQHTVGKDVVAGLTQREIDRQEVINELFVTEASHLRTLRVLDLIFYQRMKKENLMPREELARLFPNLPELIEIHNSWCEAMKKLREEGPIIKEISDLMLARFDGPAREELQQVAAQFCSYQSIALELIKTKQRKESRFQLFMQEAESHPQCRRLQLRDLIISEMQRLTKYPLLLESIIKHTEGGTSEHEKLCRARDQCREILKYVNEAVKQTENRHRLEGYQKRLDATALERASNPLAAEFKSLDLTTRKMIHEGPLTWRISKDKTLDLHVLLLEDLLVLLQKQDEKLLLKCHSKTAVGSSDSKQTFSPVLKLNAVLIRSVATDKRAFFIICTSKLGPPQIYELVALTSSDKNTWMELLEEAVRNATRHPGAAPMPVHPPPPGPREPAQQGPTPSRVELDDSDVFHGEPEPEELPGGTGSQQRVQGKHQVLLEDPEQEGSAEEEELGVLPCPSTSLDGENRGIRTRNPIHLAFPGPLFMEGLADSALEDVENLRHLILWSLLPGHTMETQAAQEPEDDLTPTPSVISVTSHPWDPGSPGQAPPGGEGDNTQLAGLEGERPEQEDMGLCSLEHLPPRTRNSGIWESPELDRNLAEDASSTEAAGGYKVVRKAEVAGSKVVPALPESGQSEPGPPEVEGGTKATGNCFYVSMPSGPPDSSTDHSEAPMSPPQPDSLPAGQTEPQPQLQGGNDDPRRPSRSPPSLALRDVGMIFHTIEQLTLKLNRLKDMELAHRELLKSLGGESSGGTTPVGSFHTEAARWTDGSLSPPAKEPLASDSRNSHELGPCPEDGSDAPLEDSTADAAASPGP

SEQ ID NO: 73465 - protein, 1562 aa, Homo sapiens
  Payload ID: 14536
  Gene Symbol: ARHGEF11
  Gene Name: Rho guanine nucleotide exchange factor (GEF) 11
  Uniprot ID: O15085
  ENSP ID: ENSP00000357177
MSVRLPQSIDRLSSLSSLGDSAPERKSPSHHRQPSDASETTGLVQRCVIIQKDQHGFGFTVSGDRIVLVQSVRPGGAAMKAGVKEGDRIIKVNGTMVTNSSHLEVVKLIKSGAYVALTLLGSSPSSMGISGLQQDPSPAGAPRITSVIPSPPPPPPLPPPQRITGPKPLQDPEVQKHATQILRNMLRQEEKELQRICEVYSRNPASLLEEQIEGARRRVTQLQLKIQQETGGSVDILPLYGDTSQRPSEGRLSLDSQEGDSGLDSGTERFPSLSESLMNRNSVLSDPGLDSPRTSPVIMARVAQHHRRQGSDAAVPSTGDQGVDQSPKPLIIGPEEDYDPGYFNNESDIIFQDLEKLKSRPAHLGVFLRYIFSQADPSPLLFYLCAEVYQQASPKDSRSLGKDIWNIFLEKNAPLRVKIPEMLQAEIDSRLRNSEDARGVLCEAQEAAMPEIQEQIHDYRTKRTLGLGSLYGENDLLDLDGDPLRERQVAEKQLAALGDILSKYEEDRSAPMDFALNTYMSHAGIRLREARPSNTAEKAQSAPDKDKWLPFFPKTKKSSNSKKEKDALEDKKRNPILKYIGKPKSSSQSTFHIPLSPVEVKPGNVRNIIQHFENNQQYDAPEPGTQRLSTGSFPEDLLESDSSRSEIRLGRSESLKGREEMKRSRKAENVPRSRSDVDMDAAAEATRLHQSASSSTSSLSTRSLENPTPPFTPKMGRRSIESPSLGFCTDTLLPHLLEDDLGQLSDLEPEPDAQNWQHTVGKDVVAGLTQREIDRQEVINELFVTEASHLRTLRVLDLIFYQRMKKENLMPREELARLFPNLPELIEIHNSWCEAMKKLREEGPIIKEISDLMLARFDGPAREELQQVAAQFCSYQSIALELIKTKQRKESRFQLFMQEAESHPQCRRLQLRDLIISEMQRLTKYPLLLESIIKHTEGGTSEHEKLCRARDQCREILKYVNEAVKQTENRHRLEGYQKRLDATALERASNPLAAEFKSLDLTTRKMIHEGPLTWRISKDKTLDLHVLLLEDLLVLLQKQDEKLLLKCHSKTAVGSSDSKQTFSPVLKLNAVLIRSVATDKRAFFIICTSKLGPPQIYELVALTSSDKNTWMELLEEAVRNATRHPGAAPMPVHPPPPGPREPAQQGPTPSRVELDDSDVFHGEPEPEELPGGTGSQQRVQGKHQVLLEDPEQEGSAEEEELGVLPCPSTSLDGENRGIRTRNPIHLAFPGPLFMEGLADSALEDVENLRHLILWSLLPGHTMETQAAQEPEDDLTPTPSVISVTSHPWDPGSPGQAPPGGEGDNTQLAGLEGERPEQEDMGLCSLEHLPPRTRNSGIWESPELDRNLAEDASSTEAAGGYKVVRKAEVAGSKVVPALPESGQSEPGPPEVEGGTKATGNCFYVSMPSGPPDSSTDHSEAPMSPPQPDSLPAGQTEPQPQLQGGNDDPRRPSRSPPSLALRDVGMIFHTIEQLTLKLNRLKDMELAHRELLKSLGGESSGGTTPVGSFHTEAARWTDGSLSPPAKEPLASDSRNSHELGPCPEDGSDAPLEDSTADAAASPGP

SEQ ID NO: 73466 - protein, 1525 aa, Homo sapiens
  Payload ID: 14537
  Gene Symbol: ARHGEF12
  Gene Name: Rho guanine nucleotide exchange factor (GEF) 12
  Uniprot ID: Q9NZN5
  ENSP ID: ENSP00000349056
MSGTQSTITDRFPLKKPIRHGSILNRESPTDKKQKVERIASHDFDPTGLVQRCVIIQKDDNGFGLTVSGDNPVFVQSVKEDGAAMRAGVQTGDRIIKVNGTLVTHSNHLEVVKLIKSGSYVALTVQGRPPGSPQIPLADSEVEPSVIGHMSPIMTSPHSPGASGNMERITSPVLMGEENNVVHNQKVEILRKMLQKEQERLQLLQEDYNRTPAQRLLKEIQEAKKHIPQLQEQLSKATGSAQDGAVVTPSRPLGDTLTVSEAETDPGDVLGRTDCSSGDASRPSSDNADSPKSGPKERIYLEENPEKSETIQDTDTQSLVGSPSTRIAPHIIGAEDDDFGTEHEQINGQCSCFQSIELLKSRPAHLAVFLHHVVSQFDPATLLCYLYSDLYKHTNSKETRRIFLEFHQFFLDRSAHLKVSVPDEMSADLEKRRPELIPEDLHRHYIQTMQERVHPEVQRHLEDFRQKRSMGLTLAESELTKLDAERDKDRLTLEKERTCAEQIVAKIEEVLMTAQAVEEDKSSTMQYVILMYMKHLGVKVKEPRNLEHKRGRIGFLPKIKQSMKKDKEGEEKGKRRGFPSILGPPRRPSRHDNSAIGRAMELQKARHPKHLSTPSSVSPEPQDSAKLRQSGLANEGTDAGYLPANSMSSVASGASFSQEGGKENDTGSKQVGETSAPGDTLDGTPRTLNTVFDFPPPPLDQVQEEECEVERVTEHGTPKPFRKFDSVAFGESQSEDEQFENDLETDPPNWQQLVSREVLLGLKPCEIKRQEVINELFYTERAHVRTLKVLDQVFYQRVSREGILSPSELRKIFSNLEDILQLHIGLNEQMKAVRKRNETSVIDQIGEDLLTWFSGPGEEKLKHAAATFCSNQPFALEMIKSRQKKDSRFQTFVQDAESNPLCRRLQLKDIIPTQMQRLTKYPLLLDNIAKYTEWPTEREKVKKAADHCRQILNYVNQAVKEAENKQRLEDYQRRLDTSSLKLSEYPNVEELRNLDLTKRKMIHEGPLVWKVNRDKTIDLYTLLLEDILVLLQKQDDRLVLRCHSKILASTADSKHTFSPVIKLSTVLVRQVATDNKALFVISMSDNGAQIYELVAQTVSEKTVWQDLICRMAASVKEQSTKPIPLPQSTPGEGDNDEEDPSKLKEEQHGISVTGLQSPDRDLGLESTLISSKPQSHSLSTSGKSEVRDLFVAERQFAKEQHTDGTLKEVGEDYQIAIPDSHLPVSEERWALDALRNLGLLKQLLVQQLGLTEKSVQEDWQHFPRYRTASQGPQTDSVIQNSENIKAYHSGEGHMPFRTGTGDIATCYSPRTSTESFAPRDSVGLAPQDSQASNILVMDHMIMTPEMPTMEPEGGLDDSGEHFFDAREAHSDENPSEGDGAVNKEEKDVNLRISGNYLILDGYDPVQESSTDEEVASSLTLQPMTGIPAVESTHQQQHSPQNTHSDGAISPFTPEFLVQQRWGAMEYSCFEIQSPSSCADSQSQIMEYIHKIEADLEHLKKVEESYTILCQRLAGSALTDKHSDKS

SEQ ID NO: 73467 - protein, 1544 aa, Homo sapiens
  Payload ID: 14537
  Gene Symbol: ARHGEF12
  Gene Name: Rho guanine nucleotide exchange factor (GEF) 12
  Uniprot ID: Q9NZN5
  ENSP ID: ENSP00000380942
MSGTQSTITDRFPLKKPIRHGSILNRESPTDKKQKVERIASHDFDPTDSSSKKTKSSSEESRSEIYGLVQRCVIIQKDDNGFGLTVSGDNPVFVQSVKEDGAAMRAGVQTGDRIIKVNGTLVTHSNHLEVVKLIKSGSYVALTVQGRPPGSPQIPLADSEVEPSVIGHMSPIMTSPHSPGASGNMERITSPVLMGEENNVVHNQKVEILRKMLQKEQERLQLLQEDYNRTPAQRLLKEIQEAKKHIPQLQEQLSKATGSAQDGAVVTPSRPLGDTLTVSEAETDPGDVLGRTDCSSGDASRPSSDNADSPKSGPKERIYLEENPEKSETIQDTDTQSLVGSPSTRIAPHIIGAEDDDFGTEHEQINGQCSCFQSIELLKSRPAHLAVFLHHVVSQFDPATLLCYLYSDLYKHTNSKETRRIFLEFHQFFLDRSAHLKVSVPDEMSADLEKRRPELIPEDLHRHYIQTMQERVHPEVQRHLEDFRQKRSMGLTLAESELTKLDAERDKDRLTLEKERTCAEQIVAKIEEVLMTAQAVEEDKSSTMQYVILMYMKHLGVKVKEPRNLEHKRGRIGFLPKIKQSMKKDKEGEEKGKRRGFPSILGPPRRPSRHDNSAIGRAMELQKARHPKHLSTPSSVSPEPQDSAKLRQSGLANEGTDAGYLPANSMSSVASGASFSQEGGKENDTGSKQVGETSAPGDTLDGTPRTLNTVFDFPPPPLDQVQEEECEVERVTEHGTPKPFRKFDSVAFGESQSEDEQFENDLETDPPNWQQLVSREVLLGLKPCEIKRQEVINELFYTERAHVRTLKVLDQVFYQRVSREGILSPSELRKIFSNLEDILQLHIGLNEQMKAVRKRNETSVIDQIGEDLLTWFSGPGEEKLKHAAATFCSNQPFALEMIKSRQKKDSRFQTFVQDAESNPLCRRLQLKDIIPTQMQRLTKYPLLLDNIAKYTEWPTEREKVKKAADHCRQILNYVNQAVKEAENKQRLEDYQRRLDTSSLKLSEYPNVEELRNLDLTKRKMIHEGPLVWKVNRDKTIDLYTLLLEDILVLLQKQDDRLVLRCHSKILASTADSKHTFSPVIKLSTVLVRQVATDNKALFVISMSDNGAQIYELVAQTVSEKTVWQDLICRMAASVKEQSTKPIPLPQSTPGEGDNDEEDPSKLKEEQHGISVTGLQSPDRDLGLESTLISSKPQSHSLSTSGKSEVRDLFVAERQFAKEQHTDGTLKEVGEDYQIAIPDSHLPVSEERWALDALRNLGLLKQLLVQQLGLTEKSVQEDWQHFPRYRTASQGPQTDSVIQNSENIKAYHSGEGHMPFRTGTGDIATCYSPRTSTESFAPRDSVGLAPQDSQASNILVMDHMIMTPEMPTMEPEGGLDDSGEHFFDAREAHSDENPSEGDGAVNKEEKDVNLRISGNYLILDGYDPVQESSTDEEVASSLTLQPMTGIPAVESTHQQQHSPQNTHSDGAISPFTPEFLVQQRWGAMEYSCFEIQSPSSCADSQSQIMEYIHKIEADLEHLKKVEESYTILCQRLAGSALTDKHSDKS

SEQ ID NO: 73468 - protein, 1441 aa, Homo sapiens
  Payload ID: 14537
  Gene Symbol: ARHGEF12
  Gene Name: Rho guanine nucleotide exchange factor (GEF) 12
  ENSP ID: ENSP00000432984
MRAGVQTGDRIIKVNGTLVTHSNHLEVVKLIKSGSYVALTVQGRPPGSPQIPLADSEVEPSVIGHMSPIMTSPHSPGASGNMERITSPVLMGEENNVVHNQKVEILRKMLQKEQERLQLLQEDYNRTPAQRLLKEIQEAKKHIPQLQEQLSKATGSAQDGAVVTPSRPLGDTLTVSEAETDPGDVLGRTDCSSGDASRPSSDNADSPKSGPKERIYLEENPEKSETIQDTDTQSLVGSPSTRIAPHIIGAEDDDFGTEHEQINGQCSCFQSIELLKSRPAHLAVFLHHVVSQFDPATLLCYLYSDLYKHTNSKETRRIFLEFHQFFLDRSAHLKVSVPDEMSADLEKRRPELIPEDLHRHYIQTMQERVHPEVQRHLEDFRQKRSMGLTLAESELTKLDAERDKDRLTLEKERTCAEQIVAKIEEVLMTAQAVEEDKSSTMQYVILMYMKHLGVKVKEPRNLEHKRGRIGFLPKIKQSMKKDKEGEEKGKRRGFPSILGPPRRPSRHDNSAIGRAMELQKARHPKHLSTPSSVSPEPQDSAKLRQSGLANEGTDAGYLPANSMSSVASGASFSQEGGKENDTGSKQVGETSAPGDTLDGTPRTLNTVFDFPPPPLDQVQEEECEVERVTEHGTPKPFRKFDSVAFGESQSEDEQFENDLETDPPNWQQLVSREVLLGLKPCEIKRQEVINELFYTERAHVRTLKVLDQVFYQRVSREGILSPSELRKIFSNLEDILQLHIGLNEQMKAVRKRNETSVIDQIGEDLLTWFSGPGEEKLKHAAATFCSNQPFALEMIKSRQKKDSRFQTFVQDAESNPLCRRLQLKDIIPTQMQRLTKYPLLLDNIAKYTEWPTEREKVKKAADHCRQILNYVNQAVKEAENKQRLEDYQRRLDTSSLKLSEYPNVEELRNLDLTKRKMIHEGPLVWKVNRDKTIDLYTLLLEDILVLLQKQDDRLVLRCHSKILASTADSKHTFSPVIKLSTVLVRQVATDNKALFVISMSDNGAQIYELVAQTVSEKTVWQDLICRMAASVKEQSTKPIPLPQSTPGEGDNDEEDPSKLKEEQHGISVTGLQSPDRDLGLESTLISSKPQSHSLSTSGKSEVRDLFVAERQFAKEQHTDGTLKEVGEDYQIAIPDSHLPVSEERWALDALRNLGLLKQLLVQQLGLTEKSVQEDWQHFPRYRTASQGPQTDSVIQNSENIKAYHSGEGHMPFRTGTGDIATCYSPRTSTESFAPRDSVGLAPQDSQASNILVMDHMIMTPEMPTMEPEGGLDDSGEHFFDAREAHSDENPSEGDGAVNKEEKDVNLRISGNYLILDGYDPVQESSTDEEVASSLTLQPMTGIPAVESTHQQQHSPQNTHSDGAISPFTPEFLVQQRWGAMEYSCFEIQSPSSCADSQSQIMEYIHKIEADLEHLKKVEESYTILCQRLAGSALTDKHSDKS

SEQ ID NO: 73469 - protein, 841 aa, Homo sapiens
  Payload ID: 14538
  Gene Symbol: ARHGEF15
  Gene Name: Rho guanine nucleotide exchange factor (GEF) 15
  Uniprot ID: O94989
  ENSP ID: ENSP00000355026
MSAQSLPAATPPTQKPPRIIRPRPPSRSRAAQSPGPPHNGSSPQELPRNSNDAPTPMCTPIFWEPPAASLKPPALLPPSASRASLDSQTSPDSPSSTPTPSPVSRRSASPEPAPRSPVPPPKPSGSPCTPLLPMAGVLAQNGSASAPGTVRRLAGRFEGGAEGRAQDADAPEPGLQARADVNGEREAPLTGSGSQENGAPDAGLACPPCCPCVCHTTRPGLELRWVPVGGYEEVPRVPRRASPLRTSRSRPHPPSIGHPAVVLTSYRSTAERKLLPLLKPPKPTRVRQDATIFGDPPQPDLDLLSEDGIQTGDSPDEAPQNTPPATVEGREEEGLEVLKEQNWELPLQDEPLYQTYRAAVLSEELWGVGEDGSPSPANAGDAPTFPRPPGPRNTLWQELPAVQASGLLDTLSPQERRMQESLFEVVTSEASYLRSLRLLTDTFVLSQALRDTLTPRDHHTLFSNVQRVQGVSERFLATLLSRVRSSPHISDLCDVVHAHAVGPFSVYVDYVRNQQYQEETYSRLMDTNVRFSAELRRLQSLPKCERLPLPSFLLLPFQRITRLRMLLQNILRQTEEGSSRQENAQKALGAVSKIIERCSAEVGRMKQTEELIRLTQRLRFHKVKALPLVSWSRRLEFQGELTELGCRRGGVLFASRPRFTPLCLLLFSDLLLITQPKSGQRLQVLDYAHRSLVQAQQVPDPSGPPTFRLSLLSNHQGRPTHRLLQASSLSDMQRWLGAFPTPGPLPCSPDTIYEDCDCSQELCSESSAPAKTEGRSLESRAAPKHLHKTPEGWLKGLPGAFPAQLVCEVTGEHERRRHLRQNQRLLEAVGSSSGTPNAPPP

SEQ ID NO: 73470 - protein, 841 aa, Homo sapiens; identical to SEQ ID NO: 73469
  Payload ID: 14538
  Gene Symbol: ARHGEF15
  Gene Name: Rho guanine nucleotide exchange factor (GEF) 15
  Uniprot ID: O94989
  ENSP ID: ENSP00000412505

SEQ ID NO: 73471 - protein, 116 aa, Homo sapiens
  Payload ID: 14538
  Gene Symbol: ARHGEF15
  Gene Name: Rho guanine nucleotide exchange factor (GEF) 15
  ENSP ID: ENSP00000462796
MSAQSLPAATPPTQKPPRIIRPRPPSRSRAAQSPGPPHNGSSPQELPRNSNDAPTPMCTPIFWEPPAASLKPPALLPPSASRASLDSQTSPDSPSSTPTPSPVSRRSASPEPAPRS

SEQ ID NO: 73472 - protein, 91 aa, Homo sapiens
  Payload ID: 14538
  Gene Symbol: ARHGEF15
  Gene Name: Rho guanine nucleotide exchange factor (GEF) 15
  ENSP ID: ENSP00000463875
ASPLRTSRSRPHPPSIGHPAVVLTSYRSTAERKLLPLLKPPKPTRVRQDATIFGDPPQPDLDLLSEDGIQTGDSPDEAPQNTPPATVEGRY

SEQ ID NO: 73473 - protein, 207 aa, Homo sapiens
  Payload ID: 14538
  Gene Symbol: ARHGEF15
  Gene Name: Rho guanine nucleotide exchange factor (GEF) 15
  ENSP ID: ENSP00000464540
MSAQSLPAATPPTQKPPRIIRPRPPSRSRAAQSPGPPHNGSSPQELPRNSNDAPTPMCTPIFWEPPAASLKPPALLPPSASRASLDSQTSPDSPSSTPTPSPVSRRSASPEPAPRSPVPPPKPSGSPCTPLLPMAGVLAQNGSASAPGTVRRLAGRFEGGAEGRAQDADAPEPGLQARADVNGEREAPLTGSGSQENGAPDAGLACP

SEQ ID NO: 73474 - protein, 421 aa, Homo sapiens
  Payload ID: 14539
  Gene Symbol: ARHGEF16
  Gene Name: Rho guanine nucleotide exchange factor (GEF) 16
  Uniprot ID: Q5VV41
  ENSP ID: ENSP00000367622
MFEILTSEFSYQHSLSILVEEFLQSKELRATVTQMEHHHLFSNILDVLGASQRFFEDLEQRHKAQVLVEDISDILEEHAEKHFHPYIAYCSNEVYQQRTLQKLISSNAAFREALREIERRPACGGLPMLSFLILPMQRVTRLPLLMDTLCLKTQGHSERYKAASRALKAISKLVRQCNEGAHRMERMEQMYTLHTQLDFSKVKSLPLISASRWLLKRGELFLVEETGLFRKIASRPTCYLFLFNDVLVVTKKKSEESYMVQDYAQMNHIQVEKIEPSELPLPGGGNRSSSVPHPFQVTLLRNSEGRQEQLLLSSDSASDRARWIVALTHSERQWQGLSSKGDLPQVEITKAFFAKQADEVTLQQADVVLVLQQEDGWLYGERLRDGETGWFPEDFARFITSRVAVEGNVRRMERLRVETDV

SEQ ID NO: 73475 - protein, 421 aa, Homo sapiens; identical to SEQ ID NO: 73474
  Payload ID: 14539
  Gene Symbol: ARHGEF16
  Gene Name: Rho guanine nucleotide exchange factor (GEF) 16
  Uniprot ID: Q5VV41
  ENSP ID: ENSP00000367624

SEQ ID NO: 73476 - protein, 709 aa, Homo sapiens
  Payload ID: 14539
  Gene Symbol: ARHGEF16
  Gene Name: Rho guanine nucleotide exchange factor (GEF) 16
  Uniprot ID: Q5VV41
  ENSP ID: ENSP00000367629
MAQRHSDSSLEEKLLGHRFHSELRLDAGGNPASGLPMVRGSPRVRDDAAFQPQVPAPPQPRPPGHEEPWPIVLSTESPAALKLGTQQLIPKSLAVASKAKTPARHQSFGAAVLSREAARRDPKLLPAPSFSLDDMDVDKDPGGMLRRNLRNQSYRAAMKGLGKPGGQGDAIQLSPKLQALAEEPSQPHTRSPAKNKKTLGRKRGHKGSFKDDPQLYQEIQERGLNTSQESDDDILDESSSPEGTQKVDATIVVKSYRPAQVTWSQLPEVVELGILDQLSTEERKRQEAMFEILTSEFSYQHSLSILVEEFLQSKELRATVTQMEHHHLFSNILDVLGASQRFFEDLEQRHKAQVLVEDISDILEEHAEKHFHPYIAYCSNEVYQQRTLQKLISSNAAFREALREIERRPACGGLPMLSFLILPMQRVTRLPLLMDTLCLKTQGHSERYKAASRALKAISKLVRQCNEGAHRMERMEQMYTLHTQLDFSKVKSLPLISASRWLLKRGELFLVEETGLFRKIASRPTCYLFLFNDVLVVTKKKSEESYMVQDYAQMNHIQVEKIEPSELPLPGGGNRSSSVPHPFQVTLLRNSEGRQEQLLLSSDSASDRARWIVALTHSERQWQGLSSKGDLPQVEITKAFFAKQADEVTLQQADVVLVLQQEDGWLYGERLRDGETGWFPEDFARFITSRVAVEGNVRRMERLRVETDV

SEQ ID NO: 73477 - protein, 180 aa, Homo sapiens
  Payload ID: 14539
  Gene Symbol: ARHGEF16
  Gene Name: Rho guanine nucleotide exchange factor (GEF) 16
  ENSP ID: ENSP00000390853
MFASDLLRALDCCPGAGSSGLLPQLGPRQLLAFTVNCLGNHRYLGFFEDLEQRHKAQVLVEDISDILEEHAEKHFHPYIAYCSNEVYQQRTLQKLISSNAAFREALREIERRPACGGLPMLSFLILPMQRVTRLPLLMDTLCLKTQGHSERYKAASRALKAISKLVRQCNEGAHRMERME

SEQ ID NO: 73478 - protein, 146 aa, Homo sapiens
  Payload ID: 14539
  Gene Symbol: ARHGEF16
  Gene Name: Rho guanine nucleotide exchange factor (GEF) 16
  ENSP ID: ENSP00000411936
MFEILTSEFSYQHSLSILVEEFLQSKELRATVTQMEHHHLFSNILDVLGASQRFFEDLEQRHKAQVLVEDISDILEEHAEKHFHPYIAYCSNEVYQQRTLQKLISSNAAFREALREIERRPACGGLPMLSFLILPMQRVTRLPLLM

SEQ ID NO: 73479 - protein, 2063 aa, Homo sapiens
  Payload ID: 14540
  Gene Symbol: ARHGEF17
  Gene Name: Rho guanine nucleotide exchange factor (GEF) 17
  Uniprot ID: Q96PE2
  ENSP ID: ENSP00000263674
MADGAPRPQLYRSVSFKLLERWSGGPGLREEDTDTPGLRRRASCRPTTAARGQPSRRVSKLASGPLAAPAQPRPLRSLSPSVRQLSRRFDAPRLDDGSAGTRDGGVLPAAAEEAAEGPARGAWPSVTEMRKLFGGPGSRRPSADSESPGTPSPDGAAWEPPARESRQPPTPPPRTCFPLAGLRSARPLTGPETEGRLRRPQQQQERAQRPADGLHSWHIFSQPQAGARASCSSSSIAASYPVSRSRAASSSEEEEEGPPQLPGAQSPAYHGGHSSGSDDDRDGEGGHRWGGRPGLRPGSSLLDQDCRPDSDGLNLSSMNSAGVSGSPEPPTSPRAPREEGLREWGSGSPPCVPGPQEGLRPMSDSVGGAFRVAKVSFPSYLASPAGSRGSSRYSSTETLKDDDLWSSRGSGGWGVYRSPSFGAGEGLLRSQARTRAKGPGGTSRALRDGGFEPEKSRQRKSLSNPDIASETLTLLSFLRSDLSELRVRKPGGSSGDRGSNPLDGRDSPSAGGPVGQLEPIPIPAPASPGTRPTLKDLTATLRRAKSFTCSEKPMARRLPRTSALKSSSSELLLTGPGAEEDPLPLIVQDQYVQEARQVFEKIQRMGAQQDDGSDAPPGSPDWAGDVTRGQRSQEELSGPESSLTDEGIGADPEPPVAAFCGLGTTGMWRPLSSSSAQTNHHGPGTEDSLGGWALVSPETPPTPGALRRRRKVPPSGSGGSELSNGEAGEAYRSLSDPIPQRHRAATSEEPTGFSVDSNLLGSLSPKTGLPATSAMDEGLTSGHSDWSVGSEESKGYQEVIQSIVQGPGTLGRVVDDRIAGKAPKKKSLSDPSRRGELAGPGFEGPGGEPIREVEPMLPPSSSEPILVEQRAEPEEPGATRSRAQSERALPEALPPPATAHRNFHLDPKLADILSPRLIRRGSKKRPARSSHQELRRDEGSQDQTGSLSRARPSSRHVRHASVPATFMPIVVPEPPTSVGPPVAVPEPIGFPTRAHPTLQAPSLEDVTKQYMLNLHSGEVPAPVPVDMPCLPLAAPPSAEAKPPEAARPADEPTPASKCCSKPQVDMRKHVAMTLLDTEQSYVESLRTLMQGYMQPLKQPENSVLCDPSLVDEIFDQIPELLEHHEQFLEQVRHCMQTWHAQQKVGALLVQSFSKDVLVNIYSAYIDNFLNAKDAVRVAKEARPAFLKFLEQSMRENKEKQALSDLMIKPVQRIPRYELLVKDLLKHTPEDHPDHPLLLEAQRNIKQVAERINKGVRSAEEAERHARVLQEIEAHIEGMEDLQAPLRRFLRQEMVIEVKAIGGKKDRSLFLFTDLIVCTTLKRKSGSLRRSSMSLYTAASVIDTASKYKMLWKLPLEDADIIKGASQATNRENIQKAISRLDEDLTTLGQMSKLSESLGFPHQSLDDALRDLSAAMHRDLSEKQALCYALSFPPTKLELCATRPEGTDSYIFEFPHPDARLGFEQAFDEAKRKLASSKSCLDPEFLKAIPIMKTRSGMQFSCAAPTLNSCPEPSPEVWVCNSDGYVGQVCLLSLRAEPDVEACIAVCSARILCIGAVPGLQPRCHREPPPSLRSPPETAPEPAGPELDVEAAADEEAATLAEPGPQPCLHISIAGSGLEMTPGLGEGDPRPELVPFDSDSDDESSPSPSGTLQSQASRSTISSSFGNEETPSSKEATAETTSSEEEQEPGFLPLSGSFGPGGPCGTSPMDGRALRRSSHGSFTRGSLEDLLSVDPEAYQSSVWLGTEDGCVHVYQSSDSIRDRRNSMKLQHAASVTCILYLNNQVFVSLANGELVVYQREAGHFWDPQNFKSVTLGTQGSPITKMVSVGGRLWCGCQNRVLVLSPDTLQLEHMFYVGQDSSRCVACMVDSSLGVWVTLKGSAHVCLYHPDTFEQLAEVDVTPPVHRMLAGSDAIIRQHKAACLRITALLVCEELLWVGTSAGVVLTMPTSPGTVSCPRAPLSPTGLGQGHTGHVRFLAAVQLPDGFNLLCPTPPPPPDTGPEKLPSLEHRDSPWHRGPAPARPKMLVISGGDGYEDFRLSSGGGSSSETVGRDDSTNHLLLWRV

SEQ ID NO: 73480 - protein, 193 aa, Homo sapiens
  Payload ID: 14540
  Gene Symbol: ARHGEF17
  Gene Name: Rho guanine nucleotide exchange factor (GEF) 17
  ENSP ID: ENSP00000441135
  MOD_RES (1)..(1): Any amino acid
XSVGPPVAVPEPIGFPTRAHPTLQAPSLEDVTKQYMLNLHSGEVPAPVPVDMPCLPLAAPPSAEAKPPEAARPADEPTPASKCCSKPQVDMRKHVAMTLLDTEQSYVESLRTLMQVGLGAHSPENGLSEPRRLSDGCEQTPFMDKGLRPESRVPGIRRLSMKNPQHGHSREGGRLLPGKRECRGARPPQGRRP

SEQ ID NO: 73481 - protein, 802 aa, Homo sapiens
  Payload ID: 14541
  Gene Symbol: ARHGEF19
  Gene Name: Rho guanine nucleotide exchange factor (GEF) 19
  Uniprot ID: Q8IW93
  ENSP ID: ENSP00000270747
MDCGPPATLQPHLTGPPGTAHHPVAVCQQESLSFAELPALKPPSPVCLDLFPVAPEELRAPGSRWSLGTPAPLQGLLWPLSPGGSDTEITSGGMRPSRAGSWPHCPGAQPPALEGPWSPRHTQPQRRASHGSEKKSAWRKMRVYQREEVPGCPEAHAVFLEPGQVVQEQALSTEEPRVELSGSTRVSLEGPERRRFSASELMTRLHSSLRLGRNSAARALISGSGTGAAREGKASGMEARSVEMSGDRVSRPAPGDSREGDWSEPRLDTQEEPPLGSRSTNERRQSRFLLNSVLYQEYSDVASARELRRQQREEEGPGDEAEGAEEGPGPPRANLSPSSSFRAQRSARGSTFSLWQDIPDVRGSGVLATLSLRDCKLQEAKFELITSEASYIHSLSVAVGHFLGSAELSECLGAQDKQWLFSKLPEVKSTSERFLQDLEQRLEADVLRFSVCDVVLDHCPAFRRVYLPYVTNQAYQERTYQRLLLENPRFPGILARLEESPVCQRLPLTSFLILPFQRITRLKMLVENILKRTAQGSEDEDMATKAFNALKELVQECNASVQSMKRTEELIHLSKKIHFEGKIFPLISQARWLVRHGELVELAPLPAAPPAKLKLSSKAVYLHLFNDCLLLSRRKELGKFAVFVHAKMAELQVRDLSLKLQGIPGHVFLLQLLHGQHMKHQFLLRARTESEKQRWISALCPSSPQEDKEVISEGEDCPQVQCVRTYKALHPDELTLEKTDILSVRTWTSDGWLEGVRLADGEKGWVPQAYVEEISSLSARLRNLRENKRVTSATSKLGEAPV

SEQ ID NO: 73482 - protein, 307 aa, Homo sapiens
  Payload ID: 14541
  Gene Symbol: ARHGEF19
  Gene Name: Rho guanine nucleotide exchange factor (GEF) 19
  ENSP ID: ENSP00000391145
  MOD_RES (1)..(1): Any amino acid
XRDRGQERLAQFPAAGRGSPGPPGARLGVGLEKGRGREVWRPGVWGCEARASEVNWSCPFDPVCALPQAKFELITSEASYIHSLSVAVGHFLGSAELSECLGAQDKQWLFSKLPEVKSTSERFLQDLEQRLEADVLRFSVCDVVLDHCPAFRRVYLPYVTNQAYQERTYQRLLLENPRFPGILARLEESPVCQRLPLTSFLILPFQRITRLKMLVENILKRTAQGSEDEDMATKAFNALKELVQECNASVQSMKRTEELIHLSKKIHFEGKIFPLISQARWLVRHGELVELAPLPAAPPAKLKLSSK

SEQ ID NO: 73483 - protein, 167 aa, Homo sapiens
  Payload ID: 14541
  Gene Symbol: ARHGEF19
  Gene Name: Rho guanine nucleotide exchange factor (GEF) 19
  ENSP ID: ENSP00000414370
ERLAQFPAAGRGSPGPPGARLGVGLEKGRGREVWRPGVWGCEARASEVNWSCPFDPVCALPQAKFELITSEASYIHSLSVAVGHFLGSAELSECLGAQDKQWLFSKLPEVKSTSERFLQDLEQRLEADVLRFSVCDVVLDHCPAFRRVYLPYVTNQAYQERTYQRLL

SEQ ID NO: 73484 - protein, 580 aa, Homo sapiens
  Payload ID: 14542
  Gene Symbol: ARHGEF25
  Gene Name: Rho guanine nucleotide exchange factor (GEF) 25
  Uniprot ID: Q86VW2
  ENSP ID: ENSP00000286494
MRGGHKGGRCACPRVIRKVLAKCGCCFARGGRESYSIAGSEGSISASAASGLAAPSGPSSGLSSGPCSPGPPGPVSGLRRWLDHSKHCLSVETEADSGQAGPYENWMLEPALATGEELPELTLLTTLLEGPGDKTQPPEEETLSQAPESEEEQKKKALERSMYVLSELVETEKMYVDDLGQIVEGYMATMAAQGVPESLRGRDRIVFGNIQQIYEWHRDYFLQELQRCLKDPDWLAQLFIKHERRLHMYVVYCQNKPKSEHVVSEFGDSYFEELRQQLGHRLQLNDLLIKPVQRIMKYQLLLKDFLKYYNRAGMDTADLEQAVEVMCFVPKRCNDMMTLGRLRGFEGKLTAQGKLLGQDTFWVTEPEAGGLLSSRGRERRVFLFEQIIIFSEALGGGVRGGTQPGYVYKNSIKVSCLGLEGNLQGDPCRFALTSRGPEGGIQRYVLQAADPAISQAWIKHVAQILESQRDFLNALQSPIEYQRRESQTNSLGRPRGPGVGSPGRIQLGDQAQGSTHTPINGSLPSLLLSPKGEVARALLPLDKQALGDIPQAPHDSPPVSPTPKTPPCQARLAKLDEDEL

SEQ ID NO: 73485 - protein, 619 aa, Homo sapiens
  Payload ID: 14542
  Gene Symbol: ARHGEF25
  Gene Name: Rho guanine nucleotide exchange factor (GEF) 25
  Uniprot ID: Q86VW2
  ENSP ID: ENSP00000335560
MKPPDRPAPGRTDRILGVMGGMLRACALPGQEGPPRRSPLGLVGTEPESERTEGDHRRDREHEVLAGALQPESYSIAGSEGSISASAASGLAAPSGPSSGLSSGPCSPGPPGPVSGLRRWLDHSKHCLSVETEADSGQAGPYENWMLEPALATGEELPELTLLTTLLEGPGDKTQPPEEETLSQAPESEEEQKKKALERSMYVLSELVETEKMYVDDLGQIVEGYMATMAAQGVPESLRGRDRIVFGNIQQIYEWHRDYFLQELQRCLKDPDWLAQLFIKHERRLHMYVVYCQNKPKSEHVVSEFGDSYFEELRQQLGHRLQLNDLLIKPVQRIMKYQLLLKDFLKYYNRAGMDTADLEQAVEVMCFVPKRCNDMMTLGRLRGFEGKLTAQGKLLGQDTFWVTEPEAGGLLSSRGRERRVFLFEQIIIFSEALGGGVRGGTQPGYVYKNSIKVSCLGLEGNLQGDPCRFALTSRGPEGGIQRYVLQAADPAISQAWIKHVAQILESQRDFLNALQSPIEYQRRESQTNSLGRPRGPGVGSPGRIQLGDQAQGSTHTPINGSLPSLLLSPKGEVARALLPLDKQALGDIPQAPHDSPPVSPTPKTPPCQARLAKLDEDEL

SEQ ID NO: 73486 - protein, 474 aa, Homo sapiens
  Payload ID: 14542
  Gene Symbol: ARHGEF25
  Gene Name: Rho guanine nucleotide exchange factor (GEF) 25
  Uniprot ID: Q86VW2
  ENSP ID: ENSP00000484303
MLEPALATGEELPELTLLTTLLEGPGDKTQPPEEETLSQAPESEEEQKKKALERSMYVLSELVETEKMYVDDLGQIVEGYMATMAAQGVPESLRGRDRIVFGNIQQIYEWHRDYFLQELQRCLKDPDWLAQLFIKHERRLHMYVVYCQNKPKSEHVVSEFGDSYFEELRQQLGHRLQLNDLLIKPVQRIMKYQLLLKDFLKYYNRAGMDTADLEQAVEVMCFVPKRCNDMMTLGRLRGFEGKLTAQGKLLGQDTFWVTEPEAGGLLSSRGRERRVFLFEQIIIFSEALGGGVRGGTQPGYVYKNSIKVSCLGLEGNLQGDPCRFALTSRGPEGGIQRYVLQAADPAISQAWIKHVAQILESQRDFLNALQSPIEYQRRESQTNSLGRPRGPGVGSPGRIQLGDQAQGSTHTPINGSLPSLLLSPKGEVARALLPLDKQALGDIPQAPHDSPPVSPTPKTPPCQARLAKLDEDEL

SEQ ID NO: 73487 - protein, 871 aa, Homo sapiens
  Payload ID: 14543
  Gene Symbol: ARHGEF26
  Gene Name: Rho guanine nucleotide exchange factor (GEF) 26
  Uniprot ID: Q96DR7
  ENSP ID: ENSP00000348828
MDGESEVDFSSNSITPLWRRRSIPQPHQVLGRSKPRPQSYQSPNGLLITDFPVEDGGTLLAAQIPAQVPTASDSRTVHRSPLLLGAQRRAVANGGTASPEYRAASPRLRRPKSPKLPKAVPGGSPKSPANGAVTLPAPPPPPVLRPPRTPNAPAPCTPEEDLTGLTASPVPSPTANGLAANNDSPGSGSQSGRKAKDPERGLFPGPQKSSSEQKLPLQRLPSQENELLENPSVVLSTNSPAALKVGKQQIIPKSLASEIKISKSNNQNVEPHKRLLKVRSMVEGLGGPLGHAGEESEVDNDVDSPGSLRRGLRSTSYRRAVVSGFDFDSPTSSKKKNRMSQPVLKVVMEDKEKFSSLGRIKKKMLKGQGTFDGEENAVLYQNYKEKALDIDSDEESEPKEQKSDEKIVIHHKPLRSTWSQLSAVKRKGLSQTVSQEERKRQEAIFEVISSEHSYLLSLEILIRMFKNSKELSDTMTKTERHHLFSNITDVCEASKKFFIELEARHQNNIFIDDISDIVEKHTASTFDPYVKYCTNEVYQQRTLQKLLATNPSFKEVLSRIESHEDCRNLPMISFLILPMQRVTRLPLLMDTICQKTPKDSPKYEVCKRALKEVSKLVRLCNEGARKMERTEMMYTINSQLEFKIKPFPLVSSSRWLVKRGELTAYVEDTVLFSRRTSKQQVYFFLFNDVLIITKKKSEESYNVNDYSLRDQLLVESCDNEELNSSPGKNSSTMLYSRQSSASHLFTLTVLSNHANEKVEMLLGAETQSERARWITALGHSSGKPPADRTSLTQVEIVRSFTAKQPDELSLQVADVVLIYQRVSDGWYEGERLRDGERGWFPMECAKEITCQATIDKNVERMGRLLGLETNV

SEQ ID NO: 73488 - protein, 446 aa, Homo sapiens
  Payload ID: 14543
  Gene Symbol: ARHGEF26
  Gene Name: Rho guanine nucleotide exchange factor (GEF) 26
  Uniprot ID: Q96DR7
  ENSP ID: ENSP00000423295
MDGESEVDFSSNSITPLWRRRSIPQPHQVLGRSKPRPQSYQSPNGLLITDFPVEDGGTLLAAQIPAQVPTASDSRTVHRSPLLLGAQRRAVANGGTASPEYRAASPRLRRPKSPKLPKAVPGGSPKSPANGAVTLPAPPPPPVLRPPRTPNAPAPCTPEEDLTGLTASPVPSPTANGLAANNDSPGSGSQSGRKAKDPERGLFPGPQKSSSEQKLPLQRLPSQENELLENPSVVLSTNSPAALKVGKQQIIPKSLASEIKISKSNNQNVEPHKRLLKVRSMVEGLGGPLGHAGEESEVDNDVDSPGSLRRGLRSTSYRRAVVSGFDFDSPTSSKKKNRMSQPVLKVVMEDKEKFSSLGRIKKKMLKGQGTFDGEENAVLYQNYKEKALDIDSDEESEPKEQKSDEKIVIHHKPLRSTWSQLSAVKRKVILIVGFMEMKDGRLRGGK

SEQ ID NO: 73489 - protein, 871 aa, Homo sapiens; identical to SEQ ID NO: 73487
  Payload ID: 14543
  Gene Symbol: ARHGEF26
  Gene Name: Rho guanine nucleotide exchange factor (GEF) 26
  Uniprot ID: Q96DR7
  ENSP ID: ENSP00000423418

SEQ ID NO: 73490 - protein, 791 aa, Homo sapiens
  Payload ID: 14543
  Gene Symbol: ARHGEF26
  Gene Name: Rho guanine nucleotide exchange factor (GEF) 26
  Uniprot ID: Q96DR7
  ENSP ID: ENSP00000424446
MDGESEVDFSSNSITPLWRRRSIPQPHQVLGRSKPRPQSYQSPNGLLITDFPVEDGGTLLAAQIPAQVPTASDSRTVHRSPLLLGAQRRAVANGGTASPEYRAASPRLRRPKSPKLPKAVPGGSPKSPANGAVTLPAPPPPPVLRPPRTPNAPAPCTPEEDLTGLTASPVPSPTANGLAANNDSPGSGSQSGRKAKDPERGLFPGPQKSSSEQKLPLQRLPSQENELLENPSVVLSTNSPAALKVGKQQIIPKSLASEIKISKSNNQNVEPHKRLLKVRSMVEGLGGPLGHAGEESEVDNDVDSPGSLRRGLRSTSYRRAVVSGFDFDSPTSSKKKNRMSQPVLKVVMEDKEKFSSLGRIKKKMLKGQGTFDGEENAVLYQNYKEKALDIDSDEESEPKEQKSDEKIVIHHKPLRSTWSQLSAVKRKGLSQTVSQEERKRQEAIFEVISSEHSYLLSLEILIRMFKNSKELSDTMTKTERHHLFSNITDVCEASKKFFIELEARHQNNIFIDDISDIVEKHTASTFDPYVKYCTNEVYQQRTLQKLLATNPSFKEVLSRIESHEDCRNLPMISFLILPMQRVTRLPLLMDTICQKTPKDSPKYEVCKRALKEVSKLVRLCNEGARKMERTEMMYTINSQLEFKIKPFPLVSSSRWLVKRGELTAYVEDTVLFSRRTSKQQVYFFLFNDVLIITKKKSEESYNVNDYSLRDQLLVESCDNEELNSSPGKNSSTMLYSRQSSASHLFTLTVLSNHANEKVEMLLGAETQSERARWITALGHSSGKPPADRTCG

SEQ ID NO: 73491 - protein, 871 aa, Homo sapiens; identical to SEQ ID NO: 73487
  Payload ID: 14543
  Gene Symbol: ARHGEF26
  Gene Name: Rho guanine nucleotide exchange factor (GEF) 26
  Uniprot ID: Q96DR7
  ENSP ID: ENSP00000481927

SEQ ID NO: 73492 - protein, 871 aa, Homo sapiens; identical to SEQ ID NO: 73487
  Payload ID: 14543
  Gene Symbol: ARHGEF26
  Gene Name: Rho guanine nucleotide exchange factor (GEF) 26
  Uniprot ID: Q96DR7
  ENSP ID: ENSP00000484367

SEQ ID NO: 73493 - protein, 446 aa, Homo sapiens; identical to SEQ ID NO: 73488
  Payload ID: 14543
  Gene Symbol: ARHGEF26
  Gene Name: Rho guanine nucleotide exchange factor (GEF) 26
  Uniprot ID: Q96DR7
  ENSP ID: ENSP00000486665

SEQ ID NO: 73494 - protein, 791 aa, Homo sapiens; identical to SEQ ID NO: 73490
  Payload ID: 14543
  Gene Symbol: ARHGEF26
  Gene Name: Rho guanine nucleotide exchange factor (GEF) 26
  Uniprot ID: Q96DR7
  ENSP ID: ENSP00000487265

SEQ ID NO: 73495 - protein, 1651 aa, Homo sapiens
  Payload ID: 14544
  Gene Symbol: ARHGEF28
  Gene Name: Rho guanine nucleotide exchange factor (GEF) 28
  Uniprot ID: Q8N1W1
  ENSP ID: ENSP00000296794
MELSCSEAPLYGQMMIYAKFDKNVYLPEDAEFYFTYDGSHQRHVMIAERIEDNVLQSSVPGHGLQETVTVSVCLCSEGYSPVTMGSGSVTYVDNMACRLARLLVTQANRLTACSHQTLLTPFALTAGALPALDEELVLALTHLELPLEWTVLGSSSLEVSSHRESLLHLAMRWGLAKLSQFFLCLPGGVQALALPNEEGATPLDLALREGHSKLVEDVTNFQGRWSPSFSRVQLSEEASLHYIHSSETLTLTLNHTAEHLLEADIKLFRKYFWDRAFLVKAFEPEARPEERTAMPSSGAETEEEIKNSVSSRSAAEKEDIKRVKSLVVQHNEHEDQHSLDLDRSFDILKKSKPPSTLLAAGRLSDMLNGGDEVYANCMVIDQVGDLDISYINIEGITATTSPESRGCTLWPQSSKHTLPTETSPSVYPLSENVEGTAHTEAQQSFMSPSSSCASNLNLSFGWHGFEKEQSHLKKRSSSLDALDADSEGEGHSEPSHICYTPGSQSSSRTGIPSGDELDSFETNTEPDFNISRAESLPLSSNLQSKESLLSGVRSRSYSCSSPKISLGKTRLVRELTVCSSSEEQRAYSLSEPPRENRIQEEEWDKYIIPAKSESEKYKVSRTFSFLMNRMTSPRNKSKTKSKDAKDKEKLNRHQFAPGTFSGVLQCLVCDKTLLGKESLQCSNCNANVHKGCKDAAPACTKKFQEKYNKNKPQTILGNSSFRDIPQPGLSLHPSSSVPVGLPTGRRETVGQVHPLSRSVPGTTLESFRRSATSLESESDHNSCRSRSHSDELLQSMGSSPSTESFIMEDVVDSSLWSDLSSDAQEFEAESWSLVVDPSFCNRQEKDVIKRQDVIFELMQTEMHHIQTLFIMSEIFRKGMKEELQLDHSTVDKIFPCLDELLEIHRHFFYSMKERRQESCAGSDRNFVIDRIGDILVQQFSEENASKMKKIYGEFCCHHKEAVNLFKELQQNKKFQNFIKLRNSNLLARRRGIPECILLVTQRITKYPVLVERILQYTKERTEEHKDLRKALCLIKDMIATVDLKVNEYEKNQKWLEILNKIENKTYTKLKNGHVFRKQALMSEERTLLYDGLVYWKTATGRFKDILALLLTDVLLFLQEKDQKYIFAAVDQKPSVISLQKLIAREVANEERGMFLISASSAGPEMYEIHTNSKEERNNWMRRIQQAVESCPEEKGGRTSESDEDKRKAEARVAKIQQCQEILTNQDQQICAYLEEKLHIYAELGELSGFEDVHLEPHLLIKPDPGEPPQAASLLAAALKEAESLQVAVKASQMGAVSQSCEDSCGDSVLADTLSSHDVPGSPTASLVTGGREGRGCSDVDPGIQGVVTDLAVSDAGEKVECRNFPGSSQSEIIQAIQNLTRLLYSLQAALTIQDSHIEIHRLVLQQQEGLSLGHSILRGGPLQDQKSRDADRQHEELANVHQLQHQLQQEQRRWLRRCEQQQRAQATRESWLQERERECQSQEELLLRSRGELDLQLQEYQHSLERLREGQRLVEREQARMRAQQSLLGHWKHGRQRSLPAVLLPGGPEVMELNRSESLCHENSFFINEALVQMSFNTFNKLNPSVIHQDATYPTTQSHSDLVRTSEHQVDLKVDPSQPSNVSHKLWTAAGSGHQILPFHESSKDSCKNGN

SEQ ID NO: 73496 - protein, 1392 aa, Homo sapiens
  Payload ID: 14544
  Gene Symbol: ARHGEF28
  Gene Name: Rho guanine nucleotide exchange factor (GEF) 28
  Uniprot ID: Q8N1W1
  ENSP ID: ENSP00000296799
MDSDSDSPFNYSWPSFPKMKIRRRTSKQDRSFDILKKSKPPSTLLAAGRLSDMLNGGDEVYANCMVIDQVGDLDISYINIEGITATTSPESRGCTLWPQSSKHTLPTETSPSVYPLSENVEGTAHTEAQQSFMSPSSSCASNLNLSFGWHGFEKEQSHLKKRSSSLDALDADSEGEGHSEPSHICYTPGSQSSSRTGIPSGDELDSFETNTEPDFNISRAESLPLSSNLQSKESLLSGVRSRSYSCSSPKISLGKTRLVRELTVCSSSEEQRAYSLSEPPRENRIQEEEWDKYIIPAKSESEKYKVSRTFSFLMNRMTSPRNKSKTKSKDAKDKEKLNRHQFAPGTFSGVLQCLVCDKTLLGKESLQCSNCNANVHKGCKDAAPACTKKFQEKYNKNKPQTILGNSSFRDIPQPGLSLHPSSSVPVGLPTGRRETVGQVHPLSRSVPGTTLESFRRSATSLESESDHNSCRSRSHSDELLQSMGSSPSTESFIMEDVVDSSLWSDLSSDAQEFEAESWSLVVDPSFCNRQEKDVIKRQDVIFELMQTEMHHIQTLFIMSEIFRKGMKEELQLDHSTVDKIFPCLDELLEIHRHFFYSMKERRQESCAGSDRNFVIDRIGDILVQQFSEENASKMKKIYGEFCCHHKEAVNLFKELQQNKKFQNFIKLRNSNLLARRRGIPECILLVTQRITKYPVLVERILQYTKERTEEHKDLRKALCLIKDMIATVDLKVNEYEKNQKWLEILNKIENKTYTKLKNGHVFRKQALMSEERTLLYDGLVYWKTATGRFKDILALLLTDVLLFLQEKDQKYIFAAVDQKPSVISLQKLIAREVANEERGMFLISASSAGPEMYEIHTNSKEERNNWMRRIQQAVESCPEEKGGRTSESDEDKRKAEARVAKIQQCQEILTNQDQQICAYLEEKLHIYAELGELSGFEDVHLEPHLLIKPDPGEPPQAASLLAAALKEAESLQVAVKASQMGAVSQSCEDSCGDSVLADTLSSHDVPGSPTASLVTGGREGRGCSDVDPGIQGVVTDLAVSDAGEKVECRNFPGSSQSEIIQAIQNLTRLLYSLQAALTIQDSHIEIHRLVLQQQEGLSLGHSILRGGPLQDQKSRDADRQHEELANVHQLQHQLQQEQRRWLRRCEQQQRAQATRESWLQERERECQSQEELLLRSRGELDLQLQEYQHSLERLREGQRLVEREQARMRAQQSLLGHWKHGRQRSLPAVLLPGGPEVMELNRSESLCHENSFFINEALVQMSFNTFNKLNPSVIHQDATYPTTQSHSDLVRTSEHQVDLKVDPSQPSNVSHKLWTAAGSGHQILPFHESSKDSCKNDLDTSHTESPTPHDSNSHRPQLQAFITEAKLNLPTRTMTRQDGETGDGAKENIVYL

SEQ ID NO: 73497 - protein, 1731 aa, Homo sapiens
  Payload ID: 14544
  Gene Symbol: ARHGEF28
  Gene Name: Rho guanine nucleotide exchange factor (GEF) 28
  Uniprot ID: Q8N1W1
  ENSP ID: ENSP00000411459
MELSCSEAPLYGQMMIYAKFDKNVYLPEDAEFYFTYDGSHQRHVMIAERIEDNVLQSSVPGHGLQETVTVSVCLCSEGYSPVTMGSGSVTYVDNMACRLARLLVTQANRLTACSHQTLLTPFALTAGALPALDEELVLALTHLELPLEWTVLGSSSLEVSSHRESLLHLAMRWGLAKLSQFFLCLPGGVQALALPNEEGATPLDLALREGHSKLVEDVTNFQGRWSPSFSRVQLSEEASLHYIHSSETLTLTLNHTAEHLLEADIKLFRKYFWDRAFLVKAFEPEARPEERTAMPSSGAETEEEIKNSVSSRSAAEKEDIKRVKSLVVQHNEHEDQHSLDLDRSFDILKKSKPPSTLLAAGRLSDMLNGGDEVYANCMVIDQVGDLDISYINIEGITATTSPESRGCTLWPQSSKHTLPTETSPSVYPLSENVEGTAHTEAQQSFMSPSSSCASNLNLSFGWHGFEKEQSHLKKRSSSLDALDADSEGEGHSEPSHICYTPGSQSSSRTGIPSGDELDSFETNTEPDFNISRAESLPLSSNLQSKESLLSGVRSRSYSCSSPKISLGKTRLVRELTVCSSSEEQRAYSLSEPPRENRIQEEEWDKYIIPAKSESEKYKVSRTFSFLMNRMTSPRNKSKTKSKDAKDKEKLNRHQFAPGTFSGVLQCLVCDKTLLGKESLQCSNCNANVHKGCKDAAPACTKKFQEKYNKNKPQTILGNSSFRDIPQPGLSLHPSSSVPVGLPTGRRETVGQVHPLSRSVPGTTLESFRRSATSLESESDHNSCRSRSHSDELLQSMGSSPSTESFIMEDVVDSSLWSDLSSDAQEFEAESWSLVVDPSFCNRQEKDVIKRQDVIFELMQTEMHHIQTLFIMSEIFRKGMKEELQLDHSTVDKIFPCLDELLEIHRHFFYSMKERRQESCAGSDRNFVIDRIGDILVQQFSEENASKMKKIYGEFCCHHKEAVNLFKELQQNKKFQNFIKLRNSNLLARRRGIPECILLVTQRITKYPVLVERILQYTKERTEEHKDLRKALCLIKDMIATVDLKVNEYEKNQKWLEILNKIENKTYTKLKNGHVFRKQALMSEERTLLYDGLVYWKTATGRFKDILALLLTDVLLFLQEKDQKYIFAAVDQKPSVISLQKLIAREVANEERGMFLISASSAGPEMYEIHTNSKEERNNWMRRIQQAVESCPEEKGGRTSESDEDKRKAEARVAKIQQCQEILTNQDQQICAYLEEKLHIYAELGELSGFEDVHLEPHLLIKPDPGEPPQAASLLAAALKEAESLQVAVKASQMGAVSQSCEDSCGDSVLADTLSSHDVPGSPTASLVTGGREGRGCSDVDPGIQGVVTDLAVSDAGEKVECRNFPGSSQSEIIQAIQNLTRLLYSLQAALTIQDSHIEIHRLVLQQQEGLSLGHSILRGGPLQDQKSRDADRQHEELANVHQLQHQLQQEQRRWLRRCEQQQRAQATRESWLQERERECQSQEELLLRSRGELDLQLQEYQHSLERLREGQRLVEREQARMRAQQSLLGHWKHGRQRSLPAVLLPGGPEVMELNRSESLCHENSFFINEALVQMSFNTFNKLNPSVIHQDATYPTTQSHSDLVRTSEHQVDLKVDPSQPSNVSHKLWTAAGSGHQILPFHESSKDSCKNGSSMTKCSCTLTSPPGLWTGTTSTLKDLDTSHTESPTPHDSNSHRPQLQAFITEAKLNLPTRTMTRQDGETGDGAKENIVYL

SEQ ID NO: 73498 - protein, 1705 aa, Homo sapiens
  Payload ID: 14544
  Gene Symbol: ARHGEF28
  Gene Name: Rho guanine nucleotide exchange factor (GEF) 28
  Uniprot ID: Q8N1W1
  ENSP ID: ENSP00000412175
MELSCSEAPLYGQMMIYAKFDKNVYLPEDAEFYFTYDGSHQRHVMIAERIEDNVLQSSVPGHGLQETVTVSVCLCSEGYSPVTMGSGSVTYVDNMACRLARLLVTQANRLTACSHQTLLTPFALTAGALPALDEELVLALTHLELPLEWTVLGSSSLEVSSHRESLLHLAMRWGLAKLSQFFLCLPGGVQALALPNEEGATPLDLALREGHSKLVEDVTNFQGRWSPSFSRVQLSEEASLHYIHSSETLTLTLNHTAEHLLEADIKLFRKYFWDRAFLVKAFEPEARPEERTAMPSSGAETEEEIKNSVSSRSAAEKEDIKRVKSLVVQHNEHEDQHSLDLDRSFDILKKSKPPSTLLAAGRLSDMLNGGDEVYANCMVIDQVGDLDISYINIEGITATTSPESRGCTLWPQSSKHTLPTETSPSVYPLSENVEGTAHTEAQQSFMSPSSSCASNLNLSFGWHGFEKEQSHLKKRSSSLDALDADSEGEGHSEPSHICYTPGSQSSSRTGIPSGDELDSFETNTEPDFNISRAESLPLSSNLQSKESLLSGVRSRSYSCSSPKISLGKTRLVRELTVCSSSEEQRAYSLSEPPRENRIQEEEWDKYIIPAKSESEKYKVSRTFSFLMNRMTSPRNKSKTKSKDAKDKEKLNRHQFAPGTFSGVLQCLVCDKTLLGKESLQCSNCNANVHKGCKDAAPACTKKFQEKYNKNKPQTILGNSSFRDIPQPGLSLHPSSSVPVGLPTGRRETVGQVHPLSRSVPGTTLESFRRSATSLESESDHNSCRSRSHSDELLQSMGSSPSTESFIMEDVVDSSLWSDLSSDAQEFEAESWSLVVDPSFCNRQEKDVIKRQDVIFELMQTEMHHIQTLFIMSEIFRKGMKEELQLDHSTVDKIFPCLDELLEIHRHFFYSMKERRQESCAGSDRNFVIDRIGDILVQQFSEENASKMKKIYGEFCCHHKEAVNLFKELQQNKKFQNFIKLRNSNLLARRRGIPECILLVTQRITKYPVLVERILQYTKERTEEHKDLRKALCLIKDMIATVDLKVNEYEKNQKWLEILNKIENKTYTKLKNGHVFRKQALMSEERTLLYDGLVYWKTATGRFKDILALLLTDVLLFLQEKDQKYIFAAVDQKPSVISLQKLIAREVANEERGMFLISASSAGPEMYEIHTNSKEERNNWMRRIQQAVESCPEEKGGRTSESDEDKRKAEARVAKIQQCQEILTNQDQQICAYLEEKLHIYAELGELSGFEDVHLEPHLLIKPDPGEPPQAASLLAAALKEAESLQVAVKASQMGAVSQSCEDSCGDSVLADTLSSHDVPGSPTASLVTGGREGRGCSDVDPGIQGVVTDLAVSDAGEKVECRNFPGSSQSEIIQAIQNLTRLLYSLQAALTIQDSHIEIHRLVLQQQEGLSLGHSILRGGPLQDQKSRDADRQHEELANVHQLQHQLQQEQRRWLRRCEQQQRAQATRESWLQERERECQSQEELLLRSRGELDLQLQEYQHSLERLREGQRLVEREQARMRAQQSLLGHWKHGRQRSLPAVLLPGGPEVMELNRSESLCHENSFFINEALVQMSFNTFNKLNPSVIHQDATYPTTQSHSDLVRTSEHQVDLKVDPSQPSNVSHKLWTAAGSGHQILPFHESSKDSCKNDLDTSHTESPTPHDSNSHRPQLQAFITEAKLNLPTRTMTRQDGETGDGAKENIVYL

SEQ ID NO: 73499 - protein, 651 aa, Homo sapiens
  Payload ID: 14544
  Gene Symbol: ARHGEF28
  Gene Name: Rho guanine nucleotide exchange factor (GEF) 28
  ENSP ID: ENSP00000421081
MIATVDLKVNEYEKNQKWLEILNKIENKTYTKLKNGHVFRKQALMSEERTLLYDGLVYWKTATGRFKDILALLLTDVLLFLQEKDQKYIFAAVDQKPSVISLQKLIAREVANEERGMFLISASSAGPEMYEIHTNSKEERNNWMRRIQQAVESCPEEKGGRTSESDEDKRKAEARVAKIQQCQEILTNQDQQICAYLEEKLHIYAELGELSGFEDVHLEPHLLIKPDPGEPPQAASLLAAALKEALVTGGREGRGCSDVDPGIQGVVTDLAVSDAGEKVECRNFPGSSQSEIIQAIQNLTRLLYSLQAALTIQDSHIEIHRLVLQQQEGLSLGHSILRGGPLQDQKSRDADRQHEELANVHQLQHQLQQEQRRWLRRCEQQQRAQATRESWLQERERECQSQEELLLRSRGELDLQLQEYQHSLERLREGQRLVEREQARMRAQQSLLGHWKHGRQRSLPAVLLPGGPEVMELNRSESLCHENSFFINEALVQMSFNTFNKLNPSVIHQDATYPTTQSHSDLVRTSEHQVDLKVDPSQPSNVSHKLWTAAGSGHQILPFHESSKDSCKNGSSMTKCSCTLTSPPGLWTGTTSTLKDLDTSHTESPTPHDSNSHRPQLQAFITEAKLNLPTRTMTRQDGETGDGAKENIVYL

SEQ ID NO: 73500 - protein, 83 aa, Homo sapiens
  Payload ID: 14544
  Gene Symbol: ARHGEF28
  Gene Name: Rho guanine nucleotide exchange factor (GEF) 28
  ENSP ID: ENSP00000421859
MELSCSEAPLYGQMMIYAKFDKNVYLPEDAEFYFTYDGSHQRHVMIAERIEDNVLQSSVPGHGLQETVTVSVCLCSEGYSPVT

SEQ ID NO: 73501 - protein, 1705 aa, Homo sapiens; identical to SEQ ID NO: 73498
  Payload ID: 14544
  Gene Symbol: ARHGEF28
  Gene Name: Rho guanine nucleotide exchange factor (GEF) 28
  Uniprot ID: Q8N1W1
  ENSP ID: ENSP00000441436

SEQ ID NO: 73502 - protein, 1731 aa, Homo sapiens; identical to SEQ ID NO: 73497
  Payload ID: 14544
  Gene Symbol: ARHGEF28
  Gene Name: Rho guanine nucleotide exchange factor (GEF) 28
  Uniprot ID: Q8N1W1
  ENSP ID: ENSP00000441913

SEQ ID NO: 73503 - protein, 526 aa, Homo sapiens
  Payload ID: 14545
  Gene Symbol: ARHGEF3
  Gene Name: Rho guanine nucleotide exchange factor (GEF) 3
  Uniprot ID: Q9NR81
  ENSP ID: ENSP00000296315
MVAKDYPFYLTVKRANCSLELPPASGPAKDAEEPSNKRVKPLSRVTSLANLIPPVKATPLKRFSQTLQRSISFRSESRPDILAPRPWSRNAAPSSTKRRDSKLWSETFDVCVNQMLTSKEIKRQEAIFELSQGEEDLIEDLKLAKKAYHDPMLKLSIMTEQELNQIFGTLDSLIPLHEELLSQLRDVRKPDGSTEHVGPILVGWLPCLSSYDSYCSNQVAAKALLDHKKQDHRVQDFLQRCLESPFSRKLDLWNFLDIPRSRLVKYPLLLREILRHTPNDNPDQQHLEEAINIIQGIVAEINTKTGESECRYYKERLLYLEEGQKDSLIDSSRVLCCHGELKNNRGVKLHVFLFQEVLVITRAVTHNEQLCYQLYRQPIPVKDLLLEDLQDGEVRLGGSLRGAFSNNERIKNFFRVSFKNGSQSQTHSLQANDTFNKQQWLNCIRQAKETVLCAAGQAGVLDSEGSFLNPTTGSRELQGETKLEQMDQSDSESDCSMDTSEVSLDCERMEQTDSSCGNSRHGESNV

SEQ ID NO: 73504 - protein, 558 aa, Homo sapiens
  Payload ID: 14545
  Gene Symbol: ARHGEF3
  Gene Name: Rho guanine nucleotide exchange factor (GEF) 3
  Uniprot ID: Q9NR81
  ENSP ID: ENSP00000341071
MDSSTAMNQCSCRGMEENKERPKRQRQNNFPMFPSPKAWNFRGRKRKQSTQDEDAVSLCSLDISEPSNKRVKPLSRVTSLANLIPPVKATPLKRFSQTLQRSISFRSESRPDILAPRPWSRNAAPSSTKRRDSKLWSETFDVCVNQMLTSKEIKRQEAIFELSQGEEDLIEDLKLAKKAYHDPMLKLSIMTEQELNQIFGTLDSLIPLHEELLSQLRDVRKPDGSTEHVGPILVGWLPCLSSYDSYCSNQVAAKALLDHKKQDHRVQDFLQRCLESPFSRKLDLWNFLDIPRSRLVKYPLLLREILRHTPNDNPDQQHLEEAINIIQGIVAEINTKTGESECRYYKERLLYLEEGQKDSLIDSSRVLCCHGELKNNRGVKLHVFLFQEVLVITRAVTHNEQLCYQLYRQPIPVKDLLLEDLQDGEVRLGGSLRGAFSNNERIKNFFRVSFKNGSQSQTHSLQANDTFNKQQWLNCIRQAKETVLCAAGQAGVLDSEGSFLNPTTGSRELQGETKLEQMDQSDSESDCSMDTSEVSLDCERMEQTDSSCGNSRHGESNV

SEQ ID NO: 73505 - protein, 532 aa, Homo sapiens
  Payload ID: 14545
  Gene Symbol: ARHGEF3
  Gene Name: Rho guanine nucleotide exchange factor (GEF) 3
  Uniprot ID: Q9NR81
  ENSP ID: ENSP00000410922
MIEVCHHNWLLWLCPSKFGIFMCCLASTTGQMELRRTREPSNKRVKPLSRVTSLANLIPPVKATPLKRFSQTLQRSISFRSESRPDILAPRPWSRNAAPSSTKRRDSKLWSETFDVCVNQMLTSKEIKRQEAIFELSQGEEDLIEDLKLAKKAYHDPMLKLSIMTEQELNQIFGTLDSLIPLHEELLSQLRDVRKPDGSTEHVGPILVGWLPCLSSYDSYCSNQVAAKALLDHKKQDHRVQDFLQRCLESPFSRKLDLWNFLDIPRSRLVKYPLLLREILRHTPNDNPDQQHLEEAINIIQGIVAEINTKTGESECRYYKERLLYLEEGQKDSLIDSSRVLCCHGELKNNRGVKLHVFLFQEVLVITRAVTHNEQLCYQLYRQPIPVKDLLLEDLQDGEVRLGGSLRGAFSNNERIKNFFRVSFKNGSQSQTHSLQANDTFNKQQWLNCIRQAKETVLCAAGQAGVLDSEGSFLNPTTGSRELQGETKLEQMDQSDSESDCSMDTSEVSLDCERMEQTDSSCGNSRHGESNV

SEQ ID NO: 73506 - protein, 184 aa, Homo sapiens
  Payload ID: 14545
  Gene Symbol: ARHGEF3
  Gene Name: Rho guanine nucleotide exchange factor (GEF) 3
  ENSP ID: ENSP00000417087
MFPSPKAWNFRGRKRKQSTQDEDAVSLCSLDISEPSNKRVKPLSRVTSLANLIPPVKATPLKRFSQTLQRSISFRSESRPDILAPRPWSRNAAPSSTKRRDSKLWSETFDVCVNQMLTSKEIKRQEAIFELSQGEEDLIEDLKLAKKAYHDPMLKLSIMTEQELNQIFGTLDSLIPLHEELLSQ

SEQ ID NO: 73507 - protein, 236 aa, Homo sapiens
  Payload ID: 14545
  Gene Symbol: ARHGEF3
  Gene Name: Rho guanine nucleotide exchange factor (GEF) 3
  ENSP ID: ENSP00000417810
  MOD_RES (1)..(1): Any amino acid
XVESCPARSRLSVSVSPPPPGIVELGPPFAWEFCSRLGSAVTSQRAGPAAAMVAKDYPFYLTVKRANCSLELPPASGPAKDAEEPSNKRVKPLSRVTSLANLIPPVKATPLKRFSQTLQRSISFRSESRPDILAPRPWSRNAAPSSTKRRDSKLWSETFDVCVNQMLTSKEIKRQEAIFELSQGEEDLIEDLKLAKKAYHDPMLKLSIMTEQELNQIFGTLDSLIPLHEAPLPQLL

SEQ ID NO: 73508 - protein, 416 aa, Homo sapiens
  Payload ID: 14545
  Gene Symbol: ARHGEF3
  Gene Name: Rho guanine nucleotide exchange factor (GEF) 3
  ENSP ID: ENSP00000417986
MVAKDYPFYLTVKRANCSLELPPASGPAKDAEEPSNKRVKPLSRVTSLANLIPPVKATPLKRFSQTLQRSISFRSESRPDILAPRPWSRNAAPSSTKRRDSKLWSETFDVCVNQMLTSKEIKRQEAIFELSQGEEDLIEDLKLAKKAYHDPMLKLSIMTEQELNQIFGTLDSLIPLHEELLSQLRDVRKPDGSTEHVGPILVGWLPCLSSYDSYCSNQVAAKALLDHKKQDHRVQDFLQRCLESPFSRKLDLWNFLDIPRSRLVKYPLLLREILRHTPNDNPDQQHLEEAINIIQGIVAEINTKTGESECRYYKERLLYLEEGQKDSLIDSSRVLCCHGELKNNRGVKLHVFLFQEVLVITRAVTHNEQLCYQLYRQPIPVKDLLLEDLQDGEVRLGGSLRGAFSNNERSMDSSRG

SEQ ID NO: 73509 - protein, 100 aa, Homo sapiens
  Payload ID: 14545
  Gene Symbol: ARHGEF3
  Gene Name: Rho guanine nucleotide exchange factor (GEF) 3
  ENSP ID: ENSP00000418469
MDSSTAMNQCSCRGMEENKERPKRQRQNNFPMFPSPKAWNFRGRKRKQSTQDEDAVSLCSLDISEPSNKRVKPLSRVTSLANLIPPVKATPLKRFSQTLQ

SEQ ID NO: 73510 - protein, 497 aa, Homo sapiens
  Payload ID: 14545
  Gene Symbol: ARHGEF3
  Gene Name: Rho guanine nucleotide exchange factor (GEF) 3
  ENSP ID: ENSP00000418826
MIEEPSNKRVKPLSRVTSLANLIPPVKATPLKRFSQTLQRSISFRSESRPDILAPRPWSRNAAPSSTKRRDSKLWSETFDVCVNQMLTSKEIKRQEAIFELSQGEEDLIEDLKLAKKAYHDPMLKLSIMTEQELNQIFGTLDSLIPLHEELLSQLRDVRKPDGSTEHVGPILVGWLPCLSSYDSYCSNQVAAKALLDHKKQDHRVQDFLQRCLESPFSRKLDLWNFLDIPRSRLVKYPLLLREILRHTPNDNPDQQHLEEAINIIQGIVAEINTKTGESECRYYKERLLYLEEGQKDSLIDSSRVLCCHGELKNNRGVKLHVFLFQEVLVITRAVTHNEQLCYQLYRQPIPVKDLLLEDLQDGEVRLGGSLRGAFSNNERIKNFFRVSFKNGSQSQTHSLQANDTFNKQQWLNCIRQAKETVLCAAGQAGVLDSEGSFLNPTTGSRELQGETKLEQMDQSDSESDCSMDTSEVSLDCERMEQTDSSCGNSRHGESNV

SEQ ID NO: 73511 - protein, 50 aa, Homo sapiens
  Payload ID: 14545
  Gene Symbol: ARHGEF3
  Gene Name: Rho guanine nucleotide exchange factor (GEF) 3
  ENSP ID: ENSP00000418984
MDSSTAMNQCSCRGMEENKERAVGGVSGTSAINGRNNWFFRLLRKSDLCG

SEQ ID NO: 73512 - protein, 196 aa, Homo sapiens
  Payload ID: 14545
  Gene Symbol: ARHGEF3
  Gene Name: Rho guanine nucleotide exchange factor (GEF) 3
  ENSP ID: ENSP00000420402
MFDRNIWPKRQRQNNFPMFPSPKAWNFRGRKRKQSTQDEDAVSLCSLDISEPSNKRVKPLSRVTSLANLIPPVKATPLKRFSQTLQRSISFRSESRPDILAPRPWSRNAAPSSTKRRDSKLWSETFDVCVNQMLTSKEIKRQEAIFELSQGEEDLIEDLKLAKKAYHDPMLKLSIMTEQELNQIFGTLDSLIPLHE

SEQ ID NO: 73513 - protein, 532 aa, Homo sapiens
  Payload ID: 14545
  Gene Symbol: ARHGEF3
  Gene Name: Rho guanine nucleotide exchange factor (GEF) 3
  ENSP ID: ENSP00000420420
MRSERPMVWCCLFVRSQRKRKQSTQDEDAVSLCSLDISEPSNKRVKPLSRVTSLANLIPPVKATPLKRFSQTLQRSISFRSESRPDILAPRPWSRNAAPSSTKRRDSKLWSETFDVCVNQMLTSKEIKRQEAIFELSQGEEDLIEDLKLAKKAYHDPMLKLSIMTEQELNQIFGTLDSLIPLHEELLSQLRDVRKPDGSTEHVGPILVGWLPCLSSYDSYCSNQVAAKALLDHKKQDHRVQDFLQRCLESPFSRKLDLWNFLDIPRSRLVKYPLLLREILRHTPNDNPDQQHLEEAINIIQGIVAEINTKTGESECRYYKERLLYLEEGQKDSLIDSSRVLCCHGELKNNRGVKLHVFLFQEVLVITRAVTHNEQLCYQLYRQPIPVKDLLLEDLQDGEVRLGGSLRGAFSNNERIKNFFRVSFKNGSQSQTHSLQANDTFNKQQWLNCIRQAKETVLCAAGQAGVLDSEGSFLNPTTGSRELQGETKLEQMDQSDSESDCSMDTSEVSLDCERMEQTDSSCGNSRHGESNV

SEQ ID NO: 73514 - protein, 70 aa, Homo sapiens
  Payload ID: 14545
  Gene Symbol: ARHGEF3
  Gene Name: Rho guanine nucleotide exchange factor (GEF) 3
  ENSP ID: ENSP00000420633
MFDRNICPVILHVKRTNSVLALRLVHSLNGSGKTTFPCFPLLKPGISEGSSRDHPRRKQLILTSLLQDLL

SEQ ID NO: 73515 - protein, 870 aa, Homo sapiens
  Payload ID: 14546
  Gene Symbol: ARHGEF33
  Gene Name: Rho guanine nucleotide exchange factor (GEF) 33
  Uniprot ID: A8MVX0
  ENSP ID: ENSP00000381780
MEKTKTKQGENEHMPVNNPSTQIYQLQALASELKTGFTEAMQELSRIQHGEYALEEKVKSCRCSMEEKVTEMKNSLNYFKEELSNAMSMIQAITSKQEEMQQKIEQLQQEKRRESRKVKAKKTQKEEHSSQAGPAQAQGSPFRSINIPEPVLPSEDFTNLLPSQAYEKAQESRSVHVGDSNVKGMMGPGVNPTTPEAEENLKSCLSADIQSKGHLPSGMWRQPKDGKEWGEEYVTKDHPDKLKEAGQGRHSSLENVLCETSLAAKRQTVALELLESERKYVINISLILKIKATFQGSDGKRNSKERSLFPGSLRYLVQQHLDLLHALQERVLKWPRQGVLGDLFLKLTNDENNFLDYYVAYLRDLPECISLVHVVVLKEGDEEIKSDIYTLFFHIVQRIPEYLIHLQNVLKFTEQEHPDYYLLLVCVQRLRVFISHYTLLFQCNEDLLIQKRKKLKKSSMAKLYKGLASQCANAGQDASPTAGPEAVRDTGIHSEELLQPYPSAPSSGPAITHLMPPVKKSQQQQSLMESMQPGKPSDWELEGRKHERPESLLAPTQFCAAEQDVKALAGPLQAIPEMDFESSPAEPLGNVERSLRAPAELLPDARGFVPAAYEEFEYGGEIFALPAPYDEEPFQAPALFENCSPASSESSLDICFLRPVSFAMEAERPEHPLQPLPKSATSPAGSSSAYKLEAAAQAHGKAKPLSRSLKEFPRAPPADGVAPRLYSTRSSSGGRAPIKAERAAQAHGPAAAAVAARGASRTFFPQQRSQSEKQTYLEVRREMHLEDTTRFCPKEERESEQTSFSDQNPRQDQKGGFRSSFRKLFKKKSSGSEYREKTNENPSMDPSPTKQDFFRNRLALANDLDQGTAV

SEQ ID NO: 73516 - protein, 870 aa, Homo sapiens; identical to SEQ ID NO: 73515
  Payload ID: 14546
  Gene Symbol: ARHGEF33
  Gene Name: Rho guanine nucleotide exchange factor (GEF) 33
  Uniprot ID: A8MVX0
  ENSP ID: ENSP00000387020

SEQ ID NO: 73517 - protein, 109 aa, Homo sapiens
  Payload ID: 14546
  Gene Symbol: ARHGEF33
  Gene Name: Rho guanine nucleotide exchange factor (GEF) 33
  ENSP ID: ENSP00000399688
  MOD_RES (1)..(1): Any amino acid
XGRAPIKAERAAQAHGPAAAAVAARGASRTFFPQQRSQSEKQTYLEEMHLEDTTRFCPKEERESEQTSFSDQNPRQDQKGGFRSSFRKLFKKKNGNATGEDFCGPWGWW

SEQ ID NO: 73518 - protein, 108 aa, Homo sapiens
  Payload ID: 14546
  Gene Symbol: ARHGEF33
  Gene Name: Rho guanine nucleotide exchange factor (GEF) 33
  ENSP ID: ENSP00000413620
GRAPIKAERAAQAHGPAAAAVAARGASRTFFPQQRSQSEKQTYLEEMHLEDTTRFCPKEERESEQTSFSDQNPRQDQKGGFRSSFRKLFKKKNGNATGEDFCGPWGWW

SEQ ID NO: 73519 - protein, 484 aa, Homo sapiens
  Payload ID: 14547
  Gene Symbol: ARHGEF35
  Gene Name: Rho guanine nucleotide exchange factor (GEF) 35
  Uniprot ID: A5YM69
  ENSP ID: ENSP00000367355
MEAEEAQHGASPPISAIEEFSIIPEAPMRSSQVSALGLEAQEDEDPSYKWREEHRLSATQQSELRDVCDYAIETMPSFPKEGSADVEPNQESLVAEACDTPEHWEAVPQSLAGRQARTLAPPELWACPIQSEHLDMAPFSSDLGSEEEEVEFWPGLTSLTLGSGQAEEEEETSSDNSGQTRYYSPCEEHPAETNQNEGAESGTIRQGEELPSEELQESQGLLHPQEVQVLEEQGQQEAGFRGEGTLREDVCADGLLGEEQMIEQVNDEKGEQKQKQEQVQDVMLGRQGERMGLTGEPEGLNDGEWEQEDMERKAQGQGGPEQGEERKRELQVPEENRADSQDEKSQTFLGKSEEVTGKQEDHGIKEKGVPVSGQEAKEPESWDGGRLGAVGRARSREEENEHHGPSMPALIAPEDSPHCDLFPGASYLVTQIPGTQTESRAEELSPAALSPLLEPIRCSHQPISLLGSFLTEESPDKEKLLSVL

SEQ ID NO: 73520 - protein, 675 aa, Homo sapiens
  Payload ID: 14548
  Gene Symbol: ARHGEF37
  Gene Name: Rho guanine nucleotide exchange factor (GEF) 37
  Uniprot ID: A1IGU5
  ENSP ID: ENSP00000328083
MAKHGADEPSSRSGSPDREGRASEDRSLLHQRLAVRELIDTEVSYLHMLQLCASDIRSRLQQLPQGDLDVLFSNIDDIIKVNSRFLHDLQETASKEEEQVQLVGNIFLEFQEELEQVYKVYCASYDQALLLVDTYRKEPELQRHIQGIVEAVVPQAGSSGLSFLLVIPLQRITRYPLLLQKILENTVPDASAYPVLQRAVSALQDVNTNINEYKMRKEVASKYTKVEQLTLRERLARINTHTLSKKTTRLSQLLKQEAGLIPRTEDKEFDDLEERFQWVSLCVTELKNNVAAYLDNLQAFLYFRPHEYNLDIPEGPAVQYCNLARDLHLEAFLKFKQRLEGLVWQPLCSLAKALLGPQNLIKKRLDKLLDFERVEEKLLEVGSVTYQEEAARHTYQALNSLLVAELPQFNQLVMQWLGQIMCTFVTLQRDLAKQVLQRAEGSMAQLPHHHVPEPAFRKLVEDALGRTSNQLRSFQETFEKVQPPPTTQPLLPGSERQVQALLSRYGPGKLYQVTSNISGTGTLDLTLPRGQIVAILQNKDTKGNSGRWLVDTGGHRGYVPAGKLQLYHVVPSAEELRRQAGLNKDPRCLTPEPSPALVPSIPTMNQVIAAYPFVARSSHEVSLQAGQPVTILEAQDKKGNPEWSLVEVNGQRGYVPSGFLARARSPVLWGWSLPS

SEQ ID NO: 73521 - protein, 103 aa, Homo sapiens
  Payload ID: 14548
  Gene Symbol: ARHGEF37
  Gene Name: Rho guanine nucleotide exchange factor (GEF) 37
  ENSP ID: ENSP00000425621
MAKHGADEPSSRSGSPDREGRASEDRSLLHQRLAVRELIDTEVSYLHMLQLCASDIRSRLQQLPQGDLDVLFSNIDDIIKVNSRFLHDLQETASKEEEQVQLV

SEQ ID NO: 73522 - protein, 219 aa, Homo sapiens
  Payload ID: 14549
  Gene Symbol: ARHGEF38
  Gene Name: Rho guanine nucleotide exchange factor (GEF) 38
  Uniprot ID: Q9NXL2
  ENSP ID: ENSP00000265154
MEPKEATGKENMVTKKKNLAFLRSRLYMLERRKTDTVVESSVSGDHSGTLRRSQSDRTEYNQKLQEKMTPQGECSVAETLTPEEEHHMKRMMAKREKIIKELIQTEKDYLNDLELCVREVVQPLRNKKTDRLDVDSLFSNIESVHQISAKLLSLLEEATTDVEPAMQVIGEVFLQIKGPLEDIYKIYCYHHDEAHSILESYEKEEELKEHLSHCIQSLK

SEQ ID NO: 73523 - protein, 777 aa, Homo sapiens
  Payload ID: 14549
  Gene Symbol: ARHGEF38
  Gene Name: Rho guanine nucleotide exchange factor (GEF) 38
  Uniprot ID: Q9NXL2
  ENSP ID: ENSP00000416125
MEPKEATGKENMVTKKKNLAFLRSRLYMLERRKTDTVVESSVSGDHSGTLRRSQSDRTEYNQKLQEKMTPQGECSVAETLTPEEEHHMKRMMAKREKIIKELIQTEKDYLNDLELCVREVVQPLRNKKTDRLDVDSLFSNIESVHQISAKLLSLLEEATTDVEPAMQVIGEVFLQIKGPLEDIYKIYCYHHDEAHSILESYEKEEELKEHLSHCIQSLKKIYMQEGKPNLLDMGSLMIKPIQRVMKYPLLLCELRNSTPPSHPDYRALDDAFAAVKDINVNINELKRRKDLVLKYKKNDEDESLKDKLSKLNIHSISKKSKRVTNHLKILTRGESQVKDNTFNREEKLFRALEKTVRLCVKNISLCLQHIQDAMPLALQSVMDLQEISYNKDDEMDYSETLSNALNSCHDFASHLQRLILTPLSALLSLFPGPHKLIQKRYDKLLDCNSYLQRSTGEESDLAKKEYEALNAQLVEELQAFNQAARKILLNCLCSFITLLRDLMLVAQQAYSTLVPMPLLVSSISEIQNQVLEEIQNLNCVKENSATFIERKLSFEKKKPVQILPEMPHQTDIHRSKLLSTYSAEELYQAKRKCNATQEYDINLLEGDLVAVIEQKDPLGSTSRWLVDTGNVKGYVYSSFLKPYNPAKMQKVDAENRFCDDDFENISLFVSSRPASDSVTGTSESSIGDSSSSLSGTCGKFETNGTDVDSFQEVDEQIFYAVHAFQARSDHELSLQEYQRVHILRFCDLSGNKEWWLAEAQGQKGYVPANYLGKMTYA

SEQ ID NO: 73524 - protein, 335 aa, Homo sapiens
  Payload ID: 14550
  Gene Symbol: ARHGEF39
  Gene Name: Rho guanine nucleotide exchange factor (GEF) 39
  Uniprot ID: Q8N4T4
  ENSP ID: ENSP00000367638
MELSCPGSRCPVQEQRARWERKRACTARELLETERRYQEQLGLVATYFLGILKAKGTLRPPERQALFGSWELIYGASQELLPYLEGGCWGQGLEGFCRHLELYNQFAANSERSQTTLQEQLKKNKGFRRFVRLQEGRPEFGGLQLQDLLPLPLQRLQQYENLVVALAENTGPNSPDHQQLTRAARLISETAQRVHTIGQKQKNDQHLRRVQALLSGRQAKGLTSGRWFLRQGWLLVVPPHGEPRPRMFFLFTDVLLMAKPRPPLHLLRSGTFACKALYPMAQCHLSRVFGHSGGPCGGLLSLSFPHEKLLLMSTDQEELSRWYHSLTWAISSQKN

SEQ ID NO: 73525 - protein, 186 aa, Homo sapiens
  Payload ID: 14550
  Gene Symbol: ARHGEF39
  Gene Name: Rho guanine nucleotide exchange factor (GEF) 39
  Uniprot ID: Q8N4T4
  ENSP ID: ENSP00000436519
MELSCPGSRCPVQEQRARWERKRACTARELLETERRYQEQLGLVATYFLGILKAKGTLRPPERQALFGSWELIYGASQELLPYLEGGCWGQGLEGFCRHLELYNQFAANSERSQTTLQEQLKKNKGFRRFVRLQEGRPEFGGLQLQDLLPLPLQRLQQYENLVVALAENTGPNSPDHQQLTPVLPS

SEQ ID NO: 73526 - protein, 299 aa, Homo sapiens
  Payload ID: 14550
  Gene Symbol: ARHGEF39
  Gene Name: Rho guanine nucleotide exchange factor (GEF) 39
  Uniprot ID: Q8N4T4
  ENSP ID: ENSP00000436756
MLGVCQTLKQYFLGILKAKGTLRPPERQALFGSWELIYGASQELLPYLEGGCWGQGLEGFCRHLELYNQFAANSERSQTTLQEQLKKNKGFRRFVRLQEGRPEFGGLQLQDLLPLPLQRLQQYENLVVALAENTGPNSPDHQQLTRAARLISETAQRVHTIGQKQKNDQHLRRVQALLSGRQAKGLTSGRWFLRQGWLLVVPPHGEPRPRMFFLFTDVLLMAKPRPPLHLLRSGTFACKALYPMAQCHLSRVFGHSGGPCGGLLSLSFPHEKLLLMSTDQEELSRWYHSLTWAISSQKN

SEQ ID NO: 73527 - protein, 690 aa, Homo sapiens
  Payload ID: 14551
  Gene Symbol: ARHGEF4
  Gene Name: Rho guanine nucleotide exchange factor (GEF) 4
  Uniprot ID: Q9NR80
  ENSP ID: ENSP00000316845
MPWEEPAGEKPSCSHSQKAFHMEPAQKPCFTTDMVTWALLCISAETVRGEAPSQPRGIPHRSPVSVDDLWLEKTQRKKLQKQAHVERRLHIGAVHKDGVKCWRKTIITSPESLNLPRRSHPLSQSAPTGLNHMGWPEHTPGTAMPDGALDTAVCADEVGSEEDLYDDLHSSSHHYSHPGGGGEQLAINELISDGSVVCAEALWDHVTMDDQELGFKAGDVIEVMDATNREWWWGRVADGEGWFPASFVRLRVNQDEPADDDAPLAGNSGAEDGGAEAQSSKDQMRTNVINEILSTERDYIKHLRDICEGYVRQCRKRADMFSEEQLRTIFGNIEDIYRCQKAFVKALEQRFNRERPHLSELGACFLEHQADFQIYSEYCNNHPNACVELSRLTKLSKYVYFFEACRLLQKMIDISLDGFLLTPVQKICKYPLQLAELLKYTHPQHRDFKDVEAALHAMKNVAQLINERKRRLENIDKIAQWQSSIEDWEGEDLLVRSSELIYSGELTRVTQPQAKSQQRMFFLFDHQLIYCKKDLLRRDVLYYKGRLDMDGLEVVDLEDGKDRDLHVSIKNAFRLHRGATGDSHLLCTRKPEQKQRWLKAFAREREQVQLDQETGFSITELQRKQAMLNASKQQVTGKPKAVGRPCYLTRQKHPALPSNRPQQQVLVLAEPRRKPSTFWHSISRLAPFRK

SEQ ID NO: 73528 - protein, 619 aa, Homo sapiens
  Payload ID: 14551
  Gene Symbol: ARHGEF4
  Gene Name: Rho guanine nucleotide exchange factor (GEF) 4
  Uniprot ID: Q9NR80
  ENSP ID: ENSP00000348017
MRPDGQQALDAVVRSFDCHSEAALRQRNDVIYCSLPRTAQGIVQREDQLEVLVSLREVWGRRRGRDGTCTGAMPDGALDTAVCADEVGSEEDLYDDLHSSSHHYSHPGGGGEQLAINELISDGSVVCAEALWDHVTMDDQELGFKAGDVIEVMDATNREWWWGRVADGEGWFPASFVRLRVNQDEPADDDAPLAGNSGAEDGGAEAQSSKDQMRTNVINEILSTERDYIKHLRDICEGYVRQCRKRADMFSEEQLRTIFGNIEDIYRCQKAFVKALEQRFNRERPHLSELGACFLEHQADFQIYSEYCNNHPNACVELSRLTKLSKYVYFFEACRLLQKMIDISLDGFLLTPVQKICKYPLQLAELLKYTHPQHRDFKDVEAALHAMKNVAQLINERKRRLENIDKIAQWQSSIEDWEGEDLLVRSSELIYSGELTRVTQPQAKSQQRMFFLFDHQLIYCKKDLLRRDVLYYKGRLDMDGLEVVDLEDGKDRDLHVSIKNAFRLHRGATGDSHLLCTRKPEQKQRWLKAFAREREQVQLDQETGFSITELQRKQAMLNASKQQVTGKPKAVGRPCYLTRQKHPALPSNRPQQQVLVLAEPRRKPSTFWHSISRLAPFRK

SEQ ID NO: 73529 - protein, 720 aa, Homo sapiens [sequence omitted]

SEQ ID NO: 73530 - protein, 1014 aa, Homo sapiens
  Payload ID: 14551
  Gene Symbol: ARHGEF4
  Gene Name: Rho guanine nucleotide exchange factor (GEF) 4
  ENSP ID: ENSP00000386794
MRALVRAHSIAGFSPECPEDPVGQNVVKSGTHVKEGAKNERDPRIQNIPSPAPTQLSGPIPAFQSGAPHLQGPCKPGGFRLQRASQDTPSAGLLGENQLRQDSRSCLVASCLTSELVKLSAEEVPEPAECKSEQSPESRTQEPQGTQLAPRAADERETQKHLWGISVQAGNQTSNYTSKYVLSEESKSPTRAKFPRQPSSEGTQVWSGDLMGCLEVSDSSDAPETTQKSSAIDTSKAAEEAMVLDPNYREQALQGLSEFKAATVSHCGPGAEEGEQGPGGAGGRQLEPKAGGEASRGRGALIIVAVEQKGLQASRSNAGPVPETLPRDFPKERPESPLSTGETPCESPTRGKTPAGNECELPAAPIQGAGDGALQRVAQAAELGRVLVPQAASEETPSTEEPPGERLRGESRSSGSGERGPEEAPEGGAAAARGQRPRVPALEPPQPPRGLRKGAQEPGKRPTFSKVTSFRKGRPLATESPGGVPAPTTEGRRWGSSGPEGLPRENPPAAAGRDAPPLHHGDASAWPEFVPQAAGDRTAGPAGAGHTGTSGDLGSRGPSSESCNAKRLKTTEKKLRARLALAHKTFSNFIESIVLEKENTHERSPSSPKGEKEKSRLRQGSWRAFLKSKDAGSPKKPTLVSLPLGPEVLSPAETDSHCEERAEDKEGYVFSDHWAPPLASTPLSSSLVSPEHRRKSEPTIKCTATQEGGRYLPSGIFPEKSWLASPGSPRAQQAGIAHTLPSSSACCLAYENPGTPCRPTSPKPLSPRPSAQRMGLHYPGRGSAISMVSLGSYSYVDSSSGDPERPKIPKGQTSFLLSLQTLNQDEQKEESREGGQGPRGLGTVPWLRDLPGSENHMPWEEPAGEKPSCSHSQKAFHMEPAQKPCFTTDMVTWALLCISAETVRGEAPSQPRGIPHRSPVSVDDLWLEKTQRKKLQKQAHVERRLHIGAVHKDGVKCWRKTIITSPESLNLPRRSHPLSQSAPTGLNHMGWPEHTPGTGELRASLFCYVLWILA

SEQ ID NO: 73531 - protein, 630 aa, Homo sapiens
  Payload ID: 14551
  Gene Symbol: ARHGEF4
  Gene Name: Rho guanine nucleotide exchange factor (GEF) 4
  ENSP ID: ENSP00000387285
MPWEEPAGEKPSCSHSQKAFHMEPAQKPCFTTDMVTWALLCISAETVRGEAPSQPRGIPHRSPVSVDDLWLEKTQRKKLQKQAHVERRLHIGAVHKDGVKCWRKTIITSPESLNLPRRSHPLSQSAPTGLNHMGWPEHTPGTAMPDGALDTAVCADEVGSEEDLYDDLHSSSHHYSHPGGGGEQLAINELISDGSVVCAEALWDHVTMDDQELGFKAGDVIEVMDATNREWWWGRVADGEGWFPASFVRLRVNQDEPADDDAPLAGNSGAEDGGAEAQSSKDQMRTNVINEILSTERDYIKHLRDICEQADFQIYSEYCNNHPNACVELSRLTKLSKYVYFFEACRLLQKMIDISLDGFLLTPVQKICKYPLQLAELLKYTHPQHRDFKDVEAALHAMKNVAQLINERKRRLENIDKIAQWQSSIEDWEGEDLLVRSSELIYSGELTRVTQPQAKSQQRMFFLFDHQLIYCKKDLLRRDVLYYKGRLDMDGLEVVDLEDGKDRDLHVSIKNAFRLHRGATGDSHLLCTRKPEQKQRWLKAFAREREQVQLDQETGFSITELQRKQAMLNASKQQVTGKPKAVGRPCYLTRQKHPALPSNRPQQQVLVLAEPRRKPSTFWHSISRLAPFRK

SEQ ID NO: 73532 - protein, 372 aa, Homo sapiens
  Payload ID: 14551
  Gene Symbol: ARHGEF4
  Gene Name: Rho guanine nucleotide exchange factor (GEF) 4
  ENSP ID: ENSP00000389661
PLASTPLSSSLVSPEHRRKSEPTIKCTATQEGGRYLPSGIFPEKSWLASPGSPRAQQAGIAHTLPSSSACCLAYENPGTPCRPTSPKPLSPRPSAQRMGLHYPGRGSAISMVSLGSYSYVDSSSGDPERPKIPKGQTSFLLSLQTLNQDEQKEESREGGQGPRGLGTVPWLRDLPGSENHMPWEEPAGEKPSCSHSQKAFHMEPAQKPCFTTDMVTWALLCISAETVRGEAPSQPRGIPHRSPVSVDDLWLEKTQRKKLQKQAHVERRLHIGAVHKDGVKCWRKTIITSPESLNLPRRSHPLSQSAPTGLNHMGWPEHTPGTAVGRPCYLTRQKHPALPSNRPQQQVLVLAEPRRKPSTFWHSISRLAPFRK

SEQ ID NO: 73533 - protein, 192 aa, Homo sapiens
  Payload ID: 14551
  Gene Symbol: ARHGEF4
  Gene Name: Rho guanine nucleotide exchange factor (GEF) 4
  ENSP ID: ENSP00000398455
MPWEEPAGEKPSCSHSQKAFHMEPAQKPCFTTDMVTWALLCISAETVRGEAPSQPRGIPHRSPVSVDDLWLEKTQRKKLQKQAHVERRLHIGAVHKDGVKCWRKTIITSPESLNLPRRSHPLSQSAPTGLNHMGWPEHTPGTAVGRPCYLTRQKHPALPSNRPQQQVLVLAEPRRKPSTFWHSISRLAPFRK

SEQ ID NO: 73534 - protein, 670 aa, Homo sapiens
  Payload ID: 14551
  Gene Symbol: ARHGEF4
  Gene Name: Rho guanine nucleotide exchange factor (GEF) 4
  Uniprot ID: Q9NR80
  ENSP ID: ENSP00000432267
MPWEEPAGEKPSCSHSQKAFHMEPAQKPCFTTDMVTWALLCISAETVRGEAPSQPRGIPHRSPVSVDDLWLEKTQRKKLQKQAHVERRLHIGAVHKDGVKCWRKTIITSPESLNLPRRSHPLSQSAPTGLNHMGWPEHTPGTAMPDGALDTAVCADEVGSEEDLYDDLHSSSHHYSHPGGGGEQLAINELISDGSVVCAEALWDHVTMDDQELGFKAGDVIEVMDATNREWWWGRVADGEGWFPASFVRLRVNQDEPADDDAPLAGNSGAEDGGAEAQSSKDQMRTNVINEILSTERDYIKHLRDICEGYVRQCRKRADMFSEEQLRTIFGNIEDIYRCQKAFVKALEQRFNRERPHLSELGACFLEHQADFQIYSEYCNNHPNACVELSRLTKLSKYVYFFEACRLLQKMIDISLDGFLLTPVQKICKYPLQLAELLKYTHPQHRDFKDVEAALHAMKNVAQLINERKRRLENIDKIAQWQSSIEDWEGEDLLVRSSELIYSGELTRVTQPQAKSQQRMFFLFDHQLIYCKKDLLRRDVLYYKGRLDMDGLEVVDLEDGKDRDLHVSIKNAFRLHRGATGDSHLLCTRKPEQKQRWLKAFAREREQVQLDQETGFSITELQRKQAMLNASKQQVTGKPKGRRTAAPPPRLPGPYPADIIPFSEPQSQAS

SEQ ID NO: 73535 - protein, 287 aa, Homo sapiens
  Payload ID: 14551
  Gene Symbol: ARHGEF4
  Gene Name: Rho guanine nucleotide exchange factor (GEF) 4
  ENSP ID: ENSP00000432301
  MOD_RES (1)..(1): Any amino acid
XACVELSRLTKLSKYVYFFEACRLLQKMIDISLDGFLLTPVQKICKYPLQLAELLKYTHPQHRDFKDVEAALHAMKNVAQLINERKRRLENIDKIAQWQSSIEDWEGEDLLVRSSELIYSGELTRVTQPQAKSQQRMFFLFDHQLIYCKKDLLRRDVLYYKGRLDMDGLEVVDLEDGKDRDLHVSIKNAFRLHRGATGDSHLLCTRKPEQKQRWLKAFAREREQVQLDQETGFSITELQRKQAMLNASKQQVTGKPKGRRTAAPPPRLPGPYPADIIPFSEPQSQAS

SEQ ID NO: 73536 - protein, 630 aa, Homo sapiens; identical to SEQ ID NO: 73531
  Payload ID: 14551
  Gene Symbol: ARHGEF4
  Gene Name: Rho guanine nucleotide exchange factor (GEF) 4
  ENSP ID: ENSP00000483548

SEQ ID NO: 73537 - protein, 1519 aa, Homo sapiens
  Payload ID: 14552
  Gene Symbol: ARHGEF40
  Gene Name: Rho guanine nucleotide exchange factor (GEF) 40
  Uniprot ID: Q8TER5
  ENSP ID: ENSP00000298694
MEPEPVEDCVQSTLAALYPPFEATAPTLLGQVFQVVERTYREDALRYTLDFLVPAKHLLAKVQQEACAQYSGFLFFHEGWPLCLHEQVVVQLAALPWQLLRPGDFYLQVVPSAAQAPRLALKCLAPGGGRVQEVPVPNEACAYLFTPEWLQGINKDRPTGRLSTCLLSAPSGIQRLPWAELICPRFVHKEGLMVGHQPSTLPPELPSGPPGLPSPPLPEEALGTRSPGDGHNAPVEGPEGEYVELLEVTLPVRGSPTDAEGSPGLSRVRTVPTRKGAGGKGRHRRHRAWMHQKGLGPRGQDGARPPGEGSSTGASPESPPGAEAVPEAAVLEVSEPPAEAVGEASGSCPLRPGELRGGGGGGQGAEGPPGTPRRTGKGNRRKKRAAGRGALSRGGDSAPLSPGDKEDASHQEALGNLPSPSEHKLPECHLVKEEYEGSGKPESEPKELKTAGEKEPQLSEACGPTEEGAGERELEGPGLLCMAGHTGPEGPLSDTPTPPLETVQEGKGDNIPEEALAVSVSDHPDVAWDLMASGFLILTGGVDQSGRALLTITPPCPPEEPPPSRDTLNTTLHYLHSLLRPDLQTLGLSVLLDLRQAPPLPPALIPALSQLQDSGDPPLVQRLLILIHDDLPTELCGFQGAEVLSENDLKRVAKPEELQWELGGHRDPSPSHWVEIHQEVVRLCRLCQGVLGSVRQAIEELEGAAEPEEEEAVGMPKPLQKVLADPRLTALQRDGGAILMRLRSTPSSKLEGQGPATLYQEVDEAIHQLVRLSNLHVQQQEQRQCLRRLQQVLQWLSGPGEEQLASFAMPGDTLSALQETELRFRAFSAEVQERLAQAREALALEENATSQKVLDIFEQRLEQVESGLHRALRLQRFFQQAHEWVDEGFARLAGAGPGREAVLAALALRRAPEPSAGTFQEMRALALDLGSPAALREWGRCQARCQELERRIQQHVGEEASPRGYRRRRADGASSGGAQWGPRSPSPSLSSLLLPSSPGPRPAPSHCSLAPCGEDYEEEGPELAPEAEGRPPRAVLIRGLEVTSTEVVDRTCSPREHVLLGRARGPDGPWGVGTPRMERKRSISAQQRLVSELIACEQDYVATLSEPVPPPGPELTPELRGTWAAALSARERLRSFHRTHFLRELQGCATHPLRIGACFLRHGDQFSLYAQYVKHRHKLENGLAALSPLSKGSMEAGPYLPRALQQPLEQLTRYGRLLEELLREAGPELSSECRALGAAVQLLREQEARGRDLLAVEAVRGCEIDLKEQGQLLHRDPFTVICGRKKCLRHVFLFEHLLLFSKLKGPEGGSEMFVYKQAFKTADMGLTENIGDSGLCFELWFRRRRAREAYTLQATSPEIKLKWTSSIAQLLWRQAAHNKELRVQQMVSMGIGNKPFLDIKALGERTLSALLTGRAARTRASVAVSSFEHAGPSLPGLSPGACSLPARVEEEAWDLDVKQISLAPETLDSSGDVSPGPRNSPSLQPPHPGSSTPTLASRGILGLSRQSHARALSDPTTPL

SEQ ID NO: 73538 - protein, 557 aa, Homo sapiens
  Payload ID: 14552
  Gene Symbol: ARHGEF40
  Gene Name: Rho guanine nucleotide exchange factor (GEF) 40
  ENSP ID: ENSP00000451335
MEPEPVEDCVQSTLAALYPPFEATAPTLLGQVFQVVERTYREDALRYTLDFLVPAKHLLAKVQQEACAQYSGFLFFHEGWPLCLHEQVVVQLAALPWQLLRPGDFYLQVVPSAAQAPRLALKCLAPGGGRVQEVPVPNEACAYLFTPEWLQGINKDRPTGRLSTCLLSAPSGIQRLPWAELICPRFVHKEGLMVGHQPSTLPPELPSGPPGLPSPPLPEEALGTRSPGDGHNAPVEGPEGEYVELLEVTLPVRGSPTDAEGSPGLSRVRTVPTRKGAGGKGRHRRHRAWMHQKGLGPRGQDGARPPGEGSSTGASPESPPGAEAVPEAAVLEVSEPPAEAVGEASGSCPLRPGELRGGGGGGQGAEGPPGTPRRTGKGNRRKKRAAGRGALSRGGDSAPLSPGDKEDASHQEALGNLPSPSEHKLPECHLVKEEYEGSGKPESEPKELKTAGEKEPQLSEACGPTEEGAGERELEGPGLLCMAGHTGPEGPLSDTPTPPLETVQEGKGDNIPEEALAVSVSDHPDVAWDLMASGFLILTGQWASVGEGKQDWEREAI

SEQ ID NO: 73539 - protein, 502 aa, Homo sapiens
  Payload ID: 14552
  Gene Symbol: ARHGEF40
  Gene Name: Rho guanine nucleotide exchange factor (GEF) 40
  ENSP ID: ENSP00000451655
MEPEPVEDCVQSTLAALYPPFEATAPTLLGQVFQVVERTYREDALRYTLDFLVPAKHLLAKVQQEACAQYSGFLFFHEGWPLCLHEQVVVQLAALPWQLLRPGDFYLQVVPSAAQAPRLALKCLAPGGGRVQEVPVPNEACAYLFTPEWLQGINKDRPTGRLSTCLLSAPSGIQRLPWAELICPRFVHKEGLMVGHQPSTLPPELPSGPPGLPSPPLPEEALGTRSPGDGHNAPVEGPEGEYVELLEVTLPVRGSPTDAEGSPGLSRVRTVPTRKGAGGKGRHRRHRAWMHQKGLGPRGQDGARPPGEGSSTGASPESPPGAEAVPEAAVLEVSEPPAEAVGEASGSCPLRPGELRGGGGGGQGAEGPPGTPRRTGKGNRRKKRAAGRGALSRGGDSAPLSPGDKEDASHQEALGNLPSPRHTGPEGPLSDTPTPPLETVQEGKGDNIPEEALAVSVSDHPDVAWDLMASGFLILTAWPFCVFRRGGPEWASSADHYPTVPS

SEQ ID NO: 73540 - protein, 620 aa, Homo sapiens
  Payload ID: 14552
  Gene Symbol: ARHGEF40
  Gene Name: Rho guanine nucleotide exchange factor (GEF) 40
  ENSP ID: ENSP00000452283
MEPEPVEDCVQSTLAALYPPFEATAPTLLGQVFQVVERTYREDALRYTLDFLVPAKHLLAKVQQEACAQYSGFLFFHEGWPLCLHEQVVVQLAALPWQLLRPGDFYLQVVPSAAQAPRLALKCLAPGGGRVQEVPVPNEACAYLFTPEWLQGINKDRPTGRLSTCLLSAPSGIQRLPWAELICPRFVHKEGLMVGHQPSTLPPELPSGPPGLPSPPLPEEALGTRSPGDGHNAPVEGPEGEYVELLEVTLPVRGSPTDAEGSPGLSRVRTVPTRKGAGGKGRHRRHRAWMHQKGLGPRGQDGARPPGEGSSTGASPESPPGAEAVPEAAVLEVSEPPAEAVGEASGSCPLRPGELRGGGGGGQGAEGPPGTPRRTGKGNRRKKRAAGRGALSRGGDSAPLSPGDKEDASHQEALGNLPSPSEHKLPECHLVKEEYEGSGKPESEPKELKTAGEKEPQLSEACGPTEEGAGERELEGPGLLCMAGHTGPEGPLSDTPTPPLETVQEGKGDNIPEEALAVSVSDHPDVAWDLMASGFLILTGGVDQSGRALLTITPPCPPEEPPPSRDTLNTTLHYLHSLLRPDLQTLGLSVLLDLRQAPPLPPALIPALSQLQFRVILFCP

SEQ ID NO: 73541 - protein, 1597 aa, Homo sapiens
  Payload ID: 14553
  Gene Symbol: ARHGEF5
  Gene Name: Rho guanine nucleotide exchange factor (GEF) 5
  Uniprot ID: Q12774
  ENSP ID: ENSP00000056217
MEAEEAQRGASPPISAIEEFSIIPEAPMRSSQVSALGLEAQEDEDPSYKWREEHRLSATQQSELRDVCDYAIETMPSFPKEGSADVEPNQESLVAEACDTPEHWEAVPQSLAGRQARTLAPPELWACPIQSEHLDMAPFSSDLGSEEEEVEFWPGLTSLTLGSGQAEEEEETSSDNSGQTRYYSPCEEHPAETNQNEGSESGTIRQGEELPPEELQESQGLLHPQEVQVLEEQGQQEAGFRGEGTLREDVCADGLLGEEQMIEQVNDEKGEQKQKQEQVQDVMLGRQGERMGLTGEPEGLNDGEWEQEDMERKAQGQGGPEQGEERKRELQVPEENRADSQDEKSQTFLGKSEEVTGKQEDHGIKEKGVPVSGQEAKEPESWDGGRLGAVGRARSREEENEHHGPSMPALIAPEDSPHCDLFPGASYLMTQIPGTQTESRAEELSPAALSPSLEPIRCSHQPISLLGSFLTEESPDKEIDQNSQQEESRLRKGTVSSQGTEVVFASASVTPPRTPDSAPPSPAEAYPITPASVSARPPVAFPRRETSCAARAPETASAPLSMDDPSPCGTSEMCPAALYGFPSTGTSPPRPPANSTGTVQHLRSDSFPGSHRTEQTPDLVGMLLSYSHSELPQRPPKPAIYSSVTPRRDRRSGRDYSTVSASPTALSTLKQDSQESISNLERPSSPPSIQPWVSPHNPAFATESPAYGSSPSFVSMEDVRIHEPLPPPPPQRRDTHPSVVETDGHARVVVPTLKQHSHPPPLALGSGLHAPHKGPLPQASDPAVARQHRPLPSTPDSSHHAQATPRWRYNKPLPPTPDLPQPHLPPISAPGSSRIYRPLPPLPIIDPPTEPPPLPPKSRGRSRSTRGGHMNSGGHAKTRPACQDWTVPLPASAGRTSWPPATARSTESFTSTSRSKSEVSPGMAFSNMTNFLCPSSPTTPWTPELQGPTSKDEAGVSEHPEAPAREPLRRTTPQQGASGPGRSPVGQARQPEKPSHLHLEKASSWPHRRDSGRPPGDSSGQAVAPSEGANKHKGWSRQGLRRPSILPEGSSDSRGPAVEKHPGPSDTVVFREKKPKEVMGGFSRRCSKLINSSQLLYQEYSDVVLNKEIQSQQRLESLSETPGPSSPRQPRKALVSSESYLQRLSMASSGSLWQEIPVVRNSTVLLSMTHEDQKLQEVKFELIVSEASYLRSLNIAVDHFQLSTSLRATLSNQEHQWLFSRLQDVRDVSATFLSDLEENFENNIFSFQVCDVVLNHAPDFRRVYLPYVTNQTYQERTFQSLMNSNSNFREVLEKLESDPVCQRLSLKSFLILPFQRITRLKLLLQNILKRTQPGSSEEAEATKAHHALEQLIRDCNNNVQSMRRTEELIYLSQKIEFECKIFPLISQSRWLVKSGELTALEFSASPGLRRKLNTRPVHLHLFNDCLLLSRPREGSRFLVFDHAPFSSIRGEKCEMKLHGPHKNLFRLFLRQNTQGAQAEFLFRTETQSEKLRWISALAMPREELDLLECYNSPQVQCLRAYKPRENDELALEKADVVMVTQQSSDGWLEGVRLSDGERGWFPVQQVEFISNPEVRAQNLKEAHRVKTAKLQLVEQQA

SEQ ID NO: 73542 - protein, 181 aa, Homo sapiens
  Payload ID: 14553
  Gene Symbol: ARHGEF5
  Gene Name: Rho guanine nucleotide exchange factor (GEF) 5
  ENSP ID: ENSP00000417979
MEAEEAQRGASPPISAIEEFSIIPEAPMRSSQVSALGLEAQEDEDPSYKWREEHRLSATQQNSRGPAVEKHPGPSDTVVFREKKPKEVMGGFSRRCSKLINSSQLLYQEYSDVVLNKEIQSQQRLESLSETPGPSSPRQPRKALVSSESYLQRLSMASSGSLWQEIPVVRNSTVLLSMTHE

SEQ ID NO: 73543 - protein, 519 aa, Homo sapiens
  Payload ID: 14553
  Gene Symbol: ARHGEF5
  Gene Name: Rho guanine nucleotide exchange factor (GEF) 5
  Uniprot ID: Q12774
  ENSP ID: ENSP00000418227
MGGFSRRCSKLINSSQLLYQEYSDVVLNKEIQSQQRLESLSETPGPSSPRQPRKALVSSESYLQRLSMASSGSLWQEIPVVRNSTVLLSMTHEDQKLQEVKFELIVSEASYLRSLNIAVDHFQLSTSLRATLSNQEHQWLFSRLQDVRDVSATFLSDLEENFENNIFSFQVCDVVLNHAPDFRRVYLPYVTNQTYQERTFQSLMNSNSNFREVLEKLESDPVCQRLSLKSFLILPFQRITRLKLLLQNILKRTQPGSSEEAEATKAHHALEQLIRDCNNNVQSMRRTEELIYLSQKIEFECKIFPLISQSRWLVKSGELTALEFSASPGLRRKLNTRPVHLHLFNDCLLLSRPREGSRFLVFDHAPFSSIRGEKCEMKLHGPHKNLFRLFLRQNTQGAQAEFLFRTETQSEKLRWISALAMPREELDLLECYNSPQVQCLRAYKPRENDELALEKADVVMVTQQSSDGWLEGVRLSDGERGWFPVQQVEFISNPEVRAQNLKEAHRVKTAKLQLVEQQA

SEQ ID NO: 73544 - protein, 797 aa, Homo sapiens
  Payload ID: 14553
  Gene Symbol: ARHGEF5
  Gene Name: Rho guanine nucleotide exchange factor (GEF) 5
  ENSP ID: ENSP00000418745
  MOD_RES (1)..(1): Any amino acid
XVVVPTLKQHSHPPPLALGSGLHAPHKGPLPQASDPAVARQHRPLPSTPDSSHHAQATPRWRYNKPLPPTPDLPQPHLPPISAPGSSRIYRPLPPLPIIDPPTEPPPLPPKSRGRSRSTRGGHMNSGGHAKTRPACQDWTVPLPASAGRTSWPPATARSTESFTSTSRSKSEVSPGMAFSNMTNFLCPSSPTTPWTPELQGPTSKDEAGVSEHPEAPAREPLRRTTPQQGASGPGRSPVGQARQPEKPSHLHLEKASSWPHRRDSGRPPGDSSGQAVAPSEGANKHKGWSRQGLRRPSILPEGSSDSRGPAVEKHPGPSDTVVFREKKPKEVMGGFSRRCSKLINSSQLLYQEYSDVVLNKEIQSQQRLESLSETPGPSSPRQPRKALVSSESYLQRLSMASSGSLWQEIPVVRNSTVLLSMTHEDQKLQEVKFELIVSEASYLRSLNIAVDHFQLSTSLRATLSNQEHQWLFSRLQDVRDVSATFLSDLEENFENNIFSFQVCDVVLNHAPDFRRVYLPYVTNQTYQERTFQSLMNSNSNFREVLEKLESDPVCQRLSLKSFLILPFQRITRLKLLLQNILKRTQPGSSEEAEATKAHHALEQLIRDCNNNVQSMRRTEELIYLSQKIEFECKIFPLISQSRWLVKSGELTALEFSASPGLRRKLNTRPVHLHLFNDCLLLSRPRESEKLRWISALAMPREELDLLECYNSPQVQCLRAYKPRENDELALEKADVVMVTQQSSDGWLEGVRLSDGERGWFPVQQVEFISNPEVRAQNLKEAHRVKTAKLQLVEQQA

SEQ ID NO: 73545 - protein, 705 aa, Homo sapiens
  Payload ID: 14554
  Gene Symbol: ARHGEF7
  Gene Name: Rho guanine nucleotide exchange factor (GEF) 7
  ENSP ID: ENSP00000218789
MTDNSNNQLVVRAKFNFQQTNEDELSFSKGDVIHVTRVEEGGWWEGTLNGRTGWFPSNYVREVKASEKPVSPKSGTLKSPPKGFDTTAINKSYYNVVLQNILETENEYSKELQTVLSTYLRPLQTSEKLSSANISYLMGNLEEICSFQQMLVQSLEECTKLPEAQQRVGGCFLNLMPQMKTLYLTYCANHPSAVNVLTEHSEELGEFMETKGASSPGILVLTTGLSKPFMRLDKYPTLLKELERHMEDYHTDRQDIQKSMAAFKNLSAQCQEVRKRKELELQILTEAIRNWEGDDIKTLGNVTYMSQVLIQCAGSEEKNERYLLLFPNVLLMLSASPRMSGFIYQGKLPTTGMTITKLEDSENHRNAFEISGSMIERILVSCNNQQDLQEWVEHLQKQTKVTSVGNPTIKPHSVPSHTLPSHPVTPSSKHADSKPAPLTPAYHTLPHPSHHGTPHTTINWGPLEPPKTPKPWSLSCLRPAPPLRPSAALCYKEDLSKSPKTMKKLLPKRKPERKPSDEEFASRKSTAALEEDAQILKVIEAYCTSAKTRQTLNSTWQGTDLMHNHVLADDDQPSLDSLGRRSSLSRLEPSDLSEDSDYDSIWTAHSYRMGSTSRSRKESAPQVLLPEEEKIIVEETKSNGQTVIEEKSLVDTVYALKDEVQELRQDNKKMKKSLEEEQRARKDLEKLVRKVLKNMNDPAWDETNL

SEQ ID NO: 73546 - protein, 782 aa, Homo sapiens
  Payload ID: 14554
  Gene Symbol: ARHGEF7
  Gene Name: Rho guanine nucleotide exchange factor (GEF) 7
  Uniprot ID: Q14155
  ENSP ID: ENSP00000325994
MNSAEQTVTWLITLGVLESPKKTISDPEGFLQASLKDGVVLCRLLERLLPGTIEKVYPEPRSESECLSNIREFLRGCGASLRLETFDANDLYQGQNFNKVLSSLVTLNKVTADIGLGSDSVCARPSSHRIKSFDSLGSQSLHTRTSKLFQGQYRSLDMTDNSNNQLVVRAKFNFQQTNEDELSFSKGDVIHVTRVEEGGWWEGTLNGRTGWFPSNYVREVKASEKPVSPKSGTLKSPPKGFDTTAINKSYYNVVLQNILETENEYSKELQTVLSTYLRPLQTSEKLSSANISYLMGNLEEICSFQQMLVQSLEECTKLPEAQQRVGGCFLNLMPQMKTLYLTYCANHPSAVNVLTEHSEELGEFMETKGASSPGILVLTTGLSKPFMRLDKYPTLLKELERHMEDYHTDRQDIQKSMAAFKNLSAQCQEVRKRKELELQILTEAIRNWEGDDIKTLGNVTYMSQVLIQCAGSEEKNERYLLLFPNVLLMLSASPRMSGFIYQGKLPTTGMTITKLEDSENHRNAFEISGSMIERILVSCNNQQDLQEWVEHLQKQTKVTSVGNPTIKPHSVPSHTLPSHPVTPSSKHADSKPAPLTPAYHTLPHPSHHGTPHTTINWGPLEPPKTPKPWSLSCLRPAPPLRPSAALCYKEDLSKSPKTMKKLLPKRKPERKPSDEEFASRKSTAALEEDAQILKVIEAYCTSAKTRQTLNSTWQGTDLMHNHVLADDDQPSLDSLGRRSSLSRLEPSDLSEDSDYDSIWTAHSYRMGSTSRKSCCSYISHQN

SEQ ID NO: 73547 - protein, 625 aa, Homo sapiens
  Payload ID: 14554
  Gene Symbol: ARHGEF7
  Gene Name: Rho guanine nucleotide exchange factor (GEF) 7
  Uniprot ID: Q14155
  ENSP ID: ENSP00000364875
MTDNSNNQLVVRAKFNFQQTNEDELSFSKGDVIHVTRVEEGGWWEGTLNGRTGWFPSNYVREVKASEKPVSPKSGTLKSPPKGFDTTAINKSYYNVVLQNILETENEYSKELQTVLSTYLRPLQTSEKLSSANISYLMGNLEEICSFQQMLVQSLEECTKLPEAQQRVGGCFLNLMPQMKTLYLTYCANHPSAVNVLTEHSEELGEFMETKGASSPGILVLTTGLSKPFMRLDKYPTLLKELERHMEDYHTDRQDIQKSMAAFKNLSAQCQEVRKRKELELQILTEAIRNWEGDDIKTLGNVTYMSQVLIQCAGSEEKNERYLLLFPNVLLMLSASPRMSGFIYQGKLPTTGMTITKLEDSENHRNAFEISGSMIERILVSCNNQQDLQEWVEHLQKQTKVTSVGNPTIKPHSVPSHTLPSHPVTPSSKHADSKPAPLTPAYHTLPHPSHHGTPHTTINWGPLEPPKTPKPWSLSCLRPAPPLRPSAALCYKEDLSKSPKTMKKLLPKRKPERKPSDEEFASRKSTAALEEDAQILKVIEAYCTSAKTRQTLNSTWQGTDLMHNHVLADDDQPSLDSLGRRSSLSRLEPSDLSEDSDYDSIWTAHSYRMGSTSRKSCCSYISHQN

SEQ ID NO: 73548 - protein, 646 aa, Homo sapiens
  Payload ID: 14554
  Gene Symbol: ARHGEF7
  Gene Name: Rho guanine nucleotide exchange factor (GEF) 7
  Uniprot ID: Q14155
  ENSP ID: ENSP00000364888
MTDNSNNQLVVRAKFNFQQTNEDELSFSKGDVIHVTRVEEGGWWEGTLNGRTGWFPSNYVREVKASEKPVSPKSGTLKSPPKGFDTTAINKSYYNVVLQNILETENEYSKELQTVLSTYLRPLQTSEKLSSANISYLMGNLEEICSFQQMLVQSLEECTKLPEAQQRVGGCFLNLMPQMKTLYLTYCANHPSAVNVLTEHSEELGEFMETKGASSPGILVLTTGLSKPFMRLDKYPTLLKELERHMEDYHTDRQDIQKSMAAFKNLSAQCQEVRKRKELELQILTEAIRNWEGDDIKTLGNVTYMSQVLIQCAGSEEKNERYLLLFPNVLLMLSASPRMSGFIYQGKLPTTGMTITKLEDSENHRNAFEISGSMIERILVSCNNQQDLQEWVEHLQKQTKVTSVGNPTIKPHSVPSHTLPSHPVTPSSKHADSKPAPLTPAYHTLPHPSHHGTPHTTINWGPLEPPKTPKPWSLSCLRPAPPLRPSAALCYKEDLSKSPKTMKKLLPKRKPERKPSDEEFASRKSTAALEEDAQILKVIEAYCTSAKTRQTLNSSSRKESAPQVLLPEEEKIIVEETKSNGQTVIEEKSLVDTVYALKDEVQELRQDNKKMKKSLEEEQRARKDLEKLVRKVLKNMNDPAWDETNL

SEQ ID NO: 73549 - protein, 753 aa, Homo sapiens
  Payload ID: 14554
  Gene Symbol: ARHGEF7
  Gene Name: Rho guanine nucleotide exchange factor (GEF) 7
  Uniprot ID: Q14155
  ENSP ID: ENSP00000364891
MNSAEQTVTWLITLGVLESPKKTISDPEGFLQASLKDGVVLCRLLERLLPGTIEKTFDANDLYQGQNFNKVLSSLVTLNKVTADIGLGSDSVCARPSSHRIKSFDSLGSQSLHTRTSKLFQGQYRSLDMTDNSNNQLVVRAKFNFQQTNEDELSFSKGDVIHVTRVEEGGWWEGTLNGRTGWFPSNYVREVKASEKPVSPKSGTLKSPPKGFDTTAINKSYYNVVLQNILETENEYSKELQTVLSTYLRPLQTSEKLSSANISYLMGNLEEICSFQQMLVQSLEECTKLPEAQQRVGGCFLNLMPQMKTLYLTYCANHPSAVNVLTEHSEELGEFMETKGASSPGILVLTTGLSKPFMRLDKYPTLLKELERHMEDYHTDRQDIQKSMAAFKNLSAQCQEVRKRKELELQILTEAIRNWEGDDIKTLGNVTYMSQVLIQCAGSEEKNERYLLLFPNVLLMLSASPRMSGFIYQGKLPTTGMTITKLEDSENHRNAFEISGSMIERILVSCNNQQDLQEWVEHLQKQTKVTSVGNPTIKPHSVPSHTLPSHPVTPSSKHADSKPAPLTPAYHTLPHPSHHGTPHTTINWGPLEPPKTPKPWSLSCLRPAPPLRPSAALCYKEDLSKSPKTMKKLLPKRKPERKPSDEEFASRKSTAALEEDAQILKVIEAYCTSAKTRQTLNSTWQGTDLMHNHVLADDDQPSLDSLGRRSSLSRLEPSDLSEDSDYDSIWTAHSYRMGSTSRKSCCSYISHQN

SEQ ID NO: 73550 - protein, 803 aa, Homo sapiens
  Payload ID: 14554
  Gene Symbol: ARHGEF7
  Gene Name: Rho guanine nucleotide exchange factor (GEF) 7
  Uniprot ID: Q14155
  ENSP ID: ENSP00000364893
MNSAEQTVTWLITLGVLESPKKTISDPEGFLQASLKDGVVLCRLLERLLPGTIEKVYPEPRSESECLSNIREFLRGCGASLRLELLFPPSQPPQHLVTTILLSASTFDANDLYQGQNFNKVLSSLVTLNKVTADIGLGSDSVCARPSSHRIKSFDSLGSQSLHTRTSKLFQGQYRSLDMTDNSNNQLVVRAKFNFQQTNEDELSFSKGDVIHVTRVEEGGWWEGTLNGRTGWFPSNYVREVKASEKPVSPKSGTLKSPPKGFDTTAINKSYYNVVLQNILETENEYSKELQTVLSTYLRPLQTSEKLSSANISYLMGNLEEICSFQQMLVQSLEECTKLPEAQQRVGGCFLNLMPQMKTLYLTYCANHPSAVNVLTEHSEELGEFMETKGASSPGILVLTTGLSKPFMRLDKYPTLLKELERHMEDYHTDRQDIQKSMAAFKNLSAQCQEVRKRKELELQILTEAIRNWEGDDIKTLGNVTYMSQVLIQCAGSEEKNERYLLLFPNVLLMLSASPRMSGFIYQGKLPTTGMTITKLEDSENHRNAFEISGSMIERILVSCNNQQDLQEWVEHLQKQTKVTSVGNPTIKPHSVPSHTLPSHPVTPSSKHADSKPAPLTPAYHTLPHPSHHGTPHTTINWGPLEPPKTPKPWSLSCLRPAPPLRPSAALCYKEDLSKSPKTMKKLLPKRKPERKPSDEEFASRKSTAALEEDAQILKVIEAYCTSAKTRQTLNSTWQGTDLMHNHVLADDDQPSLDSLGRRSSLSRLEPSDLSEDSDYDSIWTAHSYRMGSTSRKSCCSYISHQN

SEQ ID NO: 73551 - protein, 143 aa, Homo sapiens
  Payload ID: 14554
  Gene Symbol: ARHGEF7
  Gene Name: Rho guanine nucleotide exchange factor (GEF) 7
  ENSP ID: ENSP00000389890
MKTFDANDLYQGQNFNKVLSSLVTLNKVTADIGLGSDSVCARPSSHRIKSFDSLGSQSLHTRTSKLFQGQYRSLDMTDNSNNQLVVRAKFNFQQTNEDELSFSKGDVIHVTRVEEGGWWEGTLNGRTGWFPSNYVREVKASGK

SEQ ID NO: 73552 - protein, 646 aa, Homo sapiens; identical to SEQ ID NO: 73548
  Payload ID: 14554
  Gene Symbol: ARHGEF7
  Gene Name: Rho guanine nucleotide exchange factor (GEF) 7
  Uniprot ID: Q14155
  ENSP ID: ENSP00000397068

SEQ ID NO: 73553 - protein, 66 aa, Homo sapiens
  Payload ID: 14554
  Gene Symbol: ARHGEF7
  Gene Name: Rho guanine nucleotide exchange factor (GEF) 7
  ENSP ID: ENSP00000406732
MTDNSNNQLVVRAKFNFQQTNEDELSFSKGDVIHVTRVEEGGWWEGTLNGRTGWFPSNYVREVKAS

SEQ ID NO: 73554 - protein, 547 aa, Homo sapiens
  Payload ID: 14554
  Gene Symbol: ARHGEF7
  Gene Name: Rho guanine nucleotide exchange factor (GEF) 7
  ENSP ID: ENSP00000417596
MGSCSSQSVQKTRRGRKVVLQNILETENEYSKELQTVLSTYLRPLQTSEKLSSANISYLMGNLEEICSFQQMLVQSLEECTKLPEAQQRVGGCFLNLMPQMKTLYLTYCANHPSAVNVLTEHSEELGEFMETKGASSPGILVLTTGLSKPFMRLDKYPTLLKELERHMEDYHTDRQDIQKSMAAFKNLSAQCQEVRKRKELELQILTEAIRNWEGDDIKTLGNVTYMSQVLIQCAGSEEKNERYLLLFPNVLLMLSASPRMSGFIYQGKLPTTGMTITKLEDSENHRNAFEISGSMIERILVSCNNQQDLQEWVEHLQKQTKVTSVGNPTIKPHSVPSHTLPSHPVTPSSKHADSKPAPLTPAYHTLPHPSHHGTPHTTINWGPLEPPKTPKPWSLSCLRPAPPLRPSAALCYKEDLSKSPKTMKKLLPKRKPERKPSDEEFASRKSTAALEEDAQILKVIEAYCTSAKTRQTLNSTWQGTDLMHNHVLADDDQPSLDSLGRRSSLSRLEPSDLSEDSDYDSIWTAHSYRMGSTSRKSCCSYISHQN

SEQ ID NO: 73555 - protein, 39 aa, Homo sapiens
  Payload ID: 14554
  Gene Symbol: ARHGEF7
  Gene Name: Rho guanine nucleotide exchange factor (GEF) 7
  ENSP ID: ENSP00000418043
MTDNSNNQLVVRAKFNFQQTNEDELSFSKGDVIHVTRVE

SEQ ID NO: 73556 - protein, 447 aa, Homo sapiens
  Payload ID: 14554
  Gene Symbol: ARHGEF7
  Gene Name: Rho guanine nucleotide exchange factor (GEF) 7
  ENSP ID: ENSP00000418067
MTDNSNNQLVVRAKFNFQQTNEDELSFSKGDVIHVTRVEEGGWWEGTLNGRTGWFPSNYVREVKASEKPVSPKSGTLKSPPKGFDTTAINKSYYNVVLQNILETENEYSKELQTVLSTYLRPLQTSEKLSSANISYLMGNLEEICSFQQMLVQSLEECTKLPEAQQRVGGCFLNLMPQMKTLYLTYCANHPSAVNVLTEHSEELGEFMETKGASSPGILVLTTGLSKPFMRLDKYPTLLKELERHMEDYHTDRQDIQKSMAAFKNLSAQCQEVRKRKELELQILTEAIRNWEGDDIKTLGNVTYMSQVLIQCAGSEEKNERYLLLFPNVLLMLSASPRMSGFIYQGKLPTTGMTITKLEDSENHRNAFEISGSMIERILVSCNNQQDLQEWVEHLQKQTKVTSVGNPTIKPHSVPSHTLPSHPVTPSSKHADSKPAPLTPAYHTLPH

SEQ ID NO: 73557 - protein, 151 aa, Homo sapiens
  Payload ID: 14554
  Gene Symbol: ARHGEF7
  Gene Name: Rho guanine nucleotide exchange factor (GEF) 7
  ENSP ID: ENSP00000418235
MTDNSNNQLVVRAKFNFQQTNEDELSFSKGDVIHVTRVEEGGWWEGTLNGRTGWFPSNYVREVKASEKPVSPKSGTLKSPPKGFDTTAINKSYYNVPVLSRGAESSAHEGGGTPRDCMEVEPGSPGSEVLPAGLKGMPASRHIWEPECAVV

SEQ ID NO: 73558 - protein, 61 aa, Homo sapiens
  Payload ID: 14554
  Gene Symbol: ARHGEF7
  Gene Name: Rho guanine nucleotide exchange factor (GEF) 7
  ENSP ID: ENSP00000420592
MTDNSNNQLVVRAKFNFQQTNEDELSFSKGDVIHVTRVEEGGWWEGTLNGRTGWFPSNYVR

SEQ ID NO: 73559 - protein, 130 aa, Homo sapiens
  Payload ID: 14554
  Gene Symbol: ARHGEF7
  Gene Name: Rho guanine nucleotide exchange factor (GEF) 7
  ENSP ID: ENSP00000445384
  MOD_RES (1)..(1): Any amino acid
XVLIQCAGSEEKNERYLLLFPNVLLMLSASPRMSGFIYQGKLPTTGMTITKLEDSENHRNAFEISGSMIERILVSCNNQQDLQEWVEHLQKQTKVTSVGNPTIKPHSVPSHTVRTWCFSSFQTPGVASRG

SEQ ID NO: 73560 - protein, 1015 aa, Homo sapiens
  Payload ID: 14555
  Gene Symbol: ARHGEF18
  Gene Name: Rho/Rac guanine nucleotide exchange factor (GEF) 18
  Uniprot ID: Q6ZSZ5
  ENSP ID: ENSP00000319200
MTVSQKGGPQPTPSPAGPGTQLGPITGEMDEADSAFLKFKQTADDSLSLTSPNTESIFVEDPYTASLRSEIESDGHEFEAESWSLAVDAAYAKKQKREVVKRQDVLYELMQTEVHHVRTLKIMLKVYSRALQEELQFSSKAIGRLFPCADDLLETHSHFLARLKERRQESLEEGSDRNYVIQKIGDLLVQQFSGENGERMKEKYGVFCSGHNEAVSHYKLLLQQNKKFQNLIKKIGNFSIVRRLGVQECILLVTQRITKYPVLVERIIQNTEAGTEDYEDLTQALNLIKDIISQVDAKVSECEKGQRLREIAGKMDLKSSSKLKNGLTFRKEDMLQRQLHLEGMLCWKTTSGRLKDILAILLTDVLLLLQEKDQKYVFASVDSKPPVISLQKLIVREVANEEKAMFLISASLQGPEMYEIYTSSKEDRNAWMAHIQRAVESCPDEEEGPFSLPEEERKVVEARATRLRDFQERLSMKDQLIAQSLLEKQQIYLEMAEMGGLEDLPQPRGLFRGGDPSETLQGELILKSAMSEIEGIQSLICRQLGSANGQAEDGGSSTGPPRRAETFAGYDCTNSPTKNGSFKKKVSSTDPRPRDWRGPPNSPDLKLSDSDIPGSSEESPQVVEAPGTESDPRLPTVLESELVQRIQTLSQLLLNLQAVIAHQDSYVETQRAAIQEREKQFRLQSTRGNLLLEQERQRNFEKQREERAALEKLQSQLRHEQQRWERERQWQHQELERAGARLQEREGEARQLRERLEQERAELERQRQAYQHDLERLREAQRAVERERERLELLRRLKKQNTAPGALPPDTLAEAQPPSHPPSFNGEGLEGPRVSMLPSGVGPEYAERPEVARRDSAPTENRLAKSDVPIQLLSATNQFQRQAAVQQQIPTKLAASTKGGKDKGGKSRGSQRWESSASFDLKQQLLLNKLMGKDESTSRNRRSLSPILPGRHSPAPPPDPGFPAPSPPPADSPSEGFSLKAGGTALLPGPPAPSPLPATPLSAKEDASKEDVIFF

SEQ ID NO: 73561 - protein, 1173 aa, Homo sapiens
  Payload ID: 14555
  Gene Symbol: ARHGEF18
  Gene Name: Rho/Rac guanine nucleotide exchange factor (GEF) 18
  Uniprot ID: Q6ZSZ5
  ENSP ID: ENSP00000352995
MVTVGTNILPSRPAASANTAREDAALFSRRIPPRHKNGAAQPGAAPGPGAPGANMGNAHSKSGDRHSALPGRPELSFYGSFPRKWSENVFLDNELLTSKILSVLRPQSERGFRAGDLRYPTHFLSTNSVLASVTASLKEHPRGTLLSDGSPALSRNVGMTVSQKGGPQPTPSPAGPGTQLGPITGEMDEADSAFLKFKQTADDSLSLTSPNTESIFVEDPYTASLRSEIESDGHEFEAESWSLAVDAAYAKKQKREVVKRQDVLYELMQTEVHHVRTLKIMLKVYSRALQEELQFSSKAIGRLFPCADDLLETHSHFLARLKERRQESLEEGSDRNYVIQKIGDLLVQQFSGENGERMKEKYGVFCSGHNEAVSHYKLLLQQNKKFQNLIKKIGNFSIVRRLGVQECILLVTQRITKYPVLVERIIQNTEAGTEDYEDLTQALNLIKDIISQVDAKVSECEKGQRLREIAGKMDLKSSSKLKNGLTFRKEDMLQRQLHLEGMLCWKTTSGRLKDILAILLTDVLLLLQEKDQKYVFASVDSKPPVISLQKLIVREVANEEKAMFLISASLQGPEMYEIYTSSKEDRNAWMAHIQRAVESCPDEEEGPFSLPEEERKVVEARATRLRDFQERLSMKDQLIAQSLLEKQQIYLEMAEMGGLEDLPQPRGLFRGGDPSETLQGELILKSAMSEIEGIQSLICRQLGSANGQAEDGGSSTGPPRRAETFAGYDCTNSPTKNGSFKKKVSSTDPRPRDWRGPPNSPDLKLSDSDIPGSSEESPQVVEAPGTESDPRLPTVLESELVQRIQTLSQLLLNLQAVIAHQDSYVETQRAAIQEREKQFRLQSTRGNLLLEQERQRNFEKQREERAALEKLQSQLRHEQQRWERERQWQHQELERAGARLQEREGEARQLRERLEQERAELERQRQAYQHDLERLREAQRAVERERERLELLRRLKKQNTAPGALPPDTLAEAQPPSHPPSFNGEGLEGPRVSMLPSGVGPEYAERPEVARRDSAPTENRLAKSDVPIQLLSATNQFQRQAAVQQQIPTKLAASTKGGKDKGGKSRGSQRWESSASFDLKQQLLLNKLMGKDESTSRNRRSLSPILPGRHSPAPPPDPGFPAPSPPPADSPSEGFSLKAGGTALLPGPPAPSPLPATPLSAKEDASKEDVIFF

SEQ ID NO: 73562 - protein, 812 aa, Homo sapiens
  Payload ID: 14555
  Gene Symbol: ARHGEF18
  Gene Name: Rho/Rac guanine nucleotide exchange factor (GEF) 18
  ENSP ID: ENSP00000470729
  MOD_RES (1)..(1): Any amino acid
XRMKEKYGVFCSGHNEAVSHYKLLLQQNKKFQNLIKKIGNFSIVRRLGVQECILLVTQRITKYPVLVERIIQNTEAGTEDYEDLTQALNLIKDIISQVDAKVSECEKGQRLREIAGKMDLKSSSKLKNGLTFRKEDMLQRQLHLEGMLCWKTTSGRLKDILAILLTDVLLLLQEKDQKYVFASVDSKPPVISLQKLIVREVANEEKAMFLISASLQGPEMYEIYTSSKEDRNAWMAHIQRAVESCPDEEEGPFSLPEEERKVVEARATRLRDFQERLSMKDQLIAQSLLEKQQIYLEMAEMGGLEDLPQPRGLFRGGDPSETLQGELILKSAMSEIEGIQSLICRQLGSANGQAEDGGSSTGPPRRAETFAGYDCTNSPTKNGSFKKKVSSTDPRPRDWRGPPNSPDLKLSDSDIPGSSEESPQVVEAPGTESDPRLPTVLESELVQRIQTLSQLLLNLQDSYVETQRAAIQEREKQFRLQSTRGNLLLEQERQRNFEKQREERAALEKLQSQLRHEQQRWERERQWQHQELERAGARLQEREGEARQLRERLEQERAELERQRQAYQHDLERLREAQRAVERERERLELLRRLKKQNTAPGALPPDTLAEAQPPSHPPSFNGEGLEGPRVSMLPSGVGPEYAERPEVARRDSAPTENRLAKSDVPIQLLSATNQFQRQAAVQQQIPTKLAASTKGGKDKGGKSRGSQRWESSASFDLKQQLLLNKLMGKDESTSRNRRSLSPILPGRHSPAPPPDPGFPAPSPPPADSPSEGFSLKAGGTALLPGPPAPSPLPATPLSAKEDASKEDVIFF

SEQ ID NO: 73563 - protein, 86 aa, Homo sapiens
  Payload ID: 14555
  Gene Symbol: ARHGEF18
  Gene Name: Rho/Rac guanine nucleotide exchange factor (GEF) 18
  ENSP ID: ENSP00000471597
MTVSQKGGPQPTPSPAGPGTQLGPITGEMDEADSAFLKFKQTADDSLSLTSPNTESIFVEDPYTASLRSEIESDGHEFEAESWSLA

SEQ ID NO: 73564 - protein, 985 aa, Homo sapiens
  Payload ID: 14556
  Gene Symbol: ARHGEF2
  Gene Name: Rho/Rac guanine nucleotide exchange factor (GEF) 2
  Uniprot ID: Q92974
  ENSP ID: ENSP00000314787
MSRIESLTRARIDRSRELASKTREKEKMKEAKDARYTNGHLFTTISVSGMTMCYACNKSITAKEALICPTCNVTIHNRCKDTLANCTKVKQKQQKAALLKNNTALQSVSLRSKTTIRERPSSAIYPSDSFRQSLLGSRRGRSSLSLAKSVSTTNIAGHFNDESPLGLRRILSQSTDSLNMRNRTLSVESLIDEEVIYSELMSDFEMDEKDFAADSWSLAVDSSFLQQHKKEVMKQQDVIYELIQTELHHVRTLKIMTRLFRTGMLEELHLEPGVVQGLFPCVDELSDIHTRFLSQLLERRRQALCPGSTRNFVIHRLGDLLISQFSGPSAEQMCKTYSEFCSRHSKALKLYKELYARDKRFQQFIRKVTRPAVLKRHGVQECILLVTQRITKYPLLISRILQHSHGIEEERQDLTTALGLVKELLSNVDEGIYQLEKGARLQEIYNRMDPRAQTPVPGKGPFGREELLRRKLIHDGCLLWKTATGRFKDVLVLLMTDVLVFLQEKDQKYIFPTLDKPSVVSLQNLIVRDIANQEKGMFLISAAPPEMYEVHTASRDDRSTWIRVIQQSVRTCPSREDFPLIETEDEAYLRRIKMELQQKDRALVELLREKVGLFAEMTHFQAEEDGGSGMALPTLPRGLFRSESLESPRGERLLQDAIREVEGLKDLLVGPGVELLLTPREPALPLEPDSGGNTSPGVTANGEARTFNGSIELCRADSDSSQRDRNGNQLRSPQEEALQRLVNLYGLLHGLQAAVAQQDTLMEARFPEGPERREKLCRANSRDGEAGRAGAAPVAPEKQATELALLQRQHALLQEELRRCRRLGEERATEAGSLEARLRESEQARALLEREAEEARRQLAALGQTEPLPAEAPWARRPVDPRRRSLPAGDALYLSFNPPQPSRGTDRLDLPVTTRSVHRNFEDRERQELGSPEERLQDSSDPDTGSEEEGSSRLSPPHSPRDFTRMQDIPEETESRDGEAVASES

SEQ ID NO: 73565 - protein, 958 aa, Homo sapiens
  Payload ID: 14556
  Gene Symbol: ARHGEF2
  Gene Name: Rho/Rac guanine nucleotide exchange factor (GEF) 2
  Uniprot ID: Q92974
  ENSP ID: ENSP00000315325
MKEAKDARYTNGHLFTTISVSGMTMCYACNKSITAKEALICPTCNVTIHNRCKDTLANCTKVKQKQQKAALLKNNTALQSVSLRSKTTIRERPSSAIYPSDSFRQSLLGSRRGRSSLSLAKSVSTTNIAGHFNDESPLGLRRILSQSTDSLNMRNRTLSVESLIDEEVIYSELMSDFEMDEKDFAADSWSLAVDSSFLQQHKKEVMKQQDVIYELIQTELHHVRTLKIMTRLFRTGMLEELHLEPGVVQGLFPCVDELSDIHTRFLSQLLERRRQALCPGSTRNFVIHRLGDLLISQFSGPSAEQMCKTYSEFCSRHSKALKLYKELYARDKRFQQFIRKVTRPAVLKRHGVQECILLVTQRITKYPLLISRILQHSHGIEEERQDLTTALGLVKELLSNVDEGIYQLEKGARLQEIYNRMDPRAQTPVPGKGPFGREELLRRKLIHDGCLLWKTATGRFKDVLVLLMTDVLVFLQEKDQKYIFPTLDKPSVVSLQNLIVRDIANQEKGMFLISAAPPEMYEVHTASRDDRSTWIRVIQQSVRTCPSREDFPLIETEDEAYLRRIKMELQQKDRALVELLREKVGLFAEMTHFQAEEDGGSGMALPTLPRGLFRSESLESPRGERLLQDAIREVEGLKDLLVGPGVELLLTPREPALPLEPDSGGNTSPGVTANGEARTFNGSIELCRADSDSSQRDRNGNQLRSPQEEALQRLVNLYGLLHGLQAAVAQQDTLMEARFPEGPERREKLCRANSRDGEAGRAGAAPVAPEKQATELALLQRQHALLQEELRRCRRLGEERATEAGSLEARLRESEQARALLEREAEEARRQLAALGQTEPLPAEAPWARRPVDPRRRSLPAGDALYLSFNPPQPSRGTDRLDLPVTTRSVHRNFEDRERQELGSPEERLQDSSDPDTGSEEEGSSRLSPPHSPRDFTRMQDIPEETESRDGEAVASES

SEQ ID NO: 73566 - protein, 986 aa, Homo sapiens
  Payload ID: 14556
  Gene Symbol: ARHGEF2
  Gene Name: Rho/Rac guanine nucleotide exchange factor (GEF) 2
  Uniprot ID: Q92974
  ENSP ID: ENSP00000354837
MSRIESLTRARIDRSRELASKTREKEKMKEAKDARYTNGHLFTTISVSGMTMCYACNKSITAKEALICPTCNVTIHNRCKDTLANCTKVKQKQQKAALLKNNTALQSVSLRSKTTIRERPSSAIYPSDSFRQSLLGSRRGRSSLSLAKSVSTTNIAGHFNDESPLGLRRILSQSTDSLNMRNRTLSVESLIDEAEVIYSELMSDFEMDEKDFAADSWSLAVDSSFLQQHKKEVMKQQDVIYELIQTELHHVRTLKIMTRLFRTGMLEELHLEPGVVQGLFPCVDELSDIHTRFLSQLLERRRQALCPGSTRNFVIHRLGDLLISQFSGPSAEQMCKTYSEFCSRHSKALKLYKELYARDKRFQQFIRKVTRPAVLKRHGVQECILLVTQRITKYPLLISRILQHSHGIEEERQDLTTALGLVKELLSNVDEGIYQLEKGARLQEIYNRMDPRAQTPVPGKGPFGREELLRRKLIHDGCLLWKTATGRFKDVLVLLMTDVLVFLQEKDQKYIFPTLDKPSVVSLQNLIVRDIANQEKGMFLISAAPPEMYEVHTASRDDRSTWIRVIQQSVRTCPSREDFPLIETEDEAYLRRIKMELQQKDRALVELLREKVGLFAEMTHFQAEEDGGSGMALPTLPRGLFRSESLESPRGERLLQDAIREVEGLKDLLVGPGVELLLTPREPALPLEPDSGGNTSPGVTANGEARTFNGSIELCRADSDSSQRDRNGNQLRSPQEEALQRLVNLYGLLHGLQAAVAQQDTLMEARFPEGPERREKLCRANSRDGEAGRAGAAPVAPEKQATELALLQRQHALLQEELRRCRRLGEERATEAGSLEARLRESEQARALLEREAEEARRQLAALGQTEPLPAEAPWARRPVDPRRRSLPAGDALYLSFNPPQPSRGTDRLDLPVTTRSVHRNFEDRERQELGSPEERLQDSSDPDTGSEEEGSSRLSPPHSPRDFTRMQDIPEETESRDGEAVASES

SEQ ID NO: 73567 - protein, 264 aa, Homo sapiens [sequence omitted]

SEQ ID NO: 73568 - protein, 7 aa, Homo sapiens
  Payload ID: 14556
  Gene Symbol: ARHGEF2
  Gene Name: Rho/Rac guanine nucleotide exchange factor (GEF) 2
  ENSP ID: ENSP00000476518
MLSKSVP

SEQ ID NO: 73569 - protein, 83 aa, Homo sapiens
  Payload ID: 14556
  Gene Symbol: ARHGEF2
  Gene Name: Rho/Rac guanine nucleotide exchange factor (GEF) 2
  ENSP ID: ENSP00000476532
MLSKSVPVSGINCLLDRSDTDGNVSQSSAIDLRKRCSQLEGHSGTRVGSSLRQTFSFLSGMTGKAKTREKEKMKEAKDARYTN

SEQ ID NO: 73570 - protein, 263 aa, Homo sapiens
  Payload ID: 14556
  Gene Symbol: ARHGEF2
  Gene Name: Rho/Rac guanine nucleotide exchange factor (GEF) 2
  ENSP ID: ENSP00000476689
  MOD_RES (1)..(1): Any amino acid
XQEEALQRLVNLYGLLHGLQAAVAQQDTLMEARFPEGPERREKLCRANSRDGEAGRAGAAPVAPEKQATELALLQRQHALLQEELRRCRRLGEERATEAGSLEARLRESEQARALLEREAEEARRQLAALGQTEPLPAEAPWARRPVDPRRRSLPAGDALYLSFNPPQPSRGTDRLDLPVTTRSVHRNFEDRERQELGSPEERLQDSSDPDTGSEEEGSSRLSPPHSPRGETLAETWTRDFTRMQDIPEETESRDGEAVASES

SEQ ID NO: 73571 - protein, 178 aa, Homo sapiens
  Payload ID: 14556
  Gene Symbol: ARHGEF2
  Gene Name: Rho/Rac guanine nucleotide exchange factor (GEF) 2
  ENSP ID: ENSP00000476699
MSGNRRQPSRRGQTREKEKMKEAKDARYTNGHLFTTISVSGMTMCYACNKSITAKEALICPTCNVTIHNRCKDTLANCTKVKQKQQKAALLKNNTALQSVSLRSKTTIRERPSSAIYPSDSFRQSLLGSRRGRSSLSLAKSVSTTNIAGHFNDESPLGLRRILSQSTDSLNMRNRTLS

SEQ ID NO: 73572 - protein, 214 aa, Homo sapiens
  Payload ID: 14556
  Gene Symbol: ARHGEF2
  Gene Name: Rho/Rac guanine nucleotide exchange factor (GEF) 2
  ENSP ID: ENSP00000476724
MKEAKDARYTNGHLFTTISVSGMTMCYACNKSITAKEALICPTCNVTIHNRCKDTLANCTKVKQKQQKAALLKNNTALQSVSLRSKTTIRERPSSAIYPSDSFRQSLLGSRRGRSSLSLAKSVSTTNIAGHFNDESPLGLRRILSQSTDSLNMRNRTLSVESLIDEAEVIYSELMSDFEMDEKDFAADSWSLAVDSSFLQQHKKEVMKQQDVIY

SEQ ID NO: 73573 - protein, 1031 aa, Homo sapiens
  Payload ID: 14556
  Gene Symbol: ARHGEF2
  Gene Name: Rho/Rac guanine nucleotide exchange factor (GEF) 2
  ENSP ID: ENSP00000476916
MLSKSVPVSGINCLLDRSDTDGNVSQSSAIDLRKRCSQLEGHSGTRVGSSLRQTFSFLSGMTGKAKTREKEKMKEAKDARYTNGHLFTTISVSGMTMCYACNKSITAKEALICPTCNVTIHNRCKDTLANCTKVKQKQQKAALLKNNTALQSVSLRSKTTIRERPSSAIYPSDSFRQSLLGSRRGRSSLSLAKSVSTTNIAGHFNDESPLGLRRILSQSTDSLNMRNRTLSVESLIDEAEVIYSELMSDFEMDEKDFAADSWSLAVDSSFLQQHKKEVMKQQDVIYELIQTELHHVRTLKIMTRLFRTGMLEELHLEPGVVQGLFPCVDELSDIHTRFLSQLLERRRQALCPGSTRNFVIHRLGDLLISQFSGPSAEQMCKTYSEFCSRHSKALKLYKELYARDKRFQQFIRKVTRPAVLKRHGVQECILLVTQRITKYPLLISRILQHSHGIEEERQDLTTALGLVKELLSNVDEGIYQLEKGARLQEIYNRMDPRAQTPVPGKGPFGREELLRRKLIHDGCLLWKTATGRFKDVLVLLMTDVLVFLQEKDQKYIFPTLDKPSVVSLQNLIVRDIANQEKGMFLISAAPPEMYEVHTASRDDRSTWIRVIQQSVRTCPSREDFPLIETEDEAYLRRIKMELQQKDRALVELLREKVGLFAEMTHFQAEEDGGSGMALPTLPRGLFRSESLESPRGERLLQDAIREVEGLKDLLVGPGVELLLTPREPALPLEPDSGGNTSPGVTANGEARTFNGSIELCRADSDSSQRDRNGNQLRSPQEEALQRLVNLYGLLHGLQAAVAQQDTLMEARFPEGPERREKLCRANSRDGEAGRAGAAPVAPEKQATELALLQRQHALLQEELRRCRRLGEERATEAGSLEARLRESEQARALLEREAEEARRQLAALGQTEPLPAEAPWARRPVDPRRRSLPAGDALYLSFNPPQPSRGTDRLDLPVTTRSVHRNFEDRERQELGSPEERLQDSSDPDTGSEEEGSSRLSPPHSPRDFTRMQDIPEETESRDGEAVASES

SEQ ID NO: 73574 - protein, 229 aa, Homo sapiens
  Payload ID: 14556
  Gene Symbol: ARHGEF2
  Gene Name: Rho/Rac guanine nucleotide exchange factor (GEF) 2
  ENSP ID: ENSP00000477299
MKEAKDARYTNGHLFTTISVSGMTMCYACNKSITAKEALICPTCNVTIHNRCKDTLANCTKVKQKQQKAALLKNNTALQSVSLRSKTTIRERPSSAIYPSDSFRQSLLGSRRGRSSLSLAKSVSTTNIAGHFNDESPLGLRRILSQSTDSLNMRNRTLSVESLIDEAEVIYSELMSDFEMDEKDFAADSWSLAVDSSFLQQHKKEVMKQQDVIYELIQTELHHVRTLKI

SEQ ID NO: 73575 - protein, 59 aa, Homo sapiens
  Payload ID: 14556
  Gene Symbol: ARHGEF2
  Gene Name: Rho/Rac guanine nucleotide exchange factor (GEF) 2
  ENSP ID: ENSP00000477448
QQKAALLKNNTALQSVSLRSKNISMMSLPWGCAGSSHSPQTPSTCGTEPYPWNPSLTKR

SEQ ID NO: 73576 - protein, 1354 aa, Homo sapiens
  Payload ID: 14557
  Gene Symbol: ROCK1
  Gene Name: Rho-associated, coiled-coil containing protein kinase 1
  Uniprot ID: Q13464
  ENSP ID: ENSP00000382697
MSTGDSFETRFEKMDNLLRDPKSEVNSDCLLDGLDALVYDLDFPALRKNKNIDNFLSRYKDTINKIRDLRMKAEDYEVVKVIGRGAFGEVQLVRHKSTRKVYAMKLLSKFEMIKRSDSAFFWEERDIMAFANSPWVVQLFYAFQDDRYLYMVMEYMPGGDLVNLMSNYDVPEKWARFYTAEVVLALDAIHSMGFIHRDVKPDNMLLDKSGHLKLADFGTCMKMNKEGMVRCDTAVGTPDYISPEVLKSQGGDGYYGRECDWWSVGVFLYEMLVGDTPFYADSLVGTYSKIMNHKNSLTFPDDNDISKEAKNLICAFLTDREVRLGRNGVEEIKRHLFFKNDQWAWETLRDTVAPVVPDLSSDIDTSNFDDLEEDKGEEETFPIPKAFVGNQLPFVGFTYYSNRRYLSSANPNDNRTSSNADKSLQESLQKTIYKLEEQLHNEMQLKDEMEQKCRTSNIKLDKIMKELDEEGNQRRNLESTVSQIEKEKMLLQHRINEYQRKAEQENEKRRNVENEVSTLKDQLEDLKKVSQNSQLANEKLSQLQKQLEEANDLLRTESDTAVRLRKSHTEMSKSISQLESLNRELQERNRILENSKSQTDKDYYQLQAILEAERRDRGHDSEMIGDLQARITSLQEEVKHLKHNLEKVEGERKEAQDMLNHSEKEKNNLEIDLNYKLKSLQQRLEQEVNEHKVTKARLTDKHQSIEEAKSVAMCEMEKKLKEEREAREKAENRVVQIEKQCSMLDVDLKQSQQKLEHLTGNKERMEDEVKNLTLQLEQESNKRLLLQNELKTQAFEADNLKGLEKQMKQEINTLLEAKRLLEFELAQLTKQYRGNEGQMRELQDQLEAEQYFSTLYKTQVKELKEEIEEKNRENLKKIQELQNEKETLATQLDLAETKAESEQLARGLLEEQYFELTQESKKAASRNRQEITDKDHTVSRLEEANSMLTKDIEILRRENEELTEKMKKAEEEYKLEKEEEISNLKAAFEKNINTERTLKTQAVNKLAEIMNRKDFKIDRKKANTQDLRKKEKENRKLQLELNQEREKFNQMVVKHQKELNDMQAQLVEECAHRNELQMQLASKESDIEQLRAKLLDLSDSTSVASFPSADETDGNLPESRIEGWLSVPNRGNIKRYGWKKQYVVVSSKKILFYNDEQDKEQSNPSMVLDIDKLFHVRPVTQGDVYRAETEEIPKIFQILYANEGECRKDVEMEPVQQAEKTNFQNHKGHEFIPTLYHFPANCDACAKPLWHVFKPPPALECRRCHVKCHRDHLDKKEDLICPCKVSYDVTSARDMLLLACSQDEQKKWVTHLVKKIPKNPPSGFVRASPRTLSTRSTANQSFRKVVKNTSGKTS

SEQ ID NO: 73577 - protein, 99 aa, Homo sapiens
  Payload ID: 14557
  Gene Symbol: ROCK1
  Gene Name: Rho-associated, coiled-coil containing protein kinase 1
  ENSP ID: ENSP00000462004
PPALECRRCHVKCHRDHLDKKEDLICPCKVSYDVTSARDMLLLACSQDEQKKWVTHLVKKIPKNPPSGFVRASPRTLSTRSTANQSFRKVVKNTSGKTR

SEQ ID NO: 73578 - protein, 1137 aa, Homo sapiens
  Payload ID: 14557
  Gene Symbol: ROCK1
  Gene Name: Rho-associated, coiled-coil containing protein kinase 1
  ENSP ID: ENSP00000489185
MSTGDSFETRFEKMDNLLRDPKSEVNSDCLLDGLDALVYDLDFPALRKNKNIDNFLSRYKDTINKIRDLRMKAEDYEVVKVIGRGAFGEVQLVRHKSTRKVYAMKLLSKFEMIKRSDSAFFWEERDIMAFANSPWVVQLFYAFQDDRYLYMVMEYMPGGDLVNLMSNYDVPEKWARFYTAEVVLALDAIHSMGFIHRDVKPDNMLLDKSGHLKLADFGTCMKMNKEGMVRCDTAVGTPDYISPEVLKSQGGDGYYGRECDWWSVGVFLYEMLVGDTPFYADSLVGTYSKIMNHKNSLTFPDDNDISKEAKNLICAFLTDREVRLGRNGVEEIKRHLFFKNDQWAWETLRDTVAPVVPDLSSDIDTSNFDDLEEDKGEEETFPIPKAFVGNQLPFVGFTYYSNRRYLSSANPNDNRTSSNADKSLQESLQKTIYKLEEQLHNEMQLKDEMEQKCRTSNIKLDKIMKELDEEGNQRRNLESTVSQIEKEKMLLQHRINEYQRKAEQENEKRRNVENEVSTLKDQLEDLKKVSQNSQLANEKLSQLQKQLEEANDLLRTESDTAVRLRKSHTEMSKSISQLESLNRELQERNRILENSKSQTDKDYYQLQAILEAERRDRGHDSEMIGDLQARITSLQEEVKHLKHNLEKVEGERKEAQDMLNHSEKEKNNLEIDLNYKLKSLQQRLEQEVNEHKVTKARLTDKHQSIEEAKSVAMCEMEKKLKEEREAREKAENRVVQIEKQCSMLDVDLKQSQQKLEHLTGNKERMEDEVKNLTLQLEQESNKRLLLQNELKTQAFEADNLKGLEKQMKQEINTLLEAKRLLEFELAQLTKQYRGNEGQMRELQDQLEAEQYFSTLYKTQVKELKEEIEEKNRENLKKIQELQNEKETLATQLDLAETKAESEQLARGLLEEQYFELTQESKKAASRNRQEITDKDHTVSRLEEANSMLTKDIEILRRENEELTEKMKKAEEEYKLEKEEEISNLKAAFEKNINTERTLKTQAVNKLAEIMNRKDFKIDRKKANTQDLRKKEKENRKLQLELNQEREKFNQMVVKHQKELNDMQAQLVEECAHRNELQMQLASKESDIEQLRAKLLDLSDSTSVASFPSADETDGNLPVDSACIPYLFIFYSCLLVKN

SEQ ID NO: 73579 - protein, 446 aa, Homo sapiens
  Payload ID: 14558
  Gene Symbol: ROCK2
  Gene Name: Rho-associated, coiled-coil containing protein kinase 2
  ENSP ID: ENSP00000261535
MSRPPPTGKMPGAPETAPGDGAGASRQRKLEALIRDPRSPINVESLLDGLNSLVLDLDFPALRKNKNIDNFLNRYEKIVKKIRGLQMKAEDYDVVKVIGRGAFGEVQLVRHKASQKVYAMKLLSKFEMIKRSDSAFFWEERDIMAFANSPWVVQLFYAFQDDRYLYMVMEYMPGGDLVNLMSNYDVPEKWAKFYTAEVVLALDAIHSMGLIHRDVKPDNMLLDKHGHLKLADFGTCMKMDETGMVHCDTAVGTPDYISPEVLKSQGGDGFYGRECDWWSVGVFLYEMLVGDTPFYADSLVGTYSKIMDHKNSLCFPEDAEISKHAKNLICAFLTDREVRLGRNGVEEIRQHPFFKNDQWHWDNIRETAAPVVPELSSDIDSSNFDDIEDDKGDVETFPIPKAFVGNQLPFIGFTYYRENLLLSDSPSCRETDSIQSRKNEESQEVC

SEQ ID NO: 73580 - protein, 1388 aa, Homo sapiens
  Payload ID: 14558
  Gene Symbol: ROCK2
  Gene Name: Rho-associated, coiled-coil containing protein kinase 2
  Uniprot ID: O75116
  ENSP ID: ENSP00000317985
MSRPPPTGKMPGAPETAPGDGAGASRQRKLEALIRDPRSPINVESLLDGLNSLVLDLDFPALRKNKNIDNFLNRYEKIVKKIRGLQMKAEDYDVVKVIGRGAFGEVQLVRHKASQKVYAMKLLSKFEMIKRSDSAFFWEERDIMAFANSPWVVQLFYAFQDDRYLYMVMEYMPGGDLVNLMSNYDVPEKWAKFYTAEVVLALDAIHSMGLIHRDVKPDNMLLDKHGHLKLADFGTCMKMDETGMVHCDTAVGTPDYISPEVLKSQGGDGFYGRECDWWSVGVFLYEMLVGDTPFYADSLVGTYSKIMDHKNSLCFPEDAEISKHAKNLICAFLTDREVRLGRNGVEEIRQHPFFKNDQWHWDNIRETAAPVVPELSSDIDSSNFDDIEDDKGDVETFPIPKAFVGNQLPFIGFTYYRENLLLSDSPSCRETDSIQSRKNEESQEIQKKLYTLEEHLSNEMQAKEELEQKCKSVNTRLEKTAKELEEEITLRKSVESALRQLEREKALLQHKNAEYQRKADHEADKKRNLENDVNSLKDQLEDLKKRNQNSQISTEKVNQLQRQLDETNALLRTESDTAARLRKTQAESSKQIQQLESNNRDLQDKNCLLETAKLKLEKEFINLQSALESERRDRTHGSEIINDLQGRICGLEEDLKNGKILLAKVELEKRQLQERFTDLEKEKSNMEIDMTYQLKVIQQSLEQEEAEHKATKARLADKNKIYESIEEAKSEAMKEMEKKLLEERTLKQKVENLLLEAEKRCSLLDCDLKQSQQKINELLKQKDVLNEDVRNLTLKIEQETQKRCLTQNDLKMQTQQVNTLKMSEKQLKQENNHLMEMKMNLEKQNAELRKERQDADGQMKELQDQLEAEQYFSTLYKTQVRELKEECEEKTKLGKELQQKKQELQDERDSLAAQLEITLTKADSEQLARSIAEEQYSDLEKEKIMKELEIKEMMARHKQELTEKDATIASLEETNRTLTSDVANLANEKEELNNKLKDVQEQLSRLKDEEISAAAIKAQFEKQLLTERTLKTQAVNKLAEIMNRKEPVKRGNDTDVRRKEKENRKLHMELKSEREKLTQQMIKYQKELNEMQAQIAEESQIRIELQMTLDSKDSDIEQLRSQLQALHIGLDSSSIGSGPGDAEADDGFPESRLEGWLSLPVRNNTKKFGWVKKYVIVSSKKILFYDSEQDKEQSNPYMVLDIDKLFHVRPVTQTDVYRADAKEIPRIFQILYANEGESKKEQEFPVEPVGEKSNYICHKGHEFIPTLYHFPTNCEACMKPLWHMFKPPPALECRRCHIKCHKDHMDKKEEIIAPCKVYYDISTAKNLLLLANSTEEQQKWVSRLVKKIPKKPPAPDPFARSSPRTSMKIQQNQSIRRPSRQLAPNKPS

SEQ ID NO: 73581 - protein, 1145 aa, Homo sapiens
  Payload ID: 14558
  Gene Symbol: ROCK2
  Gene Name: Rho-associated, coiled-coil containing protein kinase 2
  ENSP ID: ENSP00000385509
MVHCDTAVGTPDYISPEVLKSQGGDGFYGRECDWWSVGVFLYEMLVGDTPFYADSLVGTYSKIMDHKNSLCFPEDAEISKHAKNLICAFLTDREVRLGRNGVEEIRQHPFFKNDQWHWDNIRETAAPVVPELSSDIDSSNFDDIEDDKGDVETFPIPKAFVGNQLPFIGFTYYRENLLLSDSPSCRETDSIQSRKNEESQEIQKKLYTLEEHLSNEMQAKEELEQKCKSVNTRLEKTAKELEEEITLRKSVESALRQLEREKALLQHKNAEYQRKADHEADKKRNLENDVNSLKDQLEDLKKRNQNSQISTEKVNQLQRQLDETNALLRTESDTAARLRKTQAESSKQIQQLESNNRDLQDKNCLLETAKLKLEKEFINLQSALESERRDRTHGSEIINDLQGRICGLEEDLKNGKILLAKVELEKRQLQERFTDLEKEKSNMEIDMTYQLKVIQQSLEQEEAEHKATKARLADKNKIYESIEEAKSEAMKEMEKKLLEERTLKQKVENLLLEAEKRCSLLDCDLKQSQQKINELLKQKDVLNEDVRNLTLKIEQETQKRCLTQNDLKMQTQQVNTLKMSEKQLKQENNHLMEMKMNLEKQNAELRKERQDADGQMKELQDQLEAEQYFSTLYKTQVRELKEECEEKTKLGKELQQKKQELQDERDSLAAQLEITLTKADSEQLARSIAEEQYSDLEKEKIMKELEIKEMMARHKQELTEKDATIASLEETNRTLTSDVANLANEKEELNNKLKDVQEQLSRLKDEEISAAAIKAQFEKQLLTERTLKTQAVNKLAEIMNRKEPVKRGNDTDVRRKEKENRKLHMELKSEREKLTQQMIKYQKELNEMQAQIAEESQIRIELQMTLDSKDSDIEQLRSQLQALHIGLDSSSIGSGPGDAEADDGFPESRLEGWLSLPVRNNTKKFGWVKKYVIVSSKKILFYDSEQDKEQSNPYMVLDIDKLFHVRPVTQTDVYRADAKEIPRIFQILYANEGESKKEQEFPVEPVGEKSNYICHKGHEFIPTLYHFPTNCEACMKPLWHMFKPPPALECRRCHIKCHKDHMDKKEEIIAPCKVYYDISTAKNLLLLANSTEEQQKWVSRLVKKIPKKPPAPDPFARSSPRTSMKIQQNQSIRRPSRQLAPNKPS

SEQ ID NO: 73582 - protein, 203 aa, Homo sapiens
  Payload ID: 14558
  Gene Symbol: ROCK2
  Gene Name: Rho-associated, coiled-coil containing protein kinase 2
  ENSP ID: ENSP00000395957
MKAEDYDVVKVIGRGAFGEVQLVRHKASQKVYAMKLLSKFEMIKRSDSAFFWEERDIMAFANSPWVVQTGMVHCDTAVGTPDYISPEVLKSQGGDGFYGRECDWWSVGVFLYEMLVGDTPFYADSLVGTYSKIMDHKNSLCFPEDAEISKHAKNLICAFLTDREVRLGRNGVEEIRQHPFFKNDQWHWDNIRETAAPVVPELS

SEQ ID NO: 73583 - protein, 703 aa, Homo sapiens
  Payload ID: 14558
  Gene Symbol: ROCK2
  Gene Name: Rho-associated, coiled-coil containing protein kinase 2
  ENSP ID: ENSP00000481789
MEIDMTYQLKVIQQSLEQEEAEHKATKARLADKNKIYESIEEAKSEAMKEMEKKLLEERTLKQKVENLLLEAEKRCSLLDCDLKQSQQKINELLKQKDVLNEDVRNLTLKIEQETQKRCLTQNDLKMQTQQVNTLKMSEKQLKQENNHLMEMKMNLEKQNAELRKERQDADGQMKELQDQLEAEQYFSTLYKTQVRELKEECEEKTKLGKELQQKKQELQDERDSLAAQLEITLTKADSEQLARSIAEEQYSDLEKEKIMKELEIKEMMARHKQELTEKDATIASLEETNRTLTSDVANLANEKEELNNKLKDVQEQLSRLKDEEISAAAIKAQFEKQLLTERTLKTQAVNKLAEIMNRKEPVKRGNDTDVRRKEKENRKLHMELKSEREKLTQQMIKYQKELNEMQAQIAEESQIRIELQMTLDSKDSDIEQLRSQLQALHIGLDSSSIGSGPGDAEADDGFPESRLEGWLSLPVRNNTKKFGWVKKYVIVSSKKILFYDSEQDKEQSNPYMVLDIDKLFHVRPVTQTDVYRADAKEIPRIFQILYANEGESKKEQEFPVEPVGEKSNYICHKGHEFIPTLYHFPTNCEACMKPLWHMFKPPPALECRRCHIKCHKDHMDKKEEIIAPCKVYYDISTAKNLLLLANSTEEQQKWVSRLVKKIPKKPPAPDPFARSSPRTSMKIQQNQSIRRPSRQLAPNKPS

SEQ ID NO: 73584 - protein, 348 aa, Homo sapiens [sequence omitted]

SEQ ID NO: 73585 - protein, 855 aa, Homo sapiens
  Payload ID: 14560
  Gene Symbol: RHBDF1
  Gene Name: rhomboid 5 homolog 1 (Drosophila)
  Uniprot ID: Q96CC6
  ENSP ID: ENSP00000262316
MSEARRDSTSSLQRKKPPWLKLDIPSAVPLTAEEPSFLQPLRRQAFLRSVSMPAETAHISSPHHELRRPVLQRQTSITQTIRRGTADWFGVSKDSDSTQKWQRKSIRHCSQRYGKLKPQVLRELDLPSQDNVSLTSTETPPPLYVGPCQLGMQKIIDPLARGRAFRVADDTAEGLSAPHTPVTPGAASLCSFSSSRSGFHRLPRRRKRESVAKMSFRAAAALMKGRSVRDGTFRRAQRRSFTPASFLEEDTTDFPDELDTSFFAREGILHEELSTYPDEVFESPSEAALKDWEKAPEQADLTGGALDRSELERSHLMLPLERGWRKQKEGAAAPQPKVRLRQEVVSTAGPRRGQRIAVPVRKLFAREKRPYGLGMVGRLTNRTYRKRIDSFVKRQIEDMDDHRPFFTYWLTFVHSLVTILAVCIYGIAPVGFSQHETVDSVLRNRGVYENVKYVQQENFWIGPSSEALIHLGAKFSPCMRQDPQVHSFIRSAREREKHSACCVRNDRSGCVQTSEEECSSTLAVWVKWPIHPSAPELAGHKRQFGSVCHQDPRVCDEPSSEDPHEWPEDITKWPICTKNSAGNHTNHPHMDCVITGRPCCIGTKGRCEITSREYCDFMRGYFHEEATLCSQVHCMDDVCGLLPFLNPEVPDQFYRLWLSLFLHAGILHCLVSICFQMTVLRDLEKLAGWHRIAIIYLLSGVTGNLASAIFLPYRAEVGPAGSQFGILACLFVELFQSWQILARPWRAFFKLLAVVLFLFTFGLLPWIDNFAHISGFISGLFLSFAFLPYISFGKFDLYRKRCQIIIFQVVFLGLLAGLVVLFYVYPVRCEWCEFLTCIPFTDKFCEKYELDAQLH

SEQ ID NO: 73586 - protein, 137 aa, Homo sapiens
  Payload ID: 14560
  Gene Symbol: RHBDF1
  Gene Name: rhomboid 5 homolog 1 (Drosophila)
  ENSP ID: ENSP00000394427
MSEARRDSTSSLQRKKPPWLKLDIPSAVPLTAEEPSFLQPLRRQAFLRSVSMPAETAHISSPHHELRRPVLQRQTSITQTIRSRQVRFGRVHTLPLLGPRAARRAFPQRQSLSWSLLRGTADWFGVSKDSDSTQKWQ

SEQ ID NO: 73587 - protein, 232 aa, Homo sapiens
  Payload ID: 14560
  Gene Symbol: RHBDF1
  Gene Name: rhomboid 5 homolog 1 (Drosophila)
  ENSP ID: ENSP00000406397
  MOD_RES (1)..(1): Any amino acid
XRPCCIGTKGRCEITSREYCDFMRGYFHEEATLCSQVHCMDDVCGLLPFLNPEMTVLRDLEKLAGWHRIAIIYLLSGVTGNLASAIFLPYRAEVGPAGSQFGILACLFVELFQSWQILARPWRAFFKLLAVVLFLFTFGLLPWIDNFAHISGFISGLFLSFAFLPYISFGKFDLYRKRCQIIIFQVVFLGLLAGLVVLFYVYPVRCEWCEFLTCIPFTDKFCEKYELDAQLH

SEQ ID NO: 73588 - protein, 162 aa, Homo sapiens
  Payload ID: 14560
  Gene Symbol: RHBDF1
  Gene Name: rhomboid 5 homolog 1 (Drosophila)
  ENSP ID: ENSP00000408915
MSEARRDSTSSLQRKKPPWLKLDIPSAVPLTAEEPSFLQPLRRQAFLRSVSMPAETAHISSPHHELRRPVLQRQTSITQTIRRGTADWFGVSKDSDSTQKWQRKSIRHCSQRYGKLKPQVLRELDLPSQDNVSLTSTETPPPLYVGPCQLGMQKIIDPLARG

SEQ ID NO: 73589 - protein, 188 aa, Homo sapiens
  Payload ID: 14560
  Gene Symbol: RHBDF1
  Gene Name: rhomboid 5 homolog 1 (Drosophila)
  ENSP ID: ENSP00000411508
MSEARRDSTSSLQRKKPPWLKLDIPSAVPLTAEEPSFLQPLRRQAFLRSVSMPAETAHISSPHHELRRPVLQRQTSITQTIRRGTADWFGVSKDSDSTQKWQRKSIRHCSQRYGKLKPQVLRELDLPSQDNVSLTSTETPPPLYVGPCQLGMQKLPLRFPPAPAAAQARVGGQDELPGGRSADERPLR

SEQ ID NO: 73590 - protein, 88 aa, Homo sapiens
  Payload ID: 14560
  Gene Symbol: RHBDF1
  Gene Name: rhomboid 5 homolog 1 (Drosophila)
  ENSP ID: ENSP00000412218
MSEARRDSTSSLQRKKPPWLKLDIPSAVPLTAEEPSFLQPLRRQAFLRSVSMPAETAHISSPHHELRRPVLQRQTSITQTIRRPWSLE

SEQ ID NO: 73591 - protein, 856 aa, Homo sapiens
  Payload ID: 14561
  Gene Symbol: RHBDF2
  Gene Name: rhomboid 5 homolog 2 (Drosophila)
  Uniprot ID: Q6PJF5
  ENSP ID: ENSP00000322775
MASADKNGGSVSSVSSSRLQSRKPPNLSITIPPPEKETQAPGEQDSMLPEGFQNRRLKKSQPRTWAAHTTACPPSFLPKRKNPAYLKSVSLQEPRSRWQESSEKRPGFRRQASLSQSIRKGAAQWFGVSGDWEGQRQQWQRRSLHHCSMRYGRLKASCQRDLELPSQEAPSFQGTESPKPCKMPKIVDPLARGRAFRHPEEMDRPHAPHPPLTPGVLSLTSFTSVRSGYSHLPRRKRMSVAHMSLQAAAALLKGRSVLDATGQRCRVVKRSFAFPSFLEEDVVDGADTFDSSFFSKEEMSSMPDDVFESPPLSASYFRGIPHSASPVSPDGVQIPLKEYGRAPVPGPRRGKRIASKVKHFAFDRKKRHYGLGVVGNWLNRSYRRSISSTVQRQLESFDSHRPYFTYWLTFVHVIITLLVICTYGIAPVGFAQHVTTQLVLRNKGVYESVKYIQQENFWVGPSSIDLIHLGAKFSPCIRKDGQIEQLVLRERDLERDSGCCVQNDHSGCIQTQRKDCSETLATFVKWQDDTGPPMDKSDLGQKRTSGAVCHQDPRTCEEPASSGAHIWPDDITKWPICTEQARSNHTGFLHMDCEIKGRPCCIGTKGSCEITTREYCEFMHGYFHEEATLCSQVHCLDKVCGLLPFLNPEVPDQFYRLWLSLFLHAGVVHCLVSVVFQMTILRDLEKLAGWHRIAIIFILSGITGNLASAIFLPYRAEVGPAGSQFGLLACLFVELFQSWPLLERPWKAFLNLSAIVLFLFICGLLPWIDNIAHIFGFLSGLLLAFAFLPYITFGTSDKYRKRALILVSLLAFAGLFAALVLWLYIYPINWPWIEHLTCFPFTSRFCEKYELDQVLH

SEQ ID NO: 73592 - protein, 74 aa, Homo sapiens
  Payload ID: 14561
  Gene Symbol: RHBDF2
  Gene Name: rhomboid 5 homolog 2 (Drosophila)
  ENSP ID: ENSP00000464942
MASADKNGGSVSSVSSSRLQSRKPPNLSITIPPPEKETQAPGEQDSMLPERKNPAYLKSVSLQEPRSRWQESSE

SEQ ID NO: 73593 - protein, 28 aa, Homo sapiens
  Payload ID: 14561
  Gene Symbol: RHBDF2
  Gene Name: rhomboid 5 homolog 2 (Drosophila)
  ENSP ID: ENSP00000464975
MASADKNGGSVSSVSSSRLQSRKPPNLS

SEQ ID NO: 73594 - protein, 13 aa, Homo sapiens
  Payload ID: 14561
  Gene Symbol: RHBDF2
  Gene Name: rhomboid 5 homolog 2 (Drosophila)
  ENSP ID: ENSP00000465124
MASADKNGGSVSS

SEQ ID NO: 73595 - protein, 73 aa, Homo sapiens
  Payload ID: 14561
  Gene Symbol: RHBDF2
  Gene Name: rhomboid 5 homolog 2 (Drosophila)
  ENSP ID: ENSP00000465531
MASADKNGGSVSSVSSSRLQSRKPPNLSITIPPPEKETQAPGEQDSMLPERKNPAYLKSVSLQEPRSRWQESS

SEQ ID NO: 73596 - protein, 112 aa, Homo sapiens
  Payload ID: 14561
  Gene Symbol: RHBDF2
  Gene Name: rhomboid 5 homolog 2 (Drosophila)
  ENSP ID: ENSP00000465632
MASADKNGGSVSSVSSSRLQSRKPPNLSITIPPPEKETQAPGEQDSMLPERKNPAYLKSVSLQEPRSRWQESSEKRPGFRRQASLSQSIRKGAAQWFGVSGDWEGQRQQWQR

SEQ ID NO: 73597 - protein, 26 aa, Homo sapiens
  Payload ID: 14561
  Gene Symbol: RHBDF2
  Gene Name: rhomboid 5 homolog 2 (Drosophila)
  ENSP ID: ENSP00000465990
MASADKNGGSVSSVSSSRLQSRKPPN

SEQ ID NO: 73598 - protein, 47 aa, Homo sapiens
  Payload ID: 14561
  Gene Symbol: RHBDF2
  Gene Name: rhomboid 5 homolog 2 (Drosophila)
  ENSP ID: ENSP00000466029
MASADKNGGSVSSVSSSRLQSRKPPNLSITIPPPEKETQAPGEQDSM

SEQ ID NO: 73599 - protein, 827 aa, Homo sapiens
  Payload ID: 14561
  Gene Symbol: RHBDF2
  Gene Name: rhomboid 5 homolog 2 (Drosophila)
  Uniprot ID: Q6PJF5
  ENSP ID: ENSP00000466867
MASADKNGGSVSSVSSSRLQSRKPPNLSITIPPPEKETQAPGEQDSMLPERKNPAYLKSVSLQEPRSRWQESSEKRPGFRRQASLSQSIRKGAAQWFGVSGDWEGQRQQWQRRSLHHCSMRYGRLKASCQRDLELPSQEAPSFQGTESPKPCKMPKIVDPLARGRAFRHPEEMDRPHAPHPPLTPGVLSLTSFTSVRSGYSHLPRRKRMSVAHMSLQAAAALLKGRSVLDATGQRCRVVKRSFAFPSFLEEDVVDGADTFDSSFFSKEEMSSMPDDVFESPPLSASYFRGIPHSASPVSPDGVQIPLKEYGRAPVPGPRRGKRIASKVKHFAFDRKKRHYGLGVVGNWLNRSYRRSISSTVQRQLESFDSHRPYFTYWLTFVHVIITLLVICTYGIAPVGFAQHVTTQLVLRNKGVYESVKYIQQENFWVGPSSIDLIHLGAKFSPCIRKDGQIEQLVLRERDLERDSGCCVQNDHSGCIQTQRKDCSETLATFVKWQDDTGPPMDKSDLGQKRTSGAVCHQDPRTCEEPASSGAHIWPDDITKWPICTEQARSNHTGFLHMDCEIKGRPCCIGTKGSCEITTREYCEFMHGYFHEEATLCSQVHCLDKVCGLLPFLNPEVPDQFYRLWLSLFLHAGVVHCLVSVVFQMTILRDLEKLAGWHRIAIIFILSGITGNLASAIFLPYRAEVGPAGSQFGLLACLFVELFQSWPLLERPWKAFLNLSAIVLFLFICGLLPWIDNIAHIFGFLSGLLLAFAFLPYITFGTSDKYRKRALILVSLLAFAGLFAALVLWLYIYPINWPWIEHLTCFPFTSRFCEKYELDQVLH

SEQ ID NO: 73600 - protein, 86 aa, Homo sapiens
  Payload ID: 14561
  Gene Symbol: RHBDF2
  Gene Name: rhomboid 5 homolog 2 (Drosophila)
  ENSP ID: ENSP00000467468
LPFLNPEVPDQFYRLWLSLFLHAGVVHCLVSVVFQMTILRDLEKLAGWHRIAIIFILSGITGNLASAIFLPYRAEPQGSPCLPGRS

SEQ ID NO: 73601 - protein, 185 aa, Homo sapiens
  Payload ID: 14561
  Gene Symbol: RHBDF2
  Gene Name: rhomboid 5 homolog 2 (Drosophila)
  ENSP ID: ENSP00000467549
MASADKNGGSVSSVSSSRLQSRKPPNLSITIPPPEKETQAPGEQDSMLPEGFQNRRLKKSQPRTWAAHTTACPPSFLPKRKNPAYLKSVSLQEPRSRWQESSEKRPGFRRQASLSQSIRKGAAQWFGVSGDWEGQRQQWQRRSLHHCSMRYGRLKASCQRDLELPSQEAPSFQGTESPKPCKMPK

SEQ ID NO: 73602 - protein, 89 aa, Homo sapiens
  Payload ID: 14561
  Gene Symbol: RHBDF2
  Gene Name: rhomboid 5 homolog 2 (Drosophila)
  ENSP ID: ENSP00000467677
MASADKNGGSVSSVSSSRLQSRKPPNLSITIPPPEKETQAPGEQDSMLPERKNPAYLKSVSLQEPRSRWQESSEKRPGFRRQASLSQSI

SEQ ID NO: 73603 - protein, 47 aa, Homo sapiens; identical to SEQ ID NO: 73598
  Payload ID: 14561
  Gene Symbol: RHBDF2
  Gene Name: rhomboid 5 homolog 2 (Drosophila)
  ENSP ID: ENSP00000467971

SEQ ID NO: 73604 - protein, 315 aa, Homo sapiens
  Payload ID: 14562
  Gene Symbol: RHBDD1
  Gene Name: rhomboid domain containing 1
  Uniprot ID: Q8TEB9
  ENSP ID: ENSP00000344779
MQRRSRGINTGLILLLSQIFHVGINNIPPVTLATLALNIWFFLNPQKPLYSSCLSVEKCYQQKDWQRLLLSPLHHADDWHLYFNMASMLWKGINLERRLGSRWFAYVITAFSVLTGVVYLLLQFAVAEFMDEPDFKRSCAVGFSGVLFALKVLNNHYCPGGFVNILGFPVPNRFACWVELVAIHLFSPGTSFAGHLAGILVGLMYTQGPLKKIMEACAGGFSSSVGYPGRQYYFNSSGSSGYQDYYPHGRPDHYEEAPRNYDTYTAGLSEEEQLERALQASLWDRGNTRNSPPPYGFHLSPEEMRRQRLHRFDSQ

SEQ ID NO: 73605 - protein, 315 aa, Homo sapiens; identical to SEQ ID NO: 73604
  Payload ID: 14562
  Gene Symbol: RHBDD1
  Gene Name: rhomboid domain containing 1
  Uniprot ID: Q8TEB9
  ENSP ID: ENSP00000375914

SEQ ID NO: 73606 - protein, 157 aa, Homo sapiens
  Payload ID: 14562
  Gene Symbol: RHBDD1
  Gene Name: rhomboid domain containing 1
  ENSP ID: ENSP00000387269
MRRQNVSNQQQNKHSQRVSFPPRTSFAGHLAGILVGLMYTQGPLKKIMEACAGGFSSSVGYPGRQYYFNSSGSSGYQDYYPHGRPDHYEEAPRNYDTYTAGLSEEEQLERALQASLWDRGKPGHKETMASLLDPKIKVRTDKGPRCLGSLKQAAVWT

SEQ ID NO: 73607 - protein, 124 aa, Homo sapiens
  Payload ID: 14562
  Gene Symbol: RHBDD1
  Gene Name: rhomboid domain containing 1
  ENSP ID: ENSP00000388847
MQRRSRGINTGLILLLSQIFHVGINNIPPVTLATLALNIWFFLNPQKPLYSSCLSVEKCYQQKDWQRLLLSPLHHADDWHLYFNMASMLWKGINLERRLGSRWFAYVITAFSVLTGVVYLLLQF

SEQ ID NO: 73608 - protein, 54 aa, Homo sapiens
  Payload ID: 14562
  Gene Symbol: RHBDD1
  Gene Name: rhomboid domain containing 1
  ENSP ID: ENSP00000397298
MQRRSRGINTGLILLLSQIFHVGINNIPPVTLATLALNIWFFLNPQKPLYSSCL

SEQ ID NO: 73609 - protein, 151 aa, Homo sapiens
  Payload ID: 14562
  Gene Symbol: RHBDD1
  Gene Name: rhomboid domain containing 1
  ENSP ID: ENSP00000399694
MQRRSRGINTGLILLLSQIFHVGINNIPPVTLATLALNIWFFLNPQKPLYSSCLSVEKCYQQKDWQRLLLSPLHHADDWHLYFNMASMLWKGINLERRLGSRWFAYVITAFSVLTGVVYLLLQFAVAEFMDEPDFKRSCAVGFSGVLFALK

SEQ ID NO: 73610 - protein, 134 aa, Homo sapiens
  Payload ID: 14562
  Gene Symbol: RHBDD1
  Gene Name: rhomboid domain containing 1
  ENSP ID: ENSP00000400765
MQRRSRGINTGLILLLSQIFHVGINNIPPVTLATLALNIWFFLNPQKPLYSSCLSVEKCYQQKDWQRLLLSPLHHADDWHLYFNMASMLWKGINLERRLGSRWFAYVITAFSVLTGVVYLLLQFAVAEFMDEPD

SEQ ID NO: 73611 - protein, 50 aa, Homo sapiens
  Payload ID: 14562
  Gene Symbol: RHBDD1
  Gene Name: rhomboid domain containing 1
  ENSP ID: ENSP00000410384
MQRRSRGINTGLILLLSQIFHVGINNIPPVTLATLALNIWFFLNPQKPLY

SEQ ID NO: 73612 - protein, 6 aa, Homo sapiens
  Payload ID: 14562
  Gene Symbol: RHBDD1
  Gene Name: rhomboid domain containing 1
  ENSP ID: ENSP00000414801
MQRRSR

SEQ ID NO: 73613 - protein, 364 aa, Homo sapiens
  Payload ID: 14563
  Gene Symbol: RHBDD2
  Gene Name: rhomboid domain containing 2
  Uniprot ID: Q6NTF9
  ENSP ID: ENSP00000006777
MAASGPGCRSWCLCPEVPSATFFTALLSLLVSGPRLFLLQQPLAPSGLTLKSEALRNWQVYRLVTYIFVYENPISLLCGAIIIWRFAGNFERTVGTVRHCFFTVIFAIFSAIIFLSFEAVSSLSKLGEVEDARGFTPVAFAMLGVTTVRSRMRRALVFGMVVPSVLVPWLLLGASWLIPQTSFLSNVCGLSIGLAYGLTYCYSIDLSERVALKLDQTFPFSLMRRISVFKYVSGSSAERRAAQSRKLNPVPGSYPTQSCHPHLSPSHPVSQTQHASGQKLASWPSCTPGHMPTLPPYQPASGLCYVQNHFGPNPTSSSVYPASAGTSLGIQPPTPVNSPGTVYSGALGTPGAAGSKESSRVPMP

SEQ ID NO: 73614 - protein, 223 aa, Homo sapiens
  Payload ID: 14563
  Gene Symbol: RHBDD2
  Gene Name: rhomboid domain containing 2
  Uniprot ID: Q6NTF9
  ENSP ID: ENSP00000314144
MLGVTTVRSRMRRALVFGMVVPSVLVPWLLLGASWLIPQTSFLSNVCGLSIGLAYGLTYCYSIDLSERVALKLDQTFPFSLMRRISVFKYVSGSSAERRAAQSRKLNPVPGSYPTQSCHPHLSPSHPVSQTQHASGQKLASWPSCTPGHMPTLPPYQPASGLCYVQNHFGPNPTSSSVYPASAGTSLGIQPPTPVNSPGTVYSGALGTPGAAGSKESSRVPMP

SEQ ID NO: 73615 - protein, 223 aa, Homo sapiens; identical to SEQ ID NO: 73614
  Payload ID: 14563
  Gene Symbol: RHBDD2
  Gene Name: rhomboid domain containing 2
  Uniprot ID: Q6NTF9
  ENSP ID: ENSP00000391232

SEQ ID NO: 73616 - protein, 79 aa, Homo sapiens
  Payload ID: 14563
  Gene Symbol: RHBDD2
  Gene Name: rhomboid domain containing 2
  ENSP ID: ENSP00000403507
MAASGPGCRSWCLCPEVPSATFFTALLSLLVSGPRLFLLQQPLAPSGLTLKSEALRNWQATMEGGVRITAEETGTQSVK

SEQ ID NO: 73617 - protein, 386 aa, Homo sapiens
  Payload ID: 14564
  Gene Symbol: RHBDD3
  Gene Name: rhomboid domain containing 3
  Uniprot ID: Q9Y3P4
  ENSP ID: ENSP00000216085
MHARGPHGQLSPALPLASSVLMLLMSTLWLVGAGPGLVLAPELLLDPWQVHRLLTHALGHTALPGLLLSLLLLPTVGWQQECHLGTLRFLHASALLALASGLLAVLLAGLGLSSAAGSCGYMPVHLAMLAGEGHRPRRPRGALPPWLSPWLLLALTPLLSSEPPFLQLLCGLLAGLAYAAGAFRWLEPSERRLQVLQEGVLCRTLAGCWPLRLLATPGSLAELPVTHPAGVRPPIPGPPYVASPDLWSHWEDSALPPPSLRPVQPTWEGSSEAGLDWAGASFSPGTPMWAALDEQMLQEGIQASLLDGPAQEPQSAPWLSKSSVSSLRLQQLERMGFPTEQAVVALAATGRVEGAVSLLVGGQVGTETLVTHGKGGPAHSEGPGPP

SEQ ID NO: 73618 - protein, 136 aa, Homo sapiens
  Payload ID: 14564
  Gene Symbol: RHBDD3
  Gene Name: rhomboid domain containing 3
  ENSP ID: ENSP00000384113
MHARGPHGQLSPALPLASSVLMLLMSTLWLVGAGPGLVLAPELLLDPWQVHRLLTHALGHTALPGLLLSLLLLPTVGWQQECHLGTLRFLHASALLALASGLLAVLLAGLGLSSAAGSCGYMPVHLAMLAGEGHRP

SEQ ID NO: 73619 - protein, 89 aa, Homo sapiens
  Payload ID: 14564
  Gene Symbol: RHBDD3
  Gene Name: rhomboid domain containing 3
  ENSP ID: ENSP00000399550
MHARGPHGQLSPALPLASSVLMLLMSTLWLVGAGPGLVLAPELLLDPWQETGSMLPRLVLNSWPQVILPSQPPQVLGLYSCEPLRPALR

SEQ ID NO: 73620 - protein, 195 aa, Homo sapiens
  Payload ID: 14564
  Gene Symbol: RHBDD3
  Gene Name: rhomboid domain containing 3
  ENSP ID: ENSP00000413128
MHARGPHGQLSPALPLASSVLMLLMSTLWLVGAGPGLVLAPELLLDPWQVHRLLTHALGHTALPGLLLSLLLLPTVGWQQECHLGTLRFLHASALLALASGLLAVLLAGLGLSSAAGSCGYMPVHLAMLAGEGHRPRRPRGALPPWLSPWLLLALTPLLSSEPPFLQLLCGLLAGLAYAAGAFRWLEPSERRLQV

SEQ ID NO: 73621 - protein, 438 aa, Homo sapiens
  Payload ID: 14565
  Gene Symbol: RHBDL1
  Gene Name: rhomboid, veinlet-like 1 (Drosophila)
  Uniprot ID: O75783
  ENSP ID: ENSP00000219551
MGRVEDGGTTEELEDWDPGTSALPAPGIKQGPREQTGTGPLSQKCWEPEPDAPSQPGPALWSRGRARTQALAGGSSLQQLDPENTGFIGADTFTGLVHSHELPLDPAKLDMLVALAQSNEQGQVCYQELVDLISSKRSSSFKRAIANGQRALPRDGPLDEPGLGVYKRFVRYVAYEILPCEVDRRWYFYRHRSCPPPVFMASVTLAQIIVFLCYGARLNKWVLQTYHPEYMKSPLVYHPGHRARAWRFLTYMFMHVGLEQLGFNALLQLMIGVPLEMVHGLLRISLLYLAGVLAGSLTVSITDMRAPVVGGSGGVYALCSAHLANVVMNWAGMRCPYKLLRMVLALVCMSSEVGRAVWLRFSPPLPASGPQPSFMAHLAGAVVGVSMGLTILRSYEERLRDQCGWWVVLLAYGTFLLFAVFWNVFAYDLLGAHIPPPP

SEQ ID NO: 73622 - protein, 373 aa, Homo sapiens
  Payload ID: 14565
  Gene Symbol: RHBDL1
  Gene Name: rhomboid, veinlet-like 1 (Drosophila)
  Uniprot ID: O75783
  ENSP ID: ENSP00000344206
MDRSSLLQLIQEQQLDPENTGFIGADTFTGLVHSHELPLDPAKLDMLVALAQSNEQGQVCYQELVDLISSKRSSSFKRAIANGQRALPRDGPLDEPGLGVYKRFVRYVAYEILPCEVDRRWYFYRHRSCPPPVFMASVTLAQIIVFLCYGARLNKWVLQTYHPEYMKSPLVYHPGHRARAWRFLTYMFMHVGLEQLGFNALLQLMIGVPLEMVHGLLRISLLYLAGVLAGSLTVSITDMRAPVVGGSGGVYALCSAHLANVVMNWAGMRCPYKLLRMVLALVCMSSEVGRAVWLRFSPPLPASGPQPSFMAHLAGAVVGVSMGLTILRSYEERLRDQCGWWVVLLAYGTFLLFAVFWNVFAYDLLGAHIPPPP

SEQ ID NO: 73623 - protein, 229 aa, Homo sapiens
  Payload ID: 14565
  Gene Symbol: RHBDL1
  Gene Name: rhomboid, veinlet-like 1 (Drosophila)
  ENSP ID: ENSP00000455608
MDRSSLLQLIQEQQLDPENTGFIGADTFTGLVHSHELPLDPAKLDMLVALAQSNEQGQVCYQELVDLIIVFLCYGARLNKWVLQTYHPEYMKSPLVYHPGHRARAWRFLTYMFMHVGLEQLGFNALLQLMIGVPLEMVHGLLRISLLYLAGVLAGSLTVSITDMRAPVVGGSGGVYALCSAHLANVVMNWAGMRCPYKLLRMVLALVCMSSEVGRAVWLRFSPPLPASG

SEQ ID NO: 73624 - protein, 303 aa, Homo sapiens
  Payload ID: 14566
  Gene Symbol: RHBDL2
  Gene Name: rhomboid, veinlet-like 2 (Drosophila)
  Uniprot ID: Q9NX52
  ENSP ID: ENSP00000289248
MAAVHDLEMESMNLNMGREMKEELEEEEKMREDGGGKDRAKSKKVHRIVSKWMLPEKSRGTYLERANCFPPPVFIISISLAELAVFIYYAVWKPQKQWITLDTGILESPFIYSPEKREEAWRFISYMLVHAGVQHILGNLCMQLVLGIPLEMVHKGLRVGLVYLAGVIAGSLASSIFDPLRYLVGASGGVYALMGGYFMNVLVNFQEMIPAFGIFRLLIIILIIVLDMGFALYRRFFVPEDGSPVSFAAHIAGGFAGMSIGYTVFSCFDKALLKDPRFWIAIAAYLACVLFAVFFNIFLSPAN

SEQ ID NO: 73625 - protein, 303 aa, Homo sapiens; identical to SEQ ID NO: 73624
  Payload ID: 14566
  Gene Symbol: RHBDL2
  Gene Name: rhomboid, veinlet-like 2 (Drosophila)
  Uniprot ID: Q9NX52
  ENSP ID: ENSP00000362081

SEQ ID NO: 73626 - protein, 132 aa, Homo sapiens
  Payload ID: 14566
  Gene Symbol: RHBDL2
  Gene Name: rhomboid, veinlet-like 2 (Drosophila)
  Uniprot ID: Q9NX52
  ENSP ID: ENSP00000441097
MAAVHDLEMESMNLNMGREMKEELEEEEKMREDGGGKDRAKSKKVHRIVSKWMLPEKSRGTYLERANCFPPPVFIISISLAELAVFIYYAVWKPQKQWITLDTGILESPFIYSPEKREEAWRFISYMLVHAG

SEQ ID NO: 73627 - protein, 404 aa, Homo sapiens
  Payload ID: 14567
  Gene Symbol: RHBDL3
  Gene Name: rhomboid, veinlet-like 3 (Drosophila)
  Uniprot ID: P58872
  ENSP ID: ENSP00000269051
MGEHPSPGPAVAACAEAERIEELEPEAEERLPAAPEDHWKVLFDQFDPGNTGYISTGKFRSLLESHSSKLDPHKREVLLALADSHADGQIGYQDFVSLMSNKRSNSFRQAILQGNRRLSSKALLEEKGLSLSQRLIRHVAYETLPREIDRKWYYDSYTCCPPPWFMITVTLLEVAFFLYNGVSLGQFVLQVTHPRYLKNSLVYHPQLRAQVWRYLTYIFMHAGIEHLGLNVVLQLLVGVPLEMVHGATRIGLVYVAGVVAGSLAVSVADMTAPVVGSSGGVYALVSAHLANIVMNWSGMKCQFKLLRMAVALICMSMEFGRAVWLRFHPSAYPPCPHPSFVAHLGGVAVGITLGVVVLRNYEQRLQDQSLWWIFVAMYTVFVLFAVFWNIFAYTLLDLKLPPPP

SEQ ID NO: 73628 - protein, 416 aa, Homo sapiens
  Payload ID: 14567
  Gene Symbol: RHBDL3
  Gene Name: rhomboid, veinlet-like 3 (Drosophila)
  ENSP ID: ENSP00000394849
MGEHPSPGPAVAACAEAERIEELEPEAEERLPAAPEDHWKVLFDQFDPGNTGYISTGKFRSLLESHSSKLDPHKREVLLALADSHADGQIGYQDFVSLMSNKRSNSFRQAILQGNRRLSSKALLEEKGLSLSQRLIRHVAYETLPREIDRKWYYDSYTCCPPPWFMITVTLLEVAFFLYNGVSLGQFVLQVTHPRYLKNSLVYHPQLRAQVWRYLTYIFMHAGIEHLGLNVVLQLLVGVPLEMVHGATRIGLVYVAGVVAELVRHEVPVQAAADGCGPYLYEHGVWAGRVAPLPPVGLSPVPSPKLCGALGWRGRGHHPGRGGPEELRAEAPGPVTVVDFCGHVHRLRAVRCLLEHLCLHPAGLKAAASPLRAGGPRSGRGGKSSTHRERLRGFFSSPAQLGRADKDRRLWATVMF

SEQ ID NO: 73629 - protein, 396 aa, Homo sapiens
  Payload ID: 14567
  Gene Symbol: RHBDL3
  Gene Name: rhomboid, veinlet-like 3 (Drosophila)
  Uniprot ID: P58872
  ENSP ID: ENSP00000442092
MGEHPSPGPAVAACAEAERIEELEPEAEERLPAAPEDFDPGNTGYISTGKFRSLLESHSSKLDPHKREVLLALADSHADGQIGYQDFVSLMSNKRSNSFRQAILQGNRRLSSKALLEEKGLSLSQRLIRHVAYETLPREIDRKWYYDSYTCCPPPWFMITVTLLEVAFFLYNGVSLGQFVLQVTHPRYLKNSLVYHPQLRAQVWRYLTYIFMHAGIEHLGLNVVLQLLVGVPLEMVHGATRIGLVYVAGVVAGSLAVSVADMTAPVVGSSGGVYALVSAHLANIVMNWSGMKCQFKLLRMAVALICMSMEFGRAVWLRFHPSAYPPCPHPSFVAHLGGVAVGITLGVVVLRNYEQRLQDQSLWWIFVAMYTVFVLFAVFWNIFAYTLLDLKLPPPP

SEQ ID NO: 73630 - protein, 51 aa, Homo sapiens
  Payload ID: 14567
  Gene Symbol: RHBDL3
  Gene Name: rhomboid, veinlet-like 3 (Drosophila)
  ENSP ID: ENSP00000463941
MGEHPSPGPAVAACAEAERIEELEPEAEERLPAAPEDHWKVLFDQEAFLDL

SEQ ID NO: 73631 - protein, 306 aa, Homo sapiens
  Payload ID: 14567
  Gene Symbol: RHBDL3
  Gene Name: rhomboid, veinlet-like 3 (Drosophila)
  Uniprot ID: P58872
  ENSP ID: ENSP00000466508
MSNKRSNSFRQAILQGNRRLSSKALLEEKGLSLSQRLIRHVAYETLPREIDRKWYYDSYTCCPPPWFMITVTLLEVAFFLYNGVSLGQFVLQVTHPRYLKNSLVYHPQLRAQVWRYLTYIFMHAGIEHLGLNVVLQLLVGVPLEMVHGATRIGLVYVAGVVAGSLAVSVADMTAPVVGSSGGVYALVSAHLANIVMNWSGMKCQFKLLRMAVALICMSMEFGRAVWLRFHPSAYPPCPHPSFVAHLGGVAVGITLGVVVLRNYEQRLQDQSLWWIFVAMYTVFVLFAVFWNIFAYTLLDLKLPPPP

SEQ ID NO: 73632 - protein, 212 aa, Homo sapiens
  Payload ID: 14568
  Gene Symbol: ROPN1
  Gene Name: rhophilin associated tail protein 1
  Uniprot ID: Q9HAT0
  ENSP ID: ENSP00000184183
MAQTDKPTCIPPELPKMLKEFAKAAIRVQPQDLIQWAADYFEALSRGETPPVRERSERVALCNRAELTPELLKILHSQVAGRLIIRAEELAQMWKVVNLPTDLFNSVMNVGRFTEEIEWLKFLALACSALGVTITKTLKIVCEVLSCDHNGGSPRIPFSTFQFLYTYIAKVDGEISASHVSRMLNYMEQEVIGPDGIITVNDFTQNPRVQLE

SEQ ID NO: 73633 - protein, 212 aa, Homo sapiens; identical to SEQ ID NO: 73632
  Payload ID: 14568
  Gene Symbol: ROPN1
  Gene Name: rhophilin associated tail protein 1
  Uniprot ID: Q9HAT0
  ENSP ID: ENSP00000385919

SEQ ID NO: 73634 - protein, 129 aa, Homo sapiens
  Payload ID: 14568
  Gene Symbol: ROPN1
  Gene Name: rhophilin associated tail protein 1
  ENSP ID: ENSP00000417067
MAQTDKPTCIPPELPKMLKEFAKAAIRVQPQDLIQWAADYFEALSRGETPPVRERSERVALCNRAELTPELLKILHSQVAGRLIIRAEELAQMWKVVNLPTDLFNSVMNVGRFTEEIEWLKFLALACSA

SEQ ID NO: 73635 - protein, 58 aa, Homo sapiens
  Payload ID: 14568
  Gene Symbol: ROPN1
  Gene Name: rhophilin associated tail protein 1
  Uniprot ID: Q9HAT0
  ENSP ID: ENSP00000417379
MAQTDKPTCIPPELPKMLKEFAKAAIRVQPQDLIQWAAEYVLLSRLHPLEDGRRQRVL

SEQ ID NO: 73636 - protein, 77 aa, Homo sapiens
  Payload ID: 14568
  Gene Symbol: ROPN1
  Gene Name: rhophilin associated tail protein 1
  ENSP ID: ENSP00000418931
MAQTDKPTCIPPELPKMLKEFAKAAIRVQPQDLIQWAADYFEALSRGETPPVRERSERVALCNRAELTPELLKILHS

SEQ ID NO: 73637 - protein, 58 aa, Homo sapiens; identical to SEQ ID NO: 73635
  Payload ID: 14568
  Gene Symbol: ROPN1
  Gene Name: rhophilin associated tail protein 1
  Uniprot ID: Q9HAT0
  ENSP ID: ENSP00000419205

SEQ ID NO: 73638 - protein, 116 aa, Homo sapiens
  Payload ID: 14568
  Gene Symbol: ROPN1
  Gene Name: rhophilin associated tail protein 1
  ENSP ID: ENSP00000420310
MAQTDKPTCIPPELPKMLKEFAKAAIRVQPQDLIQWAADYFEALSRGETPPVRERSERVALCNRAELTPELLKILHSQVAGRLIIRAEELAQMWKVVNLPTDLFNSVMNVGRFTEE

SEQ ID NO: 73639 - protein, 58 aa, Homo sapiens; identical to SEQ ID NO: 73635
  Payload ID: 14568
  Gene Symbol: ROPN1
  Gene Name: rhophilin associated tail protein 1
  Uniprot ID: Q9HAT0
  ENSP ID: ENSP00000420567

SEQ ID NO: 73640 - protein, 58 aa, Homo sapiens; identical to SEQ ID NO: 73635
  Payload ID: 14568
  Gene Symbol: ROPN1
  Gene Name: rhophilin associated tail protein 1
  Uniprot ID: Q9HAT0
  ENSP ID: ENSP00000420590

SEQ ID NO: 73641 - protein, 212 aa, Homo sapiens; identical to SEQ ID NO: 73632
  Payload ID: 14568
  Gene Symbol: ROPN1
  Gene Name: rhophilin associated tail protein 1
  Uniprot ID: Q9HAT0
  ENSP ID: ENSP00000483603

SEQ ID NO: 73642 - protein, 212 aa, Homo sapiens
  Payload ID: 14569
  Gene Symbol: ROPN1B
  Gene Name: rhophilin associated tail protein 1B
  Uniprot ID: Q9BZX4
  ENSP ID: ENSP00000251776
MAQTDKPTCIPPELPKMLKEFAKAAIRAQPQDLIQWGADYFEALSRGETPPVRERSERVALCNWAELTPELLKILHSQVAGRLIIRAEELAQMWKVVNLPTDLFNSVMNVGRFTEEIEWLKFLALACSALGVTITKTLKIVCEVLSCDHNGGLPRIPFSTFQFLYTYIAEVDGEICASHVSRMLNYIEQEVIGPDGLITVNDFTQNPRVWLE

SEQ ID NO: 73643 - protein, 120 aa, Homo sapiens
  Payload ID: 14569
  Gene Symbol: ROPN1B
  Gene Name: rhophilin associated tail protein 1B
  Uniprot ID: Q9BZX4
  ENSP ID: ENSP00000421662
MWKVVNLPTDLFNSVMNVGRFTEEIEWLKFLALACSALGVTITKTLKIVCEVLSCDHNGGLPRIPFSTFQFLYTYIAEVDGEICASHVSRMLNYIEQEVIGPDGLITVNDFTQNPRVWLE

SEQ ID NO: 73644 - protein, 102 aa, Homo sapiens
  Payload ID: 14569
  Gene Symbol: ROPN1B
  Gene Name: rhophilin associated tail protein 1B
  ENSP ID: ENSP00000423058
MAQTDKPTCIPPELPKMLKEFAKAAIRAQPQDLIQWGADYFEALSRGETPPVRERSERVALCNWAELTPELLKILHSQVAGRLIIRAEELAQMWKVVNLPTD

SEQ ID NO: 73645 - protein, 120 aa, Homo sapiens; identical to SEQ ID NO: 73643
  Payload ID: 14569
  Gene Symbol: ROPN1B
  Gene Name: rhophilin associated tail protein 1B
  Uniprot ID: Q9BZX4
  ENSP ID: ENSP00000424447

SEQ ID NO: 73646 - protein, 58 aa, Homo sapiens
  Payload ID: 14569
  Gene Symbol: ROPN1B
  Gene Name: rhophilin associated tail protein 1B
  ENSP ID: ENSP00000424457
MAQTDKPTCIPPELPKMLKEFAKAAIRAQPQDLIQWGAEYVLLSRLHLLEDGRGERVL

SEQ ID NO: 73647 - protein, 130 aa, Homo sapiens
  Payload ID: 14569
  Gene Symbol: ROPN1B
  Gene Name: rhophilin associated tail protein 1B
  ENSP ID: ENSP00000425548
MAQTDKPTCIPPELPKMLKEFAKAAIRAQPQDLIQWGADYFEALSRGETPPVRERSERVALCNWAELTPELLKILHSQVAGRLIIRAEELAQMWKVVNLPTDLFNSVMNVGRFTEEIEWLKFLALACSAL

SEQ ID NO: 73648 - protein, 212 aa, Homo sapiens; identical to SEQ ID NO: 73642
  Payload ID: 14569
  Gene Symbol: ROPN1B
  Gene Name: rhophilin associated tail protein 1B
  Uniprot ID: Q9BZX4
  ENSP ID: ENSP00000426271

SEQ ID NO: 73649 - protein, 230 aa, Homo sapiens
  Payload ID: 14570
  Gene Symbol: ROPN1L
  Gene Name: rhophilin associated tail protein 1-like
  Uniprot ID: Q96C74
  ENSP ID: ENSP00000274134
MPLPDTMFCAQQIHIPPELPDILKQFTKAAIRTQPADVLRWSAGYFSALSRGDPLPVKDRMEMPTATQKTDTGLTQGLLKVLHKQCHHKRYVELTDLEQKWKNLCLPKEKFKALLQLDPCENKIKWINFLALGCSMLGGSLNTALKHLCEILTDDPEGGPARIPFKTFSYVYRYLARLDSDVSPLETESYLASLKENIDARKNGMIGLSDFFFPKRKLLESIENSEDVGH

SEQ ID NO: 73650 - protein, 230 aa, Homo sapiens; identical to SEQ ID NO: 73649
  Payload ID: 14570
  Gene Symbol: ROPN1L
  Gene Name: rhophilin associated tail protein 1-like
  Uniprot ID: Q96C74
  ENSP ID: ENSP00000421405

SEQ ID NO: 73651 - protein, 670 aa, Homo sapiens
  Payload ID: 14571
  Gene Symbol: RHPN1
  Gene Name: rhophilin, Rho GTPase binding protein 1
  Uniprot ID: Q8TCX5
  ENSP ID: ENSP00000289013
MILEERPDGAGAGEESPRLQGCDSLTQIQCGQLQSRRAQIHQQIDKELQMRTGAENLYRATSNNRVRETVALELSYVNSNLQLLKEELEELSGGVDPGRHGSEAVTVPMIPLGLKETKELDWSTPLKELISVHFGEDGASYEAEIRELEALRQAMRTPSRNESGLELLTAYYNQLCFLDARFLTPARSLGLFFHWYDSLTGVPAQQRALAFEKGSVLFNIGALHTQIGARQDRSCTEGARRAMEAFQRAAGAFSLLRENFSHAPSPDMSAASLCALEQLMMAQAQECVFEGLSPPASMAPQDCLAQLRLAQEAAQVAAEYRLVHRTMAQPPVHDYVPVSWTALVHVKAEYFRSLAHYHVAMALCDGSPATEGELPTHEQVFLQPPTSSKPRGPVLPQELEERRQLGKAHLKRAILGQEEALRLHALCRVLREVDLLRAVISQTLQRSLAKYAELDREDDFCEAAEAPDIQPKTHQKPEARMPRLSQGKGPDIFHRLGPLSVFSAKNRWRLVGPVHLTRGEGGFGLTLRGDSPVLIAAVIPGSQAAAAGLKEGDYIVSVNGQPCRWWRHAEVVTELKAAGEAGASLQVVSLLPSSRLPSLGDRRPVLLGPRGLLRSQREHGCKTPASTWASPRPLLNWSRKAQQGKTGGCPQPCAPVKPAPPSSLKHPGWP

SEQ ID NO: 73652 - protein, 695 aa, Homo sapiens
  Payload ID: 14571
  Gene Symbol: RHPN1
  Gene Name: rhophilin, Rho GTPase binding protein 1
  Uniprot ID: Q8TCX5
  ENSP ID: ENSP00000484724
MILEERPDGAGAGEESPRLQGCDSLTQIQCGQLQSRRAQIHQQIDKELQMRTGAENLYRATSNNRVRETVALELSYVNSNLQLLKEELEELSGGVDPGRHGSEAVTVPMIPLGLKETKELDWSTPLKELISVHFGEDGASYEAEIRELEALRQAMRTPSRNESGLELLTAYYNQLCFLDARFLTPARSLGLFFHWYDSLTGVPAQQRALAFEKGSVLFNIGALHTQIGARQDRSCTEGARRAMEAFQRAAGAFSLLRENFSHAPSPDMSAASLCALEQLMMAQAQECVFEGLSPPASMAPQDCLAQLRLAQEAAQVAAEYRLVHRTMAQPPVHDYVPVSWTALVHVKAEYFRSLAHYHVAMALCDGSRECPPHLPMVLPRPPRAGSQPLCPPAATEGELPTHEQVFLQPPTSSKPRGPVLPQELEERRQLGKAHLKRAILGQEEALRLHALCRVLREVDLLRAVISQTLQRSLAKYAELDREDDFCEAAEAPDIQPKTHQKPEARMPRLSQGKGPDIFHRLGPLSVFSAKNRWRLVGPVHLTRGEGGFGLTLRGDSPVLIAAVIPGSQAAAAGLKEGDYIVSVNGQPCRWWRHAEVVTELKAAGEAGASLQVVSLLPSSRLPSLGDRRPVLLGPRGLLRSQREHGCKTPASTWASPRPLLNWSRKAQQGKTGGCPQPCAPVKPAPPSSLKHPGWP

SEQ ID NO: 73653 - protein, 686 aa, Homo sapiens
  Payload ID: 14572
  Gene Symbol: RHPN2
  Gene Name: rhophilin, Rho GTPase binding protein 2
  Uniprot ID: Q8IUC4
  ENSP ID: ENSP00000254260
MTDALLPAAPQPLEKENDGYFRKGCNPLAQTGRSKLQNQRAALNQQILKAVRMRTGAENLLKVATNSKVREQVRLELSFVNSDLQMLKEELEGLNISVGVYQNTEEAFTIPLIPLGLKETKDVDFAVVLKDFILEHYSEDGYLYEDEIADLMDLRQACRTPSRDEAGVELLMTYFIQLGFVESRFFPPTRQMGLLFTWYDSLTGVPVSQQNLLLEKASVLFNTGALYTQIGTRCDRQTQAGLESAIDAFQRAAGVLNYLKDTFTHTPSYDMSPAMLSVLVKMMLAQAQESVFEKISLPGIRNEFFMLVKVAQEAAKVGEVYQQLHAAMSQAPVKENIPYSWASLACVKAHHYAALAHYFTAILLIDHQVKPGTDLDHQEKCLSQLYDHMPEGLTPLATLKNDQQRRQLGKSHLRRAMAHHEESVREASLCKKLRSIEVLQKVLCAAQERSRLTYAQHQEEDDLLNLIDAPSVVAKTEQEVDIILPQFSKLTVTDFFQKLGPLSVFSANKRWTPPRSIRFTAEEGDLGFTLRGNAPVQVHFLDPYCSASVAGAREGDYIVSIQLVDCKWLTLSEVMKLLKSFGEDEIEMKVVSLLDSTSSMHNKSATYSVGMQKTYSMICLAIDDDDKTDKTKKISKKLSFLSWGTNKNRQKSASTLCLPSVGAARPQVKKKLPSPFSLLNSDSSWY

SEQ ID NO: 73654 - protein, 128 aa, Homo sapiens
  Payload ID: 14572
  Gene Symbol: RHPN2
  Gene Name: rhophilin, Rho GTPase binding protein 2
  ENSP ID: ENSP00000465898
MTDALLPAAPQPLEKENDGYFRKGCNPLAQTGRSKLQNQRAALNQQILKAVRMRTGAENLLKVATNSKVREQVRLELSFVNSDLQMLKEELEGLNISVGVYQNTEILSWNITVKMAIYMKMKLQILWI

SEQ ID NO: 73655 - protein, 696 aa, Homo sapiens
  Payload ID: 14573
  Gene Symbol: RHOBTB1
  Gene Name: Rho-related BTB domain containing 1
  Uniprot ID: O94844
  ENSP ID: ENSP00000338671
MDADMDYERPNVETIKCVVVGDNAVGKTRLICARACNTTLTQYQLLATHVPTVWAIDQYRVCQEVLERSRDVVDEVSVSLRLWDTFGDHHKDRRFAYGRSDVVVLCFSIANPNSLNHVKSMWYPEIKHFCPRTPVILVGCQLDLRYADLEAVNRARRPLARPIKRGDILPPEKGREVAKELGLPYYETSVFDQFGIKDVFDNAIRAALISRRHLQFWKSHLKKVQKPLLQAPFLPPKAPPPVIKIPECPSMGTNEAACLLDNPLCADVLFILQDQEHIFAHRIYLATSSSKFYDLFLMECEESPNGSEGACEKEKQSRDFQGRILSVDPEEEREEGPPRIPQADQWKSSNKSLVEALGLEAEGAVPETQTLTGWSKGFIGMHREMQVNPISKRMGPMTVVRMDASVQPGPFRTLLQFLYTGQLDEKEKDLVGLAQIAEVLEMFDLRMMVENIMNKEAFMNQEITKAFHVRKANRIKECLSKGTFSDVTFKLDDGAISAHKPLLICSCEWMAAMFGGSFVESANSEVYLPNINKISMQAVLDYLYTKQLSPNLDLDPLELIALANRFCLPHLVALAEQHAVQELTKAATSGVGIDGEVLSYLELAQFHNAHQLAAWCLHHICTNYNSVCSKFRKEIKSKSADNQEYFERHRWPPVWYLKEEDHYQRVKREREKEDIALNKHRSRRKWCFWNSSPAVA

SEQ ID NO: 73656 - protein, 696 aa, Homo sapiens; identical to SEQ ID NO: 73655
  Payload ID: 14573
  Gene Symbol: RHOBTB1
  Gene Name: Rho-related BTB domain containing 1
  Uniprot ID: O94844
  ENSP ID: ENSP00000350595

SEQ ID NO: 73657 - protein, 727 aa, Homo sapiens
  Payload ID: 14574
  Gene Symbol: RHOBTB2
  Gene Name: Rho-related BTB domain containing 2
  Uniprot ID: Q9BYZ6
  ENSP ID: ENSP00000251822
MDSDMDYERPNVETIKCVVVGDNAVGKTRLICARACNATLTQYQLLATHVPTVWAIDQYRVCQEVLERSRDVVDDVSVSLRLWDTFGDHHKDRRFAYGRSDVVVLCFSIANPNSLHHVKTMWYPEIKHFCPRAPVILVGCQLDLRYADLEAVNRARRPLARPIKPNEILPPEKGREVAKELGIPYYETSVVAQFGIKDVFDNAIRAALISRRHLQFWKSHLRNVQRPLLQAPFLPPKPPPPIIVVPDPPSSSEECPAHLLEDPLCADVILVLQERVRIFAHKIYLSTSSSKFYDLFLMDLSEGELGGPSEPGGTHPEDHQGHSDQHHHHHHHHHGRDFLLRAASFDVCESVDEAGGSGPAGLRASTSDGILRGNGTGYLPGRGRVLSSWSRAFVSIQEEMAEDPLTYKSRLMVVVKMDSSIQPGPFRAVLKYLYTGELDENERDLMHIAHIAELLEVFDLRMMVANILNNEAFMNQEITKAFHVRRTNRVKECLAKGTFSDVTFILDDGTISAHKPLLISSCDWMAAMFGGPFVESSTREVVFPYTSKSCMRAVLEYLYTGMFTSSPDLDDMKLIILANRLCLPHLVALTEQYTVTGLMEATQMMVDIDGDVLVFLELAQFHCAYQLADWCLHHICTNYNNVCRKFPRDMKAMSPENQEYFEKHRWPPVWYLKEEDHYQRARKEREKEDYLHLKRQPKRRWLFWNSPSSPSSSAASSSSPSSSSAVV

SEQ ID NO: 73658 - protein, 749 aa, Homo sapiens
  Payload ID: 14574
  Gene Symbol: RHOBTB2
  Gene Name: Rho-related BTB domain containing 2
  Uniprot ID: Q9BYZ6
  ENSP ID: ENSP00000427926
MQAWRKGPDGPQKTSSDSMSRLMDSDMDYERPNVETIKCVVVGDNAVGKTRLICARACNATLTQYQLLATHVPTVWAIDQYRVCQEVLERSRDVVDDVSVSLRLWDTFGDHHKDRRFAYGRSDVVVLCFSIANPNSLHHVKTMWYPEIKHFCPRAPVILVGCQLDLRYADLEAVNRARRPLARPIKPNEILPPEKGREVAKELGIPYYETSVVAQFGIKDVFDNAIRAALISRRHLQFWKSHLRNVQRPLLQAPFLPPKPPPPIIVVPDPPSSSEECPAHLLEDPLCADVILVLQERVRIFAHKIYLSTSSSKFYDLFLMDLSEGELGGPSEPGGTHPEDHQGHSDQHHHHHHHHHGRDFLLRAASFDVCESVDEAGGSGPAGLRASTSDGILRGNGTGYLPGRGRVLSSWSRAFVSIQEEMAEDPLTYKSRLMVVVKMDSSIQPGPFRAVLKYLYTGELDENERDLMHIAHIAELLEVFDLRMMVANILNNEAFMNQEITKAFHVRRTNRVKECLAKGTFSDVTFILDDGTISAHKPLLISSCDWMAAMFGGPFVESSTREVVFPYTSKSCMRAVLEYLYTGMFTSSPDLDDMKLIILANRLCLPHLVALTEQYTVTGLMEATQMMVDIDGDVLVFLELAQFHCAYQLADWCLHHICTNYNNVCRKFPRDMKAMSPENQEYFEKHRWPPVWYLKEEDHYQRARKEREKEDYLHLKRQPKRRWLFWNSPSSPSSSAASSSSPSSSSAVV

SEQ ID NO: 73659 - protein, 734 aa, Homo sapiens
  Payload ID: 14574
  Gene Symbol: RHOBTB2
  Gene Name: Rho-related BTB domain containing 2
  Uniprot ID: Q9BYZ6
  ENSP ID: ENSP00000429141
MKARSRLMDSDMDYERPNVETIKCVVVGDNAVGKTRLICARACNATLTQYQLLATHVPTVWAIDQYRVCQEVLERSRDVVDDVSVSLRLWDTFGDHHKDRRFAYGRSDVVVLCFSIANPNSLHHVKTMWYPEIKHFCPRAPVILVGCQLDLRYADLEAVNRARRPLARPIKPNEILPPEKGREVAKELGIPYYETSVVAQFGIKDVFDNAIRAALISRRHLQFWKSHLRNVQRPLLQAPFLPPKPPPPIIVVPDPPSSSEECPAHLLEDPLCADVILVLQERVRIFAHKIYLSTSSSKFYDLFLMDLSEGELGGPSEPGGTHPEDHQGHSDQHHHHHHHHHGRDFLLRAASFDVCESVDEAGGSGPAGLRASTSDGILRGNGTGYLPGRGRVLSSWSRAFVSIQEEMAEDPLTYKSRLMVVVKMDSSIQPGPFRAVLKYLYTGELDENERDLMHIAHIAELLEVFDLRMMVANILNNEAFMNQEITKAFHVRRTNRVKECLAKGTFSDVTFILDDGTISAHKPLLISSCDWMAAMFGGPFVESSTREVVFPYTSKSCMRAVLEYLYTGMFTSSPDLDDMKLIILANRLCLPHLVALTEQYTVTGLMEATQMMVDIDGDVLVFLELAQFHCAYQLADWCLHHICTNYNNVCRKFPRDMKAMSPENQEYFEKHRWPPVWYLKEEDHYQRARKEREKEDYLHLKRQPKRRWLFWNSPSSPSSSAASSSSPSSSSAVV

SEQ ID NO: 73660 - protein, 182 aa, Homo sapiens
  Payload ID: 14574
  Gene Symbol: RHOBTB2
  Gene Name: Rho-related BTB domain containing 2
  ENSP ID: ENSP00000430785
MQAWRKGPDGPQKTSSDSMSRLMDSDMDYERPNVETIKCVVVGDNAVGKTRLICARACNATLTQYQLLATHVPTVWAIDQYRVCQEVLERSRDVVDDVSVSLRLWDTFGDHHKDRRFAYGRSDVVVLCFSIANPNSLHHVKTMWYPEIKHFCPRAPVILVGCQLDLRYADLEAVNRARRPLA

SEQ ID NO: 73661 - protein, 611 aa, Homo sapiens
  Payload ID: 14575
  Gene Symbol: RHOBTB3
  Gene Name: Rho-related BTB domain containing 3
  Uniprot ID: O94955
  ENSP ID: ENSP00000369318
MSIHIVALGNEGDTFHQDNRPSGLIRTYLGRSPLVSGDESSLLLNAASTVARPVFTEYQASAFGNVKLVVHDCPVWDIFDSDWYTSRNLIGGADIIVIKYNVNDKFSFHEVKDNYIPVIKRALNSVPVIIAAVGTRQNEELPCTCPLCTSDRGSCVSTTEGIQLAKELGATYLELHSLDDFYIGKYFGGVLEYFMIQALNQKTSEKMKKRKMSNSFHGIRPPQLEQPEKMPVLKAEASHYNSDLNNLLFCCQCVDVVFYNPNLKKVVEAHKIVLCAVSHVFMLLFNVKSPTDIQDSSIIRTTQDLFAINRDTAFPGASHESSGNPPLRVIVKDALFCSCLSDILRFIYSGAFQWEELEEDIRKKLKDSGDVSNVIEKVKCILKTPGKINCLRNCKTYQARKPLWFYNTSLKFFLNKPMLADVVFEIQGTTVPAHRAILVARCEVMAAMFNGNYMEAKSVLIPVYGVSKETFLSFLEYLYTDSCCPAGIFQAMCLLICAEMYQVSRLQHICELFIITQLQSMPSRELASMNLDIVDLLKKAKFHHSDCLSTWLLHFIATNYLIFSQKPEFQDLSVEERSFVEKHRWPSNMYLKQLAEYRKYIHSRKCRCLVM

SEQ ID NO: 73662 - protein, 103 aa, Homo sapiens
  Payload ID: 14575
  Gene Symbol: RHOBTB3
  Gene Name: Rho-related BTB domain containing 3
  ENSP ID: ENSP00000421875
  MOD_RES (1)..(1): Any amino acid
XDIIVIKYNVNDKFSFHEVKDNYIPVIKRALNSVPVIIAAVGTRQNEELPCTCPLCTSDRGSCVSTTEGIQLAKELGATYLELHSLDDFYIGKYFGGVKKCLS

SEQ ID NO: 73663 - protein, 242 aa, Homo sapiens
  Payload ID: 14575
  Gene Symbol: RHOBTB3
  Gene Name: Rho-related BTB domain containing 3
  ENSP ID: ENSP00000422360
MPKRAVLFTDRQPIQFLKINCLRNCKTYQARKPLWFYNTSLKFFLNKPMLADVVFEIQGTTVPAHRAILVARCEVMAAMFNGNYMEAKSVLIPVYGVSKETFLSFLEYLYTDSCCPAGIFQAMCLLICAEMYQVSRLQHICELFIITQLQSMPSRELASMNLDIVDLLKKAKFHHSDCLSTWLLHFIATNYLIFSQKPEFQDLSVEERSFVEKHRWPSNMYLKQLAEYRKYIHSRKCRCLVM

SEQ ID NO: 73664 - protein, 72 aa, Homo sapiens
  Payload ID: 14575
  Gene Symbol: RHOBTB3
  Gene Name: Rho-related BTB domain containing 3
  ENSP ID: ENSP00000423652
LVSGDESSLLLNAASTVARPVFTEYQASAFGNVKLVVHDCPVWKSYLVHAHYVPQTEGAVLVQLKGSNLQKN

SEQ ID NO: 73665 - protein, 180 aa, Homo sapiens
  Payload ID: 14575
  Gene Symbol: RHOBTB3
  Gene Name: Rho-related BTB domain containing 3
  ENSP ID: ENSP00000423688
MRKRQTWSIHIVALGNEGDTFHQDNRPSGLIRTYLGRSPLVSGDESSLLLNAASTVARPVFTEYQASAFGNVKLVVHDCPVWDIFDSDWYTSRNLIGGADIIVIKYNVNDKFSFHEVKDNYIPVIKRALNSVPVIIAAVGTRQNEELPCTCPLCTSDRGSCVSTTEGIQLAKELGATYLE

SEQ ID NO: 73666 - protein, 37 aa, Homo sapiens
  Payload ID: 14575
  Gene Symbol: RHOBTB3
  Gene Name: Rho-related BTB domain containing 3
  ENSP ID: ENSP00000424700
  MOD_RES (1)..(1): Any amino acid
XIFSQKPEFQDLSVFFLKLQWKNAVLLKSTDGRRICT

SEQ ID NO: 73667 - protein, 172 aa, Homo sapiens
  Payload ID: 14575
  Gene Symbol: RHOBTB3
  Gene Name: Rho-related BTB domain containing 3
  ENSP ID: ENSP00000424844
  MOD_RES (1)..(1): Any amino acid
XADVVFEIQGTTVPAHRAILVARCEVMAAMFNGNYMEAKSVLIPVYGVSKETFLSFLEYLYTDSCCPAGIFQAMCLLICAEMYQVSRLQHICELFIITQLQSMPSRELASMNLDIVDLLKKAKFHHSDCLSTWLLHFIATNYLIFSQKPEFQDLSGRLLISVLKRKLYVLCS

SEQ ID NO: 73668 - protein, 76 aa, Homo sapiens
  Payload ID: 14575
  Gene Symbol: RHOBTB3
  Gene Name: Rho-related BTB domain containing 3
  ENSP ID: ENSP00000425342
  MOD_RES (1)..(1): Any amino acid
XYLIFSQKPEFQDLSGSFMVKPEYLQRGGAKARAGHHDCHVRGIPSILRSREGKKIHSQKQLFTVTLIVTRIKMAK

SEQ ID NO: 73669 - protein, 117 aa, Homo sapiens
  Payload ID: 14575
  Gene Symbol: RHOBTB3
  Gene Name: Rho-related BTB domain containing 3
  ENSP ID: ENSP00000426390
  MOD_RES (1)..(1): Any amino acid
XEMYQVSRLQHICELFIITQLQSMPSRELASMNLDIVDLLKKAKFHHSDCLSTWLLHFIATNYLIFSQKPEFQDLSVEERSFVEKHRWPSNMYLKQLAEYRKYIHSRKCRCLVIKRH

SEQ ID NO: 73670 - protein, 104 aa, Homo sapiens
  Payload ID: 14575
  Gene Symbol: RHOBTB3
  Gene Name: Rho-related BTB domain containing 3
  ENSP ID: ENSP00000426479
MSIHIVALGNEGDTFHQDNRPSGLIRTYLGRSPLVSGDESSLLLNAASTVARPVFTEYQASAFGNVKLVVHDCPVWVRKSSCSALRLKKLFFPFFSPSPFCPLP

SEQ ID NO: 73671 - protein, 513 aa, Homo sapiens
  Payload ID: 14576
  Gene Symbol: RTKN
  Gene Name: rhotekin
  Uniprot ID: Q9BST9
  ENSP ID: ENSP00000233330
MREGACKLLAACSQREQALEATKSLLVCNSRILSYMGELQRRKEAQVLGKTSRRPSDSGPPAERSPCRGRVCISDLRIPLMWKDTEYFKNKGDLHRWAVFLLLQLGEHIQDTEMILVDRTLTDISFQSNVLFAEAGPDFELRLELYGACVEEEGALTGGPKRLATKLSSSLGRSSGRRVRASLDSAGGSGSSPILLPTPVVGGPRYHLLAHTTLTLAAVQDGFRTHDLTLASHEENPAWLPLYGSVCCRLAAQPLCMTQPTASGTLRVQQAGEMQNWAQVHGVLKGTNLFCYRQPEDADTGEEPLLTIAVNKETRVRAGELDQALGRPFTLSISNQYGDDEVTHTLQTESREALQSWMEALWQLFFDMSQWKQCCDEIMKIETPAPRKPPQALAKQGSLYHEMAIEPLDDIAAVTDILTQREGARLETPPPWLAMFTDQPALPNPCSPASVAPAPDWTHPLPWGRPRTFSLDAVPPDHSPRARSVAPLPPQRSPRTRGLCSKGQPRTWLQSPV

SEQ ID NO: 73672 - protein, 563 aa, Homo sapiens
  Payload ID: 14576
  Gene Symbol: RTKN
  Gene Name: rhotekin
  Uniprot ID: Q9BST9
  ENSP ID: ENSP00000272430
MFSRNHRSRVTVARGSALEMEFKRGRFRLSLFSDLPEDTELQRKLDHEIRMREGACKLLAACSQREQALEATKSLLVCNSRILSYMGELQRRKEAQVLGKTSRRPSDSGPPAERSPCRGRVCISDLRIPLMWKDTEYFKNKGDLHRWAVFLLLQLGEHIQDTEMILVDRTLTDISFQSNVLFAEAGPDFELRLELYGACVEEEGALTGGPKRLATKLSSSLGRSSGRRVRASLDSAGGSGSSPILLPTPVVGGPRYHLLAHTTLTLAAVQDGFRTHDLTLASHEENPAWLPLYGSVCCRLAAQPLCMTQPTASGTLRVQQAGEMQNWAQVHGVLKGTNLFCYRQPEDADTGEEPLLTIAVNKETRVRAGELDQALGRPFTLSISNQYGDDEVTHTLQTESREALQSWMEALWQLFFDMSQWKQCCDEIMKIETPAPRKPPQALAKQGSLYHEMAIEPLDDIAAVTDILTQREGARLETPPPWLAMFTDQPALPNPCSPASVAPAPDWTHPLPWGRPRTFSLDAVPPDHSPRARSVAPLPPQRSPRTRGLCSKGQPRTWLQSPV

SEQ ID NO: 73673 - protein, 550 aa, Homo sapiens
  Payload ID: 14576
  Gene Symbol: RTKN
  Gene Name: rhotekin
  Uniprot ID: Q9BST9
  ENSP ID: ENSP00000305298
MQDRLHILEDLNMLYIRQMALSLEDTELQRKLDHEIRMREGACKLLAACSQREQALEATKSLLVCNSRILSYMGELQRRKEAQVLGKTSRRPSDSGPPAERSPCRGRVCISDLRIPLMWKDTEYFKNKGDLHRWAVFLLLQLGEHIQDTEMILVDRTLTDISFQSNVLFAEAGPDFELRLELYGACVEEEGALTGGPKRLATKLSSSLGRSSGRRVRASLDSAGGSGSSPILLPTPVVGGPRYHLLAHTTLTLAAVQDGFRTHDLTLASHEENPAWLPLYGSVCCRLAAQPLCMTQPTASGTLRVQQAGEMQNWAQVHGVLKGTNLFCYRQPEDADTGEEPLLTIAVNKETRVRAGELDQALGRPFTLSISNQYGDDEVTHTLQTESREALQSWMEALWQLFFDMSQWKQCCDEIMKIETPAPRKPPQALAKQGSLYHEMAIEPLDDIAAVTDILTQREGARLETPPPWLAMFTDQPALPNPCSPASVAPAPDWTHPLPWGRPRTFSLDAVPPDHSPRARSVAPLPPQRSPRTRGLCSKGQPRTWLQSPV

SEQ ID NO: 73674 - protein, 308 aa, Homo sapiens
  Payload ID: 14577
  Gene Symbol: RTKN2
  Gene Name: rhotekin 2
  ENSP ID: ENSP00000325379
MCLLLSSAVFGVKYNLLAHTTLTLESAEDSFKTHNLSINGNEESSFWLPLYGNMCCRLVAQPACMAEDAFAGFLNQQQMVEGLISWRRLYCVLRGGKLYCFYSPEEIEAKVEPALVVPINKSLVLFEDSLEGIQLAISQSFKETRIRAMDKDAKKRIHNFSVINPVPGQAITQIFAVDNREDLQKWMEAFWQHFFDLSQWKHCCEELMKIEIMSPRKPPLFLTKEATSVYHDMSIDSPMKLESLTDIIQKKIEETNGQFLIGQHEESLPPPWATLFDGNHQMVIQKKNNSNQLHNLQKLPATSKFLFT

SEQ ID NO: 73675 - protein, 609 aa, Homo sapiens
  Payload ID: 14577
  Gene Symbol: RTKN2
  Gene Name: rhotekin 2
  Uniprot ID: Q8IZC4
  ENSP ID: ENSP00000362894
MEGPSLRGPALRLAGLPTQQDCNIQEKIDLEIRMREGIWKLLSLSTQKDQVLHAVKNLMVCNARLMAYTSELQKLEEQIANQTGRCDVKFESKERTACKGKIAISDIRIPLMWKDSDHFSNKERSRRYAIFCLFKMGANVFDTDVVNVDKTITDICFENVTIFNEAGPDFQIKVEVYSCCTEESSITNTPKKLAKKLKTSISKATGKKISSVLQEEDDEMCLLLSSAVFGVKYNLLAHTTLTLESAEDSFKTHNLSINGNEESSFWLPLYGNMCCRLVAQPACMAEDAFAGFLNQQQMVEGLISWRRLYCVLRGGKLYCFYSPEEIEAKVEPALVVPINKETRIRAMDKDAKKRIHNFSVINPVPGQAITQIFAVDNREDLQKWMEAFWQHFFDLSQWKHCCEELMKIEIMSPRKPPLFLTKEATSVYHDMSIDSPMKLESLTDIIQKKIEETNGQFLIGQHEESLPPPWATLFDGNHQMVIQKKVLYPASEPLHDEKGKKRQAPLPPSDKLPFSLKSQSNTDQLVKDNWGKTSVSQTSSLDTKLSTLMHHLQKPMAAPRKLLPARRNRLSDGEHTDTKTNFEAKPVPAPRQKSIKDILDPRSWLQAQV

SEQ ID NO: 73676 - protein, 163 aa, Homo sapiens
  Payload ID: 14577
  Gene Symbol: RTKN2
  Gene Name: rhotekin 2
  Uniprot ID: Q8IZC4
  ENSP ID: ENSP00000378678
MEGPSLRGPALRLAGLPTQQDCNIQEKIDLEIRMREGIWKLLSLSTQKDQVLHAVKNLMVCNARLMAYTSELQKLEEQIANQTGRCDVKFESKERTACKGKIAISDIRIPLMWKDSDHFSNKERSRRYAIFCLFKMGANVFDTDVVNVDKTITDICFENVTIL

SEQ ID NO: 73677 - protein, 184 aa, Homo sapiens
  Payload ID: 14578
  Gene Symbol: RHOXF1
  Gene Name: Rhox homeobox family, member 1
  Uniprot ID: Q8NHV9
  ENSP ID: ENSP00000217999
MARSLVHDTVFYCLSVYQVKISPTPQLGAASSAEGHVGQGAPGLMGNMNPEGGVNHENGMNRDGGMIPEGGGGNQEPRQQPQPPPEEPAQAAMEGPQPENMQPRTRRTKFTLLQVEELESVFRHTQYPDVPTRRELAENLGVTEDKVRVWFKNKRARCRRHQRELMLANELRADPDDCVYIVVD

SEQ ID NO: 73678 - protein, 288 aa, Homo sapiens
  Payload ID: 14579
  Gene Symbol: RHOXF2
  Gene Name: Rhox homeobox family, member 2
  Uniprot ID: Q9BQY4
  ENSP ID: ENSP00000360441
MEPPDQCSQYMTSLLSPAVDDEKELQDMNAMVLSLTEEVKEEEEDAQPEPEQGTAAGEKLKSAGAQGGEEKDGGGEEKDGGGAGVPGHLWEGDLEGTSGSDGNVEDSDQSEKEPGQQYSRPQGAVGGLEPGNAQQPNVHAFTPLQLQELERIFQREQFPSEFLRRRLARSMNVTELAVQIWFENRRAKWRRHQRALMARNMLPFMAVGQPVMVTAAEAITAPLFISGMRDDYFWDHSHSSSLCFPMPPFPPPSLPLPLMLLPPMPPAGQAEFGPFPFVIVPSFTFPNV

SEQ ID NO: 73679 - protein, 288 aa, Homo sapiens
  Payload ID: 14580
  Gene Symbol: RHOXF2B
  Gene Name: Rhox homeobox family, member 2B
  Uniprot ID: P0C7M4
  ENSP ID: ENSP00000360455
MEPPDQCSQYMTSLLSPAVDDEKELQDMNAMVLSLTEEVKEEEEDAQPEPEQGTAAGEKLKSAGAQGGEEKDGGGEEKDGGGAGVPGHLWEGNLEGTSGSDGNVEDSDQSEKEPGQQYSRPQGAVGGLEPGNAQQPNVHAFTPLQLQELECIFQREQFPSEFLRRRLARSMNVTELAVQIWFENRRAKWRRHQRALMARNMLPFMAVGQPVMVTAAEAITAPLFISGMRDDYFWDHSHSSSLCFPMPPFPPPSLPLPLMLLPPMPPAGQAEFGPFPFVIVPSFTFPNV

SEQ ID NO: 73680 - protein, 181 aa, Homo sapiens
  Payload ID: 14581
  Gene Symbol: RIBC1
  Gene Name: RIB43A domain with coiled-coils 1
  ENSP ID: ENSP00000332142
MYNIKQSTDTKEAAAIEARRNREKERQNRFFNVRNRVMGVDVQALNNQVGDRKRREAAERSKEAAYGTSQVQYDVVVQMLEKEEADRTRQLAKKVQEFREQKQQLKNGREFSLWDPGQVWKGLPTYLSYSNTYPGPASLQYFSGEDLDRDTRLRMQQGQFRYNLERQQQEQQQAKVDENYT

SEQ ID NO: 73681 - protein, 379 aa, Homo sapiens
  Payload ID: 14581
  Gene Symbol: RIBC1
  Gene Name: RIB43A domain with coiled-coils 1
  Uniprot ID: Q8N443
  ENSP ID: ENSP00000364476
MYNIKQSTDTKEAAAIEARRNREKERQNRFFNVRNRVMGVDVQALNNQVGDRKRREAAERSKEAAYGTSQVQYDVVVQMLEKEEADRTRQLAKKVQEFREQKQQLKNGREFSLWDPGQVWKGLPTYLSYSNTYPGPASLQYFSGEDLDRDTRLRMQQGQFRYNLERQQQEQQQAKVDENYTDALSNQLRLAMDAQATHLARLEESCRAAMMCAMANANKAQAAVQAGRQRCERQREQKANLAEIQHQSTSDLLTENPQVAQHPMAPYRVLPYCWKGMTPEQQAAIRKEQEVQRSKKQAHRQAEKTLDTEWKSQTMSSAQAVLELEEQERELCAVFQRGLGSFNQQLANEQKAQQDYLNSVIYTNQPTAQYHQQFNTSSR

SEQ ID NO: 73682 - protein, 238 aa, Homo sapiens
  Payload ID: 14581
  Gene Symbol: RIBC1
  Gene Name: RIB43A domain with coiled-coils 1
  Uniprot ID: Q8N443
  ENSP ID: ENSP00000401463
MYNIKQSTDTKEAAAIEARRNREKERQNRFFNVRNRVMGVDVQALNNQVGDRKRREAAERSKEAAYDALSNQLRLAMDAQATHLARLEESCRAAMMCAMANANKAQAAVQAGRQRCERQREQKANLAEIQHQSTSDLLTENPQVAQHPMAPYRVLPYCWKGMTPEQQAAIRKEQEVQRSKKQAHRQAEKTLDTEWKSQTMSSAQAVLELEEQERELCAVFQRGLGSFNQQLANEQKAQ

SEQ ID NO: 73683 - protein, 192 aa, Homo sapiens
  Payload ID: 14581
  Gene Symbol: RIBC1
  Gene Name: RIB43A domain with coiled-coils 1
  Uniprot ID: Q8N443
  ENSP ID: ENSP00000402080
MYNIKQSTDTKEAAAIEARRNREKERQNRFFNVRNRVMGVDVQALNNQVGDRKRREAAERSKEAAYGTSQVQYDVVVQMLEKEEADRTRQLAKKVQEFREQKQQLKNGREFSLWDPGQVWKGLPTYLSYSNTYPGPASLQYFSGEDLDRDTRLRMQQGQFRYNLERQQQEQQQAKVDENYTGKQPGPPDSET

SEQ ID NO: 73684 - protein, 382 aa, Homo sapiens
  Payload ID: 14582
  Gene Symbol: RIBC2
  Gene Name: RIB43A domain with coiled-coils 2
  ENSP ID: ENSP00000483356
MGSQTMAVALPRDLRQDANLAKRRHAELCRQKRVFNARNRIIGGDTEAWDVQVHDQKIKEATEKARHETFAAEMRQNDKIMCILENRKKRDRKNLCRAINDFQQSFQKPETRREFDLSDPLALKKDLPARQSDNDVRNTISGMQKFMGEDLNFHERKKFQEEQNREWSLQQQREWKNARAEQKCAEALYTETRLQFDETAKHLQKLESTTRKAVCASVKDFNKSQAIESVERKKQEKKQEQEDNLAEITNLLRGDLLSENPQQAASSFGPHRVVPDRWKGMTQEQLEQIRLVQKQQIQEKLRLQEEKRQRDLDWDRRRIQGARATLLFERQQWRRQRDLRRALDSSNLSLAKEQHLQKKYMNEVYTNQPTGDYFTQFNTGSR

SEQ ID NO: 73685 - protein, 155 aa, Homo sapiens
  Payload ID: 14583
  Gene Symbol: RFK
  Gene Name: riboflavin kinase
  Uniprot ID: Q969G6
  ENSP ID: ENSP00000365926
MRHLPYFCRGQVVRGFGRGSKQLGIPTANFPEQVVDNLPADISTGIYYGWASVGSGDVHKMVVSIGWNPYYKNTKKSMETHIMHTFKEDFYGEILNVAIVGYLRPEKNFDSLESLISAIQGDIEEAKKRLELPEHLKIKEDNFFQVSKSKIMNGH

SEQ ID NO: 73686 - protein, 120 aa, Homo sapiens
  Payload ID: 14583
  Gene Symbol: RFK
  Gene Name: riboflavin kinase
  ENSP ID: ENSP00000417215
RGFGRGSKQLGIPTANFPEQVVDNLPADISTGIYYGWASVGSGDVHKMVVSIGWNPYYKNTKKSMETHIMHTFKEDFYGEILNVAIVGYLRPEKNFDSLAGWLLLSSGMKLMKSFKMCEV

SEQ ID NO: 73687 - protein, 322 aa, Homo sapiens [sequence omitted]

SEQ ID NO: 73688 - protein, 147 aa, Homo sapiens
  Payload ID: 14584
  Gene Symbol: RBKS
  Gene Name: ribokinase
  ENSP ID: ENSP00000393558
  MOD_RES (1)..(1): Any amino acid
XNVISRAKVMVCQLEITPATSLEALTMARRSGVKTLFNPAPAIADLDPQFYTLSDVFCCNESEAEILTGLTVGSAADAGEAALVLLKRGCQVVIITLGAEGCVVLSQTEPEPKHIPTEKVKAVDTTCRPGSRPKSEAASVKKQKHYK

SEQ ID NO: 73689 - protein, 63 aa, Homo sapiens
  Payload ID: 14584
  Gene Symbol: RBKS
  Gene Name: ribokinase
  ENSP ID: ENSP00000413789
MAASGEPQRQWQEEVAAVVVVGSCMTDLVRRMCMRICYVHFCCQPTPQLQNCSSLCVITCQEN

SEQ ID NO: 73690 - protein, 36 aa, Homo sapiens
  Payload ID: 14584
  Gene Symbol: RBKS
  Gene Name: ribokinase
  ENSP ID: ENSP00000415975
MAASGEPQRQWQEEVAAVVVVGSCMTDLVRRYIRTQ

SEQ ID NO: 73691 - protein, 18 aa, Homo sapiens
  Payload ID: 14584
  Gene Symbol: RBKS
  Gene Name: ribokinase
  ENSP ID: ENSP00000483033
VLSLYLFCKSKTKKNVLV

SEQ ID NO: 73692 - protein, 286 aa, Homo sapiens
  Payload ID: 14585
  Gene Symbol: RNASEH1
  Gene Name: ribonuclease H1
  Uniprot ID: O60930
  ENSP ID: ENSP00000313350
MSWLLFLAHRVALAALPCRRGSRGFGMFYAVRRGRKTGVFLTWNECRAQVDRFPAARFKKFATEDEAWAFVRKSASPEVSEGHENQHGQESEAKASKRLREPLDGDGHESAEPYAKHMKPSVEPAPPVSRDTFSYMGDFVVVYTDGCCSSNGRRRPRAGIGVYWGPGHPLNVGIRLPGRQTNQRAEIHAACKAIEQAKTQNINKLVLYTDSMFTINGITNWVQGWKKNGWKTSAGKEVINKEDFVALERLTQGMDIQWMHVPGHSGFIGNEEADRLAREGAKQSED

SEQ ID NO: 73693 - protein, 43 aa, Homo sapiens
  Payload ID: 14585
  Gene Symbol: RNASEH1
  Gene Name: ribonuclease H1
  ENSP ID: ENSP00000404926
MSWLLFLAHRVALAALPCRRGSRGFGMFYAVRRGRKTGVFLTW

SEQ ID NO: 73694 - protein, 43 aa, Homo sapiens
  Payload ID: 14585
  Gene Symbol: RNASEH1
  Gene Name: ribonuclease H1
  ENSP ID: ENSP00000411646
MSWLLFLAHRVALAALPCRRGSRGFGMFYAVRRGRKTGVFLTC

SEQ ID NO: 73695 - protein, 299 aa, Homo sapiens
  Payload ID: 14586
  Gene Symbol: RNASEH2A
  Gene Name: ribonuclease H2, subunit A
  Uniprot ID: O75792
  ENSP ID: ENSP00000221486
MDLSELERDNTGRCRLSSPVPAVCRKEPCVLGVDEAGRGPVLGPMVYAICYCPLPRLADLEALKVADSKTLLESERERLFAKMEDTDFVGWALDVLSPNLISTSMLGRVKYNLNSLSHDTATGLIQYALDQGVNVTQVFVDTVGMPETYQARLQQSFPGIEVTVKAKADALYPVVSAASICAKVARDQAVKKWQFVEKLQDLDTDYGSGYPNDPKTKAWLKEHVEPVFGFPQFVRFSWRTAQTILEKEAEDVIWEDSASENQEGLRKITSYFLNEGSQARPRSSHRYFLERGLESATSL

SEQ ID NO: 73696 - protein, 312 aa, Homo sapiens
  Payload ID: 14587
  Gene Symbol: RNASEH2B
  Gene Name: ribonuclease H2, subunit B
  Uniprot ID: Q5TBB1
  ENSP ID: ENSP00000337623
MAAGVDCGDGVGARQHVFLVSEYLKDASKKMKNGLMFVKLVNPCSGEGAIYLFNMCLQQLFEVKVFKEKHHSWFINQSVQSGGLLHFATPVDPLFLLLHYLIKADKEGKFQPLDQVVVDNVFPNCILLLKLPGLEKLLHHVTEEKGNPEIDNKKYYKYSKEKTLKWLEKKVNQTVAALKTNNVNVSSRVQSTAFFSGDQASTDKEEDYIRYAHGLISDYIPKELSDDLSKYLKLPEPSASLPNPPSKKIKLSDEPVEAKEDYTKFNTKDLKTEKKNSKMTAAQKALAKVDKSGMKSIDTFFGVKNKKKIGKV

SEQ ID NO: 73697 - protein, 257 aa, Homo sapiens
  Payload ID: 14587
  Gene Symbol: RNASEH2B
  Gene Name: ribonuclease H2, subunit B
  Uniprot ID: Q5TBB1
  ENSP ID: ENSP00000389877
MAAGVDCGDGVGARQHVFLVSEYLKDASKKMKNGLMFVKLVNPCSGEGAIYLFNMCLQQLFEVKVFKEKHHSWFINQSVQSGGLLHFATPVDPLFLLLHYLIKADKEGKFQPLDQVVVDNVFPNCILLLKLPGLEKLLHHVTEEKGNPEIDNKKYYKYSKEKTLKWLEKKVNQTVAALKTNNVNVSSRVQSTAFFSGDQASTDKEEDYIRYAHGLISDYIPKELSDDLSKYLKLPEPSASLPNPPSKMAAQRQKRGK

SEQ ID NO: 73698 - protein, 332 aa, Homo sapiens
  Payload ID: 14587
  Gene Symbol: RNASEH2B
  Gene Name: ribonuclease H2, subunit B
  ENSP ID: ENSP00000481236
MAAGVDCGDGVGARQHVFLVSEYLKDASKKMKNGLMFVKLVNPCSGEGAIYLFNMCLQQLFEVKVFKEKHHSWFINQSVQSGGLLHFATPVDPLFLLLHYLIKADKEGKFQPLDQVVVDNVFPNCILLLKLPGLEKLLHHVTEEKGNPEIDNKKYYKYSKEKTLKWLEKKVNQTVAALKTNNVNVSSRVQSTAFFSGDQASTDKEEDYIRYAHGLISDYIPKELSDDLSKYLKLPEPSASLPNPPSKKIKLSDEPVEAKEDYTKFNTKDLKTEKKNSKMTAAQKALAKVDKSGMKSIDTFFGVKNKKLERFETLKIKSSKNICFLHVSVCPS

SEQ ID NO: 73699 - protein, 84 aa, Homo sapiens
  Payload ID: 14587
  Gene Symbol: RNASEH2B
  Gene Name: ribonuclease H2, subunit B
  ENSP ID: ENSP00000482701
  MOD_RES (1)..(1): Any amino acid
XDYIRYAHGLISDYIPKELSDDLSKYLKLPEPSASLPNPPSKKIKLSDEPVEAKEDYTKFNTKDLKTEKVCGFRCSGVSFILSA

SEQ ID NO: 73700 - protein, 164 aa, Homo sapiens
  Payload ID: 14588
  Gene Symbol: RNASEH2C
  Gene Name: ribonuclease H2, subunit C
  Uniprot ID: Q8TDP1
  ENSP ID: ENSP00000308193
MESGDEAAIERHRVHLRSATLRDAVPATLHLLPCEVAVDGPAPVGRFFTPAIRQGPEGLEVSFRGRCLRGEEVAVPPGLVGYVMVTEEKKVSMGKPDPLRDSGTDDQEEEPLERDFDRFIGATANFSRFTLWGLETIPGPDAKVRGALTWPSLAAAIHAQVPED

SEQ ID NO: 73701 - protein, 81 aa, Homo sapiens
  Payload ID: 14588
  Gene Symbol: RNASEH2C
  Gene Name: ribonuclease H2, subunit C
  ENSP ID: ENSP00000431555
MVTEEKKVSMGKPDPLRDSGTDDQEEEPLERDFDRFIGATANFSRFTLWGLETIPGPDAKVRGALTWPSLAAAIHAQVPED

SEQ ID NO: 73702 - protein, 129 aa, Homo sapiens
  Payload ID: 14588
  Gene Symbol: RNASEH2C
  Gene Name: ribonuclease H2, subunit C
  ENSP ID: ENSP00000432081
  MOD_RES (1)..(1): Any amino acid
XRAAPGSTQRGSCLRPFAPPAPGLEVSFRGRCLRGEEVAVPPGLVGYVMVTEEKKVSMGKPDPLRDSGTDDQEEEPLERDFDRFIGATANFSRFTLWGLETIPGPDAKVRGALTWPSLAAAIHAQVPED

SEQ ID NO: 73703 - protein, 247 aa, Homo sapiens
  Payload ID: 14588
  Gene Symbol: RNASEH2C
  Gene Name: ribonuclease H2, subunit C
  ENSP ID: ENSP00000432897
MESGDEAAIERHRVHLRSATLRDAVPATLHLLPCEVAVDGPAPVGRFFTPAIRQGPEGLEVSFRGRCLRGEEVAVPPGLVGYVMVTEEKKVSMGKPDPLRDSGTDDQEEEPLERDFDRFIGATANFSRFTLWGLETIPGPDAKVRGALTWPSLAAAVSRRGVPSCPRVDGLGSTIAQTEPGGFYWVVCGKRSSLTTLPSMSRSGYSEQLGPSSGMGASLPPCLTSPTVEATPVADSRTGARGLRTRA

SEQ ID NO: 73704 - protein, 124 aa, Homo sapiens
  Payload ID: 14588
  Gene Symbol: RNASEH2C
  Gene Name: ribonuclease H2, subunit C
  ENSP ID: ENSP00000434996
  MOD_RES (1)..(1): Any amino acid
XSTQRGSCLRPFAPPAPGLEVSFRGRCLRGEEVAVPPGLVGYVMVTEEKKVSMGKPDPLRDSGTDDQEEEPLERDFDRFIGATANFSRFTLWGLETIPGPDAKVRGALTWPSLAAAIHAQVPED

SEQ ID NO: 73705 - protein, 158 aa, Homo sapiens
  Payload ID: 14588
  Gene Symbol: RNASEH2C
  Gene Name: ribonuclease H2, subunit C
  ENSP ID: ENSP00000435717
  MOD_RES (1)..(1): Any amino acid
XAIERHRVHLRSATLRDAVPATLHLLPCEVAVDGPAPVGRFFTPAIRQGPEGLEVSFRGRCLRGEEVAVPPGLVGYVMVTEEKKVSMGKPDPLRDSGTDDQEEEPLERDFDRFIGATANFSRFTLWGLETIPGPDAKVRGALTWPSLAAAIHAQVPED

SEQ ID NO: 73706 - protein, 741 aa, Homo sapiens
  Payload ID: 14589
  Gene Symbol: RNASEL
  Gene Name: ribonuclease L (2',5'-oligoisoadenylate synthetase-dependent)
  Uniprot ID: Q05823
  ENSP ID: ENSP00000356530
MESRDHNNPQEGPTSSSGRRAAVEDNHLLIKAVQNEDVDLVQQLLEGGANVNFQEEEGGWTPLHNAVQMSREDIVELLLRHGADPVLRKKNGATPFILAAIAGSVKLLKLFLSKGADVNECDFYGFTAFMEAAVYGKVKALKFLYKRGANVNLRRKTKEDQERLRKGGATALMDAAEKGHVEVLKILLDEMGADVNACDNMGRNALIHALLSSDDSDVEAITHLLLDHGADVNVRGERGKTPLILAVEKKHLGLVQRLLEQEHIEINDTDSDGKTALLLAVELKLKKIAELLCKRGASTDCGDLVMTARRNYDHSLVKVLLSHGAKEDFHPPAEDWKPQSSHWGAALKDLHRIYRPMIGKLKFFIDEKYKIADTSEGGIYLGFYEKQEVAVKTFCEGSPRAQREVSCLQSSRENSHLVTFYGSESHRGHLFVCVTLCEQTLEACLDVHRGEDVENEEDEFARNVLSSIFKAVQELHLSCGYTHQDLQPQNILIDSKKAAHLADFDKSIKWAGDPQEVKRDLEDLGRLVLYVVKKGSISFEDLKAQSNEEVVQLSPDEETKDLIHRLFHPGEHVRDCLSDLLGHPFFWTWESRYRTLRNVGNESDIKTRKSESEILRLLQPGPSEHSKSFDKWTTKINECVMKKMNKFYEKRGNFYQNTVGDLLKFIRNLGEHIDEEKHKKMKLKIGDPSLYFQKTFPDLVIYVYTKLQNTEYRKHFPQTHSPNKPQCDGAGGASGLASPGC

SEQ ID NO: 73707 - protein, 652 aa, Homo sapiens
  Payload ID: 14589
  Gene Symbol: RNASEL
  Gene Name: ribonuclease L (2',5'-oligoisoadenylate synthetase-dependent)
  Uniprot ID: Q05823
  ENSP ID: ENSP00000440844
MESRDHNNPQEGPTSSSGRRAAVEDNHLLIKAVQNEDVDLVQQLLEGGANVNFQEEEGGWTPLHNAVQMSREDIVELLLRHGADPVLRKKNGATPFILAAIAGSVKLLKLFLSKGADVNECDFYGFTAFMEAAVYGKVKALKFLYKRGANVNLRRKTKEDQERLRKGGATALMDAAEKGHVEVLKILLDEMGADVNACDNMGRNALIHALLSSDDSDVEAITHLLLDHGADVNVRGERGKTPLILAVEKKHLGLVQRLLEQEHIEINDTDSDGKTALLLAVELKLKKIAELLCKRGASTDCGDLVMTARRNYDHSLVKVLLSHGAKEDFHPPAEDWKPQSSHWGAALKDLHRIYRPMIGKLKFFIDEKYKIADTSEGGIYLGFYEKQEVAVKTFCEGSPRAQREVSCLQSSRENSHLVTFYGSESHRGHLFVCVTLCEQTLEACLDVHRGEDVENEEDEFARNVLSSIFKAVQELHLSCGYTHQDLQPQNILIDSKKAAHLADFDKSIKWAGDPQEVKRDLEDLGRLVLYVVKKGSISFEDLKAQSNEEVVQLSPDEETKDLIHRLFHPGEHVRDCLSDLLGHPFFWTWESRYRTLRNVGNESDIKTRKSESEILRLLQPGPSEHSKSFDKWTTKMSKLRHRQIIFPTTQNQ

SEQ ID NO: 73708 - protein, 124 aa, Homo sapiens
  Payload ID: 14590
  Gene Symbol: RPP14
  Gene Name: ribonuclease P/MRP 14kDa subunit
  Uniprot ID: O95059
  ENSP ID: ENSP00000295959
MPAPAATYERVVYKNPSEYHYMKVCLEFQDCGVGLNAAQFKQLLISAVKDLFGEVDAALPLDILTYEEKTLSAILRICSSGLVKLWSSLTLLGSYKGKKCAFRVIQVSPFLLALSGNSRELVLD

SEQ ID NO: 73709 - protein, 124 aa, Homo sapiens; identical to SEQ ID NO: 73708
  Payload ID: 14590
  Gene Symbol: RPP14
  Gene Name: ribonuclease P/MRP 14kDa subunit
  Uniprot ID: O95059
  ENSP ID: ENSP00000412894

SEQ ID NO: 73710 - protein, 124 aa, Homo sapiens; identical to SEQ ID NO: 73708
  Payload ID: 14590
  Gene Symbol: RPP14
  Gene Name: ribonuclease P/MRP 14kDa subunit
  Uniprot ID: O95059
  ENSP ID: ENSP00000419909

SEQ ID NO: 73711 - protein, 154 aa, Homo sapiens
  Payload ID: 14591
  Gene Symbol: RPP21
  Gene Name: ribonuclease P/MRP 21kDa subunit
  Uniprot ID: Q9H633
  ENSP ID: ENSP00000365829
MAGPVKDREAFQRLNFLYQAAHCVLAQDPENQALARFYCYTERTIAKRLVLRRDPSVKRTLCRGCSSLLVPGLTCTQRQRRCRGQRWTVQTCLTCQRSQRFLNDPGHLLWGDRPEAQLGSQADSKPLQPLPNTAHSISDRLPEEKMQTQGSSNQ

SEQ ID NO: 73712 - protein, 177 aa, Homo sapiens
  Payload ID: 14591
  Gene Symbol: RPP21
  Gene Name: ribonuclease P/MRP 21kDa subunit
  ENSP ID: ENSP00000388494
MAGPVKDREAFQRLNFLYQVSLRQGPHGDGARRPRVTAPLPQAAHCVLAQDPENQALARFYCYTERTIAKRLVLRRDPSVKRTLCRGCSSLLVPGLTCTHRQRRCRGQRWTVQTCLTCQRSQRFLNDPGHLLWGDRPEAQLGSQADSKPLQPLPNTAHSISDRLPEEKMQTQGSSNQ

SEQ ID NO: 73713 - protein, 177 aa, Homo sapiens; identical to SEQ ID NO: 73712
  Payload ID: 14591
  Gene Symbol: RPP21
  Gene Name: ribonuclease P/MRP 21kDa subunit
  ENSP ID: ENSP00000389565

SEQ ID NO: 73714 - protein, 177 aa, Homo sapiens; identical to SEQ ID NO: 73712
  Payload ID: 14591
  Gene Symbol: RPP21
  Gene Name: ribonuclease P/MRP 21kDa subunit
  ENSP ID: ENSP00000391247

SEQ ID NO: 73715 - protein, 177 aa, Homo sapiens
  Payload ID: 14591
  Gene Symbol: RPP21
  Gene Name: ribonuclease P/MRP 21kDa subunit
  Uniprot ID: Q9H633
  ENSP ID: ENSP00000394320
MAGPVKDREAFQRLNFLYQVSLRQGPHGDGARRPRVTAPLPQAAHCVLAQDPENQALARFYCYTERTIAKRLVLRRDPSVKRTLCRGCSSLLVPGLTCTQRQRRCRGQRWTVQTCLTCQRSQRFLNDPGHLLWGDRPEAQLGSQADSKPLQPLPNTAHSISDRLPEEKMQTQGSSNQ

SEQ ID NO: 73716 - protein, 144 aa, Homo sapiens
  Payload ID: 14591
  Gene Symbol: RPP21
  Gene Name: ribonuclease P/MRP 21kDa subunit
  Uniprot ID: Q9H633
  ENSP ID: ENSP00000397778
MAGPVKDREAFQRLNFLYQAAHCVLAQDPENQALARFYCYTERTIAKRLVLRRDPSVKRTLCRGCSSLLVPGLTCTQRQRRCRGQRWTVQTCLTCQRSQRFLNDPGHLLWGDRPEAQLGSQAGERFQTTTTLAKHSPLHFRPPS

SEQ ID NO: 73717 - protein, 154 aa, Homo sapiens [sequence omitted]

SEQ ID NO: 73718 - protein, 154 aa, Homo sapiens; identical to SEQ ID NO: 73711
  Payload ID: 14591
  Gene Symbol: RPP21
  Gene Name: ribonuclease P/MRP 21kDa subunit
  Uniprot ID: Q9H633
  ENSP ID: ENSP00000399295

SEQ ID NO: 73719 - protein, 162 aa, Homo sapiens
  Payload ID: 14591
  Gene Symbol: RPP21
  Gene Name: ribonuclease P/MRP 21kDa subunit
  ENSP ID: ENSP00000401788
MAGPVKDREAFQRLNFLYQAAHCVLAQDPENQALARFYCYTERTIAKRLVLRRPLSSSAPRDPSVKRTLCRGCSSLLVPGLTCTHRQRRCRGQRWTVQTCLTCQRSQRFLNDPGHLLWGDRPEAQLGSQADSKPLQPLPNTAHSISDRLPEEKMQTQGSSNQ

SEQ ID NO: 73720 - protein, 144 aa, Homo sapiens; identical to SEQ ID NO: 73716
  Payload ID: 14591
  Gene Symbol: RPP21
  Gene Name: ribonuclease P/MRP 21kDa subunit
  Uniprot ID: Q9H633
  ENSP ID: ENSP00000403747

SEQ ID NO: 73721 - protein, 154 aa, Homo sapiens; identical to SEQ ID NO: 73711
  Payload ID: 14591
  Gene Symbol: RPP21
  Gene Name: ribonuclease P/MRP 21kDa subunit
  Uniprot ID: Q9H633
  ENSP ID: ENSP00000403833

SEQ ID NO: 73722 - protein, 154 aa, Homo sapiens
  Payload ID: 14591
  Gene Symbol: RPP21
  Gene Name: ribonuclease P/MRP 21kDa subunit
  ENSP ID: ENSP00000404260
MAGPVKDREAFQRLNFLYQAAHCVLAQDPENQALARFYCYTERTIAKRLVLRRDPSVKRTLCRGCSSLLVPGLTCTQRQRRCRGQRWTVQTCLTCQRSQRFLNDPGHLLWGDRPEAQLGSQADSKPLQPLPNTAHSISDRLPEEKMQTKGSSNQ

SEQ ID NO: 73723 - protein, 154 aa, Homo sapiens [sequence omitted]

SEQ ID NO: 73724 - protein, 177 aa, Homo sapiens
  Payload ID: 14591
  Gene Symbol: RPP21
  Gene Name: ribonuclease P/MRP 21kDa subunit
  ENSP ID: ENSP00000405035
MAGPVKDREAFQRLNFLYQVSLRQGPHGDGARRPRVTAPLPQAAHCVLAQDPENQALARFYCYTERTIAKRLVLRRDPSVKRTLCRGCSSLLVPGLTCTQRQRRCRGQRWTVQTCLTCQRSQRFLNDPGHLLWGDRPEAQLGSQADSKPLQPLPNTAHSISDRLPEEKMQTKGSSNQ

SEQ ID NO: 73725 - protein, 144 aa, Homo sapiens
  Payload ID: 14591
  Gene Symbol: RPP21
  Gene Name: ribonuclease P/MRP 21kDa subunit
  ENSP ID: ENSP00000405448
MAGPVKDREAFQRLNFLYQAAHCVLAQDPENQALARFYCYTERTIAKRLVLRRDPSVKRTLCRGCSSLLVPGLTCTHRQRRCRGQRWTVQTCLTCQRSQRFLNDPGHLLWGDRPEAQLGSQAGERFQTTTTLAKHSPLHFRPPS

SEQ ID NO: 73726 - protein, 162 aa, Homo sapiens
  Payload ID: 14591
  Gene Symbol: RPP21
  Gene Name: ribonuclease P/MRP 21kDa subunit
  Uniprot ID: Q9H633
  ENSP ID: ENSP00000405834
MAGPVKDREAFQRLNFLYQAAHCVLAQDPENQALARFYCYTERTIAKRLVLRRPLSSSAPRDPSVKRTLCRGCSSLLVPGLTCTQRQRRCRGQRWTVQTCLTCQRSQRFLNDPGHLLWGDRPEAQLGSQADSKPLQPLPNTAHSISDRLPEEKMQTQGSSNQ

SEQ ID NO: 73727 - protein, 162 aa, Homo sapiens; identical to SEQ ID NO: 73719
  Payload ID: 14591
  Gene Symbol: RPP21
  Gene Name: ribonuclease P/MRP 21kDa subunit
  ENSP ID: ENSP00000408577

SEQ ID NO: 73728 - protein, 144 aa, Homo sapiens; identical to SEQ ID NO: 73716
  Payload ID: 14591
  Gene Symbol: RPP21
  Gene Name: ribonuclease P/MRP 21kDa subunit
  Uniprot ID: Q9H633
  ENSP ID: ENSP00000408610

SEQ ID NO: 73729 - protein, 162 aa, Homo sapiens; identical to SEQ ID NO: 73726
  Payload ID: 14591
  Gene Symbol: RPP21
  Gene Name: ribonuclease P/MRP 21kDa subunit
  Uniprot ID: Q9H633
  ENSP ID: ENSP00000409193

SEQ ID NO: 73730 - protein, 162 aa, Homo sapiens; identical to SEQ ID NO: 73726
  Payload ID: 14591
  Gene Symbol: RPP21
  Gene Name: ribonuclease P/MRP 21kDa subunit
  Uniprot ID: Q9H633
  ENSP ID: ENSP00000409799

SEQ ID NO: 73731 - protein, 144 aa, Homo sapiens; identical to SEQ ID NO: 73725
  Payload ID: 14591
  Gene Symbol: RPP21
  Gene Name: ribonuclease P/MRP 21kDa subunit
  ENSP ID: ENSP00000410328

SEQ ID NO: 73732 - protein, 144 aa, Homo sapiens; identical to SEQ ID NO: 73716
  Payload ID: 14591
  Gene Symbol: RPP21
  Gene Name: ribonuclease P/MRP 21kDa subunit
  Uniprot ID: Q9H633
  ENSP ID: ENSP00000411003

SEQ ID NO: 73733 - protein, 162 aa, Homo sapiens
  Payload ID: 14591
  Gene Symbol: RPP21
  Gene Name: ribonuclease P/MRP 21kDa subunit
  ENSP ID: ENSP00000412056
MAGPVKDREAFQRLNFLYQAAHCVLAQDPENQALARFYCYTERTIAKRLVLRRPLSSSAPRDPSVKRTLCRGCSSLLVPGLTCTQRQRRCRGQRWTVQTCLTCQRSQRFLNDPGHLLWGDRPEAQLGSQADSKPLQPLPNTAHSISDRLPEEKMQTKGSSNQ

SEQ ID NO: 73734 - protein, 144 aa, Homo sapiens; identical to SEQ ID NO: 73725
  Payload ID: 14591
  Gene Symbol: RPP21
  Gene Name: ribonuclease P/MRP 21kDa subunit
  ENSP ID: ENSP00000412174

SEQ ID NO: 73735 - protein, 177 aa, Homo sapiens; identical to SEQ ID NO: 73715
  Payload ID: 14591
  Gene Symbol: RPP21
  Gene Name: ribonuclease P/MRP 21kDa subunit
  Uniprot ID: Q9H633
  ENSP ID: ENSP00000412619

SEQ ID NO: 73736 - protein, 154 aa, Homo sapiens [sequence omitted]

SEQ ID NO: 73737 - protein, 177 aa, Homo sapiens; identical to SEQ ID NO: 73715
  Payload ID: 14591
  Gene Symbol: RPP21
  Gene Name: ribonuclease P/MRP 21kDa subunit
  Uniprot ID: Q9H633
  ENSP ID: ENSP00000415046

SEQ ID NO: 73738 - protein, 162 aa, Homo sapiens; identical to SEQ ID NO: 73719
  Payload ID: 14591
  Gene Symbol: RPP21
  Gene Name: ribonuclease P/MRP 21kDa subunit
  ENSP ID: ENSP00000416194

SEQ ID NO: 73739 - protein, 199 aa, Homo sapiens
  Payload ID: 14592
  Gene Symbol: RPP25
  Gene Name: ribonuclease P/MRP 25kDa subunit
  Uniprot ID: Q9BUL9
  ENSP ID: ENSP00000317691
MENFRKVRSEEAPAGCGAEGGGPGSGPFADLAPGAVHMRVKEGSKIRNLMAFATASMAQPATRAIVFSGCGRATTKTVTCAEILKRRLAGLHQVTRLRYRSVREVWQSLPPGPTQGQTPGEPAASLSVLKNVPGLAILLSKDALDPRQPGYQPPNPHPGPSSPPAAPASKRSLGEPAAGEGSAKRSQPEPGVADEDQTA

SEQ ID NO: 73740 - protein, 163 aa, Homo sapiens
  Payload ID: 14593
  Gene Symbol: RPP25L
  Gene Name: ribonuclease P/MRP 25kDa subunit-like
  Uniprot ID: Q8N5L8
  ENSP ID: ENSP00000297613
MEHYRKAGSVELPAPSPMPQLPPDTLEMRVRDGSKIRNLLGLALGRLEGGSARHVVFSGSGRAAGKAVSCAEIVKRRVPGLHQLTKLRFLQTEDSWVPASPDTGLDPLTVRRHVPAVWVLLSRDPLDPNECGYQPPGAPPGLGSMPSSSCGPRSRRRARDTRS

SEQ ID NO: 73741 - protein, 163 aa, Homo sapiens; identical to SEQ ID NO: 73740
  Payload ID: 14593
  Gene Symbol: RPP25L
  Gene Name: ribonuclease P/MRP 25kDa subunit-like
  Uniprot ID: Q8N5L8
  ENSP ID: ENSP00000368242

SEQ ID NO: 73742 - protein, 254 aa, Homo sapiens
  Payload ID: 14594
  Gene Symbol: RPP30
  Gene Name: ribonuclease P/MRP 30kDa subunit
  ENSP ID: ENSP00000277882
MAVFADLDLRAGSDLKALRGLVETAAHRELPRLRAWPTSCHPDHRATLRIGYSVVAINHIVDFKEKKQEIEKPVAVSELFTTLPIVQGKSRPIKILTRLTIIVSDPSHCNVLRATSSRARLYDVVAVFPKTEKLFHIACTHLDVDLVCITVTEKLPFYFKRPPINVAIDRGLAFELVYSPAIKDSTMRRYTISSALNLMQICKGKNVIISSAAERPLEIRGPYDVANLGLLFGLSESDAKAAVSTNCRAALLHG

SEQ ID NO: 73743 - protein, 268 aa, Homo sapiens
  Payload ID: 14594
  Gene Symbol: RPP30
  Gene Name: ribonuclease P/MRP 30kDa subunit
  Uniprot ID: P78346
  ENSP ID: ENSP00000360768
MAVFADLDLRAGSDLKALRGLVETAAHLGYSVVAINHIVDFKEKKQEIEKPVAVSELFTTLPIVQGKSRPIKILTRLTIIVSDPSHCNVLRATSSRARLYDVVAVFPKTEKLFHIACTHLDVDLVCITVTEKLPFYFKRPPINVAIDRGLAFELVYSPAIKDSTMRRYTISSALNLMQICKGKNVIISSAAERPLEIRGPYDVANLGLLFGLSESDAKAAVSTNCRAALLHGETRKTAFGIISTVKKPRPSEGDEDCLPASKKAKCEG

SEQ ID NO: 73744 - protein, 322 aa, Homo sapiens
  Payload ID: 14594
  Gene Symbol: RPP30
  Gene Name: ribonuclease P/MRP 30kDa subunit
  Uniprot ID: P78346
  ENSP ID: ENSP00000389182
MAVFADLDLRAGSDLKALRGLVETAAHLGYSVVAINHIVDFKEKKQEIEKPVAVSELFTTLPIVQGKSRPIKILTRLTIIVSDPSHCNVLRATSSRARLYDVVAVFPKTEKLFHIACTHLDVDLVCITVTEKLPFYFKRPPINVAIDRGLAFELVYSPAIKDSTMRRYTISSALNLMQICKGKNVIISSAAERPLEIRGPYDVANLGLLFGLSESDAKAAVSTNCRAALLHGETRKTAFGIISTVKKPRPSEGDEDCLPASKKAKWSHSVTQAGVQWHNLGSLQPLPLGLKPSSHLSLPRTRIQQRQLLISHQRDHTPKNRL

SEQ ID NO: 73745 - protein, 212 aa, Homo sapiens
  Payload ID: 14594
  Gene Symbol: RPP30
  Gene Name: ribonuclease P/MRP 30kDa subunit
  ENSP ID: ENSP00000407972
EIEKPVAVSELFTTLPIVQGKSRPIKILTRLTIIVSDPSHCNVLRATSSRARLYDVVAVFPKTEKLFHIACTHLDVDLVCITVTEKLPFYFKRPPINVAIDRGLAFELVYSPAIKDSTMRRYTISSALNLMQICKGKPLEIRGPYDVANLGLLFGLSESDAKAAVSTNCRAALLHGETRKTAFGIISTVKKPRPSEGDEDCLPASKKAKCEG

SEQ ID NO: 73746 - protein, 283 aa, Homo sapiens
  Payload ID: 14595
  Gene Symbol: RPP38
  Gene Name: ribonuclease P/MRP 38kDa subunit
  Uniprot ID: P78345
  ENSP ID: ENSP00000367439
MAAAPQAPGRGSLRKTRPLVVKTSLNNPYIIRWSALESEDMHFILQTLEDRLKAIGLQKIEDKKKKNKTPFLKKESREKCSIAVDISENLKEKKTDAKQQVSGWTPAHVRKQLAIGVNEVTRALERRELLLVLVCKSVKPAMITSHLIQLSLSRSVPACQVPRLSERIAPVIGLKCVLALAFKKNTTDFVDEVRAIIPRVPSLSVPWLQDRIEDSGENLETEPLESQDRELLDTSFEDLSKPKRKLADGRQASVTLQPLKIKKLIPNPNKIRKPPKSKKATPK

SEQ ID NO: 73747 - protein, 145 aa, Homo sapiens
  Payload ID: 14595
  Gene Symbol: RPP38
  Gene Name: ribonuclease P/MRP 38kDa subunit
  ENSP ID: ENSP00000367443
MAAAPQAPGRGSLRKTRPLVVKTSLNNPYIIRWSALESEDMHFILQTLEDRLKAIGLQKIEDKKKKNKTPFLKKESREKCSIAVDISENLKEKKTDAKQQVSGWTPAHVRKQLAIGVNEVTRALERRELLLVLFHSCCPGWSAVV

SEQ ID NO: 73748 - protein, 283 aa, Homo sapiens; identical to SEQ ID NO: 73746
  Payload ID: 14595
  Gene Symbol: RPP38
  Gene Name: ribonuclease P/MRP 38kDa subunit
  Uniprot ID: P78345
  ENSP ID: ENSP00000367444

SEQ ID NO: 73749 - protein, 283 aa, Homo sapiens; identical to SEQ ID NO: 73746
  Payload ID: 14595
  Gene Symbol: RPP38
  Gene Name: ribonuclease P/MRP 38kDa subunit
  Uniprot ID: P78345
  ENSP ID: ENSP00000367445

SEQ ID NO: 73750 - protein, 168 aa, Homo sapiens
  Payload ID: 14595
  Gene Symbol: RPP38
  Gene Name: ribonuclease P/MRP 38kDa subunit
  ENSP ID: ENSP00000402635
MAAAPQAPGRGSLRKTRPLVVKTSLNNPYIIRWSALESEDMHFILQTLEDRLKAIGLQKIEDKKKKNKTPFLKKESREKCSIAVDISENLKEKKTDAKQQVSGWTPAHVRKQLAIGVNEVTRALERRELLLVLVCKSVKPAMITSHLIQLSLSRSVPACQVPRLSERI

SEQ ID NO: 73751 - protein, 283 aa, Homo sapiens; identical to SEQ ID NO: 73746
  Payload ID: 14595
  Gene Symbol: RPP38
  Gene Name: ribonuclease P/MRP 38kDa subunit
  Uniprot ID: P78345
  ENSP ID: ENSP00000478982

SEQ ID NO: 73752 - protein, 340 aa, Homo sapiens
  Payload ID: 14596
  Gene Symbol: RPP40
  Gene Name: ribonuclease P/MRP 40kDa subunit
  Uniprot ID: O75818
  ENSP ID: ENSP00000317998
MATLRRLREAPRHLLVCEKSNFGNHKSRHRHLVQTHYYNYRVSFLIPECGILSEELKNLVMNTGPYYFVKNLPLHELITPEFISTFIKKGKLILSLDKDTYEETGLQGHPSQFSGRKIMKFIVSIDLMELSLNLDSKKYERISWSFKEKKPLKFDFLLAWHKTGSEESTMMSYFSKYQIQEHQPKVALSTLRDLQCPVLQSSELEGTPEVSCRALELFDWLGAVFSNVDLNNEPNNFISTYCCPEPSTVVAKAYLCTITGFILPEKICLLLEHLCHYFDEPKLAPWVTLSVQGFADSPVSWEKNEHGFRKGGEHLYNFVIFNNQDYWLQMAVGANDHCPP

SEQ ID NO: 73753 - protein, 363 aa, Homo sapiens
  Payload ID: 14596
  Gene Symbol: RPP40
  Gene Name: ribonuclease P/MRP 40kDa subunit
  Uniprot ID: O75818
  ENSP ID: ENSP00000369391
MATLRRLREAPRHLLVCEKSNFGNHKSRHRHLVQTHYYNYRVSFLIPECGILSEELKNLVMNTGPYYFVKNLPLHELITPEFISTFIKKGSCYALTYNTHIDEDNTVALLPNGKLILSLDKDTYEETGLQGHPSQFSGRKIMKFIVSIDLMELSLNLDSKKYERISWSFKEKKPLKFDFLLAWHKTGSEESTMMSYFSKYQIQEHQPKVALSTLRDLQCPVLQSSELEGTPEVSCRALELFDWLGAVFSNVDLNNEPNNFISTYCCPEPSTVVAKAYLCTITGFILPEKICLLLEHLCHYFDEPKLAPWVTLSVQGFADSPVSWEKNEHGFRKGGEHLYNFVIFNNQDYWLQMAVGANDHCPP

SEQ ID NO: 73754 - protein, 113 aa, Homo sapiens
  Payload ID: 14596
  Gene Symbol: RPP40
  Gene Name: ribonuclease P/MRP 40kDa subunit
  ENSP ID: ENSP00000418874
MATLRRLREAPRHLLVCEKSNFGNHKSRHRHLVQTHYYNYRVSFLIPECGILSEELKNLVMNTGPYYFVKNLPLHELITPEFISTFIKKEFYFGPLSAHPQRFLLCTNIQYTY

SEQ ID NO: 73755 - protein, 303 aa, Homo sapiens
  Payload ID: 14596
  Gene Symbol: RPP40
  Gene Name: ribonuclease P/MRP 40kDa subunit
  ENSP ID: ENSP00000419431
MNTGPYYFVKNLPLHELITPEFISTFIKKGSCYALTYNTHIDEDNTVALLPNGKLILSLDKDTYEETGLQGHPSQFSGRKIMKFIVSIDLMELSLNLDSKKYERISWSFKEKKPLKFDFLLAWHKTGSEESTMMSYFSKYQIQEHQPKVALSTLRDLQCPVLQSSELEGTPEVSCRALELFDWLGAVFSNVDLNNEPNNFISTYCCPEPSTVVAKAYLCTITGFILPEKICLLLEHLCHYFDEPKLAPWVTLSVQGFADSPVSWEKNEHGFRKGGEHLYNFVIFNNQDYWLQMAVGANDHCPP

SEQ ID NO: 73756 - protein, 321 aa, Homo sapiens
  Payload ID: 14596
  Gene Symbol: RPP40
  Gene Name: ribonuclease P/MRP 40kDa subunit
  ENSP ID: ENSP00000484334
MATLRRLREAPRHLLVCEKSNFGNHKSRHRHLVQTHYYNYRVSFLIPECGILSEELKNLVMNTGPYYFVKNLPLHELITPEFISTFIKKGSCYALTYNTHIDEDNTVALLPNGKLILSLDKDTYEETGLQGHPSQFSGRKIMKFSSEESTMMSYFSKYQIQEHQPKVALSTLRDLQCPVLQSSELEGTPEVSCRALELFDWLGAVFSNVDLNNEPNNFISTYCCPEPSTVVAKAYLCTITGFILPEKICLLLEHLCHYFDEPKLAPWVTLSVQGFADSPVSWEKNEHGFRKGGEHLYNFVIFNNQDYWLQMAVGANDHCPP

SEQ ID NO: 73757 - protein, 71 aa, Homo sapiens
  Payload ID: 14597
  Gene Symbol: RNASET2
  Gene Name: ribonuclease T2
  ENSP ID: ENSP00000028008
MRPAALRGALLGCLCLALLCLGGADKRLRDNHEWKKLIMVQHWPETVCEKIQNDCRDPPDYWTIHGLWQAR

SEQ ID NO: 73758 - protein, 121 aa, Homo sapiens
  Payload ID: 14597
  Gene Symbol: RNASET2
  Gene Name: ribonuclease T2
  Uniprot ID: O00584
  ENSP ID: ENSP00000390833
MRPAALRGALLGCLCLALLCLGGADKRLRDNHEWKKLIMVQHWPETVCEKIQNDCRDPPDYWTIHGLWPDKSEGCNRSWPFNLEEIKKNWMEITDSSLPSPSTLPIINIFYSVLHLLQLMN

SEQ ID NO: 73759 - protein, 256 aa, Homo sapiens
  Payload ID: 14597
  Gene Symbol: RNASET2
  Gene Name: ribonuclease T2
  Uniprot ID: O00584
  ENSP ID: ENSP00000422846
MRPAALRGALLGCLCLALLCLGGADKRLRDNHEWKKLIMVQHWPETVCEKIQNDCRDPPDYWTIHGLWPDKSEGCNRSWPFNLEEIKDLLPEMRAYWPDVIHSFPNRSRFWKHEWEKHGTCAAQVDALNSQKKYFGRSLELYRELDLNSVLLKLGIKPSINYYQVADFKDALARVYGVIPKIQCLPPSQDEEVQTIGQIELCLTKQDQQLQNCTEPGEQPSPKQEVWLANGAAESRGLRVCEDGPVFYPPPKKTKH

SEQ ID NO: 73760 - protein, 218 aa, Homo sapiens
  Payload ID: 14597
  Gene Symbol: RNASET2
  Gene Name: ribonuclease T2
  ENSP ID: ENSP00000424947
MVQHWPETVCEKIQNDCRDPPDYWTIHGLWPDKSEGCNRSWPFNLEEIKDLLPEMRAYWPDVIHSFPNRSRFWKHEWEKHGTCAAQVDALNSQKKYFGRSLELYRELDLNSVLLKLGIKPSINYYQVADFKDALARVYGVIPKIQCLPPSQDEEVQTIGQIELCLTKQDQQLQNCTEPGEQPSPKQEVWLANGAAESRGLRVCEDGPVFYPPPKKTKH

SEQ ID NO: 73761 - protein, 253 aa, Homo sapiens
  Payload ID: 14597
  Gene Symbol: RNASET2
  Gene Name: ribonuclease T2
  ENSP ID: ENSP00000426059
MRPAALRGALLGCLCLALLCLGGADKRLRDNHEWKKLIMVQHWPETVCEKIQNDCRDPPDYWTIHGLWPDKSEGCNRSWPFNLEEIKDLLPEMRAYWPDVIHSFPNRSRFWKHEWEKHGTCAAQVDALNSQKKYFGRSLELYRELDLNSVLLKLGIKPSINYYQVADFKDALARVYGVIPKIQCLPPSQDEEVQTIGQIELCLTKQDQQLQNCTEPGEQPSPKQEVWLANGAAESRGLRVCEDGPVFYPPPKK

SEQ ID NO: 73762 - protein, 256 aa, Homo sapiens; identical to SEQ ID NO: 73759
  Payload ID: 14597
  Gene Symbol: RNASET2
  Gene Name: ribonuclease T2
  Uniprot ID: O00584
  ENSP ID: ENSP00000426455

SEQ ID NO: 73763 - protein, 238 aa, Homo sapiens
  Payload ID: 14597
  Gene Symbol: RNASET2
  Gene Name: ribonuclease T2
  ENSP ID: ENSP00000480244
MRPAALRGALLGCLCLALLCLGGADKRLRDNHEWKKLIMVQHWPETVCEKIQNDCRDPPDYWTIHGLWPDKSEGCNRSWPFNLEEIKKNWMEITDSSLPSPSMGPAPPRWMRSTPRRSTLAEAWNSTGSWTSTGGCALPPAALPSGDLCCRPSLTAGSRGVGVDLTALQQLLHVHYSATGIIPEECSEPTKPFQIILHHDHTEWVQSIGMPIWTISSSESAIGKTRTQPACAVLSHDS

SEQ ID NO: 73764 - protein, 306 aa, Homo sapiens [sequence omitted]

SEQ ID NO: 73765 - protein, 156 aa, Homo sapiens
  Payload ID: 14598
  Gene Symbol: RNASE1
  Gene Name: ribonuclease, RNase A family, 1 (pancreatic)
  Uniprot ID: P07998
  ENSP ID: ENSP00000344193
MALEKSLVRLLLLVLILLVLGWVQPSLGKESRAKKFQRQHMDSDSSPSSSSTYCNQMMRRRNMTQGRCKPVNTFVHEPLVDVQNVCFQEKVTCKNGQGNCYKSNSSMHITDCRLTNGSRYPNCAYRTSPKERHIIVACEGSPYVPVHFDASVEDST

SEQ ID NO: 73766 - protein, 156 aa, Homo sapiens; identical to SEQ ID NO: 73765
  Payload ID: 14598
  Gene Symbol: RNASE1
  Gene Name: ribonuclease, RNase A family, 1 (pancreatic)
  Uniprot ID: P07998
  ENSP ID: ENSP00000381057

SEQ ID NO: 73767 - protein, 156 aa, Homo sapiens; identical to SEQ ID NO: 73765
  Payload ID: 14598
  Gene Symbol: RNASE1
  Gene Name: ribonuclease, RNase A family, 1 (pancreatic)
  Uniprot ID: P07998
  ENSP ID: ENSP00000381060

SEQ ID NO: 73768 - protein, 156 aa, Homo sapiens; identical to SEQ ID NO: 73765
  Payload ID: 14598
  Gene Symbol: RNASE1
  Gene Name: ribonuclease, RNase A family, 1 (pancreatic)
  Uniprot ID: P07998
  ENSP ID: ENSP00000399493

SEQ ID NO: 73769 - protein, 116 aa, Homo sapiens
  Payload ID: 14598
  Gene Symbol: RNASE1
  Gene Name: ribonuclease, RNase A family, 1 (pancreatic)
  ENSP ID: ENSP00000451058
MDSDSSPSSSSTYCNQMMRRRNMTQGRCKPVNTFVHEPLVDVQNVCFQEKVTCKNGQGNCYKSNSSMHITDCRLTNGSRYPNCAYRTSPKERHIIVACEGSPYVPVHFDASVEDST

SEQ ID NO: 73770 - protein, 216 aa, Homo sapiens
  Payload ID: 14599
  Gene Symbol: RNASE10
  Gene Name: ribonuclease, RNase A family, 10 (non-active)
  Uniprot ID: Q5GAN6
  ENSP ID: ENSP00000333358
MKLNLVQIFFMLLMLLLGLGMGLGLGLHMATAVLEESDQPLNEFWSSDSQDKAEATEEGDGTQTTETLVLSNKEVVQPGWPEDPILGEDEVGGNKMLRASALFQSNKDYLRLDQTDRECNDMMAHKMKEPSQSCIAQYAFIHEDLNTVKAVCNSPVIACELKGGKCHKSSRPFDLTLCELSQPDQVTPNCNYLTSVIKKHIIITCNDMKRQLPTGQ

SEQ ID NO: 73771 - protein, 244 aa, Homo sapiens
  Payload ID: 14599
  Gene Symbol: RNASE10
  Gene Name: ribonuclease, RNase A family, 10 (non-active)
  Uniprot ID: Q5GAN6
  ENSP ID: ENSP00000392996
MWGAPLPRRPVWDVRSASAGPQPCLGGKMKLNLVQIFFMLLMLLLGLGMGLGLGLHMATAVLEESDQPLNEFWSSDSQDKAEATEEGDGTQTTETLVLSNKEVVQPGWPEDPILGEDEVGGNKMLRASALFQSNKDYLRLDQTDRECNDMMAHKMKEPSQSCIAQYAFIHEDLNTVKAVCNSPVIACELKGGKCHKSSRPFDLTLCELSQPDQVTPNCNYLTSVIKKHIIITCNDMKRQLPTGQ

SEQ ID NO: 73772 - protein, 199 aa, Homo sapiens
  Payload ID: 14600
  Gene Symbol: RNASE11
  Gene Name: ribonuclease, RNase A family, 11 (non-active)
  Uniprot ID: Q8TAA1
  ENSP ID: ENSP00000381092
METFPLLLLSLGLVLAEASESTMKIIKEEFTDEEMQYDMAKSGQEKQTIEILMNPILLVKNTSLSMSKDDMSSTLLTFRSLHYNDPKGNSSGNDKECCNDMTVWRKVSEANGSCKWSNNFIRSSTEVMRRVHRAPSCKFVQNPGISCCESLELENTVCQFTTGKQFPRCQYHSVTSLEKILTVLTGHSLMSWLVCGSKL

SEQ ID NO: 73773 - protein, 199 aa, Homo sapiens; identical to SEQ ID NO: 73772
  Payload ID: 14600
  Gene Symbol: RNASE11
  Gene Name: ribonuclease, RNase A family, 11 (non-active)
  Uniprot ID: Q8TAA1
  ENSP ID: ENSP00000381093

SEQ ID NO: 73774 - protein, 199 aa, Homo sapiens; identical to SEQ ID NO: 73772
  Payload ID: 14600
  Gene Symbol: RNASE11
  Gene Name: ribonuclease, RNase A family, 11 (non-active)
  Uniprot ID: Q8TAA1
  ENSP ID: ENSP00000395210

SEQ ID NO: 73775 - protein, 178 aa, Homo sapiens
  Payload ID: 14600
  Gene Symbol: RNASE11
  Gene Name: ribonuclease, RNase A family, 11 (non-active)
  ENSP ID: ENSP00000401398
METFPLLLLSLGLVLAEASESTMKIIKEEFTDEEMQYDMAKSGQEKQTIEILMNPILLVKNTSLSMSKDDMSSTLLTFRSLHYNDPKGNSSGNDKECCNDMTVWRKVSEANGSCKWSNNFIRSSTEVMRRVHRAPSCKFVQNPGISCCESLELENTVCQFTTGKQFPRCQYHSVTSLE

SEQ ID NO: 73776 - protein, 142 aa, Homo sapiens
  Payload ID: 14600
  Gene Symbol: RNASE11
  Gene Name: ribonuclease, RNase A family, 11 (non-active)
  ENSP ID: ENSP00000415954
METFPLLLLSLGLVLAEASESTMKIIKEEFTDEEMQYDMAKSGQEKQTIEILMNPILLVKNTSLSMSKDDMSSTLLTFRSLHYNDPKGNSSGNDKECCNDMTVWRKVSEANGSCKWSNNFIRSSTEVMRRVHRAPSCKFVQN

SEQ ID NO: 73777 - protein, 199 aa, Homo sapiens; identical to SEQ ID NO: 73772
  Payload ID: 14600
  Gene Symbol: RNASE11
  Gene Name: ribonuclease, RNase A family, 11 (non-active)
  Uniprot ID: Q8TAA1
  ENSP ID: ENSP00000451318

SEQ ID NO: 73778 - protein, 136 aa, Homo sapiens
  Payload ID: 14600
  Gene Symbol: RNASE11
  Gene Name: ribonuclease, RNase A family, 11 (non-active)
  ENSP ID: ENSP00000451466
METFPLLLLSLGLVLAEASESTMKIIKEEFTDEEMQYDMAKSGQEKQTIEILMNPILLVKNTSLSMSKDDMSSTLLTFRSLHYNDPKGNSSGNDKECCNDMTVWRKVSEANGSCKWSNNFIRSSTEVMRRVHRAPS

SEQ ID NO: 73779 - protein, 199 aa, Homo sapiens; identical to SEQ ID NO: 73772
  Payload ID: 14600
  Gene Symbol: RNASE11
  Gene Name: ribonuclease, RNase A family, 11 (non-active)
  Uniprot ID: Q8TAA1
  ENSP ID: ENSP00000451563

SEQ ID NO: 73780 - protein, 178 aa, Homo sapiens; identical to SEQ ID NO: 73775
  Payload ID: 14600
  Gene Symbol: RNASE11
  Gene Name: ribonuclease, RNase A family, 11 (non-active)
  ENSP ID: ENSP00000451839

SEQ ID NO: 73781 - protein, 171 aa, Homo sapiens
  Payload ID: 14600
  Gene Symbol: RNASE11
  Gene Name: ribonuclease, RNase A family, 11 (non-active)
  ENSP ID: ENSP00000452412
METFPLLLLSLGLVLAEASESTMKIIKEEFTDEEMQYDMAKSGQEKQTIEILMNPILLVKNTSLSMSKDDMSSTLLTFRSLHYNDPKGNSSGNDKECCNDMTVWRKVSEANGSCKWSNNFIRSSTEVMRRVHRAPSCKFVQNPGISCCESLELENTVCQFTTGKQFPRCQY

SEQ ID NO: 73782 - protein, 199 aa, Homo sapiens; identical to SEQ ID NO: 73772
  Payload ID: 14600
  Gene Symbol: RNASE11
  Gene Name: ribonuclease, RNase A family, 11 (non-active)
  Uniprot ID: Q8TAA1
  ENSP ID: ENSP00000482059

SEQ ID NO: 73783 - protein, 147 aa, Homo sapiens
  Payload ID: 14601
  Gene Symbol: RNASE12
  Gene Name: ribonuclease, RNase A family, 12 (non-active)
  Uniprot ID: Q5GAN4
  ENSP ID: ENSP00000450580
MIIMVIIFLVLLFWENEVNDEAVMSTLEHLHVDYPQNDVPVPARYCNHMIIQRVIREPDHTCKKEHVFIHERPRKINGICISPKKVACQNLSAIFCFQSETKFKMTVCQLIEGTRYPACRYHYSPTEGFVLVTCDDLRPDSFLGYVK

SEQ ID NO: 73784 - protein, 156 aa, Homo sapiens
  Payload ID: 14602
  Gene Symbol: RNASE13
  Gene Name: ribonuclease, RNase A family, 13 (non-active)
  Uniprot ID: Q5GAN3
  ENSP ID: ENSP00000372410
MAPAVTRLLFLQLVLGPTLVMDIKMQIGSRNFYTLSIDYPRVNYPKGFRGYCNGLMSYMRGKMQNSDCPKIHYVIHAPWKAIQKFCKYSDSFCENYNEYCTLTQDSLPITVCSLSHQQPPTSCYYNSTLTNQKLYLLCSRKYEADPIGIAGLYSGI

SEQ ID NO: 73785 - protein, 161 aa, Homo sapiens
  Payload ID: 14603
  Gene Symbol: RNASE2
  Gene Name: ribonuclease, RNase A family, 2 (liver, eosinophil-derived neurotoxin)
  Uniprot ID: P10153
  ENSP ID: ENSP00000303276
MVPKLFTSQICLLLLLGLLAVEGSLHVKPPQFTWAQWFETQHINMTSQQCTNAMQVINNYQRRCKNQNTFLLTTFANVVNVCGNPNMTCPSNKTRKNCHHSGSQVPLIHCNLTTPSPQNISNCRYAQTPANMFYIVACDNRDQRRDPPQYPVVPVHLDRII

SEQ ID NO: 73786 - protein, 160 aa, Homo sapiens
  Payload ID: 14604
  Gene Symbol: RNASE3
  Gene Name: ribonuclease, RNase A family, 3
  Uniprot ID: P12724
  ENSP ID: ENSP00000302324
MVPKLFTSQICLLLLLGLMGVEGSLHARPPQFTRAQWFAIQHISLNPPRCTIAMRAINNYRWRCKNQNTFLRTTFANVVNVCGNQSIRCPHNRTLNNCHRSRFRVPLLHCDLINPGAQNISNCTYADRPGRRFYVVACDNRDPRDSPRYPVVPVHLDTTI

SEQ ID NO: 73787 - protein, 147 aa, Homo sapiens
  Payload ID: 14605
  Gene Symbol: RNASE4
  Gene Name: ribonuclease, RNase A family, 4
  Uniprot ID: P34096
  ENSP ID: ENSP00000381081
MALQRTHSLLLLLLLTLLGLGLVQPSYGQDGMYQRFLRQHVHPEETGGSDRYCNLMMQRRKMTLYHCKRFNTFIHEDIWNIRSICSTTNIQCKNGKMNCHEGVVKVTDCRDTGSSRAPNCRYRAIASTRRVVIACEGNPQVPVHFDG

SEQ ID NO: 73788 - protein, 147 aa, Homo sapiens; identical to SEQ ID NO: 73787
  Payload ID: 14605
  Gene Symbol: RNASE4
  Gene Name: ribonuclease, RNase A family, 4
  Uniprot ID: P34096
  ENSP ID: ENSP00000451624

SEQ ID NO: 73789 - protein, 147 aa, Homo sapiens; identical to SEQ ID NO: 73787
  Payload ID: 14605
  Gene Symbol: RNASE4
  Gene Name: ribonuclease, RNase A family, 4
  Uniprot ID: P34096
  ENSP ID: ENSP00000452245

SEQ ID NO: 73790 - protein, 156 aa, Homo sapiens
  Payload ID: 14606
  Gene Symbol: RNASE7
  Gene Name: ribonuclease, RNase A family, 7
  Uniprot ID: Q9H1E1
  ENSP ID: ENSP00000298690
MAPARAGFCPLLLLLLLGLWVAEIPVSAKPKGMTSSQWFKIQHMQPSPQACNSAMKNINKHTKRCKDLNTFLHEPFSSVAATCQTPKIACKNGDKNCHQSHGAVSLTMCKLTSGKHPNCRYKEKRQNKSYVVACKPPQKKDSQQFHLVPVHLDRVL

SEQ ID NO: 73791 - protein, 156 aa, Homo sapiens; identical to SEQ ID NO: 73790
  Payload ID: 14606
  Gene Symbol: RNASE7
  Gene Name: ribonuclease, RNase A family, 7
  Uniprot ID: Q9H1E1
  ENSP ID: ENSP00000431382

SEQ ID NO: 73792 - protein, 154 aa, Homo sapiens
  Payload ID: 14607
  Gene Symbol: RNASE8
  Gene Name: ribonuclease, RNase A family, 8
  Uniprot ID: Q8TDE3
  ENSP ID: ENSP00000311398
MAPARAGCCPLLLLLLGLWVAEVLVRAKPKDMTSSQWFKTQHVQPSPQACNSAMSIINKYTERCKDLNTFLHEPFSSVAITCQTPNIACKNSCKNCHQSHGPMSLTMGELTSGKYPNCRYKEKHLNTPYIVACDPPQQGDPGYPLVPVHLDKVV

SEQ ID NO: 73793 - protein, 205 aa, Homo sapiens
  Payload ID: 14608
  Gene Symbol: RNASE9
  Gene Name: ribonuclease, RNase A family, 9 (non-active)
  Uniprot ID: P60153
  ENSP ID: ENSP00000340162
MMRTLITTHPLPLLLLPQQLLQLVQFQEVDTDFDFPEEDKKEEFEECLEKFFSTGPARPPTKEKVKRRVLIEPGMPLNHIEYCNHEIMGKNVYYKHRWVAEHYFLLMQYDELQKICYNRFVPCKNGIRKCNRSKGLVEGVYCNLTEAFEIPACKYESLYRKGYVLITCSWQNEMQKRIPHTINDLVEPPEHRSFLSEDGVFVISP

SEQ ID NO: 73794 - protein, 210 aa, Homo sapiens
  Payload ID: 14608
  Gene Symbol: RNASE9
  Gene Name: ribonuclease, RNase A family, 9 (non-active)
  Uniprot ID: P60153
  ENSP ID: ENSP00000384683
MSAGKMMRTLITTHPLPLLLLPQQLLQLVQFQEVDTDFDFPEEDKKEEFEECLEKFFSTGPARPPTKEKVKRRVLIEPGMPLNHIEYCNHEIMGKNVYYKHRWVAEHYFLLMQYDELQKICYNRFVPCKNGIRKCNRSKGLVEGVYCNLTEAFEIPACKYESLYRKGYVLITCSWQNEMQKRIPHTINDLVEPPEHRSFLSEDGVFVISP

SEQ ID NO: 73795 - protein, 205 aa, Homo sapiens; identical to SEQ ID NO: 73793
  Payload ID: 14608
  Gene Symbol: RNASE9
  Gene Name: ribonuclease, RNase A family, 9 (non-active)
  Uniprot ID: P60153
  ENSP ID: ENSP00000409504

SEQ ID NO: 73796 - protein, 210 aa, Homo sapiens; identical to SEQ ID NO: 73794
  Payload ID: 14608
  Gene Symbol: RNASE9
  Gene Name: ribonuclease, RNase A family, 9 (non-active)
  Uniprot ID: P60153
  ENSP ID: ENSP00000450570

SEQ ID NO: 73797 - protein, 205 aa, Homo sapiens; identical to SEQ ID NO: 73793
  Payload ID: 14608
  Gene Symbol: RNASE9
  Gene Name: ribonuclease, RNase A family, 9 (non-active)
  Uniprot ID: P60153
  ENSP ID: ENSP00000450599

SEQ ID NO: 73798 - protein, 205 aa, Homo sapiens; identical to SEQ ID NO: 73793
  Payload ID: 14608
  Gene Symbol: RNASE9
  Gene Name: ribonuclease, RNase A family, 9 (non-active)
  Uniprot ID: P60153
  ENSP ID: ENSP00000450800

SEQ ID NO: 73799 - protein, 210 aa, Homo sapiens; identical to SEQ ID NO: 73794
  Payload ID: 14608
  Gene Symbol: RNASE9
  Gene Name: ribonuclease, RNase A family, 9 (non-active)
  Uniprot ID: P60153
  ENSP ID: ENSP00000450987

SEQ ID NO: 73800 - protein, 210 aa, Homo sapiens; identical to SEQ ID NO: 73794
  Payload ID: 14608
  Gene Symbol: RNASE9
  Gene Name: ribonuclease, RNase A family, 9 (non-active)
  Uniprot ID: P60153
  ENSP ID: ENSP00000451160

SEQ ID NO: 73801 - protein, 205 aa, Homo sapiens; identical to SEQ ID NO: 73793
  Payload ID: 14608
  Gene Symbol: RNASE9
  Gene Name: ribonuclease, RNase A family, 9 (non-active)
  Uniprot ID: P60153
  ENSP ID: ENSP00000451285

SEQ ID NO: 73802 - protein, 205 aa, Homo sapiens; identical to SEQ ID NO: 73793
  Payload ID: 14608
  Gene Symbol: RNASE9
  Gene Name: ribonuclease, RNase A family, 9 (non-active)
  Uniprot ID: P60153
  ENSP ID: ENSP00000451565

SEQ ID NO: 73803 - protein, 210 aa, Homo sapiens; identical to SEQ ID NO: 73794
  Payload ID: 14608
  Gene Symbol: RNASE9
  Gene Name: ribonuclease, RNase A family, 9 (non-active)
  Uniprot ID: P60153
  ENSP ID: ENSP00000481786

SEQ ID NO: 73804 - protein, 150 aa, Homo sapiens
  Payload ID: 14609
  Gene Symbol: RNASE6
  Gene Name: ribonuclease, RNase A family, k6
  Uniprot ID: Q93091
  ENSP ID: ENSP00000302046
MVLCFPLLLLLLVLWGPVCPLHAWPKRLTKAHWFEIQHIQPSPLQCNRAMSGINNYTQHCKHQNTFLHDSFQNVAAVCDLLSIVCKNRRHNCHQSSKPVNMTDCRLTSGKYPQCRYSAAAQYKFFIVACDPPQKSDPPYKLVPVHLDSIL

SEQ ID NO: 73805 - protein, 65 aa, Homo sapiens
  Payload ID: 14610
  Gene Symbol: RNASEK
  Gene Name: ribonuclease, RNase K
  ENSP ID: ENSP00000447072
MGWLRPGPRPLCPPARASWAFSHRFPSPLAPRRSPTPFFMASLLCCGPKLAACGIVLSAWGVIML

SEQ ID NO: 73806 - protein, 71 aa, Homo sapiens
  Payload ID: 14610
  Gene Symbol: RNASEK
  Gene Name: ribonuclease, RNase K
  ENSP ID: ENSP00000447359
MLGIFFNVHSAVLIEDVPFTEKDFENGPQNIYNLYEQVSYNCFIAAGLYLLLGGFSFCQVRLNKRKEYMVR

SEQ ID NO: 73807 - protein, 137 aa, Homo sapiens
  Payload ID: 14610
  Gene Symbol: RNASEK
  Gene Name: ribonuclease, RNase K
  Uniprot ID: Q6P5S7
  ENSP ID: ENSP00000449500
MGWLRPGPRPLCPPARASWAFSHRFPSPLAPRRSPTPFFMASLLCCGPKLAACGIVLSAWGVIMLIMLGIFFNVHSAVLIEDVPFTEKDFENGPQNIYNLYEQVSYNCFIAAGLYLLLGGFSFCQVRLNKRKEYMVR

SEQ ID NO: 73808 - protein, 46 aa, Homo sapiens
  Payload ID: 14610
  Gene Symbol: RNASEK
  Gene Name: ribonuclease, RNase K
  ENSP ID: ENSP00000449670
MASLLCCGPKLAACGIVLSAWGVIMLVRGLPDNARNIFQCPFRCVD

SEQ ID NO: 73809 - protein, 133 aa, Homo sapiens
  Payload ID: 14610
  Gene Symbol: RNASEK
  Gene Name: ribonuclease, RNase K
  ENSP ID: ENSP00000450174
MKKCRFSLPSSALSRDDDASREDDNLGSWERWLGHYSHPCLDHLSQCHHLTPCSRWLSPNPIMLGIFFNVHSAVLIEDVPFTEKDFENGPQNIYNLYEQVSYNCFIAAGLYLLLGGFSFCQVRLNKRKEYMVR

SEQ ID NO: 73810 - protein, 55 aa, Homo sapiens
  Payload ID: 14610
  Gene Symbol: RNASEK
  Gene Name: ribonuclease, RNase K
  ENSP ID: ENSP00000450182
MKKCRFSLPSSALSRDDDASREDDNLGSWERWLGHYSHPCLDHLSQCHHLTPCSR

SEQ ID NO: 73811 - protein, 71 aa, Homo sapiens; identical to SEQ ID NO: 73806
  Payload ID: 14610
  Gene Symbol: RNASEK
  Gene Name: ribonuclease, RNase K
  ENSP ID: ENSP00000459471

SEQ ID NO: 73812 - protein, 98 aa, Homo sapiens
  Payload ID: 14610
  Gene Symbol: RNASEK
  Gene Name: ribonuclease, RNase K
  ENSP ID: ENSP00000468923
MASLLCCGPKLAACGIVLSAWGVIMLIMLGIFFNVHSAVLIEDVPFTEKDFENGPQNIYNLYEQVSYNCFIAAGLYLLLGGFSFCQVRLNKRKEYMVR

SEQ ID NO: 73813 - protein, 461 aa, Homo sapiens [sequence omitted]

SEQ ID NO: 73814 - protein, 461 aa, Homo sapiens [sequence omitted]

SEQ ID NO: 73815 - protein, 461 aa, Homo sapiens [sequence omitted]

SEQ ID NO: 73816 - protein, 461 aa, Homo sapiens [sequence omitted]

SEQ ID NO: 73817 - protein, 461 aa, Homo sapiens [sequence omitted]

SEQ ID NO: 73818 - protein, 461 aa, Homo sapiens [sequence omitted]

SEQ ID NO: 73819 - protein, 77 aa, Homo sapiens
  Payload ID: 14611
  Gene Symbol: RNH1
  Gene Name: ribonuclease/angiogenin inhibitor 1
  ENSP ID: ENSP00000431201
MSLDIQSLDIQCEELSDARWAELLPLLQQCQVVRLDDCGLTEARCKDISSALRVNPALAELNLRSNELGDVGCPTAV

SEQ ID NO: 73820 - protein, 285 aa, Homo sapiens
  Payload ID: 14611
  Gene Symbol: RNH1
  Gene Name: ribonuclease/angiogenin inhibitor 1
  ENSP ID: ENSP00000432170
ESCGVTSDNCRDLCGIVASKASLRELALGSNKLGDVGMAELCPGLLHPSSRLRTLWIWECGITAKGCGDLCRVLRAKESLKELSLAGNELGDEGARLLCETLLEPGCQLESLWVKSCSFTAACCSHFSSVLAQNRFLLELQISNNRLEDAGVRELCQGLGQPGSVLRVLWLADCDVSDSSCSSLAATLLANHSLRELDLSNNCLGDAGILQLVESVRQPGCLLEQLVYVHALGGWCGQGCPGRKAGVGEDTGPCLPSGLCAACTTFTGLRRWRTGCRPWRRTSHP

SEQ ID NO: 73821 - protein, 8 aa, Homo sapiens
  Payload ID: 14611
  Gene Symbol: RNH1
  Gene Name: ribonuclease/angiogenin inhibitor 1
  ENSP ID: ENSP00000432781
MSLDIQSL

SEQ ID NO: 73822 - protein, 168 aa, Homo sapiens
  Payload ID: 14611
  Gene Symbol: RNH1
  Gene Name: ribonuclease/angiogenin inhibitor 1
  ENSP ID: ENSP00000433033
MSLDIQSLDIQCEELSDARWAELLPLLQQCQVVRLDDCGLTEARCKDISSALRVNPALAELNLRSNELGDVGVHCVLQGLQTPSCKIQKLRSCTSATTSWGMRACSCSAKDSWTPSAAWKSCSWSIAASRLPAASPWPPCSGPSRTSRSSRLATTTSMRLASVCCARA

SEQ ID NO: 73823 - protein, 461 aa, Homo sapiens [sequence omitted]

SEQ ID NO: 73824 - protein, 189 aa, Homo sapiens
  Payload ID: 14611
  Gene Symbol: RNH1
  Gene Name: ribonuclease/angiogenin inhibitor 1
  ENSP ID: ENSP00000434947
MSLDIQSLDIQCEELSDARWAELLPLLQQCQVVRLDDCGLTEARCKDISSALRVNPALAELNLRSNELGDVGVHCVLQGLQTPSCKIQKLSLQNCCLTGAGCGVLSSTLRTLPTLQELHLSDNLLGDAGLQLLCEGLLDPQCRLEKLQLEYCSLSAASCEPLASVLRAKPDFKELTVSNNDINEAGVRV

SEQ ID NO: 73825 - protein, 40 aa, Homo sapiens
  Payload ID: 14611
  Gene Symbol: RNH1
  Gene Name: ribonuclease/angiogenin inhibitor 1
  ENSP ID: ENSP00000434971
MSLDIQSLDIQCEELSDARWAELLPLLQQCQVVRLDDCGL

SEQ ID NO: 73826 - protein, 194 aa, Homo sapiens
  Payload ID: 14611
  Gene Symbol: RNH1
  Gene Name: ribonuclease/angiogenin inhibitor 1
  ENSP ID: ENSP00000435057
MSLDIQSLDIQCEELSDARWAELLPLLQQCQVVRLDDCGLTEARCKDISSALRVNPALAELNLRSNELGDVGVHCVLQGLQTPSCKIQKLSLQNCCLTGAGCGVLSSTLRTLPTLQELHLSDNLLGDAGLQLLCEGLLDPQCRLEKLQLEYCSLSAASCEPLASVLRAKPDFKELTVSNNDINEAGVRVLCQGL

SEQ ID NO: 73827 - protein, 461 aa, Homo sapiens [sequence omitted]

SEQ ID NO: 73828 - protein, 199 aa, Homo sapiens
  Payload ID: 14611
  Gene Symbol: RNH1
  Gene Name: ribonuclease/angiogenin inhibitor 1
  ENSP ID: ENSP00000435748
MSLDIQSLDIQCEELSDARWAELLPLLQQCQVVRLDDCGLTEARCKDISSALRVNPALAELNLRSNELGDVGVHCVLQGLQTPSCKIQKLSLQNCCLTGAGCGVLSSTLRTLPTLQELHLSDNLLGDAGLQLLCEGLLDPQCRLEKLQLEYCSLSAASCEPLASVLRAKPDFKELTVSNNDINEAGVRVLCQGLKDSPC

SEQ ID NO: 73829 - protein, 181 aa, Homo sapiens
  Payload ID: 14611
  Gene Symbol: RNH1
  Gene Name: ribonuclease/angiogenin inhibitor 1
  ENSP ID: ENSP00000435798
MSLDIQSLDIQCEELSDARWAELLPLLQQCQVVRLDDCGLTEARCKDISSALRVNPALAELNLRSNELGDVGVHCVLQGLQTPSCKIQKLSLQNCCLTGAGCGVLSSTLRTLPTLQELHLSDNLLGDAGLQLLCEGLLDPQCRLEKLHCPLQGTAAPGPDGGNRCLAVSQVPLTASVCVGD

SEQ ID NO: 73830 - protein, 35 aa, Homo sapiens
  Payload ID: 14611
  Gene Symbol: RNH1
  Gene Name: ribonuclease/angiogenin inhibitor 1
  ENSP ID: ENSP00000436022
MSLDIQSLDIQCEELSDARWAELLPLLQQCQVVRL

SEQ ID NO: 73831 - protein, 461 aa, Homo sapiens [sequence omitted]

SEQ ID NO: 73832 - protein, 461 aa, Homo sapiens [sequence omitted]

SEQ ID NO: 73833 - protein, 461 aa, Homo sapiens [sequence omitted]

SEQ ID NO: 73834 - protein, 461 aa, Homo sapiens [sequence omitted]

SEQ ID NO: 73835 - protein, 461 aa, Homo sapiens [sequence omitted]

SEQ ID NO: 73836 - protein, 189 aa, Homo sapiens; identical to SEQ ID NO: 73824
  Payload ID: 14611
  Gene Symbol: RNH1
  Gene Name: ribonuclease/angiogenin inhibitor 1
  ENSP ID: ENSP00000487751

SEQ ID NO: 73837 - protein, 461 aa, Homo sapiens [sequence omitted]

SEQ ID NO: 73838 - protein, 461 aa, Homo sapiens [sequence omitted]

SEQ ID NO: 73839 - protein, 194 aa, Homo sapiens; identical to SEQ ID NO: 73826
  Payload ID: 14611
  Gene Symbol: RNH1
  Gene Name: ribonuclease/angiogenin inhibitor 1
  ENSP ID: ENSP00000488030

SEQ ID NO: 73840 - protein, 77 aa, Homo sapiens; identical to SEQ ID NO: 73819
  Payload ID: 14611
  Gene Symbol: RNH1
  Gene Name: ribonuclease/angiogenin inhibitor 1
  ENSP ID: ENSP00000488114

SEQ ID NO: 73841 - protein, 8 aa, Homo sapiens
  Payload ID: 14611
  Gene Symbol: RNH1
  Gene Name: ribonuclease/angiogenin inhibitor 1
  ENSP ID: ENSP00000488337
MSLDIQSL

SEQ ID NO: 73842 - protein, 40 aa, Homo sapiens; identical to SEQ ID NO: 73825
  Payload ID: 14611
  Gene Symbol: RNH1
  Gene Name: ribonuclease/angiogenin inhibitor 1
  ENSP ID: ENSP00000488388

SEQ ID NO: 73843 - protein, 285 aa, Homo sapiens; identical to SEQ ID NO: 73820
  Payload ID: 14611
  Gene Symbol: RNH1
  Gene Name: ribonuclease/angiogenin inhibitor 1
  ENSP ID: ENSP00000488547

SEQ ID NO: 73844 - protein, 199 aa, Homo sapiens; identical to SEQ ID NO: 73828
  Payload ID: 14611
  Gene Symbol: RNH1
  Gene Name: ribonuclease/angiogenin inhibitor 1
  ENSP ID: ENSP00000488555

SEQ ID NO: 73845 - protein, 461 aa, Homo sapiens [sequence omitted]

SEQ ID NO: 73846 - protein, 35 aa, Homo sapiens; identical to SEQ ID NO: 73830
  Payload ID: 14611
  Gene Symbol: RNH1
  Gene Name: ribonuclease/angiogenin inhibitor 1
  ENSP ID: ENSP00000488849

SEQ ID NO: 73847 - protein, 368 aa, Homo sapiens
  Payload ID: 14612
  Gene Symbol: RAE1
  Gene Name: ribonucleic acid export 1
  Uniprot ID: P78406
  ENSP ID: ENSP00000360286
MSLFGTTSGFGTSGTSMFGSATTDNHNPMKDIEVTSSPDDSIGCLSFSPPTLPGNFLIAGSWANDVRCWEVQDSGQTIPKAQQMHTGPVLDVCWSDDGSKVFTASCDKTAKMWDLSSNQAIQIAQHDAPVKTIHWIKAPNYSCVMTGSWDKTLKFWDTRSSNPMMVLQLPERCYCADVIYPMAVVATAERGLIVYQLENQPSEFRRIESPLKHQHRCVAIFKDKQNKPTGFALGSIEGRVAIHYINPPNPAKDNFTFKCHRSNGTNTSAPQDIYAVNGIAFHPVHGTLATVGSDGRFSFWDKDARTKLKTSEQLDQPISACCFNHNGNIFAYASSYDWSKGHEFYNPQKKNYIFLRNAAEELKPRNKK

SEQ ID NO: 73848 - protein, 368 aa, Homo sapiens; identical to SEQ ID NO: 73847
  Payload ID: 14612
  Gene Symbol: RAE1
  Gene Name: ribonucleic acid export 1
  Uniprot ID: P78406
  ENSP ID: ENSP00000379181

SEQ ID NO: 73849 - protein, 368 aa, Homo sapiens; identical to SEQ ID NO: 73847
  Payload ID: 14612
  Gene Symbol: RAE1
  Gene Name: ribonucleic acid export 1
  Uniprot ID: P78406
  ENSP ID: ENSP00000379182

SEQ ID NO: 73850 - protein, 137 aa, Homo sapiens
  Payload ID: 14612
  Gene Symbol: RAE1
  Gene Name: ribonucleic acid export 1
  ENSP ID: ENSP00000392097
MSLFGTTSGFGTSGTSMFGSATTDNHNPMKDIEVTSSPDDSIGCLSFSPPTLPGNFLIAGSWANDVRCWEVQDSGQTIPKAQQMHTGPVLDVCWSDDGSKVFTASCDKTAKMWDLSSNQAIQIAQHDAPVKTIHWIK

SEQ ID NO: 73851 - protein, 137 aa, Homo sapiens; identical to SEQ ID NO: 73850
  Payload ID: 14612
  Gene Symbol: RAE1
  Gene Name: ribonucleic acid export 1
  ENSP ID: ENSP00000393264

SEQ ID NO: 73852 - protein, 87 aa, Homo sapiens
  Payload ID: 14612
  Gene Symbol: RAE1
  Gene Name: ribonucleic acid export 1
  ENSP ID: ENSP00000402924
MSLFGTTSGFGTSGTSMFGSATTDNHNPMKDIEVTSSPDDSIGCLSFSPPTLPGNFLIAGSWANDVRCWEVQDSGQTIPKAQQMHTG

SEQ ID NO: 73853 - protein, 437 aa, Homo sapiens
  Payload ID: 14612
  Gene Symbol: RAE1
  Gene Name: ribonucleic acid export 1
  ENSP ID: ENSP00000432609
MSLFGTTSGFGTSGTSMFGSATTDNHNPMKDIEVTSSPDDSIGCLSFSPPTLPGNFLIAGSWANDVRCWEVQDSGQTIPKAQQMHTGPVLDVCWSDDGSKVFTASCDKTAKMWDLSSNQAIQIAQHDAPVKTIHWIKAPNYSCVMTGSWDKTLKFWDTRSSNPMMVLQLPERCYCADVIYPMAVVATAERGLIVYQLENQPSEFRRIESPLKHQHRCVAIFKDKQNKPTGFALGSIEGRVAIHYINPPNPAKDNFTFKCHRSNGTNTSAPQDIYAVNGIAFHPVHGTLATVGSDGRFSFWDKDARTKLKTSEQLDQPISACCFNHNGNIFAYASSYDWSKVRTPGPALGAPRQQSQALGSEGLGLSCDSSQDSRVSLGRSPSPPCKGKLQDFLKWLWGFSTAFGQNPAHRKCSASVSHYGLLCSWAQKHRQAGGCTL

SEQ ID NO: 73854 - protein, 217 aa, Homo sapiens
  Payload ID: 14612
  Gene Symbol: RAE1
  Gene Name: ribonucleic acid export 1
  ENSP ID: ENSP00000432698
MSLFGTTSGFGTSGTSMFGSATTDNHNPMKDIEVTSSPDDSIGCLSFSPPTLPGNFLIAGSWANDVRCWEVQDSGQTIPKAQQMHTGPVLDVCWSDDGSKVFTASCDKTAKMWDLSSNQAIQIAQHDAPVKTIHWIKAPNYSCVMTGSWDKTLKFWDTRSSNPMMVLQLPERCYCADVIYPMAVVATAERGLIVYQLENQPSEFRRIESPLKHQRQR

SEQ ID NO: 73855 - protein, 756 aa, Homo sapiens
  Payload ID: 14613
  Gene Symbol: RAVER1
  Gene Name: ribonucleoprotein, PTB-binding 1
  ENSP ID: ENSP00000293677
MPLRPGSLVPEGAGFPKMAADVSVTHRPPLSPKSGAEVEAGDAAERRAPEEELPPLDPEEIRKRLEHTERQFRNRRKILIRGLPGDVTNQEVHDLLSDYELKYCFVDKYKGTAFVTLLNGEQAEAAINAFHQSRLRERELSVQLQPTDALLCVANLPPSLTQQQFEELVRPFGSLERCFLVYSERTGQSKGYGFAEYMKKDSAARAKSDLLGKPLGPRTLYVHWTDAGQLTPALLHSRCLCVDRLPPGFNDVDALCRALSAVHSPTFCQLACGQDGQLKGFAVLEYETAEMAEEAQQQADGLSLGGSHLRVSFCAPGPPGRSMLAALIAAQATALNRGKGLLPEPNILQLLNNLGPSASLQLLLNPLLHGSAGGKQGLLGAPPAMPLLNGPALSTALLQLALQTQGQKKPGILGDSPLGALQPGAQPANPLLGELPAGGGLPPELPPRRGKPPPLLPSVLGPAGGDREALGLGPPAAQLTPPPAPVGLRGSGLRGLQKDSGPLPTPPGVSLLGEPPKDYRIPLNPYLNLHSLLPASNLAGKEARGWGGAGRSRRPAEGPPTNPPAPGGGSSSSKAFQLKSRLLSPLSSARLPPEPGLSDSYSFDYPSDMGPRRLFSHPREPALGPHGPSRHKMSPPPSGFGERSSGGSGGGPLSHFYSGSPTSYFTSGLQAGLKQSHLSKAIGSSPLGSGEGLLGLSPGPNGHSHLLKTPLGGQKRSFAHLLPSPEPSPEGSYVGQHSQGLGGHYADSYLKRKRIF

SEQ ID NO: 73856 - protein, 96 aa, Homo sapiens
  Payload ID: 14613
  Gene Symbol: RAVER1
  Gene Name: ribonucleoprotein, PTB-binding 1
  ENSP ID: ENSP00000465753
  MOD_RES (1)..(1): Any amino acid
XVTHRPPLSPKSGAEVEAGDAAERRAPEEELPPLDPEEIRKRLEHTERQFRNRRKILIRGLPGDVTNQEVHDLLSDYELKYCFVDKYKGTEPPAGA

SEQ ID NO: 73857 - protein, 130 aa, Homo sapiens
  Payload ID: 14613
  Gene Symbol: RAVER1
  Gene Name: ribonucleoprotein, PTB-binding 1
  ENSP ID: ENSP00000468375
GGKQGLLGAPPAMPLLNGPALSTALLQLALQTQGQKKPGILGDSPLGALQPGAQPANPLLGELPAGLTAGGAPQGLPDSPESLPEPTQPAPGQQPGGPWRWQQQQQSLPAQVPPAQPPQQRPPAPRTRTV

SEQ ID NO: 73858 - protein, 606 aa, Homo sapiens
  Payload ID: 14613
  Gene Symbol: RAVER1
  Gene Name: ribonucleoprotein, PTB-binding 1
  Uniprot ID: Q8IY67
  ENSP ID: ENSP00000479520
MAADVSVTHRPPLSPKSGAEVEAGDAAERRAPEEELPPLDPEEIRKRLEHTERQFRNRRKILIRGLPGDVTNQEVHDLLSDYELKYCFVDKYKGTAFVTLLNGEQAEAAINAFHQSRLRERELSVQLQPTDALLCVANLPPSLTQQQFEELVRPFGSLERCFLVYSERTGQSKGYGFAEYMKKDSAARAKSDLLGKPLGPRTLYVHWTDAGQLTPALLHSRCLCVDRLPPGFNDVDALCRALSAVHSPTFCQLACGQDGQLKGFAVLEYETAEMAEEAQQQADGLSLGGSHLRVSFCAPGPPGRSMLAALIAAQATALNRGKGLLPEPNILQLLNNLGPSASLQLLLNPLLHGSAGGKQGLLGAPPAMPLLNGPALSTALLQLALQTQGQKKPGILGDSPLGALQPGAQPANPLLGELPAGGGLPPELPPRRGKPPPLLPSVLGPAGGDREALGLGPPAAQLTPPPAPVGLRGSGLRGPLSHFYSGSPTSYFTSGLQAGLKQSHLSKAIGSSPLGSGEGLLGLSPGPNGHSHLLKVRAGGGDMQGWEAPAPQRPLTRPALPSVSRPHWAARNAALPTCCPRPSPAQKAAMWASTPRASAATTRTPT

SEQ ID NO: 73859 - protein, 739 aa, Homo sapiens
  Payload ID: 14613
  Gene Symbol: RAVER1
  Gene Name: ribonucleoprotein, PTB-binding 1
  ENSP ID: ENSP00000482277
MAADVSVTHRPPLSPKSGAEVEAGDAAERRAPEEELPPLDPEEIRKRLEHTERQFRNRRKILIRGLPGDVTNQEVHDLLSDYELKYCFVDKYKGTAFVTLLNGEQAEAAINAFHQSRLRERELSVQLQPTDALLCVANLPPSLTQQQFEELVRPFGSLERCFLVYSERTGQSKGYGFAEYMKKDSAARAKSDLLGKPLGPRTLYVHWTDAGQLTPALLHSRCLCVDRLPPGFNDVDALCRALSAVHSPTFCQLACGQDGQLKGFAVLEYETAEMAEEAQQQADGLSLGGSHLRVSFCAPGPPGRSMLAALIAAQATALNRGKGLLPEPNILQLLNNLGPSASLQLLLNPLLHGSAGGKQGLLGAPPAMPLLNGPALSTALLQLALQTQGQKKPGILGDSPLGALQPGAQPANPLLGELPAGGGLPPELPPRRGKPPPLLPSVLGPAGGDREALGLGPPAAQLTPPPAPVGLRGSGLRGLQKDSGPLPTPPGVSLLGEPPKDYRIPLNPYLNLHSLLPASNLAGKEARGWGGAGRSRRPAEGPPTNPPAPGGGSSSSKAFQLKSRLLSPLSSARLPPEPGLSDSYSFDYPSDMGPRRLFSHPREPALGPHGPSRHKMSPPPSGFGERSSGGSGGGPLSHFYSGSPTSYFTSGLQAGLKQSHLSKAIGSSPLGSGEGLLGLSPGPNGHSHLLKTPLGGQKRSFAHLLPSPEPSPEGSYVGQHSQGLGGHYADSYLKRKRIF

SEQ ID NO: 73860 - protein, 756 aa, Homo sapiens; identical to SEQ ID NO: 73855
  Payload ID: 14613
  Gene Symbol: RAVER1
  Gene Name: ribonucleoprotein, PTB-binding 1
  ENSP ID: ENSP00000482486

SEQ ID NO: 73861 - protein, 691 aa, Homo sapiens
  Payload ID: 14614
  Gene Symbol: RAVER2
  Gene Name: ribonucleoprotein, PTB-binding 2
  Uniprot ID: Q9HCJ3
  ENSP ID: ENSP00000294428
MAAAAGDGGGEGGAGLGSAAGLGPGPGLRGQGPSAEAHEGAPDPMPAALHPEEVAARLQRMQRELSNRRKILVKNLPQDSNCQEVHDLLKDYDLKYCYVDRNKRTAFVTLLNGEQAQNAIQMFHQYSFRGKDLIVQLQPTDALLCITNVPISFTSEEFEELVRAYGNIERCFLVYSEVTGHSKGYGFVEYMKKDFAAKARLELLGRQLGASALFAQWMDVNLLASELIHSKCLCIDKLPSDYRDSEELLQIFSSVHKPVFCQLAQDEGSYVGGFAVVEYSTAEQAEEVQQAADGMTIKGSKVQVSFCAPGAPGRSTLAALIAAQRVMHSNQKGLLPEPNPVQIMKSLNNPAMLQVLLQPQLCGRAVKPAVLGTPHSLPHLMNPSISPAFLHLNKAHQSSVMGNTSNLFLQNLSHIPLAQQQLMKFENIHTNNKPGLLGEPPAVVLQTALGIGSVLPLKKELGHHHGEAHKTSSLIPTQTTITAGMGMLPFFPNQHIAGQAGPGHSNTQEKQPATVGMAEGNFSGSQPYLQSFPNLAAGSLLVGHHKQQQSQPKGTEISSGAASKNQTSLLGEPPKEIRLSKNPYLNLASVLPSVCLSSPASKTTLHKTGIASSILDAISQGSESQHALEKCIAYSPPFGDYAQVSSLRNEKRGSSYLISAPEGGSVECVDQHSQGTGAYYMETYLKKKRVY

SEQ ID NO: 73862 - protein, 678 aa, Homo sapiens
  Payload ID: 14614
  Gene Symbol: RAVER2
  Gene Name: ribonucleoprotein, PTB-binding 2
  Uniprot ID: Q9HCJ3
  ENSP ID: ENSP00000360112
MAAAAGDGGGEGGAGLGSAAGLGPGPGLRGQGPSAEAHEGAPDPMPAALHPEEVAARLQRMQRELSNRRKILVKNLPQDSNCQEVHDLLKDYDLKYCYVDRNKRTAFVTLLNGEQAQNAIQMFHQYSFRGKDLIVQLQPTDALLCITNVPISFTSEEFEELVRAYGNIERCFLVYSEVTGHSKGYGFVEYMKKDFAAKARLELLGRQLGASALFAQWMDVNLLASELIHSKCLCIDKLPSDYRDSEELLQIFSSVHKPVFCQLAQDEGSYVGGFAVVEYSTAEQAEEVQQAADGMTIKGSKVQVSFCAPGAPGRSTLAALIAAQRVMHSNQKGLLPEPNPVQIMKSLNNPAMLQVLLQPQLCGRAVKPAVLGTPHSLPHLMNPSISPAFLHLNKAHQNLSHIPLAQQQLMKFENIHTNNKPGLLGEPPAVVLQTALGIGSVLPLKKELGHHHGEAHKTSSLIPTQTTITAGMGMLPFFPNQHIAGQAGPGHSNTQEKQPATVGMAEGNFSGSQPYLQSFPNLAAGSLLVGHHKQQQSQPKGTEISSGAASKNQTSLLGEPPKEIRLSKNPYLNLASVLPSVCLSSPASKTTLHKTGIASSILDAISQGSESQHALEKCIAYSPPFGDYAQVSSLRNEKRGSSYLISAPEGGSVECVDQHSQGTGAYYMETYLKKKRVY

SEQ ID NO: 73863 - protein, 166 aa, Homo sapiens
  Payload ID: 14614
  Gene Symbol: RAVER2
  Gene Name: ribonucleoprotein, PTB-binding 2
  ENSP ID: ENSP00000397069
MTIKGSKVQVSFCAPGAPGRSTLAALIAAQRVMHSNQKGLLPEPNPVQIMKSLNNPAMLQVLLQPQLCGRAVKPAVLGTPHSLPHLMNPSISPAFLHLNKAHQNLSHIPLAQQQLMKFENIHTNNKPGLLGEPPAVVLQTALGIGSVLPLKKELGHHHGEAHKSCL

SEQ ID NO: 73864 - protein, 792 aa, Homo sapiens
  Payload ID: 14615
  Gene Symbol: RRM1
  Gene Name: ribonucleotide reductase M1
  Uniprot ID: P23921
  ENSP ID: ENSP00000300738
MHVIKRDGRQERVMFDKITSRIQKLCYGLNMDFVDPAQITMKVIQGLYSGVTTVELDTLAAETAATLTTKHPDYAILAARIAVSNLHKETKKVFSDVMEDLYNYINPHNGKHSPMVAKSTLDIVLANKDRLNSAIIYDRDFSYNYFGFKTLERSYLLKINGKVAERPQHMLMRVSVGIHKEDIDAAIETYNLLSERWFTHASPTLFNAGTNRPQLSSCFLLSMKDDSIEGIYDTLKQCALISKSAGGIGVAVSCIRATGSYIAGTNGNSNGLVPMLRVYNNTARYVDQGGNKRPGAFAIYLEPWHLDIFEFLDLKKNTGKEEQRARDLFFALWIPDLFMKRVETNQDWSLMCPNECPGLDEVWGEEFEKLYASYEKQGRVRKVVKAQQLWYAIIESQTETGTPYMLYKDSCNRKSNQQNLGTIKCSNLCTEIVEYTSKDEVAVCNLASLALNMYVTSEHTYDFKKLAEVTKVVVRNLNKIIDINYYPVPEACLSNKRHRPIGIGVQGLADAFILMRYPFESAEAQLLNKQIFETIYYGALEASCDLAKEQGPYETYEGSPVSKGILQYDMWNVTPTDLWDWKVLKEKIAKYGIRNSLLIAPMPTASTAQILGNNESIEPYTSNIYTRRVLSGEFQIVNPHLLKDLTERGLWHEEMKNQIIACNGSIQSIPEIPDDLKQLYKTVWEISQKTVLKMAAERGAFIDQSQSLNIHIAEPNYGKLTSMHFYGWKQGLKTGMYYLRTRPAANPIQFTLNKEKLKDKEKVSKEEEEKERNTAAMVCSLENRDECLMCGS

SEQ ID NO: 73865 - protein, 570 aa, Homo sapiens
  Payload ID: 14615
  Gene Symbol: RRM1
  Gene Name: ribonucleotide reductase M1
  ENSP ID: ENSP00000431464
MKDDSIEGIYDTLKQCALISKSAGGIGVAVSCIRATGSYIAGTNGNSNGLVPMLRVYNNTARYVDQGGNKRPGAFAIYLEPWHLDIFEFLDLKKNTGKEEQRARDLFFALWIPDLFMKRVETNQDWSLMCPNECPGLDEVWGEEFEKLYASYEKQGRVRKVVKAQQLWYAIIESQTETGTPYMLYKDSCNRKSNQQNLGTIKCSNLCTEIVEYTSKDEVAVCNLASLALNMYVTSEHTYDFKKLAEVTKVVVRNLNKIIDINYYPVPEACLSNKRHRPIGIGVQGLADAFILMRYPFESAEAQLLNKQIFETIYYGALEASCDLAKEQGPYETYEGSPVSKGILQYDMWNVTPTDLWDWKVLKEKIAKYGIRNSLLIAPMPTASTAQILGNNESIEPYTSNIYTRRVLSGEFQIVNPHLLKDLTERGLWHEEMKNQIIACNGSIQSIPEIPDDLKQLYKTVWEISQKTVLKMAAERGAFIDQSQSLNIHIAEPNYGKLTSMHFYGWKQGLKTGMYYLRTRPAANPIQFTLNKEKLKDKEKVSKEEEEKERNTAAMVCSLENRDECLMCGS

SEQ ID NO: 73866 - protein, 130 aa, Homo sapiens
  Payload ID: 14615
  Gene Symbol: RRM1
  Gene Name: ribonucleotide reductase M1
  ENSP ID: ENSP00000432555
  MOD_RES (1)..(1): Any amino acid
XTYNLLSERWFTHASPTLFNAGTNRPQLSSCFLLSMKDDSIEGIYDTLKQCALISKSAGGIGVAVSCIRATGSYIAGTNGNSNGLVPMLRVYNNTARYVDQGGNKRIMIYLPLASWGICYLPGALAFRHL

SEQ ID NO: 73867 - protein, 37 aa, Homo sapiens
  Payload ID: 14615
  Gene Symbol: RRM1
  Gene Name: ribonucleotide reductase M1
  ENSP ID: ENSP00000434069
MHVIKRDGRQERVMFDKITSRIQKLCYGLNMDFVDPM

SEQ ID NO: 73868 - protein, 69 aa, Homo sapiens
  Payload ID: 14615
  Gene Symbol: RRM1
  Gene Name: ribonucleotide reductase M1
  ENSP ID: ENSP00000435656
MHVIKRDGRQERVMFDKITSRIQKLCYGLNMDFVDPGLTLPPRLECSGIITAHCSLSFPSSWDHRLRSP

SEQ ID NO: 73869 - protein, 75 aa, Homo sapiens
  Payload ID: 14615
  Gene Symbol: RRM1
  Gene Name: ribonucleotide reductase M1
  ENSP ID: ENSP00000436377
MKDDSIEGIYDTLKQCALISKSAGGIGVAVSCIRATGSYIAGTNGNSNGLVPMLRVYNNTARYVDQGGNKVCSMN

SEQ ID NO: 73870 - protein, 389 aa, Homo sapiens
  Payload ID: 14616
  Gene Symbol: RRM2
  Gene Name: ribonucleotide reductase M2
  Uniprot ID: P31350
  ENSP ID: ENSP00000302955
MLSLRVPLAPITDPQQLQLSPLKGLSLVDKENTPPALSGTRVLASKTARRIFQEPTEPKTKAAAPGVEDEPLLRENPRRFVIFPIEYHDIWQMYKKAEASFWTAEEVDLSKDIQHWESLKPEERYFISHVLAFFAASDGIVNENLVERFSQEVQITEARCFYGFQIAMENIHSEMYSLLIDTYIKDPKEREFLFNAIETMPCVKKKADWALRWIGDKEATYGERVVAFAAVEGIFFSGSFASIFWLKKRGLMPGLTFSNELISRDEGLHCDFACLMFKHLVHKPSEERVREIIINAVRIEQEFLTEALPVKLIGMNCTLMKQYIEFVADRLMLELGFSKVFRVENPFDFMENISLEGKTNFFEKRVGEYQRMGVMSSPTENSFTLDADF

SEQ ID NO: 73871 - protein, 449 aa, Homo sapiens
  Payload ID: 14616
  Gene Symbol: RRM2
  Gene Name: ribonucleotide reductase M2
  Uniprot ID: P31350
  ENSP ID: ENSP00000353770
MGRVGGMAQPMGRAGAPKPMGRAGSARRGRFKGCWSEGSPVHPVPAVLSWLLALLRCASTMLSLRVPLAPITDPQQLQLSPLKGLSLVDKENTPPALSGTRVLASKTARRIFQEPTEPKTKAAAPGVEDEPLLRENPRRFVIFPIEYHDIWQMYKKAEASFWTAEEVDLSKDIQHWESLKPEERYFISHVLAFFAASDGIVNENLVERFSQEVQITEARCFYGFQIAMENIHSEMYSLLIDTYIKDPKEREFLFNAIETMPCVKKKADWALRWIGDKEATYGERVVAFAAVEGIFFSGSFASIFWLKKRGLMPGLTFSNELISRDEGLHCDFACLMFKHLVHKPSEERVREIIINAVRIEQEFLTEALPVKLIGMNCTLMKQYIEFVADRLMLELGFSKVFRVENPFDFMENISLEGKTNFFEKRVGEYQRMGVMSSPTENSFTLDADF

SEQ ID NO: 73872 - protein, 289 aa, Homo sapiens
  Payload ID: 14616
  Gene Symbol: RRM2
  Gene Name: ribonucleotide reductase M2
  ENSP ID: ENSP00000419177
MFYFLPQQKTKAAAPGVEDEPLLRENPRRFVIFPIEYHDIWQMYKKAEASFWTAEEVDLSKDIQHWESLKPEERYFISHVLAFFAASDGIVNENLVERFSQEVQITEARCFYGFQIAMENIHSEMYSLLIDTYIKDPKEREFLFNAIETMPCVKKKADWALRWIGDKEATYGERVVAFAAVEGIFFSGSFASIFWLKKRGLMPGLTFSNELISRDEGLHCDFACLMFKHLVHKPSEERVREIIINAVRIEQEFLTEALPVKLIGMNCTLMKQYIEFVADRLMLELGFSK

SEQ ID NO: 73873 - protein, 449 aa, Homo sapiens; identical to SEQ ID NO: 73871
  Payload ID: 14616
  Gene Symbol: RRM2
  Gene Name: ribonucleotide reductase M2
  Uniprot ID: P31350
  ENSP ID: ENSP00000484183

SEQ ID NO: 73874 - protein, 351 aa, Homo sapiens
  Payload ID: 14617
  Gene Symbol: RRM2B
  Gene Name: ribonucleotide reductase M2 B (TP53 inducible)
  Uniprot ID: Q7LG56
  ENSP ID: ENSP00000251810
MGDPERPEAAGLDQDERSSSDTNESEIKSNEEPLLRKSSRRFVIFPIQYPDIWKMYKQAQASFWTAEEVDLSKDLPHWNKLKADEKYFISHILAFFAASDGIVNENLVERFSQEVQVPEARCFYGFQILIENVHSEMYSLLIDTYIRDPKKREFLFNAIETMPYVKKKADWALRWIADRKSTFGERVVAFAAVEGVFFSGSFAAIFWLKKRGLMPGLTFSNELISRDEGLHCDFACLMFQYLVNKPSEERVREIIVDAVKIEQEFLTEALPVGLIGMNCILMKQYIEFVADRLLVELGFSKVFQAENPFDFMENISLEGKTNFFEKRVSEYQRFAVMAETTDNVFTLDADF

SEQ ID NO: 73875 - protein, 299 aa, Homo sapiens
  Payload ID: 14617
  Gene Symbol: RRM2B
  Gene Name: ribonucleotide reductase M2 B (TP53 inducible)
  Uniprot ID: Q7LG56
  ENSP ID: ENSP00000379248
MGDPERPEAAGLDQDEVDLSKDLPHWNKLKADEKYFISHILAFFAASDGIVNENLVERFSQEVQVPEARCFYGFQILIENVHSEMYSLLIDTYIRDPKKREFLFNAIETMPYVKKKADWALRWIADRKSTFGERVVAFAAVEGVFFSGSFAAIFWLKKRGLMPGLTFSNELISRDEGLHCDFACLMFQYLVNKPSEERVREIIVDAVKIEQEFLTEALPVGLIGMNCILMKQYIEFVADRLLVELGFSKVFQAENPFDFMENISLEGKTNFFEKRVSEYQRFAVMAETTDNVFTLDADF

SEQ ID NO: 73876 - protein, 65 aa, Homo sapiens
  Payload ID: 14617
  Gene Symbol: RRM2B
  Gene Name: ribonucleotide reductase M2 B (TP53 inducible)
  ENSP ID: ENSP00000427830
MGDPERPEAAGLDQDEMESCSVTRPECSGVISAHCNLCLLGSSDSPASASRVAGTTEIIFRHQRK

SEQ ID NO: 73877 - protein, 408 aa, Homo sapiens
  Payload ID: 14617
  Gene Symbol: RRM2B
  Gene Name: ribonucleotide reductase M2 B (TP53 inducible)
  ENSP ID: ENSP00000428115
  MOD_RES (1)..(1): Any amino acid
XDCKLQDRCRKCYSPRSGQACPPALAAAWLRRCERRGGRPRGGRRKELTLGLRPARCSAPGPAKDDAWRPQAGRSSSDTNESEIKSNEEPLLRKSSRRFVIFPIQYPDIWKMYKQAQASFWTAEEVDLSKDLPHWNKLKADEKYFISHILAFFAASDGIVNENLVERFSQEVQVPEARCFYGFQILIENVHSEMYSLLIDTYIRDPKKREFLFNAIETMPYVKKKADWALRWIADRKSTFGERVVAFAAVEGVFFSGSFAAIFWLKKRGLMPGLTFSNELISRDEGLHCDFACLMFQYLVNKPSEERVREIIVDAVKIEQEFLTEALPVGLIGMNCILMKQYIEFVADRLLVELGFSKVFQAENPFDFMENISLEGKTNFFEKRVSEYQRFAVMAETTDNVFTLDADF

SEQ ID NO: 73878 - protein, 66 aa, Homo sapiens
  Payload ID: 14617
  Gene Symbol: RRM2B
  Gene Name: ribonucleotide reductase M2 B (TP53 inducible)
  Uniprot ID: Q7LG56
  ENSP ID: ENSP00000429140
MGDPERPEAAGLDQDEVFQAENPFDFMENISLEGKTNFFEKRVSEYQRFAVMAETTDNVFTLDADF

SEQ ID NO: 73879 - protein, 43 aa, Homo sapiens
  Payload ID: 14617
  Gene Symbol: RRM2B
  Gene Name: ribonucleotide reductase M2 B (TP53 inducible)
  Uniprot ID: Q7LG56
  ENSP ID: ENSP00000429578
MGDPERPEAAGLDQDERSSSDTNESEIKSNEEPLLRKSSRRSF

SEQ ID NO: 73880 - protein, 139 aa, Homo sapiens
  Payload ID: 14617
  Gene Symbol: RRM2B
  Gene Name: ribonucleotide reductase M2 B (TP53 inducible)
  Uniprot ID: Q7LG56
  ENSP ID: ENSP00000430641
MGDPERPEAAGLDQDEGLHCDFACLMFQYLVNKPSEERVREIIVDAVKIEQEFLTEALPVGLIGMNCILMKQYIEFVADRLLVELGFSKVFQAENPFDFMENISLEGKTNFFEKRVSEYQRFAVMAETTDNVFTLDADF

SEQ ID NO: 73881 - protein, 297 aa, Homo sapiens
  Payload ID: 14617
  Gene Symbol: RRM2B
  Gene Name: ribonucleotide reductase M2 B (TP53 inducible)
  ENSP ID: ENSP00000484318
MYKQAQASFWTAEEVDLSKDLPHWNKLKADEKYFISHILAFFAASDGIVNENLVERFSQEVQVPEARCFYGFQILIENVHSEMYSLLIDTYIRDPKKREFLFNAIETMPYVKKKADWALRWIADRKSTFGERVVAFAAVEGVFFSGSFAAIFWLKKRGLMPGLTFSNELISRDEGLHCDFACLMFQYLVNKPSEERVREIIVDAVKIEQEFLTEALPVGLIGMNCILMKQYIEFVADRLLVELGFSKVFQAENPFDFMENISLEGKTNFFEKRVSEYQRFAVMAETTDNVFTLDADF

SEQ ID NO: 73882 - protein, 607 aa, Homo sapiens
  Payload ID: 14618
  Gene Symbol: RPN1
  Gene Name: ribophorin I
  Uniprot ID: P04843
  ENSP ID: ENSP00000296255
MEAPAAGLFLLLLLGTWAPAPGSASSEAPPLINEDVKRTVDLSSHLAKVTAEVVLAHLGGGSTSRATSFLLALEPELEARLAHLGVQVKGEDEEENNLEVRETKIKGKSGRFFTVKLPVALDPGAKISVIVETVYTHVLHPYPTQITQSEKQFVVFEGNHYFYSPYPTKTQTMRVKLASRNVESYTKLGNPTRSEDLLDYGPFRDVPAYSQDTFKVHYENNSPFLTITSMTRVIEVSHWGNIAVEENVDLKHTGAVLKGPFSRYDYQRQPDSGISSIRSFKTILPAAAQDVYYRDEIGNVSTSHLLILDDSVEMEIRPRFPLFGGWKTHYIVGYNLPSYEYLYNLGDQYALKMRFVDHVFDEQVIDSLTVKIILPEGAKNIEIDSPYEISRAPDELHYTYLDTFGRPVIVAYKKNLVEQHIQDIVVHYTFNKVLMLQEPLLVVAAFYILFFTVIIYVRLDFSITKDPAAEARMKVACITEQVLTLVNKRIGLYRHFDETVNRYKQSRDISTLNSGKKSLETEHKALTSEIALLQSRLKTEGSDLCDRVSEMQKLDAQVKELVLKSAVEAERLVAGKLKKDTYIENEKLISGKRQELVTKIDHILDAL

SEQ ID NO: 73883 - protein, 435 aa, Homo sapiens
  Payload ID: 14618
  Gene Symbol: RPN1
  Gene Name: ribophorin I
  ENSP ID: ENSP00000417529
MRVKLASRNVESYTKLGNPTRSEDLLDYGPFRDVPAYSQDTFKVHYENNSPFLTITSMTRVIEVSHWGNIAVEENVDLKHTGAVLKGPFSRYDYQRQPDSGISSIRSFKTILPAAAQDVYYRDEIGNVSTSHLLILDDSVEMEIRPRFPLFGGWKTHYIVGYNLPSYEYLYNLGDQYALKMRFVDHVFDEQVIDSLTVKIILPEGAKNIEIDSPYEISRAPDELHYTYLDTFGRPVIVAYKKNLVEQHIQDIVVHYTFNKVLMLQEPLLVVAAFYILFFTVIIYVRLDFSITKDPAAEARMKVACITEQVLTLVNKRIGLYRHFDETVNRYKQSRDISTLNSGKKSLETEHKALTSEIALLQSRLKTEGSDLCDRVSEMQKLDAQVKELVLKSAVEAERLVAGKLKKDTYIENEKLISGKRQELVTKIDHILDAL

SEQ ID NO: 73884 - protein, 121 aa, Homo sapiens
  Payload ID: 14618
  Gene Symbol: RPN1
  Gene Name: ribophorin I
  ENSP ID: ENSP00000419384
MEAPAAGLFLLLLLGTWAPAPGSASSEAPPLINEDVKRTVDLSSHLAKVTAEVVLAHLGGGSTSRATSFLLALEPELEARLAHLGVQVKGEDEEENNLEVRETKIKGKRVCCPGSITVVPC

SEQ ID NO: 73885 - protein, 631 aa, Homo sapiens
  Payload ID: 14619
  Gene Symbol: RPN2
  Gene Name: ribophorin II
  Uniprot ID: P04844
  ENSP ID: ENSP00000237530
MAPPGSSTVFLLALTIIASTWALTPTHYLTKHDVERLKASLDRPFTNLESAFYSIVGLSSLGAQVPDAKKACTYIRSNLDPSNVDSLFYAAQASQALSGCEISISNETKDLLLAAVSEDSSVTQIYHAVAALSGFGLPLASQEALSALTARLSKEETVLATVQALQTASHLSQQADLRSIVEEIEDLVARLDELGGVYLQFEEGLETTALFVAATYKLMDHVGTEPSIKEDQVIQLMNAIFSKKNFESLSEAFSVASAAAVLSHNRYHVPVVVVPEGSASDTHEQAILRLQVTNVLSQPLTQATVKLEHAKSVASRATVLQKTSFTPVGDVFELNFMNVKFSSGYYDFLVEVEGDNRYIANTVELRVKISTEVGITNVDLSTVDKDQSIAPKTTRVTYPAKAKGTFIADSHQNFALFFQLVDVNTGAELTPHQTFVRLHNQKTGQEVVFVAEPDNKNVYKFELDTSERKIEFDSASGTYTLYLIIGDATLKNPILWNVADVVIKFPEEEAPSTVLSQNLFTPKQEIQHLFREPEKRPPTVVSNTFTALILSPLLLLFALWIRIGANVSNFTFAPSTIIFHLGHAAMLGLMYVYWTQLNMFQTLKYLAILGSVTFLAGNRMLAQQAVKRTAH

SEQ ID NO: 73886 - protein, 615 aa, Homo sapiens
  Payload ID: 14619
  Gene Symbol: RPN2
  Gene Name: ribophorin II
  Uniprot ID: P04844
  ENSP ID: ENSP00000362724
MAPPGSSTVFLLALTIIASTWALTPTHYLTKHDVERLKASLDRPFTNLESAFYSIVGLSSLGAQVPDAKISISNETKDLLLAAVSEDSSVTQIYHAVAALSGFGLPLASQEALSALTARLSKEETVLATVQALQTASHLSQQADLRSIVEEIEDLVARLDELGGVYLQFEEGLETTALFVAATYKLMDHVGTEPSIKEDQVIQLMNAIFSKKNFESLSEAFSVASAAAVLSHNRYHVPVVVVPEGSASDTHEQAILRLQVTNVLSQPLTQATVKLEHAKSVASRATVLQKTSFTPVGDVFELNFMNVKFSSGYYDFLVEVEGDNRYIANTVELRVKISTEVGITNVDLSTVDKDQSIAPKTTRVTYPAKAKGTFIADSHQNFALFFQLVDVNTGAELTPHQTFVRLHNQKTGQEVVFVAEPDNKNVYKFELDTSERKIEFDSASGTYTLYLIIGDATLKNPILWNVADVVIKFPEEEAPSTVLSQNLFTPKQEIQHLFREPEKRPPTVVSNTFTALILSPLLLLFALWIRIGANVSNFTFAPSTIIFHLGHAAMLGLMYVYWTQLNMFQTLKYLAILGSVTFLAGNRMLAQQAVKRIAAEQSSRLAKYRTLRTAH

SEQ ID NO: 73887 - protein, 344 aa, Homo sapiens
  Payload ID: 14619
  Gene Symbol: RPN2
  Gene Name: ribophorin II
  ENSP ID: ENSP00000362735
MAPPGSSTVFLLALTIIASTWALTPTHYLTKHDVERLKASLDRPFTNLESAFYSIVGLSSLGAQVPDAKKACTYIRSNLDPSNVDSLFYAAQASQALSGCEISISNETKDLLLAAVSEDSSVTQIYHAVAALSGFGLPLASQEALSALTARLSKEETVLARVWSTVLESRSLFSKRTVQALQTASHLSQQADLRSIVEEIEDLVARLDELGGVYLQFEEGLETTALFVAATYKLMDHVGTEPSIKEDQVIQLMNAIFSKKNFESLSEAFSVASAAAVLSHNRYHVPVVVVPEGSASDTHEQAILRLQVTNVLSQPLTQATVKLEHAKSVASRATVLQKTSFTPV

SEQ ID NO: 73888 - protein, 166 aa, Homo sapiens
  Payload ID: 14619
  Gene Symbol: RPN2
  Gene Name: ribophorin II
  ENSP ID: ENSP00000399137
MQRTVQALQTASHLSQQADLRSIVEEIEDLVARLDELGGVYLQFEEGLETTALFVAATYKLMDHVGTEPSIKEDQVIQLMNAIFSKKNFESLSEAFSVASAAAVLSHNRYHVPVVVVPEGSASDTHEQAILRLQVTNVLSQPLTQATVKLEHAKSVASRATVLQKT

SEQ ID NO: 73889 - protein, 147 aa, Homo sapiens
  Payload ID: 14619
  Gene Symbol: RPN2
  Gene Name: ribophorin II
  ENSP ID: ENSP00000399404
  MOD_RES (1)..(1): Any amino acid
XGTYTLYLIIGDATLKNPILWNVADVVIKFPEEEAPSTVLSQNLFTPKQEIQHLFREPEKRPPTVVSNTFTALILSPLLLLFALWIRIGANVSNFTFAPSTIIFHLGHAEQHISSRRKMEILKTECQEKESRTIHSMRRKMEKKNFI

SEQ ID NO: 73890 - protein, 138 aa, Homo sapiens
  Payload ID: 14619
  Gene Symbol: RPN2
  Gene Name: ribophorin II
  ENSP ID: ENSP00000409580
ELDTSERKIEFDSASGTYTLYLIIGDATLKNPILWNVADVVIKFPEEEAPSTVLSQNLFTPKQEIQWIRIGANVSNFTFAPSTIIFHLGHAAMLGLMYVYWTQLNMFQTLKYLAILGSVTFLAGNRMLAQQAVKRTAH

SEQ ID NO: 73891 - protein, 162 aa, Homo sapiens
  Payload ID: 14619
  Gene Symbol: RPN2
  Gene Name: ribophorin II
  ENSP ID: ENSP00000435563
MQRKHVPTSDLTLIPAMWIPSSTLPRPARPSQDVRTVQALQTASHLSQQADLRSIVEEIEDLVARLDELGGVYLQFEEGLETTALFVAATYKLMDHVGTEPSIKEDQVIQLMNAIFSKKNFESLSEAFSVASAAAVLSHNRYHVPVVVVPEGSASDTHEQAI

SEQ ID NO: 73892 - protein, 311 aa, Homo sapiens
  Payload ID: 14620
  Gene Symbol: RPIA
  Gene Name: ribose 5-phosphate isomerase A
  Uniprot ID: P49247
  ENSP ID: ENSP00000283646
MQRPGPFSTLYGRVLAPLPGRAGGAASGGGGNSWDLPGSHVRLPGRAQSGTRGGAGNTSTSCGDSNSICPAPSTMSKAEEAKKLAGRAAVENHVRNNQVLGIGSGSTIVHAVQRIAERVKQENLNLVCIPTSFQARQLILQYGLTLSDLDRHPEIDLAIDGADEVDADLNLIKGGGGCLTQEKIVAGYASRFIVIADFRKDSKNLGDQWHKGIPIEVIPMAYVPVSRAVSQKFGGVVELRMAVNKAGPVVTDNGNFILDWKFDRVHKWSEVNTAIKMIPGVVDTGLFINMAERVYFGMQDGSVNMREKPFC

SEQ ID NO: 73893 - protein, 430 aa, Homo sapiens
  Payload ID: 14621
  Gene Symbol: RSL1D1
  Gene Name: ribosomal L1 domain containing 1
  ENSP ID: ENSP00000347897
MEDSASASLSSAAATGTSTSTPAAPTARKQLDKEQVRKAVDALLTHCKSRKNNYGLLLNENESLFLMVVLWKIPSKELRVRLTLPHSIRSDSEDICLFTKDEPNSTPEKTEQFYRKLLNKHGIKTVSQIISLQTLKKEYKSYEAKLRLLSSFDFFLTDARIRRLLPSLIGRHFYQRKKVPVSVNLLSKNLSREINDCIGGTVLNISKSGSCSAIRIGHVGMQIEHIIENIVAVTKGLSEKLPEWESVKLLFVKTEKSAALPIFSSFVSNWDEATKRSLLNKKKKEARRKRRERNFEKQKERKKKRQQARKTASVLSKDDVAPESGDTTVKKPESKKEQTPEHGKKKRGRGKAQVKATNESEDEIPQLVPIGKKTPANEKVEIQKHATGKKSPAKSPNPSTPRGKKRKALPASETPKAAESETPGKSPEKK

SEQ ID NO: 73894 - protein, 39 aa, Homo sapiens
  Payload ID: 14621
  Gene Symbol: RSL1D1
  Gene Name: ribosomal L1 domain containing 1
  ENSP ID: ENSP00000379760
MEDSASASLSSAAATGTSTSTPAAPTARKQLDKEQDLAS

SEQ ID NO: 73895 - protein, 93 aa, Homo sapiens
  Payload ID: 14621
  Gene Symbol: RSL1D1
  Gene Name: ribosomal L1 domain containing 1
  ENSP ID: ENSP00000458684
  MOD_RES (1)..(1): Any amino acid
XDSASASLSSAAATGTSTSTPAAPTARKQLDKEQVRKAVDALLTHCKSRKNNYGLLLNENESLFLMVVLWKIPSKELRVRLDEILRCCPAGVQ

SEQ ID NO: 73896 - protein, 47 aa, Homo sapiens
  Payload ID: 14621
  Gene Symbol: RSL1D1
  Gene Name: ribosomal L1 domain containing 1
  ENSP ID: ENSP00000459207
MEDSASASLSSAAATGTSTSTPAAPTARKQLDKEQDFQKNCQRSGRA

SEQ ID NO: 73897 - protein, 98 aa, Homo sapiens
  Payload ID: 14621
  Gene Symbol: RSL1D1
  Gene Name: ribosomal L1 domain containing 1
  ENSP ID: ENSP00000459331
MVVLWKIPSKELRVRLTLPHSIRSDSEDICLFTKDEPNSTPEKTEQFYRKLLNKHGIKTVSQIISLQTLKKEYKSYEAKLRLLSSFDFFLTDARIRRL

SEQ ID NO: 73898 - protein, 43 aa, Homo sapiens
  Payload ID: 14621
  Gene Symbol: RSL1D1
  Gene Name: ribosomal L1 domain containing 1
  ENSP ID: ENSP00000459622
MEDSASASLSSAAATGTSTSTPAAPTARKQLDKEQVKRQWTLS

SEQ ID NO: 73899 - protein, 158 aa, Homo sapiens
  Payload ID: 14621
  Gene Symbol: RSL1D1
  Gene Name: ribosomal L1 domain containing 1
  ENSP ID: ENSP00000460343
MVRKAVDALLTHCKSRKNNYGLLLNENESLFLMVVLWKIPSKELRVRLTLPHSIRSDSEDICLFTKDEPNSTPEKTEQFYRKLLNKHGIKTVSQIISLQTLKKEYKSYEAKLRLLSSFDFFLTDARIRRLLPSLIGRHFYQRKKVPVSVNLLSKNLSR

SEQ ID NO: 73900 - protein, 296 aa, Homo sapiens
  Payload ID: 14621
  Gene Symbol: RSL1D1
  Gene Name: ribosomal L1 domain containing 1
  ENSP ID: ENSP00000460748
MEDSASASLSSAAATGTSTSTPAAPTARKQLDKEQVRKAVDALLTHCKSRKNNYGLLLNENESLFLMVVLWKIPSKELRVRLTLPHSIRSDSEDICLFTKDEPNSTPEKTEQFYRKLLNKHGIKTVSQIISLQTLKKEYKSYEAKLRLLSSFDFFLTDARIRRLLPSLIGRHFYQRKNAIRIGHVGMQIEHIIENIVAVTKGLSEKLPEKWESVKLLFVKTEKSAALPIFSSFVSNWDEATKRSLLNKKKKEARRKRRERNFEKQKERKKKRQQARKTASVLSKDDVAPESGDTTV

SEQ ID NO: 73901 - protein, 490 aa, Homo sapiens
  Payload ID: 14621
  Gene Symbol: RSL1D1
  Gene Name: ribosomal L1 domain containing 1
  Uniprot ID: O76021
  ENSP ID: ENSP00000460871
MEDSASASLSSAAATGTSTSTPAAPTARKQLDKEQVRKAVDALLTHCKSRKNNYGLLLNENESLFLMVVLWKIPSKELRVRLTLPHSIRSDSEDICLFTKDEPNSTPEKTEQFYRKLLNKHGIKTVSQIISLQTLKKEYKSYEAKLRLLSSFDFFLTDARIRRLLPSLIGRHFYQRKKVPVSVNLLSKNLSREINDCIGGTVLNISKSGSCSAIRIGHVGMQIEHIIENIVAVTKGLSEKLPEKWESVKLLFVKTEKSAALPIFSSFVSNWDEATKRSLLNKKKKEARRKRRERNFEKQKERKKKRQQARKTASVLSKDDVAPESGDTTVKKPESKKEQTPEHGKKKRGRGKAQVKATNESEDEIPQLVPIGKKTPANEKVEIQKHATGKKSPAKSPNPSTPRGKKRKALPASETPKAAESETPGKSPEKKPKIKEEAVKEKSPSLGKKDARQTPKKPEAKFFTTPSKSVRKASHTPKKWPKKPKVPQST

SEQ ID NO: 73902 - protein, 46 aa, Homo sapiens
  Payload ID: 14621
  Gene Symbol: RSL1D1
  Gene Name: ribosomal L1 domain containing 1
  ENSP ID: ENSP00000461513
MEDSASASLSSAAATGTSTSTPAAPTARKQLDKEQCYTYWSRWNAN

SEQ ID NO: 73903 - protein, 163 aa, Homo sapiens
  Payload ID: 14622
  Gene Symbol: RSL24D1
  Gene Name: ribosomal L24 domain containing 1
  Uniprot ID: Q9UHA3
  ENSP ID: ENSP00000260443
MRIEKCYFCSGPIYPGHGMMFVRNDCKVFRFCKSKCHKNFKKKRNPRKVRWTKAFRKAAGKELTVDNSFEFEKRRNEPIKYQRELWNKTIDAMKRVEEIKQKRQAKFIMNRLKKNKELQKVQDIKEVKQNIHLIRAPLAGKGKQLEEKMVQQLQEDVDMEDAP

SEQ ID NO: 73904 - protein, 66 aa, Homo sapiens
  Payload ID: 14622
  Gene Symbol: RSL24D1
  Gene Name: ribosomal L24 domain containing 1
  ENSP ID: ENSP00000454492
MVELCIKLLQVFRFCKSKCHKNFKKKRNPRKVRWTKAFRKAAGKELTVDNSFEFEKRRNEPIKYQR

SEQ ID NO: 73905 - protein, 83 aa, Homo sapiens
  Payload ID: 14622
  Gene Symbol: RSL24D1
  Gene Name: ribosomal L24 domain containing 1
  ENSP ID: ENSP00000455291
MRIEKCYFCSGPIYPGHGMMFVRNDCKVFRFCKSKCHKNFKKKRNPRKVRWTKAFRKAAGKELTVVSTVSYQYSFYTFHSFSI

SEQ ID NO: 73906 - protein, 97 aa, Homo sapiens
  Payload ID: 14623
  Gene Symbol: RIMKLA
  Gene Name: ribosomal modification protein rimK-like family member A
  ENSP ID: ENSP00000387064
MPDTFSYGGHEDFSKMIDEAEPLGYPVVVKSTRGHRGKAVFLARDKHHLSDICHLIRHDVPYLFQKYVKESHGKDIRVVVVGGQVIGSMLRCSTDGR

SEQ ID NO: 73907 - protein, 391 aa, Homo sapiens
  Payload ID: 14623
  Gene Symbol: RIMKLA
  Gene Name: ribosomal modification protein rimK-like family member A
  Uniprot ID: Q8IXN7
  ENSP ID: ENSP00000414330
MCSQLWFLTDRRIREDYPQVQILRALRQRCSEQDVRFRAVLMDQIAVTIVGGHLGLQLNQKALTTFPDVVLVRVPTPSVQSDSDITVLRHLEKLGCRLVNRPQSILNCINKFWTFQELAGHGVPMPDTFSYGGHEDFSKMIDEAEPLGYPVVVKSTRGHRGKAVFLARDKHHLSDICHLIRHDVPYLFQKYVKESHGKDIRVVVVGGQVIGSMLRCSTDGRMQSNCSLGGVGVKCPLTEQGKQLAIQVSNILGMDFCGIDLLIMDDGSFVVCEANANVGFLAFDQACNLDVGGIIADYTMSLLPNRQTGKMAVLPGLSSPREKNEPDGCASAQGVAESVYTINSGSTSSESEPELGEIRDSSASTMGAPPSMLPEPGYNINNRIASELKLK

SEQ ID NO: 73908 - protein, 386 aa, Homo sapiens
  Payload ID: 14624
  Gene Symbol: RIMKLB
  Gene Name: ribosomal modification protein rimK-like family member B
  Uniprot ID: Q9ULI2
  ENSP ID: ENSP00000350136
MCSSVAAKLWFLTDRRIREDYPQKEILRALKAKCCEEELDFRAVVMDEVVLTIEQGNLGLRINGELITAYPQVVVVRVPTPWVQSDSDITVLRHLEKMGCRLMNRPQAILNCVNKFWTFQELAGHGVPLPDTFSYGGHENFAKMIDEAEVLEFPMVVKNTRGHRGKAVFLARDKHHLADLSHLIRHEAPYLFQKYVKESHGRDVRVIVVGGRVVGTMLRCSTDGRMQSNCSLGGVGMMCSLSEQGKQLAIQVSNILGMDVCGIDLLMKDDGSFCVCEANANVGFIAFDKACNLDVAGIIADYAASLLPSGRLTRRMSLLSVVSTASETSEPELGPPASTAVDNMSASSSSVDSDPESTERELLTKLPGGLFNMNQLLANEIKLLVD

SEQ ID NO: 73909 - protein, 307 aa, Homo sapiens
  Payload ID: 14624
  Gene Symbol: RIMKLB
  Gene Name: ribosomal modification protein rimK-like family member B
  Uniprot ID: Q9ULI2
  ENSP ID: ENSP00000438004
MCSSVAAKLWFLTDRRIREDYPQKEILRALKAKCCEEELDFRAVVMDEVVLTIEQGNLGLRINGELITAYPQVVVVRVPTPWVQSDSDITVLRHLEKMGCRLMNRPQAILNCVNKFWTFQELAGHGVPLPDTFSYGGHENFAKMIDEAEVLEFPMVVKNTRGHRGKAVFLARDKHHLADLSHLIRHEAPYLFQKYVKESHGRDVRVIVVGGRVVGTMLRCSTDGRMQSNCSLGGVGMMCSLSEQGKQLAIQVSNILGMDVCGIDLLMKDDGSFCVCEANANPFQEPKKQIQTNKKIPREKTFLLPPS

SEQ ID NO: 73910 - protein, 95 aa, Homo sapiens
  Payload ID: 14624
  Gene Symbol: RIMKLB
  Gene Name: ribosomal modification protein rimK-like family member B
  ENSP ID: ENSP00000439079
MCSSVAAKLWFLTDRRIREDYPQKEILRALKAKCCEEELDFRAVVMDEVVLTIEQGNLGLRINGELITAYPQVVVVRVPTPWVQSDSDITVLRHL

SEQ ID NO: 73911 - protein, 386 aa, Homo sapiens; identical to SEQ ID NO: 73908
  Payload ID: 14624
  Gene Symbol: RIMKLB
  Gene Name: ribosomal modification protein rimK-like family member B
  Uniprot ID: Q9ULI2
  ENSP ID: ENSP00000440943

SEQ ID NO: 73912 - protein, 114 aa, Homo sapiens
  Payload ID: 14624
  Gene Symbol: RIMKLB
  Gene Name: ribosomal modification protein rimK-like family member B
  ENSP ID: ENSP00000444445
MCSSVAAKLWFLTDRRIREDYPQKEILRALKAKCCEEELDFRAVVMDEVVLTIEQGNLGLRINGELITAYPQVVVVRVPTPWVQSDSDITVLRHLEKMGCRLMNRPQAILNCVN

SEQ ID NO: 73913 - protein, 170 aa, Homo sapiens
  Payload ID: 14624
  Gene Symbol: RIMKLB
  Gene Name: ribosomal modification protein rimK-like family member B
  ENSP ID: ENSP00000444721
MARVRARSWEGGSRRSRPAARASSKAPARLSRPRAREEPPDPGRRYIQEEIIQARKHKLIKMCSSVAAKLWFLTDRRIREDYPQKEILRALKAKCCEEELDFRAVVMDEVVLTIEQGNLGLRINGELITAYPQVVVVRVPTPWVQSDSDITVLRHLEKMGCRLMNRPQAI

SEQ ID NO: 73914 - protein, 386 aa, Homo sapiens; identical to SEQ ID NO: 73908
  Payload ID: 14624
  Gene Symbol: RIMKLB
  Gene Name: ribosomal modification protein rimK-like family member B
  Uniprot ID: Q9ULI2
  ENSP ID: ENSP00000445863

SEQ ID NO: 73915 - protein, 307 aa, Homo sapiens; identical to SEQ ID NO: 73909
  Payload ID: 14624
  Gene Symbol: RIMKLB
  Gene Name: ribosomal modification protein rimK-like family member B
  Uniprot ID: Q9ULI2
  ENSP ID: ENSP00000483871

SEQ ID NO: 73916 - protein, 214 aa, Homo sapiens
  Payload ID: 14625
  Gene Symbol: RPL10
  Gene Name: ribosomal protein L10
  Uniprot ID: P27635
  ENSP ID: ENSP00000341730
MGRRPARCYRYCKNKPYPKSRFCRGVPDAKIRIFDLGRKKAKVDEFPLCGHMVSDEYEQLSSEALEAARICANKYMVKSCGKDGFHIRVRLHPFHVIRINKMLSCAGADRLQTGMRGAFGKPQGTVARVHIGQVIMSIRTKLQNKEHVIEALRRAKFKFPGRQKIHISKKWGFTKFNADEFEDMVAEKRLIPDGCGVKYIPSRGPLDKWRALHS

SEQ ID NO: 73917 - protein, 214 aa, Homo sapiens; identical to SEQ ID NO: 73916
  Payload ID: 14625
  Gene Symbol: RPL10
  Gene Name: ribosomal protein L10
  Uniprot ID: P27635
  ENSP ID: ENSP00000358832

SEQ ID NO: 73918 - protein, 163 aa, Homo sapiens
  Payload ID: 14625
  Gene Symbol: RPL10
  Gene Name: ribosomal protein L10
  ENSP ID: ENSP00000385621
MVSDEYEQLSSEALEAARICANKYMVKSCGKDGFHIRVRLHPFHVIRINKMLSCAGADRLQTGMRGAFGKPQGTVARVHIGQVIMSIRTKLQNKEHVIEALRRAKFKFPGRQKIHISKKWGFTKFNADEFEDMVAEKRLIPDGCGVKYIPSRGPLDKWRALHS

SEQ ID NO: 73919 - protein, 200 aa, Homo sapiens
  Payload ID: 14625
  Gene Symbol: RPL10
  Gene Name: ribosomal protein L10
  ENSP ID: ENSP00000388600
MGRRPARCYRYCKNKPYPKSRFCRGVPDAKIRIFDLGRKKAKVDEFPLCGHMVSDEYEQLSSEALEAARICANKYMVKSCGKDGFHIRVRLHPFHVIRINKMLSCAGADRLQTGMRGAFGKPQGTVARVHIGQVIMSIRTKLQNKEHVIEALRRAKFKFPGRQKIHISKKWGFTKFNADEFEDMVAEKRLIPDGCGVKYI

SEQ ID NO: 73920 - protein, 181 aa, Homo sapiens
  Payload ID: 14625
  Gene Symbol: RPL10
  Gene Name: ribosomal protein L10
  ENSP ID: ENSP00000395025
MGRRPARCYRYCKNKPYPKSRFCRGVPDAKIRIFDLGRKKAKVDEFPLCGHMVSDEYEQLSSEALEAARICANKYMVKSCGKDGFHIRVRLHPFHVIRINKMLSCAGADRSTSQRSGASPSSMLMNLKTWWLKSGSSQMAVGSSTSPVVALWTSGGPCTHEGFQCAAPLLILTNKFYFLST

SEQ ID NO: 73921 - protein, 91 aa, Homo sapiens
  Payload ID: 14625
  Gene Symbol: RPL10
  Gene Name: ribosomal protein L10
  ENSP ID: ENSP00000398047
LHPFHVIRINKMLSCAGADRLQTGMRGAFGKPQGTVARVHIGQVIMSIRTKLQNKEHVIEALRRAKFKFPGRQKGAPIPAQTSLSPSLPHP

SEQ ID NO: 73922 - protein, 131 aa, Homo sapiens
  Payload ID: 14625
  Gene Symbol: RPL10
  Gene Name: ribosomal protein L10
  ENSP ID: ENSP00000405064
LHPFHVIRINKMLSCAGADRLQTGMRGAFGKPQGTVARVHIGQVIMSIRTKLQNKEHVIEALRRAKFKFPGRQKAYLALPVLGDLQKHIVEGVQLLLYGLRSGVQRDQHQAGKDCKAQGPRAAIHSWTFSP

SEQ ID NO: 73923 - protein, 108 aa, Homo sapiens
  Payload ID: 14625
  Gene Symbol: RPL10
  Gene Name: ribosomal protein L10
  ENSP ID: ENSP00000406125
PKSRFCRGVPDAKIRIFDLGRKKAKVDEFPLCGHMVSDEYEQLSSEALEAARICANKYMVKSCGKDGFHIRVRLHPFHVIRINKMLSCAGADRPTLLCQCWETSRNTS

SEQ ID NO: 73924 - protein, 28 aa, Homo sapiens
  Payload ID: 14625
  Gene Symbol: RPL10
  Gene Name: ribosomal protein L10
  ENSP ID: ENSP00000407754
LHPFHVIRINKMLSCAGADSPIPSPPPR

SEQ ID NO: 73925 - protein, 214 aa, Homo sapiens; identical to SEQ ID NO: 73916
  Payload ID: 14625
  Gene Symbol: RPL10
  Gene Name: ribosomal protein L10
  Uniprot ID: P27635
  ENSP ID: ENSP00000413436

SEQ ID NO: 73926 - protein, 178 aa, Homo sapiens
  Payload ID: 14625
  Gene Symbol: RPL10
  Gene Name: ribosomal protein L10
  ENSP ID: ENSP00000479103
MGRRPARCYRYCKNKPYPKSRFCRGVPALEAARICANKYMVKSCGKDGFHIRVRLHPFHVIRINKMLSCAGADRLQTGMRGAFGKPQGTVARVHIGQVIMSIRTKLQNKEHVIEALRRAKFKFPGRQKIHISKKWGFTKFNADEFEDMVAEKRLIPDGCGVKYIPSRGPLDKWRALHS

SEQ ID NO: 73927 - protein, 217 aa, Homo sapiens
  Payload ID: 14626
  Gene Symbol: RPL10A
  Gene Name: ribosomal protein L10a
  Uniprot ID: P62906
  ENSP ID: ENSP00000363018
MSSKVSRDTLYEAVREVLHGNQRKRRKFLETVELQISLKNYDPQKDKRFSGTVRLKSTPRPKFSVCVLGDQQHCDEAKAVDIPHMDIEALKKLNKNKKLVKKLAKKYDAFLASESLIKQIPRILGPGLNKAGKFPSLLTHNENMVAKVDEVKSTIKFQMKKVLCLAVAVGHVKMTDDELVYNIHLAVNFLVSLLKKNWQNVRALYIKSTMGKPQRLY

SEQ ID NO: 73928 - protein, 214 aa, Homo sapiens [sequence omitted]

SEQ ID NO: 73929 - protein, 178 aa, Homo sapiens [sequence omitted]

SEQ ID NO: 73930 - protein, 131 aa, Homo sapiens
  Payload ID: 14628
  Gene Symbol: RPL11
  Gene Name: ribosomal protein L11
  ENSP ID: ENSP00000390839
QDQGEKENPMRELRIRKLCLNICVGESGDRLTRAAKVLEQLTGQTPVFSKARYTVRSFGIRRNEKIAVHCTVRGAKAEEILEKGLKVREYELRKNNFSDTGNFGFGIQEHIDLGIKYDPSIGIYGLDFYVV

SEQ ID NO: 73931 - protein, 174 aa, Homo sapiens
  Payload ID: 14628
  Gene Symbol: RPL11
  Gene Name: ribosomal protein L11
  ENSP ID: ENSP00000398888
QDQGEKENPMRELRIRKLCLNICVGESGDRLTRAAKVLEQLTGQTPVFSKARYTVRSFGIRRNEKIAVHCTVRGAKAEEILEKGLKVREYELRKNNFSDTGNFGFGIQEHIDLGIKYDPSIGIYGLDFYVVLGRPGFSIADKKRRTGCIGAKHRISKEEAMRWFQQKVKLIYLK

SEQ ID NO: 73932 - protein, 165 aa, Homo sapiens [sequence omitted]

SEQ ID NO: 73933 - protein, 132 aa, Homo sapiens
  Payload ID: 14629
  Gene Symbol: RPL12
  Gene Name: ribosomal protein L12
  Uniprot ID: P30050
  ENSP ID: ENSP00000441179
MPPKFDPNEIKVVYLRCTGGEVGATSALAPKIGPLGLIEVVPSASALIIKALKEPPRDRKKQKNIKHSGNITFDEIVNIARQMRHRSLARELSGTIKEILGTAQSVGCNVDGRHPHDIIDDINSGAVECPAS

SEQ ID NO: 73934 - protein, 211 aa, Homo sapiens [sequence omitted]

SEQ ID NO: 73935 - protein, 211 aa, Homo sapiens [sequence omitted]

SEQ ID NO: 73936 - protein, 164 aa, Homo sapiens
  Payload ID: 14630
  Gene Symbol: RPL13
  Gene Name: ribosomal protein L13
  Uniprot ID: P26373
  ENSP ID: ENSP00000438959
MAPSRNGMVLKPHFHKDWQRRVATWFNQPARKIRRRKARQAKARRIAPRPASGPIRPIVRCPTVRYHTKVRAGRGFSLEELRVAGIHKKGDSSAEELKLATQLTGPVMPVRNVYKKEKARVITEEEKNFKAFASLRMARANARLFGIRAKRAKEAAEQDVEKKK

SEQ ID NO: 73937 - protein, 211 aa, Homo sapiens [sequence omitted]

SEQ ID NO: 73938 - protein, 63 aa, Homo sapiens
  Payload ID: 14630
  Gene Symbol: RPL13
  Gene Name: ribosomal protein L13
  ENSP ID: ENSP00000457174
MAPSRNGMVLKPHFHKDWQRRVATWFNQPARKIRRRWPGPSAFLWIRGGGTSPRSPCRPTCSG

SEQ ID NO: 73939 - protein, 54 aa, Homo sapiens
  Payload ID: 14630
  Gene Symbol: RPL13
  Gene Name: ribosomal protein L13
  ENSP ID: ENSP00000457686
MPVRNVYKKEKARVITEEEKNFKAFASLRMARANARLFGIRAKRAKEAAEQDVE

SEQ ID NO: 73940 - protein, 78 aa, Homo sapiens
  Payload ID: 14630
  Gene Symbol: RPL13
  Gene Name: ribosomal protein L13
  ENSP ID: ENSP00000462380
  MOD_RES (1)..(1): Any amino acid
XPVMPVRNVSEHLLKSRLQTRSVGEHVYKKEKARVITEEEKNFKAFASLRMARANARLFGIRAKRAKEAAEQDVEKKK

SEQ ID NO: 73941 - protein, 126 aa, Homo sapiens
  Payload ID: 14630
  Gene Symbol: RPL13
  Gene Name: ribosomal protein L13
  ENSP ID: ENSP00000464612
MAPSRNGMVLKPHFHKDWQRRVATWFNQPARKIRRRKARQAKARRIAPRPASGPIRPIVRCPTVRYHTKVRAGRGFSLEELRVAGIHKKVARTIGISVDPRRRNKSTESLQANVQRLKEYRSKLIL

SEQ ID NO: 73942 - protein, 203 aa, Homo sapiens [sequence omitted]

SEQ ID NO: 73943 - protein, 210 aa, Homo sapiens
  Payload ID: 14631
  Gene Symbol: RPL13A
  Gene Name: ribosomal protein L13a
  ENSP ID: ENSP00000470037
  MOD_RES (1)..(1): Any amino acid
XEVQVLVLDGRGHLLGRLAAIVAKQVLLGRKVVVVRCEGINISGNFYRNKLKYLAFLRKRMNTNPSRGPYHFRAPSRIFWRTVRGEQSVGTAGMLPHKTKRGQAALDRLKVFDGIPPPYDKKKRMVVPAALKVVRLKPTRKFAYLGRLAHEVGWKYQAVTATLEEKRKEKAKIHYRKKKQLMRLRKQAEKNVEKKIDKYTEVLKTHGLLV

SEQ ID NO: 73944 - protein, 46 aa, Homo sapiens
  Payload ID: 14631
  Gene Symbol: RPL13A
  Gene Name: ribosomal protein L13a
  ENSP ID: ENSP00000470768
MAEVQVLVLDGRGHLLGRLAAIVAKQVLLGKSLLVAPLSWAPAGGQ

SEQ ID NO: 73945 - protein, 142 aa, Homo sapiens
  Payload ID: 14631
  Gene Symbol: RPL13A
  Gene Name: ribosomal protein L13a
  ENSP ID: ENSP00000477755
MNTNPSRGPYHFRAPSRIFWRTVRGMLPHKTKRGQAALDRLKVFDGIPPPYDKKKRMVVPAALKVVRLKPTRKFAYLGRLAHEVGWKYQAVTATLEEKRKEKAKIHYRKKKQLMRLRKQAEKNVEKKIDKYTEVLKTHGLLV

SEQ ID NO: 73946 - protein, 48 aa, Homo sapiens
  Payload ID: 14631
  Gene Symbol: RPL13A
  Gene Name: ribosomal protein L13a
  ENSP ID: ENSP00000485546
MAEVQVLVLDGRGHLLGRLAAIVAKQAGRWWSYAVKASTFLAISTETS

SEQ ID NO: 73947 - protein, 215 aa, Homo sapiens [sequence omitted]

SEQ ID NO: 73948 - protein, 215 aa, Homo sapiens [sequence omitted]

SEQ ID NO: 73949 - protein, 124 aa, Homo sapiens
  Payload ID: 14632
  Gene Symbol: RPL14
  Gene Name: ribosomal protein L14
  ENSP ID: ENSP00000391446
MVFRRFVEVGRVAYVSFGPHAGKLVAIVDVIDQNRALVDGPCTQVRRQAMPFKCMQLTDFILKFPHSAHQKYVRQAWQKADINTKWAATRWAKKIEARERKAKMTDFDRFKVMKAKKMEQNNQE

SEQ ID NO: 73950 - protein, 52 aa, Homo sapiens
  Payload ID: 14632
  Gene Symbol: RPL14
  Gene Name: ribosomal protein L14
  ENSP ID: ENSP00000402476
MVRVPGPAVQRNRALPGLAPFPDSPLASAWRARQAWRALGHACAPPPLELDG

SEQ ID NO: 73951 - protein, 204 aa, Homo sapiens [sequence omitted]

SEQ ID NO: 73952 - protein, 204 aa, Homo sapiens [sequence omitted]

SEQ ID NO: 73953 - protein, 133 aa, Homo sapiens
  Payload ID: 14633
  Gene Symbol: RPL15
  Gene Name: ribosomal protein L15
  ENSP ID: ENSP00000387925
MGAYKYIQELWRKKQSDVMRFLLRVRCWQYRQLSALHRAPRPTRPDKARRLGYKAKQGYVIYRIRVRRGGRKRPVPKGATYGKPVHHGVNQLKFARSLQSVAEERAGRHCGALRVLNSYWVGEDSTYKFFEVI

SEQ ID NO: 73954 - protein, 204 aa, Homo sapiens [sequence omitted]

SEQ ID NO: 73955 - protein, 204 aa, Homo sapiens [sequence omitted]

SEQ ID NO: 73956 - protein, 145 aa, Homo sapiens
  Payload ID: 14633
  Gene Symbol: RPL15
  Gene Name: ribosomal protein L15
  Uniprot ID: P61313
  ENSP ID: ENSP00000398788
MGAYKYIQELWRKKQSDVMRFLLRVRCWQYRQLSALHRAPRPTRPDKARRLGYKAKQGYVIYRIRVRRGGRKRPVPKGATYGKPVHHGVNQLKFARSLQSVAEERAGRHCGALRVLNSYWMESHSHSGGSAVGQSRLTATSVSRV

SEQ ID NO: 73957 - protein, 174 aa, Homo sapiens
  Payload ID: 14633
  Gene Symbol: RPL15
  Gene Name: ribosomal protein L15
  ENSP ID: ENSP00000405590
MGAYKYIQELWRKKQSDVMRFLLRVRCWQYRQLSALHRAPRPTRPDKARRLGYKAKQGYVIYRIRVRRGGRKRPVPKGATYGKPVHHGVNQLKFARSLQSVAEERAGRHCGALRVLNSYWVGEDSTYKFFEVILIDPFHKAIRRNPDTQWITKPVHKHREMRGLTSAGRKSRGL

SEQ ID NO: 73958 - protein, 59 aa, Homo sapiens
  Payload ID: 14633
  Gene Symbol: RPL15
  Gene Name: ribosomal protein L15
  ENSP ID: ENSP00000408243
MGAYKYIQELWRKKQSDVMRFLLRVRCWQYRQLSALHRAPRPTRPDKARRLGYKAKQGT

SEQ ID NO: 73959 - protein, 175 aa, Homo sapiens
  Payload ID: 14633
  Gene Symbol: RPL15
  Gene Name: ribosomal protein L15
  ENSP ID: ENSP00000411176
MGAYKYIQELWRKKQSDVMRFLLRVRCWQYRQLSALHRAPRPTRPDKARRLGYKAKQGYVIYRIRVRRGGRKRPVPKGATYGKPVHHGVNQLKFARSLQSVAEVNAGRHCGALRVLNSYWVGEDSTYKFFEVILIDPFHKAIRRNPDTQWITKPVHKHREMRGLTSAGRKSRGLG

SEQ ID NO: 73960 - protein, 204 aa, Homo sapiens [sequence omitted]

SEQ ID NO: 73961 - protein, 204 aa, Homo sapiens [sequence omitted]

SEQ ID NO: 73962 - protein, 129 aa, Homo sapiens
  Payload ID: 14634
  Gene Symbol: RPL17
  Gene Name: ribosomal protein L17
  ENSP ID: ENSP00000461910
MVRYSLDPENPTKSCKSRGSNLRVHFKNTRETAQAIKGMHIRKATKYLKDVTLQKQCVPFRRYNGGVGRCAQAKQWGWTQGRWPKKSAEFLLHMLKNAESNAELKGLDVDSLVIEHIQVNKAPKMRRRT

SEQ ID NO: 73963 - protein, 184 aa, Homo sapiens [sequence omitted]

SEQ ID NO: 73964 - protein, 174 aa, Homo sapiens
  Payload ID: 14634
  Gene Symbol: RPL17
  Gene Name: ribosomal protein L17
  ENSP ID: ENSP00000462203
MVRYSLDPENPTKSCKSRGSNLRVHFKNTRETAQAIKGMHIRKATKYLKDVTLQKQCVPFRRYNGGVGRCAQAKQWGWTQGRWPKKSAEFLLHMLKNAESNAELKGLDVDSLVIEHIQVNKAPKMRRRTYRAHGRINPYMSSPCHIEMILTEKEQIVPKPEEEVAQKKKISQKK

SEQ ID NO: 73965 - protein, 184 aa, Homo sapiens [sequence omitted]

SEQ ID NO: 73966 - protein, 56 aa, Homo sapiens
  Payload ID: 14634
  Gene Symbol: RPL17
  Gene Name: ribosomal protein L17
  ENSP ID: ENSP00000462508
MVRYSLDPENPTKSCKSRGSNLRVHFKNTRETAQAIKGMHIRKATKYLKDVTLQKQ

SEQ ID NO: 73967 - protein, 146 aa, Homo sapiens
  Payload ID: 14634
  Gene Symbol: RPL17
  Gene Name: ribosomal protein L17
  Uniprot ID: P18621
  ENSP ID: ENSP00000462944
MHIRKATKYLKDVTLQKQCVPFRRYNGGVGRCAQAKQWGWTQGRWPKKSAEFLLHMLKNAESNAELKGLDVDSLVIEHIQVNKAPKMRRRTYRAHGRINPYMSSPCHIEMILTEKEQIVPKPEEEVAQKKKISQKKLKKQKLMARE

SEQ ID NO: 73968 - protein, 174 aa, Homo sapiens
  Payload ID: 14634
  Gene Symbol: RPL17
  Gene Name: ribosomal protein L17
  ENSP ID: ENSP00000463490
MSYSCKSRGSNLRVHFKNTRETAQAIKGMHIRKATKYLKDVTLQKQCVPFRRYNGGVGRCAQAKQWGWTQGRWPKKSAEFLLHMLKNAESNAELKGLDVDSLVIEHIQVNKAPKMRRRTYRAHGRINPYMSSPCHIEMILTEKEQIVPKPEEEVAQKKKISQKKLKKQKLMARE

SEQ ID NO: 73969 - protein, 184 aa, Homo sapiens [sequence omitted]

SEQ ID NO: 73970 - protein, 171 aa, Homo sapiens
  Payload ID: 14634
  Gene Symbol: RPL17
  Gene Name: ribosomal protein L17
  ENSP ID: ENSP00000463885
MVRYSLDPENPTKSCKSRGSNLRVHFKNTRETAQAIKGMHIRKATKYLKDVTLQKQCVPFRRYNGGVGRCAQAKQWGWTQGRWPKKSAEFLLHMLKNAESNAELKGLDVDSLVIEHIQVNKAPKMRRRTYRAHGRINPYMSSPCHIEMILTEKEQIVPKPEEEVAQKKKIS

SEQ ID NO: 73971 - protein, 138 aa, Homo sapiens
  Payload ID: 14634
  Gene Symbol: RPL17
  Gene Name: ribosomal protein L17
  ENSP ID: ENSP00000464586
MVRYSLDPENPTKSCKSRGSNLRVHFKNTRETAQAIKGMHIRKATKYLKDVTLQKQCVPFRRYNGGVGRCAQAKQWGWTQGRWPKKSAEFLLHMLKNAESNAELKGLDVDSLVIEHIQVNKAPKMRRRTYRAHGRINP

SEQ ID NO: 73972 - protein, 131 aa, Homo sapiens
  Payload ID: 14634
  Gene Symbol: RPL17
  Gene Name: ribosomal protein L17
  ENSP ID: ENSP00000480215
MVRYSLDPENPTKSCKSRGSNLRVHFKNTRETAQAIKGMHIRKATKYLKDVTLQKQCVPFRRYNGGVGRCAQAKQWGWTQGRWPKKSAEFLLHMLKNAESNAELKGLDVDSLVIEHIQVNKAPKMRRRTYR

SEQ ID NO: 73973 - protein, 184 aa, Homo sapiens [sequence omitted]

SEQ ID NO: 73974 - protein, 169 aa, Homo sapiens
  Payload ID: 14634
  Gene Symbol: RPL17
  Gene Name: ribosomal protein L17
  ENSP ID: ENSP00000481145
MVRYSLDPENPTKSCKSRGSNLRVHFKNTRETAQAIKGMHIRKATKYLKDVTLQKQCVPFRRYNGGVGRCAQAKQWGWTQGRWPKKSAEFLLHMLKNAESNAELKGLDVDSLVIEHIQVNKAPKMRRRTYRAHGRINPYMSSPCHIEMILTEKEQIVPKPEEEVAQKKK

SEQ ID NO: 73975 - protein, 97 aa, Homo sapiens
  Payload ID: 14634
  Gene Symbol: RPL17
  Gene Name: ribosomal protein L17
  ENSP ID: ENSP00000481587
MVRYSLDPENPTKSCKSRGSNLRVHFKNTRETAQAIKGMHIRKATKYLKDVTLQKQCVPFRRYNGGVGRCAQAKQWGWTQGRWPKKSAEFLLHMLKN

SEQ ID NO: 73976 - protein, 184 aa, Homo sapiens [sequence omitted]

SEQ ID NO: 73977 - protein, 190 aa, Homo sapiens
  Payload ID: 14635
  Gene Symbol: RPL18
  Gene Name: ribosomal protein L18
  ENSP ID: ENSP00000084795
  MOD_RES (1)..(1): Any amino acid
XPQGVDIRHNKDRKVRRKEPKSQDIYLRLLVKLYRFLARRTNSTFNQVVLKRLFMSRTNRPPLSLSRMIRKMKLPGRENKTAVVVGTITDDVRVQEVPKLKVCALRVTSRARSRILRAGGKILTFDQLALDSPKGCGTVLLSGPRKGREVYRHFGKAPGTPHSHTKPYVRSKGRKFERARGRRASRGYKN

SEQ ID NO: 73978 - protein, 167 aa, Homo sapiens
  Payload ID: 14635
  Gene Symbol: RPL18
  Gene Name: ribosomal protein L18
  ENSP ID: ENSP00000446634
  MOD_RES (1)..(1): Any amino acid
XVKLYRFLARRTNSTFNQVVLKRLFMSRTNRPPLSLSRMIRKMKLPGRENKTAVVVGTITDDVRVQEVPKLKPCPLHQVCALRVTSRARSRILRAGGKILTFDQLALDSPKGCGTVLLSGPRKGREVYRHFGKAPGTPHSHTKPYVRSKGRKFERARGRRASRGYKN

SEQ ID NO: 73979 - protein, 188 aa, Homo sapiens [sequence omitted]

SEQ ID NO: 73980 - protein, 130 aa, Homo sapiens
  Payload ID: 14635
  Gene Symbol: RPL18
  Gene Name: ribosomal protein L18
  ENSP ID: ENSP00000447894
MSRTNRPPLSLSRMIRKMKLPGRENKTAVVVGTITDDVRVQEVPKLKVCALRVTSRARSRILRAGGKILTFDQLALDSPKGCGTVLLSGPRKGREVYRHFGKAPGTPHSHTKPYVRSKGRKFERARGRRA

SEQ ID NO: 73981 - protein, 133 aa, Homo sapiens
  Payload ID: 14635
  Gene Symbol: RPL18
  Gene Name: ribosomal protein L18
  ENSP ID: ENSP00000448899
MGVDIRHNKDRKVRRKEPKSQDIYLRLLVKLYRFLARRTNSTFNQVVLKRLFMSRTNRPPLSLSRMIRKMKLPGRENKTAVVVGTITDDVRVQEVPKLKAPGTPHSHTKPYVRSKGRKFERARGRRASRGYKN

SEQ ID NO: 73982 - protein, 84 aa, Homo sapiens
  Payload ID: 14635
  Gene Symbol: RPL18
  Gene Name: ribosomal protein L18
  ENSP ID: ENSP00000449067
MGVDIRHNKDRKVRRKEPKSQDIYLRLLVKVSGQKNQLHIQPGCVEEVVYESHQPAASVPFPDDPEDEASWPGKQDGRGCGDHN

SEQ ID NO: 73983 - protein, 159 aa, Homo sapiens
  Payload ID: 14635
  Gene Symbol: RPL18
  Gene Name: ribosomal protein L18
  Uniprot ID: Q07020
  ENSP ID: ENSP00000449204
MLYRFLARRTNSTFNQVVLKRLFMSRTNRPPLSLSRMIRKMKLPGRENKTAVVVGTITDDVRVQEVPKLKVCALRVTSRARSRILRAGGKILTFDQLALDSPKGCGTVLLSGPRKGREVYRHFGKAPGTPHSHTKPYVRSKGRKFERARGRRASRGYKN

SEQ ID NO: 73984 - protein, 164 aa, Homo sapiens
  Payload ID: 14635
  Gene Symbol: RPL18
  Gene Name: ribosomal protein L18
  ENSP ID: ENSP00000449610
MGVDIRHNKDRKVRRKEPKSQDIYLRLLVKLYRFLARRTNSTFNQVVLKRLFMSRTNRPPLSLSRMIRKMKLPGRENKTAVVVGTITDDVRVQEVPKLKVCALRVTSRARSRILRAGGKILTFDQLALDSPKGCGTVLLSGPRKGREVYRHFGKAPGTPHSHTK

SEQ ID NO: 73985 - protein, 138 aa, Homo sapiens
  Payload ID: 14635
  Gene Symbol: RPL18
  Gene Name: ribosomal protein L18
  ENSP ID: ENSP00000470988
MGVDIRHNKDRKVRRKEPKSQDIYLRLLVKLYRFLARRTNSTFNQVVLKRLFMSRTNRPPLSLSRMIRKMKLPGRENKTAVVVGTITDDVRVQEVPKLKTLRPLQGPEVRACQRPTGQPRLQKLTLDPTLLLKRFLLT

SEQ ID NO: 73986 - protein, 176 aa, Homo sapiens [sequence omitted]

SEQ ID NO: 73987 - protein, 137 aa, Homo sapiens
  Payload ID: 14636
  Gene Symbol: RPL18A
  Gene Name: ribosomal protein L18a
  ENSP ID: ENSP00000471360
MKASGTLREYKLKKMKKSSGEIVYCGQVFEKSPLRVKNFGIWLRYDSRSGTHNMYREYRDLTTAGAVTQCYRDMGARHRARAHSIQIMKVEEIAASKCRRPAVKQFHDSKIKFPLPHRVLRRQHKPRFTTKRPNTFF

SEQ ID NO: 73988 - protein, 154 aa, Homo sapiens
  Payload ID: 14636
  Gene Symbol: RPL18A
  Gene Name: ribosomal protein L18a
  ENSP ID: ENSP00000471584
MKASGTLREYKVVGRCLPTPKCHTPPLYRMRIFAPNHVVAKSRFWYFVSQLKKMKKSSGEIVYCGQVFEKSPLRVKNFGIWLRYDSRSGTHNMYREYRDLTTAGAVTQCYRDMGARHRARAHSIQIMKVEEIAASKCRRPHKPRFTTKRPNTFF

SEQ ID NO: 73989 - protein, 147 aa, Homo sapiens
  Payload ID: 14636
  Gene Symbol: RPL18A
  Gene Name: ribosomal protein L18a
  ENSP ID: ENSP00000471748
MRIFAPNHVVAKSRFWYFVSQLKKMKKSSGEIVYCGQVFEKSPLRVKNFGIWLRYDSRSGTHNMYREYRDLTTAGAVTQCYRDMGARHRARAHSIQIMKVEEIAASKCRRPAVKQFHDSKIKFPLPHRVLRRQHKPRFTTKRPNTFF

SEQ ID NO: 73990 - protein, 141 aa, Homo sapiens
  Payload ID: 14636
  Gene Symbol: RPL18A
  Gene Name: ribosomal protein L18a
  ENSP ID: ENSP00000473155
MRIFAPNHVVAKSRFWYFVSQLKKMKKSSGEIVYCGQVFEKSPLRVKNFGIWLRYDSRSGTHNMYREYRDLTTAGAVTQCYRDMGARHRARAHSIQIMKVEEIAASKCRRPAVKQFHDSKIKFPLPHRVLRRQHKPRFTTK

SEQ ID NO: 73991 - protein, 196 aa, Homo sapiens [sequence omitted]

SEQ ID NO: 73992 - protein, 194 aa, Homo sapiens
  Payload ID: 14637
  Gene Symbol: RPL19
  Gene Name: ribosomal protein L19
  ENSP ID: ENSP00000462938
MLRLQKRLASSVLRCGKKKVWLDPNETNEIANANSRQQIRKLIKDGLIIRKPVTVHSRARCRKNTLARRKGRHMGIGKRKGTANARMPEKVTWMRRMRILRRLLRRYRESKKIDRHMYHSLYLKVKGNVFKNKRILMEHIHKLKADKARKKLLADQAEARRSKTKEARKRREERLQAKKEEIIKTLSKEEETKK

SEQ ID NO: 73993 - protein, 128 aa, Homo sapiens
  Payload ID: 14637
  Gene Symbol: RPL19
  Gene Name: ribosomal protein L19
  ENSP ID: ENSP00000463329
MGTFILAQDWLSESNHVFCVSSMLRLQKRLASSVLRCGKKKVWLDPNETNEIANANSRQQIRKLIKDGLIIRKPVTVHSRARCRKNTLARRKGRHMGIGKRKGTANARMPEKVTWMRRMRILRRLLRR

SEQ ID NO: 73994 - protein, 193 aa, Homo sapiens
  Payload ID: 14637
  Gene Symbol: RPL19
  Gene Name: ribosomal protein L19
  ENSP ID: ENSP00000463985
MRLQKRLASSVLRCGKKKVWLDPNETNEIANANSRQQIRKLIKDGLIIRKPVTVHSRARCRKNTLARRKGRHMGIGKRKGTANARMPEKVTWMRRMRILRRLLRRYRESKKIDRHMYHSLYLKVKGNVFKNKRILMEHIHKLKADKARKKLLADQAEARRSKTKEARKRREERLQAKKEEIIKTLSKEEETKK

SEQ ID NO: 73995 - protein, 194 aa, Homo sapiens; identical to SEQ ID NO: 73992
  Payload ID: 14637
  Gene Symbol: RPL19
  Gene Name: ribosomal protein L19
  ENSP ID: ENSP00000464538

SEQ ID NO: 73996 - protein, 160 aa, Homo sapiens [sequence omitted]

SEQ ID NO: 73997 - protein, 160 aa, Homo sapiens [sequence omitted]

SEQ ID NO: 73998 - protein, 160 aa, Homo sapiens [sequence omitted]

SEQ ID NO: 73999 - protein, 160 aa, Homo sapiens [sequence omitted]

SEQ ID NO: 74000 - protein, 87 aa, Homo sapiens
  Payload ID: 14638
  Gene Symbol: RPL21
  Gene Name: ribosomal protein L21
  ENSP ID: ENSP00000434298
MTNTKGKRRGTRYMFSRPFRKHGVVPLATYMRIYKKGDIVDIKGMGTVQKGMPHKCYHGKTGRVYNVTQHAVGIVVNKQGQDSCQEN

SEQ ID NO: 74001 - protein, 122 aa, Homo sapiens
  Payload ID: 14638
  Gene Symbol: RPL21
  Gene Name: ribosomal protein L21
  ENSP ID: ENSP00000471695
MTNTKGKRRGTRYMFSRPFRKHGVVPLATYMRIYKKGDIVDIKGMGTVQKGMPHKCYHGKTGRVYNVTQHAVGIVVNKQVKGKILAKRINVRIEHIKHSKSRDSFLKRVKENDQKKKEAKEK

SEQ ID NO: 74002 - protein, 59 aa, Homo sapiens
  Payload ID: 14638
  Gene Symbol: RPL21
  Gene Name: ribosomal protein L21
  ENSP ID: ENSP00000473246
MTNTKGKRRGTRYMFSRPFRKHGNGYCSKRNAPQVLPWQNWKSLQCYPACCWHCCKQTS

SEQ ID NO: 74003 - protein, 128 aa, Homo sapiens [sequence omitted]

SEQ ID NO: 74004 - protein, 47 aa, Homo sapiens
  Payload ID: 14639
  Gene Symbol: RPL22
  Gene Name: ribosomal protein L22
  ENSP ID: ENSP00000465313
MDAANFEQFLQERIKVNGKAGNLGGGVVTIERSKSKITVTSEVPFSK

SEQ ID NO: 74005 - protein, 53 aa, Homo sapiens
  Payload ID: 14639
  Gene Symbol: RPL22
  Gene Name: ribosomal protein L22
  ENSP ID: ENSP00000465763
MDAANFEQFLQERIKVNGKAGNLGGGVVTIERSKSKITVTSEVPFSKRRPALG

SEQ ID NO: 74006 - protein, 79 aa, Homo sapiens
  Payload ID: 14639
  Gene Symbol: RPL22
  Gene Name: ribosomal protein L22
  ENSP ID: ENSP00000466013
MDAANFEQFLQERIKVNGKAGNLGGGVVTIERSKSKITVTSEVPFSKRYLKYLTKKYLKKNNLRDWLRVVANSKESYEL

SEQ ID NO: 74007 - protein, 89 aa, Homo sapiens
  Payload ID: 14639
  Gene Symbol: RPL22
  Gene Name: ribosomal protein L22
  ENSP ID: ENSP00000466502
MDAANFEQFLQERIKVNGKAGNLGGGVVTIERSKSKITVTSEVPFSKRYLKYLTKKYLKKNNLRDWLRVVANSKESYELRYFQINQDEE

SEQ ID NO: 74008 - protein, 48 aa, Homo sapiens
  Payload ID: 14639
  Gene Symbol: RPL22
  Gene Name: ribosomal protein L22
  ENSP ID: ENSP00000467247
MDAANFEQFLQERIKVNGKAGNLGGGVVTIERSKSKITVTSEVPFSKR

SEQ ID NO: 74009 - protein, 95 aa, Homo sapiens
  Payload ID: 14639
  Gene Symbol: RPL22
  Gene Name: ribosomal protein L22
  ENSP ID: ENSP00000468274
MDAANFEQFLQERIKVNGKAGNLGGGVVTIERSKSKITVTSEVPFSKRYLKYLTKKYLKKNNLRDWLRVVANSKESYELRYFQINQDEEEEEDED

SEQ ID NO: 74010 - protein, 122 aa, Homo sapiens
  Payload ID: 14640
  Gene Symbol: RPL22L1
  Gene Name: ribosomal protein L22-like 1
  Uniprot ID: Q6P5R6
  ENSP ID: ENSP00000346080
MAPQKDRKPKRSTWRFNLDLTHPVEDGIFDSGNFEQFLREKVKVNGKTGNLGNVVHIERFKNKITVVSEKQFSKRYLKYLTKKYLKKNNLRDWLRVVASDKETYELRYFQISQDEDESESED

SEQ ID NO: 74011 - protein, 64 aa, Homo sapiens
  Payload ID: 14640
  Gene Symbol: RPL22L1
  Gene Name: ribosomal protein L22-like 1
  ENSP ID: ENSP00000418909
MAPQKDRKPKRSTWRFNLDLTHPVEDGIFDSGNFGTFPSEYLGFSSLVLHFFCFKIGAISTGEG

SEQ ID NO: 74012 - protein, 121 aa, Homo sapiens
  Payload ID: 14640
  Gene Symbol: RPL22L1
  Gene Name: ribosomal protein L22-like 1
  ENSP ID: ENSP00000419041
MAPKDRKPKRSTWRFNLDLTHPVEDGIFDSGNFEQFLREKVKVNGKTGNLGNVVHIERFKNKITVVSEKQFSKRYLKYLTKKYLKKNNLRDWLRVVASDKETYELRYFQISQDEDESESED

SEQ ID NO: 74013 - protein, 142 aa, Homo sapiens
  Payload ID: 14640
  Gene Symbol: RPL22L1
  Gene Name: ribosomal protein L22-like 1
  ENSP ID: ENSP00000419713
GQKHNQDARILNCFSRLPGSCHEQKDRKPKRSTWRFNLDLTHPVEDGIFDSGNFEQFLREKVKVNGKTGNLGNVVHIERFKNKITVVSEKQFSKRYLKYLTKKYLKKNNLRDWLRVVASDKETYELRYFQISQDEDESESED

SEQ ID NO: 74014 - protein, 63 aa, Homo sapiens
  Payload ID: 14640
  Gene Symbol: RPL22L1
  Gene Name: ribosomal protein L22-like 1
  ENSP ID: ENSP00000420039
MAPKDRKPKRSTWRFNLDLTHPVEDGIFDSGNFGTFPSEYLGFSSLVLHFFCFKIGAISTGEG

SEQ ID NO: 74015 - protein, 91 aa, Homo sapiens
  Payload ID: 14641
  Gene Symbol: RPL23
  Gene Name: ribosomal protein L23
  ENSP ID: ENSP00000367336
MAGSRRECRRGGSSGAKFRISLGLPVGAVINCADNTGAKNLYIISVKGIKGRLNRLPAAGVGDMVMATVKKGKPELRKKVHPAVVIRQRKS

SEQ ID NO: 74016 - protein, 140 aa, Homo sapiens [sequence omitted]

SEQ ID NO: 74017 - protein, 114 aa, Homo sapiens
  Payload ID: 14641
  Gene Symbol: RPL23
  Gene Name: ribosomal protein L23
  ENSP ID: ENSP00000377866
MSKRGRGGSSGAKFRISLGLPVGAVINCADNTGAKNLYIISVKGIKGRLNRLPAAGVGDMVMATVKKGKPELRKKVLLCHTGWSAVTPLKLTVTLNCWTWNPPAVAFKGLQLQV

SEQ ID NO: 74018 - protein, 140 aa, Homo sapiens [sequence omitted]

SEQ ID NO: 74019 - protein, 122 aa, Homo sapiens
  Payload ID: 14641
  Gene Symbol: RPL23
  Gene Name: ribosomal protein L23
  ENSP ID: ENSP00000462773
MSKRGRGGSSGAKFRISLGLPVGAVINCADNTGAKNLYIISVKGIKGRLNRLPAAGVGDMVMATVKKGKPELRKKVHPAVVIRQRKSYRRKDGVFLYFEDNAGVIVNNKGEMKGRKSVQLVP

SEQ ID NO: 74020 - protein, 81 aa, Homo sapiens
  Payload ID: 14641
  Gene Symbol: RPL23
  Gene Name: ribosomal protein L23
  ENSP ID: ENSP00000463014
MVMATVKKGKPELRKKVHPAVVIRQRKSYRRKDGVFLYFEDNAGVIVNNKGEMKGSAITGPVAKECADLWPRIASNAGSIA

SEQ ID NO: 74021 - protein, 34 aa, Homo sapiens
  Payload ID: 14641
  Gene Symbol: RPL23
  Gene Name: ribosomal protein L23
  ENSP ID: ENSP00000463894
MVMATVKKGKPELRKKVHPAVVIRQRKSYRRKDG

SEQ ID NO: 74022 - protein, 158 aa, Homo sapiens
  Payload ID: 14642
  Gene Symbol: RPL23A
  Gene Name: ribosomal protein L23a
  ENSP ID: ENSP00000347969
  MOD_RES (1)..(1): Any amino acid
XLVGAPCPRASPAPPKAEAKAKALKAKKAVLKGVHSHKKKKIRTSPTFRRPKTLRLRRQPKYPRKSAPRRNKLDHYAIIKFPLTTESAMKKIEDNNTLVFIVDVKANKHQIKQAVKKLYDIDVAKVNTLIRPDGEKKAYVRLAPDYDALDVANKIGII

SEQ ID NO: 74023 - protein, 194 aa, Homo sapiens
  Payload ID: 14642
  Gene Symbol: RPL23A
  Gene Name: ribosomal protein L23a
  ENSP ID: ENSP00000378396
MHPLVGAPCPRACKELVPSALTIFLLVHVQPGYITRPSLRSVVLRWAPAPPKAEAKAKALKAKKAVLKGVHSHKKKKIRTSPTFRRPKTLRLRRQPKYPRKSAPRRNKLDHYAIIKFPLTTESAMKKIEDNNTLVFIVDVKANKHQIKQAVKKLYDIDVAKVNTLIRPDGEKKAYVRLAPDYDALDVANKIGII

SEQ ID NO: 74024 - protein, 156 aa, Homo sapiens [sequence omitted]

SEQ ID NO: 74025 - protein, 170 aa, Homo sapiens
  Payload ID: 14642
  Gene Symbol: RPL23A
  Gene Name: ribosomal protein L23a
  ENSP ID: ENSP00000465342
  MOD_RES (1)..(1): Any amino acid
XAPAPPKAEAKAKALKAKKAVLKGVHSHKKKKIRTSPTFRRPKTLRLRRQPKYPRKSAPRRNKLDHYAIIKFPLTTESAMKKIEDNNTLVFIVDVKANKHQIKQAVKKLYDIDVAKVNTLIRPDGEKKAYVRLAPDYDALDVANKVSFLPTNPLMLTPWVQMMHMLATKA

SEQ ID NO: 74026 - protein, 70 aa, Homo sapiens
  Payload ID: 14642
  Gene Symbol: RPL23A
  Gene Name: ribosomal protein L23a
  ENSP ID: ENSP00000466425
MKKIEDNNTLVFIVDVKANKHQIKQAVKKLYDIDVAKVNTLIRPDGEKKAYVRLAPDYDALDVANKIGII

SEQ ID NO: 74027 - protein, 70 aa, Homo sapiens; identical to SEQ ID NO: 74026
  Payload ID: 14642
  Gene Symbol: RPL23A
  Gene Name: ribosomal protein L23a
  ENSP ID: ENSP00000468172

SEQ ID NO: 74028 - protein, 175 aa, Homo sapiens
  Payload ID: 14642
  Gene Symbol: RPL23A
  Gene Name: ribosomal protein L23a
  ENSP ID: ENSP00000468402
GQTFGSGKLHASTGWSSMSPGLVVLRWAPAPPKAEAKAKALKAKKAVLKGVHSHKKKKIRTSPTFRRPKTLRLRRQPKYPRKSAPRRNKLDHYAIIKFPLTTESAMKKIEDNNTLVFIVDVKANKHQIKQAVKKLYDIDVAKVNTLIRPDGEKKAYVRLAPDYDALDVANKIGII

SEQ ID NO: 74029 - protein, 157 aa, Homo sapiens [sequence omitted]

SEQ ID NO: 74030 - protein, 121 aa, Homo sapiens
  Payload ID: 14643
  Gene Symbol: RPL24
  Gene Name: ribosomal protein L24
  ENSP ID: ENSP00000419179
MKVELCSFSGYKIYPGHGRRYARTDGKVFQFLNAKCESAFLSKRNPRQINWTVLYRRKHKKGQSEEIQKKRTRRAVKFQRAITGASLADIMAKRNQKPEVRKAQREQAIRHLQRQHLSKRL

SEQ ID NO: 74031 - protein, 150 aa, Homo sapiens
  Payload ID: 14643
  Gene Symbol: RPL24
  Gene Name: ribosomal protein L24
  ENSP ID: ENSP00000420380
MKVELCSFSGYKIYPGHGRRYARTDGKVFQFLNAKCESAFLSKRNPRQINWTVLYRRKHKKGQSEEIQKKRTRRAVKFQRAITGASLADIMAKRNQKPEVRKAQREQAIRAAKEAKKAKQASKKTAMAAAKVIMGFLYFLEQYNRKIFFF

SEQ ID NO: 74032 - protein, 145 aa, Homo sapiens [sequence omitted]

SEQ ID NO: 74033 - protein, 63 aa, Homo sapiens
  Payload ID: 14644
  Gene Symbol: RPL26
  Gene Name: ribosomal protein L26
  ENSP ID: ENSP00000462249
VVRGHYKGQQIGKVVQVYRKKYVIYIERVQREKANGTTVHVGIHPSKLGSVFFLFFCRWLSLG

SEQ ID NO: 74034 - protein, 145 aa, Homo sapiens [sequence omitted]

SEQ ID NO: 74035 - protein, 63 aa, Homo sapiens
  Payload ID: 14644
  Gene Symbol: RPL26
  Gene Name: ribosomal protein L26
  ENSP ID: ENSP00000462619
MKFNPFVTSDRSKNRKRHFNAPSHIRRKIMSSPLSKELRQKYNVRSMPIRKDDEVQEVSMFGH

SEQ ID NO: 74036 - protein, 96 aa, Homo sapiens
  Payload ID: 14644
  Gene Symbol: RPL26
  Gene Name: ribosomal protein L26
  ENSP ID: ENSP00000463021
MKFNPFVTSDRSKNRKRHFNAPSHIRRKIMSSPLSKELRQKYNVRSMPIRKDDEVQVVRGHYKGQQIGKVVQVYRKKYVIYIERVQREKANGTTVH

SEQ ID NO: 74037 - protein, 145 aa, Homo sapiens [sequence omitted]

SEQ ID NO: 74038 - protein, 145 aa, Homo sapiens [sequence omitted]

SEQ ID NO: 74039 - protein, 110 aa, Homo sapiens
  Payload ID: 14644
  Gene Symbol: RPL26
  Gene Name: ribosomal protein L26
  ENSP ID: ENSP00000463910
MKFNPFVTSDRSKNRKRHFNAPSHIRRKIMSSPLSKELRQKYNVRSMPIRKDDEVQVVRGHYKGQQIGKVVQVYRKKYVIYIERVQREKANGTTVHVGIHPSKVGVFENA

SEQ ID NO: 74040 - protein, 135 aa, Homo sapiens
  Payload ID: 14644
  Gene Symbol: RPL26
  Gene Name: ribosomal protein L26
  ENSP ID: ENSP00000464143
  MOD_RES (1)..(1): Any amino acid
XKFNPFVTSDRSKNRKRHFNAPSHIRRKIMSSPLSKELRQKYNVRSMPIRKDDEVQVVRGHYKGQQIGKVVQVYRKKYVIYIERVQREKANGTTVHVGIHPSKAKTGQRPQKDPRTESQISPSRKGKGQIQGRNH

SEQ ID NO: 74041 - protein, 107 aa, Homo sapiens
  Payload ID: 14644
  Gene Symbol: RPL26
  Gene Name: ribosomal protein L26
  ENSP ID: ENSP00000464239
MKFNPFVTSDRSKNRKRHFNAPSHIRRKIMSSPLSKELRQKYNVRSMPIRKDDEVQVVRGHYKGQQIGKVVQVYRKKYVIYIERVQREKANGTTVHVGIHPSKVVIT

SEQ ID NO: 74042 - protein, 145 aa, Homo sapiens
  Payload ID: 14645
  Gene Symbol: RPL26L1
  Gene Name: ribosomal protein L26-like 1
  Uniprot ID: Q9UNX3
  ENSP ID: ENSP00000265100
MKFNPFVTSDRSKNRKRHFNAPSHVRRKIMSSPLSKELRQKYNVRSMPIRKDDEVQVVRGHYKGQQIGKVVQVYRKKYVIYIERVQREKANGTTVHVGIHPSKVVITRLKLDKDRKKILERKAKSRQVGKEKGKYKEELIEKMQE

SEQ ID NO: 74043 - protein, 145 aa, Homo sapiens; identical to SEQ ID NO: 74042
  Payload ID: 14645
  Gene Symbol: RPL26L1
  Gene Name: ribosomal protein L26-like 1
  Uniprot ID: Q9UNX3
  ENSP ID: ENSP00000428177

SEQ ID NO: 74044 - protein, 145 aa, Homo sapiens; identical to SEQ ID NO: 74042
  Payload ID: 14645
  Gene Symbol: RPL26L1
  Gene Name: ribosomal protein L26-like 1
  Uniprot ID: Q9UNX3
  ENSP ID: ENSP00000428223

SEQ ID NO: 74045 - protein, 38 aa, Homo sapiens
  Payload ID: 14645
  Gene Symbol: RPL26L1
  Gene Name: ribosomal protein L26-like 1
  ENSP ID: ENSP00000429783
MKFNPFVTSDRSKNRKRHFNAPSHVRRKIMSSPLSKEL

SEQ ID NO: 74046 - protein, 145 aa, Homo sapiens; identical to SEQ ID NO: 74042
  Payload ID: 14645
  Gene Symbol: RPL26L1
  Gene Name: ribosomal protein L26-like 1
  Uniprot ID: Q9UNX3
  ENSP ID: ENSP00000430147

SEQ ID NO: 74047 - protein, 128 aa, Homo sapiens
  Payload ID: 14645
  Gene Symbol: RPL26L1
  Gene Name: ribosomal protein L26-like 1
  ENSP ID: ENSP00000430673
MKFNPFVTSDRSKNRKRHFNAPSHVRRKIMSSPLSKELRQKYNVRSMPIRKDDEVQVVRGHYKGQQIGKVVQVYRKKYVIYIERVQREKANGTTVHVGIHPSKVVITRLKLDKDRKKILERKAKSRQV

SEQ ID NO: 74048 - protein, 136 aa, Homo sapiens [sequence omitted]

SEQ ID NO: 74049 - protein, 136 aa, Homo sapiens [sequence omitted]

SEQ ID NO: 74050 - protein, 144 aa, Homo sapiens
  Payload ID: 14646
  Gene Symbol: RPL27
  Gene Name: ribosomal protein L27
  ENSP ID: ENSP00000466019
  MOD_RES (1)..(1): Any amino acid
XRKAVIVKVSASRDSASLHAGTRLAAAGRAGLEFKNIDDGTSDRPYSHALVAGIDRYPRKVTAAMGKKKIAKRSKIKSFVKVYNYNHLMPTRYSVDIPLDKTVVNKDVFRDPALKRKARREAKVKFEERYKTGKNKWFFQKLRF

SEQ ID NO: 74051 - protein, 136 aa, Homo sapiens [sequence omitted]

SEQ ID NO: 74052 - protein, 80 aa, Homo sapiens
  Payload ID: 14646
  Gene Symbol: RPL27
  Gene Name: ribosomal protein L27
  ENSP ID: ENSP00000467939
MGKKKIAKRSKIKSFVKVYNYNHLMPTRYSVDIPLDKTVVNKDVFRDPALKRKARREAKVKFEERYKTGKNKWFFQKLRF

SEQ ID NO: 74053 - protein, 40 aa, Homo sapiens
  Payload ID: 14646
  Gene Symbol: RPL27
  Gene Name: ribosomal protein L27
  ENSP ID: ENSP00000468468
MGKFMKPGKVVLVLAGRYSGRKAVIVKVLCGYPLGQNCRQ

SEQ ID NO: 74054 - protein, 148 aa, Homo sapiens [sequence omitted]

SEQ ID NO: 74055 - protein, 91 aa, Homo sapiens
  Payload ID: 14647
  Gene Symbol: RPL27A
  Gene Name: ribosomal protein L27a
  ENSP ID: ENSP00000431565
MKHYHLKRNQSFCPTVNLDKLWTLVSEQTRVNAAKNKTGAAPIIDVVRSGYYKVLGKGKLPKQPVIVKAKFFSRRAEEKIKSVGGACVLVA

SEQ ID NO: 74056 - protein, 91 aa, Homo sapiens; identical to SEQ ID NO: 74055
  Payload ID: 14647
  Gene Symbol: RPL27A
  Gene Name: ribosomal protein L27a
  ENSP ID: ENSP00000431849

SEQ ID NO: 74057 - protein, 91 aa, Homo sapiens; identical to SEQ ID NO: 74055
  Payload ID: 14647
  Gene Symbol: RPL27A
  Gene Name: ribosomal protein L27a
  ENSP ID: ENSP00000432671

SEQ ID NO: 74058 - protein, 108 aa, Homo sapiens
  Payload ID: 14647
  Gene Symbol: RPL27A
  Gene Name: ribosomal protein L27a
  ENSP ID: ENSP00000433259
MPSRLRKTRKLRGHVSHGHGRIGKHRKHPGGRGNAGGLHHHRINFDKYHPGYFGKVGMKHYHLKRNQSFCPTVNLDKLWTLVSEQTRVNAAKNKTGAAPIIDVVRSVS

SEQ ID NO: 74059 - protein, 91 aa, Homo sapiens; identical to SEQ ID NO: 74055
  Payload ID: 14647
  Gene Symbol: RPL27A
  Gene Name: ribosomal protein L27a
  ENSP ID: ENSP00000433766

SEQ ID NO: 74060 - protein, 113 aa, Homo sapiens
  Payload ID: 14647
  Gene Symbol: RPL27A
  Gene Name: ribosomal protein L27a
  ENSP ID: ENSP00000435081
MPSRLRKTRKLRGHVSHGHGRIGKHRKHPGGRGNAGGLHHHRINFDKYEQTRVNAAKNKTGAAPIIDVVRSGYYKVLGKGKLPKQPVIVKAKFFSRRAEEKIKSVGGACVLVA

SEQ ID NO: 74061 - protein, 41 aa, Homo sapiens
  Payload ID: 14647
  Gene Symbol: RPL27A
  Gene Name: ribosomal protein L27a
  ENSP ID: ENSP00000435333
MPSRLRKTRKLRGHVSHGHGRIVESGVSPCWPGWSRTPDLR

SEQ ID NO: 74062 - protein, 42 aa, Homo sapiens
  Payload ID: 14647
  Gene Symbol: RPL27A
  Gene Name: ribosomal protein L27a
  ENSP ID: ENSP00000437118
  MOD_RES (1)..(1): Any amino acid
XKTRKLRGHVSHGHGRIGKHRKHPGGRGNAGGLHHHRINFDK

SEQ ID NO: 74063 - protein, 137 aa, Homo sapiens [sequence omitted]

SEQ ID NO: 74064 - protein, 69 aa, Homo sapiens
  Payload ID: 14648
  Gene Symbol: RPL28
  Gene Name: ribosomal protein L28
  Uniprot ID: P46779
  ENSP ID: ENSP00000391665
MSAHLQWMVVRNCSSFLIKRNKQTYSTEPNNLKARNSFRYNGLIHRKTVGVEPAADGKGVVVVIKRRSE

SEQ ID NO: 74065 - protein, 87 aa, Homo sapiens
  Payload ID: 14648
  Gene Symbol: RPL28
  Gene Name: ribosomal protein L28
  Uniprot ID: P46779
  ENSP ID: ENSP00000400596
MSAHLQWMVVRNCSSFLIKRNKQTYSTEPNNLKARNSFRYNGLIHRKTVGVEPAADGKGVVVVIKRRSGEFCLVWARERPLSRVWEL

SEQ ID NO: 74066 - protein, 170 aa, Homo sapiens
  Payload ID: 14648
  Gene Symbol: RPL28
  Gene Name: ribosomal protein L28
  ENSP ID: ENSP00000452763
MSAHLQWMVVRNCSSFLIKRNKQTYSTEPNNLKARNSFRYNGLIHRKTVGVEPAADGKGVVVVIKRRSGQRKPATSYVRTTINKNARATLSSIRHMIRKNKYRPDLRMLAGRVGRQQAVSSLEHQPRPGRLHLSNTAARSFCVMEPSRTLQDLGSTLGLHPLDASGTPEL

SEQ ID NO: 74067 - protein, 169 aa, Homo sapiens
  Payload ID: 14648
  Gene Symbol: RPL28
  Gene Name: ribosomal protein L28
  Uniprot ID: P46779
  ENSP ID: ENSP00000452909
MSAHLQWMVVRNCSSFLIKRNKQTYSTEPNNLKARNSFRYNGLIHRKTVGVEPAADGKGVVVVIKRRSGQRKPATSYVRTTINKNARATLSSIRHMIRKNKYRPDLRMDMLASTGSGLCCSVAVQPWASSSTSLCLRTLICNMRVDRPYYSGLMRRLNVQNLLDCAHKS

SEQ ID NO: 74068 - protein, 163 aa, Homo sapiens
  Payload ID: 14648
  Gene Symbol: RPL28
  Gene Name: ribosomal protein L28
  Uniprot ID: P46779
  ENSP ID: ENSP00000453029
MSAHLQWMVVRNCSSFLIKRNKQTYSTEPNNLKARNSFRYNGLIHRKTVGVEPAADGKGVVVVIKRRSGQRKPATSYVRTTINKNARATLSSIRHMIRKNKYRPDLRMVSWGLGIRLGETGQCCGEGPPTTGCNMGWRGMDSCFQPTPHTQHWPRGRLVECMG

SEQ ID NO: 74069 - protein, 89 aa, Homo sapiens
  Payload ID: 14648
  Gene Symbol: RPL28
  Gene Name: ribosomal protein L28
  ENSP ID: ENSP00000453285
MSAHLQWMVVRNCSSFLIKRNKQTYSTEPNNLKARNSFRYNGLIHRKTVGVEPAADGKGVVVASGSLPPPMCGPPSTRMLAPRSAASDT

SEQ ID NO: 74070 - protein, 137 aa, Homo sapiens [sequence omitted]

SEQ ID NO: 74071 - protein, 112 aa, Homo sapiens
  Payload ID: 14648
  Gene Symbol: RPL28
  Gene Name: ribosomal protein L28
  ENSP ID: ENSP00000453584
MSAHLQWMVVRNCSSFLIKRNKQTYSTEPNNLKARNSFRYNGLIHRKTVGVEPAADGKGVVVVIKRRSGRKSGNCHRGGHPWRQGVGLGTGFPLGRLVSSVSRARLSPCPHL

SEQ ID NO: 74072 - protein, 159 aa, Homo sapiens [sequence omitted]

SEQ ID NO: 74073 - protein, 159 aa, Homo sapiens [sequence omitted]

SEQ ID NO: 74074 - protein, 159 aa, Homo sapiens [sequence omitted]

SEQ ID NO: 74075 - protein, 159 aa, Homo sapiens [sequence omitted]

SEQ ID NO: 74076 - protein, 60 aa, Homo sapiens
  Payload ID: 14649
  Gene Symbol: RPL29
  Gene Name: ribosomal protein L29
  ENSP ID: ENSP00000418839
MAKSKNHTTHNQSRKWHRNGIKKPRSQRYESLKGVSALNHMEVSFLGSRCTVKASHVVFL

SEQ ID NO: 74077 - protein, 159 aa, Homo sapiens [sequence omitted]

SEQ ID NO: 74078 - protein, 37 aa, Homo sapiens
  Payload ID: 14649
  Gene Symbol: RPL29
  Gene Name: ribosomal protein L29
  ENSP ID: ENSP00000419333
MAKSKNHTTHNQSRKWHRNGIKKPRSQRYESLKGPEV

SEQ ID NO: 74079 - protein, 159 aa, Homo sapiens [sequence omitted]

SEQ ID NO: 74080 - protein, 403 aa, Homo sapiens
  Payload ID: 14650
  Gene Symbol: RPL3
  Gene Name: ribosomal protein L3
  Uniprot ID: P39023
  ENSP ID: ENSP00000346001
MSHRKFSAPRHGSLGFLPRKRSSRHRGKVKSFPKDDPSKPVHLTAFLGYKAGMTHIVREVDRPGSKVNKKEVVEAVTIVETPPMVVVGIVGYVETPRGLRTFKTVFAEHISDECKRRFYKNWHKSKKKAFTKYCKKWQDEDGKKQLEKDFSSMKKYCQVIRVIAHTQMRLLPLRQKKAHLMEIQVNGGTVAEKLDWARERLEQQVPVNQVFGQDEMIDVIGVTKGKGYKGVTSRWHTKKLPRKTHRGLRKVACIGAWHPARVAFSVARAGQKGYHHRTEINKKIYKIGQGYLIKDGKLIKNNASTDYDLSDKSINPLGGFVHYGEVTNDFVMLKGCVVGTKKRVLTLRKSLLVQTKRRALEKIDLKFIDTTSKFGHGRFQTMEEKKAFMGPLKKDRIAKEEGA

SEQ ID NO: 74081 - protein, 272 aa, Homo sapiens
  Payload ID: 14650
  Gene Symbol: RPL3
  Gene Name: ribosomal protein L3
  ENSP ID: ENSP00000385762
MTHIVREVDRPGSKVNKKEVVEAVTIVETPPMVVVGIVGYVETPRGLRTFKTVFAEHISDECKRRFYKNWHKSKKKAFTKYCKKWQDEDGKKQLEKDFSSMKKYCQVIRVIAHTQMRLLPLRQKKAHLMEIQVNGGTVAEKLDWARERLEQQVPVNQVFGQDEMIDVIGVTKGKGYKGVTSRWHTKKLPRKTHRGLRKVACIGAWHPARVAFSVARAGQKGYHHRTEINKKIYKIGQGYLIKDGKLIKNNASTDYDLSDKSINPLGGFVHYG

SEQ ID NO: 74082 - protein, 351 aa, Homo sapiens
  Payload ID: 14650
  Gene Symbol: RPL3
  Gene Name: ribosomal protein L3
  ENSP ID: ENSP00000386101
MTHIVREVDRPGSKVNKKEVVEAVTIVETPPMVVVGIVGYVETPRGLRTFKTVFAEHISDECKRRFYKNWHKSKKKAFTKYCKKWQDEDGKKQLEKDFSSMKKYCQVIRVIAHTQMRLLPLRQKKAHLMEIQVNGGTVAEKLDWARERLEQQVPVNQVFGQDEMIDVIGVTKGKGYKGVTSRWHTKKLPRKTHRGLRKVACIGAWHPARVAFSVARAGQKGYHHRTEINKKIYKIGQGYLIKDGKLIKNNASTDYDLSDKSINPLGGFVHYGEVTNDFVMLKGCVVGTKKRVLTLRKSLLVQTKRRALEKIDLKFIDTTSKFGHGRFQTMEEKKAFMGPLKKDRIAKEEGA

SEQ ID NO: 74083 - protein, 261 aa, Homo sapiens
  Payload ID: 14650
  Gene Symbol: RPL3
  Gene Name: ribosomal protein L3
  ENSP ID: ENSP00000412713
  MOD_RES (1)..(1): Any amino acid
XVCVVMAAVSLSPASARLNPRRIAAIPSWPAPGSHRKFSAPRHGSLGFLPRKRSSRHRGKVKSFPKDDPSKPVHLTAFLGYKAGMTHIVREVDRPGSKVNKKEVVEAVTIVETPPMVVVGIVGYVETPRGLRTFKTVFAEHISDECKRRFYKNWHKSKKKAFTKYCKKWQDEDGKKQLEKDFSSMKKYCQVIRVIAHTQMRLLPLRQKKAHLMEIQVNGGTVAEKLDWARERLEQQVPVNQVFGQDEMIDVIGVTKGKGYK

SEQ ID NO: 74084 - protein, 305 aa, Homo sapiens
  Payload ID: 14650
  Gene Symbol: RPL3
  Gene Name: ribosomal protein L3
  ENSP ID: ENSP00000415198
QMMNLLTGGQKLCADCHVLIWLCGVLWPSHRKFSAPRHGSLGFLPRKRSSRHRGKVKSFPKDDPSKPVHLTAFLGYKAGMTHIVREVDRPGSKVNKKEVVEAVTIVETPPMVVVGIVGYVETPRGLRTFKTVFAEHISDECKRRFYKNWHKSKKKAFTKYCKKWQDEDGKKQLEKDFSSMKKYCQVIRVIAHTQMRLLPLRQKKAHLMEIQVNGGTVAEKLDWARERLEQQVPVNQVFGQDEMIDVIGVTKGKGYKGVTSRWHTKKLPRKTHRGLRKVACIGAWHPARVAFSVARAGQKGYHHRT

SEQ ID NO: 74085 - protein, 180 aa, Homo sapiens
  Payload ID: 14650
  Gene Symbol: RPL3
  Gene Name: ribosomal protein L3
  ENSP ID: ENSP00000416273
MSHRKFSAPRHGSLGFLPRKRSSRHRGKVKSFPKDDPSKPVHLTAFLGYKAGMTHIVREVDRPGSKVNKKEVVEAVTIVETPPMVVVGIVGYVETPRGLRTFKTVFAEHISDECKRRFYKNCSARLCPMSSIQAPLAGGKGSLEAGNELHPHAVPVCLPLTPRRGDEGLHLVPSPTLLCS

SEQ ID NO: 74086 - protein, 115 aa, Homo sapiens [sequence omitted]

SEQ ID NO: 74087 - protein, 96 aa, Homo sapiens
  Payload ID: 14651
  Gene Symbol: RPL30
  Gene Name: ribosomal protein L30
  ENSP ID: ENSP00000379381
MVAAKKTKKSLESINSRLQLVMKSGKYVLGYKQTLKMIRQGKAKLVILANNCPALSGNNIELGTACGKYYRVCTLAIIDPGDSDIIRSMPEQTGEK

SEQ ID NO: 74088 - protein, 115 aa, Homo sapiens [sequence omitted]

SEQ ID NO: 74089 - protein, 114 aa, Homo sapiens
  Payload ID: 14651
  Gene Symbol: RPL30
  Gene Name: ribosomal protein L30
  ENSP ID: ENSP00000429483
MVAAKKTKKSLESINSRLQLVMKSGKYVLGYKQTLKMIRQGKAKLVILANNCPALRKSEIEYYAMLAKTGVHHYSGNNIELGTACGKYYRVCTLAIIDPGDSDIIRSMPEQTGE

SEQ ID NO: 74090 - protein, 51 aa, Homo sapiens
  Payload ID: 14651
  Gene Symbol: RPL30
  Gene Name: ribosomal protein L30
  ENSP ID: ENSP00000430506
MLAKTGVHHYSGNNIELGTACGKYYRVCTLAIIDPGDSDIIRSMPEQTGEK

SEQ ID NO: 74091 - protein, 56 aa, Homo sapiens
  Payload ID: 14651
  Gene Symbol: RPL30
  Gene Name: ribosomal protein L30
  ENSP ID: ENSP00000430556
MVAAKKTKKSLESINSRLQLVMKSGKYVLGYKQTLKMIRQGKAKLVILANNCPALR

SEQ ID NO: 74092 - protein, 125 aa, Homo sapiens [sequence omitted]

SEQ ID NO: 74093 - protein, 120 aa, Homo sapiens
  Payload ID: 14652
  Gene Symbol: RPL31
  Gene Name: ribosomal protein L31
  ENSP ID: ENSP00000386271
MAPAKKGGEKKKGRSAINEVVTREYTINIHKRIHGVGFKKRAPRALKEIRKFAMKEMGTPDVRIDTRLNKAVWAKGIRNVPYRIRVRLSRKRNEDEDSPNKLYTLVTYVPVTTFKNCHHQ

SEQ ID NO: 74094 - protein, 125 aa, Homo sapiens [sequence omitted]

SEQ ID NO: 74095 - protein, 128 aa, Homo sapiens
  Payload ID: 14652
  Gene Symbol: RPL31
  Gene Name: ribosomal protein L31
  Uniprot ID: P62899
  ENSP ID: ENSP00000386717
MAPAKKGGEKKKGRSAINEVVTREYTINIHKRIHGVGFKKRAPRALKEIRKFAMKEMGTPDVRIDTRLNKAVWAKGIRNVPYRIRVRLSRKRNEDEDSPNKLYTLVTYVPVTTFKISVLNSVTVAKSP

SEQ ID NO: 74096 - protein, 130 aa, Homo sapiens
  Payload ID: 14652
  Gene Symbol: RPL31
  Gene Name: ribosomal protein L31
  ENSP ID: ENSP00000386737
MAPAKKGGEKKKGRSAINEVVTREYTINIHKRIHGVGFKKRAPRALKEIRKFAMKEMGTPDVRIDTRLNKAVWAKGIRNVPYRIRVRLSRKRNEDEDSPNKLYTLVTYVPVTTFKSLQNDDLFKTDCHHQ

SEQ ID NO: 74097 - protein, 79 aa, Homo sapiens
  Payload ID: 14652
  Gene Symbol: RPL31
  Gene Name: ribosomal protein L31
  ENSP ID: ENSP00000387112
MAPAKKGGEKKKGRSAINEVVTREYTINIHKRIHGVGFKKRAPRALKEIRKFAMKEMGTPDVRIDTRLNKAVWAKGIRC

SEQ ID NO: 74098 - protein, 79 aa, Homo sapiens; identical to SEQ ID NO: 74097
  Payload ID: 14652
  Gene Symbol: RPL31
  Gene Name: ribosomal protein L31
  ENSP ID: ENSP00000387120

SEQ ID NO: 74099 - protein, 121 aa, Homo sapiens
  Payload ID: 14652
  Gene Symbol: RPL31
  Gene Name: ribosomal protein L31
  Uniprot ID: P62899
  ENSP ID: ENSP00000387163
MAPAKKGGEKKKGRSAINEVVTREYTINIHKRIHGVGFKKRAPRALKEIRKFAMKEMGTPDVRIDTRLNKAVWAKGIRNVPYRIRVRLSRKRNEDEDSPNKLYTLVTYVPVTTFKSKFSIP

SEQ ID NO: 74100 - protein, 79 aa, Homo sapiens; identical to SEQ ID NO: 74097
  Payload ID: 14652
  Gene Symbol: RPL31
  Gene Name: ribosomal protein L31
  ENSP ID: ENSP00000402450

SEQ ID NO: 74101 - protein, 108 aa, Homo sapiens
  Payload ID: 14652
  Gene Symbol: RPL31
  Gene Name: ribosomal protein L31
  ENSP ID: ENSP00000408172
  MOD_RES (1)..(1): Any amino acid
XRSAINEVVTREYTINIHKRIHGVGFKKRAPRALKEIRKFAMKEMGTPDVRIDTRLNKAVWAKGIRNVPYRIRVRLSRKRNEDEDSPNKLYTLVTYVPVTTFKIFFLR

SEQ ID NO: 74102 - protein, 115 aa, Homo sapiens
  Payload ID: 14652
  Gene Symbol: RPL31
  Gene Name: ribosomal protein L31
  ENSP ID: ENSP00000412976
MAPAKKGGEKKKGRSAINEVVTREYTINIHKRIHGVGFKKRAPRALKEIRKFAMKEMGTPDVRIDTRLNKAVWAKGIRNVPYRIRVRLSRKRNEDEDSPNKLYTLVTYVPVTTFK

SEQ ID NO: 74103 - protein, 153 aa, Homo sapiens
  Payload ID: 14653
  Gene Symbol: RPL32
  Gene Name: ribosomal protein L32
  ENSP ID: ENSP00000339064
MAALRPLVKPKIVKKRTKKFIRHQSDRYVKIKEEFALCTDANPPVYYFLQRNWRKPRGIDNRVRRRFKGQILMPNIGYGSNKKTKHMLPSGFRKFLVHNVKELEVLLMCNKSYCAEIAHNVSSKNRKAIVERAAQLAIRVTNPNARLRSEENE

SEQ ID NO: 74104 - protein, 135 aa, Homo sapiens [sequence omitted]

SEQ ID NO: 74105 - protein, 135 aa, Homo sapiens [sequence omitted]

SEQ ID NO: 74106 - protein, 135 aa, Homo sapiens [sequence omitted]

SEQ ID NO: 74107 - protein, 133 aa, Homo sapiens
  Payload ID: 14653
  Gene Symbol: RPL32
  Gene Name: ribosomal protein L32
  ENSP ID: ENSP00000412393
MAALRPLVKPKIVKKRTKKFIRHQSDRYVKIKRNWRKPRGIDNRVRRRFKGQILMPNIGYGSNKKTKHMLPSGFRKFLVHNVKELEVLLMCNKSYCAEIAHNVSSKNRKAIVERAAQLAIRVTNPNARLRSEE

SEQ ID NO: 74108 - protein, 62 aa, Homo sapiens
  Payload ID: 14653
  Gene Symbol: RPL32
  Gene Name: ribosomal protein L32
  ENSP ID: ENSP00000413742
MAALRPLVKPKIVKKRTKKFIRHQSDRYVKIKRNWRKPRGIDNRVRRRFKGQILMPNIGYGS

SEQ ID NO: 74109 - protein, 135 aa, Homo sapiens [sequence omitted]

SEQ ID NO: 74110 - protein, 117 aa, Homo sapiens [sequence omitted]

SEQ ID NO: 74111 - protein, 117 aa, Homo sapiens [sequence omitted]

SEQ ID NO: 74112 - protein, 117 aa, Homo sapiens [sequence omitted]

SEQ ID NO: 74113 - protein, 117 aa, Homo sapiens [sequence omitted]

SEQ ID NO: 74114 - protein, 117 aa, Homo sapiens [sequence omitted]

SEQ ID NO: 74115 - protein, 123 aa, Homo sapiens [sequence omitted]

SEQ ID NO: 74116 - protein, 96 aa, Homo sapiens
  Payload ID: 14655
  Gene Symbol: RPL35
  Gene Name: ribosomal protein L35
  ENSP ID: ENSP00000362671
MAKIKARDLRGKKKEELLKQLDDLKVELSQLRVAKVTGGAASKLSKIRVVRKSIARVLTVINQTQKENLRKFYKAAAGGPCIQMDRVLPQPPACSC

SEQ ID NO: 74117 - protein, 96 aa, Homo sapiens; identical to SEQ ID NO: 74116
  Payload ID: 14655
  Gene Symbol: RPL35
  Gene Name: ribosomal protein L35
  ENSP ID: ENSP00000437215

SEQ ID NO: 74118 - protein, 96 aa, Homo sapiens; identical to SEQ ID NO: 74116
  Payload ID: 14655
  Gene Symbol: RPL35
  Gene Name: ribosomal protein L35
  ENSP ID: ENSP00000486088

SEQ ID NO: 74119 - protein, 94 aa, Homo sapiens
  Payload ID: 14656
  Gene Symbol: RPL35A
  Gene Name: ribosomal protein L35a
  ENSP ID: ENSP00000387688
MSGRLWSKAIFAGYKRGLRNQREHTALLKIEGVYARDETEFYLGKRCAYVYKAKNNTVTPGGKPNKTRVIWGKVTRAHGNSGMVRAKFRSNLPA

SEQ ID NO: 74120 - protein, 110 aa, Homo sapiens [sequence omitted]

SEQ ID NO: 74121 - protein, 55 aa, Homo sapiens
  Payload ID: 14656
  Gene Symbol: RPL35A
  Gene Name: ribosomal protein L35a
  ENSP ID: ENSP00000398058
MSGRLWSKAIFAGYKRGLRNQREHTALLKIEGVYARDETEFYLGKRCAYVYKAKK

SEQ ID NO: 74122 - protein, 57 aa, Homo sapiens
  Payload ID: 14656
  Gene Symbol: RPL35A
  Gene Name: ribosomal protein L35a
  ENSP ID: ENSP00000410683
MSGRLWSKAIFAGYKRGLRNQREHTALLKIEGVYARDETEFYLGKRCAYVYKAKNWD

SEQ ID NO: 74123 - protein, 110 aa, Homo sapiens [sequence omitted]

SEQ ID NO: 74124 - protein, 105 aa, Homo sapiens [sequence omitted]

SEQ ID NO: 74125 - protein, 105 aa, Homo sapiens [sequence omitted]

SEQ ID NO: 74126 - protein, 105 aa, Homo sapiens [sequence omitted]

SEQ ID NO: 74127 - protein, 68 aa, Homo sapiens
  Payload ID: 14657
  Gene Symbol: RPL36
  Gene Name: ribosomal protein L36
  ENSP ID: ENSP00000462927
MALRYPMAVGLNKGHKVTKNVSKPRHSRRRGREHLESGAGQRVWGSDAGVGVRSWSWPEVAVCEVEGF

SEQ ID NO: 74128 - protein, 105 aa, Homo sapiens [sequence omitted]

SEQ ID NO: 74129 - protein, 94 aa, Homo sapiens
  Payload ID: 14657
  Gene Symbol: RPL36
  Gene Name: ribosomal protein L36
  ENSP ID: ENSP00000464613
MALRYPMAVGLNKGHKVTKNVSKPRHSRRRGRLTKHTKFVRDMIREVCGFAPYERRAMELLKVSKDKRALKFIKKRVGGRCRPRGGVGWESGPG

SEQ ID NO: 74130 - protein, 70 aa, Homo sapiens
  Payload ID: 14658
  Gene Symbol: RPL36A
  Gene Name: ribosomal protein L36a
  ENSP ID: ENSP00000361940
MVNVPKTRRTFCKKCGKHQPHKVTQYKKGKDSLYAQGKRRYDRKQSGYGGQTKPIFRKKRQKIEECALLS

SEQ ID NO: 74131 - protein, 112 aa, Homo sapiens
  Payload ID: 14658
  Gene Symbol: RPL36A
  Gene Name: ribosomal protein L36a
  ENSP ID: ENSP00000397659
MVNVPKTRRTFCKKCGKHQPHKVTQYKKGKDSLYAQGKRRYDRKQSGYGGQTKPIFRKKAKTTKKIVLRLECVEPNCRSKRMLAIKRCKHFELGGDKKRKVYNYGWKVQSFS

SEQ ID NO: 74132 - protein, 142 aa, Homo sapiens
  Payload ID: 14658
  Gene Symbol: RPL36A
  Gene Name: ribosomal protein L36a
  ENSP ID: ENSP00000404375
MIAPTDSHEEVRSGTSYILPFASRFLSFRADSAHASMVNVPKTRRTFCKKCGKHQPHKVTQYKKGKDSLYAQGKRRYDRKQSGYGGQTKPIFRKKAKTTKKIVLRLECVEPNCRSKRMLAIKRCKHFELGGDKKRKGQVIQF

SEQ ID NO: 74133 - protein, 106 aa, Homo sapiens [sequence omitted]

SEQ ID NO: 74134 - protein, 25 aa, Homo sapiens
  Payload ID: 14658
  Gene Symbol: RPL36A
  Gene Name: ribosomal protein L36a
  ENSP ID: ENSP00000473451
MLAIKRCKHFELGGDKKRKGQVIQF

SEQ ID NO: 74135 - protein, 142 aa, Homo sapiens; identical to SEQ ID NO: 74132
  Payload ID: 14658
  Gene Symbol: RPL36A
  Gene Name: ribosomal protein L36a
  ENSP ID: ENSP00000483017

SEQ ID NO: 74136 - protein, 106 aa, Homo sapiens
  Payload ID: 14659
  Gene Symbol: RPL36AL
  Gene Name: ribosomal protein L36a-like
  Uniprot ID: Q969Q0
  ENSP ID: ENSP00000346012
MVNVPKTRRTFCKKCGKHQPHKVTQYKKGKDSLYAQGRRRYDRKQSGYGGQTKPIFRKKAKTTKKIVLRLECVEPNCRSKRMLAIKRCKHFELGGDKKRKGQVIQF

SEQ ID NO: 74137 - protein, 97 aa, Homo sapiens [sequence omitted]

SEQ ID NO: 74138 - protein, 74 aa, Homo sapiens
  Payload ID: 14660
  Gene Symbol: RPL37
  Gene Name: ribosomal protein L37
  ENSP ID: ENSP00000422823
MTKGTSSFGKRRNKTHTLCRRCGSKAYHLQKSTCGKCGYPAKRKRKCMDSVKEQHLNPRGQLLQHPVHLKNVND

SEQ ID NO: 74139 - protein, 82 aa, Homo sapiens
  Payload ID: 14660
  Gene Symbol: RPL37
  Gene Name: ribosomal protein L37
  ENSP ID: ENSP00000426449
MTKGTSSFGKRRNKTHTLCRRCGSKAYHLQKSTCGKCGYPAKRKRKYNWSAKAKRRNTTGTGRMRHLKIVYRRFRYSLYVRS

SEQ ID NO: 74140 - protein, 75 aa, Homo sapiens
  Payload ID: 14661
  Gene Symbol: RPL37A
  Gene Name: ribosomal protein L37a
  ENSP ID: ENSP00000388690
MAKRTKKVGIVGKYGTRYGASLRKMVKKIEISQHAKYTCSFCGKTKMKRRAVGIWHCGSCMKTVAGGAWTYNRME

SEQ ID NO: 74141 - protein, 58 aa, Homo sapiens
  Payload ID: 14661
  Gene Symbol: RPL37A
  Gene Name: ribosomal protein L37a
  ENSP ID: ENSP00000410080
MAKRTKKVGIVGKYGTRYGASLRKMVKKIEISQHAKYTCSFCGKGEREAFTSLTIRPR

SEQ ID NO: 74142 - protein, 68 aa, Homo sapiens
  Payload ID: 14661
  Gene Symbol: RPL37A
  Gene Name: ribosomal protein L37a
  ENSP ID: ENSP00000410240
MVKKIEISQHAKYTCSFCGKTKMKRRAVGIWHCGSCMKTVAGGAWTYNTTSAVTVKSAIRRLKELKDQ

SEQ ID NO: 74143 - protein, 92 aa, Homo sapiens [sequence omitted]

SEQ ID NO: 74144 - protein, 60 aa, Homo sapiens
  Payload ID: 14661
  Gene Symbol: RPL37A
  Gene Name: ribosomal protein L37a
  ENSP ID: ENSP00000469607
MVKKIEISQHAKYTCSFCGKTKMKRRAVGIWHCGSCMKTVAGGAWTYKDAKMEPNLHELC

SEQ ID NO: 74145 - protein, 72 aa, Homo sapiens
  Payload ID: 14661
  Gene Symbol: RPL37A
  Gene Name: ribosomal protein L37a
  ENSP ID: ENSP00000470348
MAKRTKKVGIVGKYGTRYGASLRKMVKKIEISQHAKYTCSFCGKTKMKRRAVGIWHCGSCMKTVAGGAWTYK

SEQ ID NO: 74146 - protein, 60 aa, Homo sapiens; identical to SEQ ID NO: 74144
  Payload ID: 14661
  Gene Symbol: RPL37A
  Gene Name: ribosomal protein L37a
  ENSP ID: ENSP00000471102

SEQ ID NO: 74147 - protein, 88 aa, Homo sapiens
  Payload ID: 14661
  Gene Symbol: RPL37A
  Gene Name: ribosomal protein L37a
  ENSP ID: ENSP00000472653
MVKKIEISQHAKYTCSFCGKTKMKRRAVGIWHCGSCMKTVAGGAWTYKKMSAENGQQREPLMSFDHQEMPKWNQISMNSANGRRGKGR

SEQ ID NO: 74148 - protein, 70 aa, Homo sapiens [sequence omitted]

SEQ ID NO: 74149 - protein, 70 aa, Homo sapiens [sequence omitted]

SEQ ID NO: 74150 - protein, 70 aa, Homo sapiens [sequence omitted]

SEQ ID NO: 74151 - protein, 21 aa, Homo sapiens
  Payload ID: 14662
  Gene Symbol: RPL38
  Gene Name: ribosomal protein L38
  ENSP ID: ENSP00000462580
MPRKIEEIKDFLLTARRKDAK

SEQ ID NO: 74152 - protein, 64 aa, Homo sapiens
  Payload ID: 14662
  Gene Symbol: RPL38
  Gene Name: ribosomal protein L38
  ENSP ID: ENSP00000462837
MPRKIEEIKDFLLTARRKDAKSVKIKKNKDNVKFKVRCSRYLYTLVITDKEKAEKLKQSLPPGE

SEQ ID NO: 74153 - protein, 67 aa, Homo sapiens
  Payload ID: 14662
  Gene Symbol: RPL38
  Gene Name: ribosomal protein L38
  ENSP ID: ENSP00000463312
MPRKIEEIKDFLLTARRKDAKSVKIKKNKDNVKFKVRCSRYLYTLVITDKEKAEKLKQSLPPVKELK

SEQ ID NO: 74154 - protein, 51 aa, Homo sapiens [sequence omitted]

SEQ ID NO: 74155 - protein, 51 aa, Homo sapiens
  Payload ID: 14664
  Gene Symbol: RPL39L
  Gene Name: ribosomal protein L39-like
  Uniprot ID: Q96EH5
  ENSP ID: ENSP00000296277
MSSHKTFTIKRFLAKKQKQNRPIPQWIQMKPGSKIRYNSKRRHWRRTKLGL

SEQ ID NO: 74156 - protein, 51 aa, Homo sapiens; identical to SEQ ID NO: 74155
  Payload ID: 14664
  Gene Symbol: RPL39L
  Gene Name: ribosomal protein L39-like
  Uniprot ID: Q96EH5
  ENSP ID: ENSP00000389356

SEQ ID NO: 74157 - protein, 51 aa, Homo sapiens; identical to SEQ ID NO: 74155
  Payload ID: 14664
  Gene Symbol: RPL39L
  Gene Name: ribosomal protein L39-like
  Uniprot ID: Q96EH5
  ENSP ID: ENSP00000397240

SEQ ID NO: 74158 - protein, 407 aa, Homo sapiens
  Payload ID: 14665
  Gene Symbol: RPL3L
  Gene Name: ribosomal protein L3-like
  Uniprot ID: Q92901
  ENSP ID: ENSP00000268661
MSHRKFSAPRHGHLGFLPHKRSHRHRGKVKTWPRDDPSQPVHLTAFLGYKAGMTHTLREVHRPGLKISKREEVEAVTIVETPPLVVVGVVGYVATPRGLRSFKTIFAEHLSDECRRRFYKDWHKSKKKAFTKACKRWRDTDGKKQLQKDFAAMKKYCKVIRVIVHTQMKLLPFRQKKAHIMEIQLNGGTVAEKVAWAQARLEKQVPVHSVFSQSEVIDVIAVTKGRGVKGVTSRWHTKKLPRKTHKGLRKVACIGAWHPARVGCSIARAGQKGYHHRTELNKKIFRIGRGPHMEDGKLVKNNASTSYDVTAKSITPLGGFPHYGEVNNDFVMLKGCIAGTKKRVITLRKSLLVHHSRQAVENIELKFIDTTSKFGHGRFQTAQEKRAFMGPQKKHLEKETPETSGDL

SEQ ID NO: 74159 - protein, 43 aa, Homo sapiens
  Payload ID: 14665
  Gene Symbol: RPL3L
  Gene Name: ribosomal protein L3-like
  ENSP ID: ENSP00000455856
MTHTLREVHRPGLKISKREEVEAVTIVETPPLVVVGVVGYVAT

SEQ ID NO: 74160 - protein, 427 aa, Homo sapiens [sequence omitted]

SEQ ID NO: 74161 - protein, 333 aa, Homo sapiens
  Payload ID: 14666
  Gene Symbol: RPL4
  Gene Name: ribosomal protein L4
  ENSP ID: ENSP00000454281
MCRGGRMFAPTKTWRRWHRRVNTTQKRYAICSALAASALPALVMSKGHRIEEVPELPLVVEDKVEGYKKTKEAVLLLKKLKAWNDIKKVYASQRMRAGKGKMRNRRRIQRRGPCIIYNEDNGIIKAFRNIPGITLLNVSKLNILKLAPGGHVGRFCIWTESAFRKLDELYGTWRKAASLKSNYNLPMHKMINTDLSRILKSPEIQRALRAPRKKIHRRVLKKNPLKNLRIMLKLNPYAKTMRRNTILRQARNHKLRVDKAAAAAAALQAKSDEKAAVAGKKPVVGKKGKKAAVGVKKQKKPLVGKKAAATKKPAPEKKPAEKKPTTEEKKPAA

SEQ ID NO: 74162 - protein, 170 aa, Homo sapiens
  Payload ID: 14666
  Gene Symbol: RPL4
  Gene Name: ribosomal protein L4
  ENSP ID: ENSP00000457268
MACARPLISVYSEKGESSGKNVTLPAVFKAPIRPDIVNFVHTNLRKNNRQPYAVSELAGHQTSAESWGTGRAVARIPRVRGGGTHRSGQGAFGNMCRGGRMFAPTKTWRRWHRRVNTTQKRYAICSALAASALPALVMSKVEDKVEGYKKTKEAVLLLKKLKAWNDIKKV

SEQ ID NO: 74163 - protein, 171 aa, Homo sapiens
  Payload ID: 14666
  Gene Symbol: RPL4
  Gene Name: ribosomal protein L4
  ENSP ID: ENSP00000457442
MACARPLISVYSEKGESSGKNVTLPAVFKAPIRPDIVNFVHTNLRKNNRQPYAVSELAGHQTSAESWGTGRAVARIPRVRGGGTHRSGQGAFGNMCRGGRMFAPTKTWRRWHRRKNPLKNLRIMLKLNPYAKTMRRNTILRQARNHKLRVDKAAAAAAALQAKSDEKAAVA

SEQ ID NO: 74164 - protein, 25 aa, Homo sapiens [sequence omitted]

SEQ ID NO: 74165 - protein, 25 aa, Homo sapiens [sequence omitted]

SEQ ID NO: 74166 - protein, 130 aa, Homo sapiens
  Payload ID: 14668
  Gene Symbol: RPL5
  Gene Name: ribosomal protein L5
  ENSP ID: ENSP00000359338
MIVRVTNRDIICQIAYARIEGDMIVCAAYAHELPKYGVKVGLTNYAAAYCTGLLLARRLLNRFGMDKIYEGQVEVTGDEYNVESIDGQPGAFTCYLDAGLARTTTGNKVFGALKGAVDGGLSIPHSTKRF

SEQ ID NO: 74167 - protein, 297 aa, Homo sapiens [sequence omitted]

SEQ ID NO: 74168 - protein, 63 aa, Homo sapiens
  Payload ID: 14668
  Gene Symbol: RPL5
  Gene Name: ribosomal protein L5
  ENSP ID: ENSP00000473675
MGFVKVVKNKAYFKRYQVKFRRRREGKTDYYARKRLVIQDKNKYNTPKYRMIVRVTNRDIICQ

SEQ ID NO: 74169 - protein, 288 aa, Homo sapiens [sequence omitted]

SEQ ID NO: 74170 - protein, 288 aa, Homo sapiens [sequence omitted]

SEQ ID NO: 74171 - protein, 105 aa, Homo sapiens
  Payload ID: 14669
  Gene Symbol: RPL6
  Gene Name: ribosomal protein L6
  ENSP ID: ENSP00000446859
MAGEKVEKPDTKEKKPEAKKVDAGGKVKKGNLKAKKPKKGKPHCSRNPVLVRGIGRYSRSAMYSRKAMYKRKYSAAKSKVEKKKKEKVLATVTKPVGGDKNGGTR

SEQ ID NO: 74172 - protein, 159 aa, Homo sapiens
  Payload ID: 14669
  Gene Symbol: RPL6
  Gene Name: ribosomal protein L6
  ENSP ID: ENSP00000446883
MAGEKVEKPDTKEKKPEAKKVDAGGKVKKGNLKAKKPKKGKPHCSRNPVLVRGIGRYSRSAMYSRKAMYKRKYSAAKSKVEKKKKEKVLATVTKPVGGDKNGGTRVVKLRKMPRYYPTEDVPRKLLSHGKKPFSQHVRKLRASITPGTILIILTGRHRG

SEQ ID NO: 74173 - protein, 120 aa, Homo sapiens
  Payload ID: 14669
  Gene Symbol: RPL6
  Gene Name: ribosomal protein L6
  ENSP ID: ENSP00000448067
MAGEKVEKPDTKEKKPEAKKVDAGGKVKKGNLKAKKPKKGKPHCSRNPVLVRGIGRYSRSAMYSRKAMYKRKYSAAKSKVEKKKKEKVLATVTKPVGGDKNGGTRVVKLRKMPRYYPTED

SEQ ID NO: 74174 - protein, 63 aa, Homo sapiens
  Payload ID: 14669
  Gene Symbol: RPL6
  Gene Name: ribosomal protein L6
  ENSP ID: ENSP00000448570
MPRYYPTEDVPRKLLSHGKKPFSQHVRKLRASITPGTILIILTGRHRGKRVVFLKQLASGLLL

SEQ ID NO: 74175 - protein, 118 aa, Homo sapiens
  Payload ID: 14669
  Gene Symbol: RPL6
  Gene Name: ribosomal protein L6
  ENSP ID: ENSP00000449486
MAGEKVEKPDTKEKKPEAKKVDAGGKVKKGNLKAKKPKKGKPHCSRNPVLVRGIGRYSRSAMYSRKAMYKRKYSAAKSKVEKKKKEKVLATVTKPVGGDKNGGTRVVKLRKMPRYYPT

SEQ ID NO: 74176 - protein, 160 aa, Homo sapiens
  Payload ID: 14669
  Gene Symbol: RPL6
  Gene Name: ribosomal protein L6
  ENSP ID: ENSP00000476161
MAGEKVEKPDTKEKKPEAKKVDAGGKVKKGNLKAKKPKKGKPHCSRNPVLVRGIGRYSRSAMYSRKAMYKRKYSAAKSKVEKKKKEKVLATVTKPVGGDKNGGTRVVKLRKMPRYYPTEDVPRKLLSHGKKPFSQHVRKLRASITPGTILIILTGRHRGK

SEQ ID NO: 74177 - protein, 248 aa, Homo sapiens
  Payload ID: 14670
  Gene Symbol: RPL7
  Gene Name: ribosomal protein L7
  Uniprot ID: P18124
  ENSP ID: ENSP00000339795
MEGVEEKKKEVPAVPETLKKKRRNFAELKIKRLRKKFAQKMLRKARRKLIYEKAKHYHKEYRQMYRTEIRMARMARKAGNFYVPAEPKLAFVIRIRGINGVSPKVRKVLQLLRLRQIFNGTFVKLNKASINMLRIVEPYIAWGYPNLKSVNELIYKRGYGKINKKRIALTDNALIARSLGKYGIICMEDLIHEIYTVGKRFKEANNFLWPFKLSSPRGGMKKKTTHFVEGGDAGNREDQINRLIRRMN

SEQ ID NO: 74178 - protein, 208 aa, Homo sapiens
  Payload ID: 14670
  Gene Symbol: RPL7
  Gene Name: ribosomal protein L7
  ENSP ID: ENSP00000379729
MLRKARRKLIYEKAKHYHKEYRQMYRTEIRMARMARKAGNFYVPAEPKLAFVIRIRGINGVSPKVRKVLQLLRLRQIFNGTFVKLNKASINMLRIVEPYIAWGYPNLKSVNELIYKRGYGKINKKRIALTDNALIARSLGKYGIICMEDLIHEIYTVGKRFKEANNFLWPFKLSSPRGGMKKKTTHFVEGGDAGNREDQINRLIRRMN

SEQ ID NO: 74179 - protein, 208 aa, Homo sapiens; identical to SEQ ID NO: 74178
  Payload ID: 14670
  Gene Symbol: RPL7
  Gene Name: ribosomal protein L7
  ENSP ID: ENSP00000379730

SEQ ID NO: 74180 - protein, 208 aa, Homo sapiens; identical to SEQ ID NO: 74178
  Payload ID: 14670
  Gene Symbol: RPL7
  Gene Name: ribosomal protein L7
  ENSP ID: ENSP00000379731

SEQ ID NO: 74181 - protein, 88 aa, Homo sapiens
  Payload ID: 14670
  Gene Symbol: RPL7
  Gene Name: ribosomal protein L7
  ENSP ID: ENSP00000401300
MLRKARRKLIYEKAKHYHKEYRQMYRTEIRMARMARKAGNFYVPAEPKLAFVIRIRGINGVSPKVRKVLQLLRLRQIFNGTFVKLNKA

SEQ ID NO: 74182 - protein, 99 aa, Homo sapiens
  Payload ID: 14670
  Gene Symbol: RPL7
  Gene Name: ribosomal protein L7
  ENSP ID: ENSP00000415808
MLRKARRKLIYEKAKHYHKEYRQMYRTEIRMARMARKAGNFYVPAEPKLAFVIRIRGINGVSPKVRKVLQLLRLRQIFNGTFVKLNKASINMLRIVEPY

SEQ ID NO: 74183 - protein, 151 aa, Homo sapiens; identical to SEQ ID NO: 514
  Payload ID: 14671
  Gene Symbol: RPL7A
  Gene Name: ribosomal protein L7a
  ENSP ID: ENSP00000361071

SEQ ID NO: 74184 - protein, 266 aa, Homo sapiens [sequence omitted]

SEQ ID NO: 74185 - protein, 191 aa, Homo sapiens; identical to SEQ ID NO: 513
  Payload ID: 14671
  Gene Symbol: RPL7A
  Gene Name: ribosomal protein L7a
  ENSP ID: ENSP00000416638

SEQ ID NO: 74186 - protein, 246 aa, Homo sapiens
  Payload ID: 14672
  Gene Symbol: RPL7L1
  Gene Name: ribosomal protein L7-like 1
  Uniprot ID: Q6DKI1
  ENSP ID: ENSP00000346063
MAEQEQRKIPLVPENLLKKRKAYQALKATQAKQALLAKKEQKKGKGLRFKRLESFLHDSWRQKRDKVRLRRLEVKPHALELPDKHSLAFVVRIERIDGVSLLVQRTIARLRLKKIFSGVFVKVTPQNLKMLRIVEPYVTWGFPNLKSVRELILKRGQAKVKNKTIPLTDNTVIEEHLGKFGVICLEDLIHEIAFPGKHFQEISWFLCPFHLSVARHATKNRVGFLKEMGTPGYRGERINQLIRQLN

SEQ ID NO: 74187 - protein, 246 aa, Homo sapiens; identical to SEQ ID NO: 74186
  Payload ID: 14672
  Gene Symbol: RPL7L1
  Gene Name: ribosomal protein L7-like 1
  Uniprot ID: Q6DKI1
  ENSP ID: ENSP00000418221

SEQ ID NO: 74188 - protein, 196 aa, Homo sapiens
  Payload ID: 14672
  Gene Symbol: RPL7L1
  Gene Name: ribosomal protein L7-like 1
  ENSP ID: ENSP00000473356
MAEQEQRKIPLVPENLLKKRKAYQALKATQAKQALLAKKEQKKGKGLRFKRLESFLHDSWRQKRDKVRLRRLEVKPHALELPDKHSLAFVVRIERIDGVSLLVQRTIARLRLKKIFSGVFVKVTPQNLKMLRIVEPYVTWGFPNLKSVRELILKRGQAKVKNKTIPLTDNTVIEEHLGECYSLGISWGRKPGSLKL

SEQ ID NO: 74189 - protein, 257 aa, Homo sapiens [sequence omitted]

SEQ ID NO: 74190 - protein, 257 aa, Homo sapiens [sequence omitted]

SEQ ID NO: 74191 - protein, 257 aa, Homo sapiens [sequence omitted]

SEQ ID NO: 74192 - protein, 167 aa, Homo sapiens
  Payload ID: 14673
  Gene Symbol: RPL8
  Gene Name: ribosomal protein L8
  ENSP ID: ENSP00000433703
MGRVIRGQRKGAGSVFRAHVKHRKGAARLRAVDFAERHGYIKGIVKDIIHDPGRGAPLAKVVFRDPYRFKKRTELFIAAEGIHTGQFVYCGKKAQLNIGNVLPVGTMPEGTIVCCLEEKPGDRGKLARASGNYATVISHNPETKKTRVKLPSGSKKVISSANRAVVG

SEQ ID NO: 74193 - protein, 205 aa, Homo sapiens
  Payload ID: 14673
  Gene Symbol: RPL8
  Gene Name: ribosomal protein L8
  ENSP ID: ENSP00000434535
MGRVIRGQRKGAGSVFRAHVKHRKGAARLRAVDFAERHGYIKGIVKDIIHDPGRGAPLAKVVFRDPYRFKKRTELFIAAEGIHTGQFVYCGKKAQLNIGNVLPVGTMPEGTIVCCLEEKPGDRGKLARASGNYATVISHNPETKKTRVKLPSGSKKVISSANRAVVGVVAGGGRIDKPILKAGRAYHKYKAKRNCWPRVRGVAMN

SEQ ID NO: 74194 - protein, 235 aa, Homo sapiens
  Payload ID: 14673
  Gene Symbol: RPL8
  Gene Name: ribosomal protein L8
  ENSP ID: ENSP00000435313
MGRVIRGQRKGAGSVFRAHVKHRKGAARLRAVDFAERHGYIKGIVKDIIHDPGRGAPLAKVVFRDPYRFKKRTELFIAAEGIHTGQFVYCGKKAQLNIGNVLPVGTMPEGTIVCCLEEKPGDRGKLARASGNYATVISSANRAVVGVVAGGGRIDKPILKAGRAYHKYKAKRNCWPRVRGVAMNPVEHPFGGGNHQHIGKPSTIRRDAPAGRKVGLIAARRTGRLRGTKTVQEKE

SEQ ID NO: 74195 - protein, 148 aa, Homo sapiens
  Payload ID: 14673
  Gene Symbol: RPL8
  Gene Name: ribosomal protein L8
  ENSP ID: ENSP00000436460
MGRVIRGQRKGAGSVFRAHVKHRKGAARLRAVDFAERHGYIKGIVKKVISSANRAVVGVVAGGGRIDKPILKAGRAYHKYKAKRNCWPRVRGVAMNPVEHPFGGGNHQHIGKPSTIRRDAPAGRKVGLIAARRTGRLRGTKTVQEKEN

SEQ ID NO: 74196 - protein, 110 aa, Homo sapiens
  Payload ID: 14673
  Gene Symbol: RPL8
  Gene Name: ribosomal protein L8
  ENSP ID: ENSP00000437062
  MOD_RES (1)..(1): Any amino acid
XALRACAPWISLSGTATSRASSRWSSGIRIGLRSGRSCSLPPRAFTRASLCIAARRPSSTLAMCSLWAPCLRVQSCAAWRRSLETVASWPGHQGTMPPLSPTTLRPRRPV

SEQ ID NO: 74197 - protein, 192 aa, Homo sapiens [sequence omitted]

SEQ ID NO: 74198 - protein, 192 aa, Homo sapiens [sequence omitted]

SEQ ID NO: 74199 - protein, 181 aa, Homo sapiens
  Payload ID: 14674
  Gene Symbol: RPL9
  Gene Name: ribosomal protein L9
  ENSP ID: ENSP00000421872
MKTILSNQTVDIPENVDITLKGRTVIVKGPRGTLRRDFNHINVELSLLGKKKKRLRVDKWWGNRKELATVRTICSHVQNMIKGVTLGFRYKMRSVYAHFPINVVIQENGSLVEIRNFLGEKYIRRVRMRPVSQAQKDELILEGNDIELVSNSAALIQQATTVKNKDIRKFLDGIYVSEKGT

SEQ ID NO: 74200 - protein, 166 aa, Homo sapiens
  Payload ID: 14674
  Gene Symbol: RPL9
  Gene Name: ribosomal protein L9
  ENSP ID: ENSP00000422191
MKTILSNQTVDIPENVDITLKGRTVIVKGPRGTLRRDFNHINVELSLLGKKKKRLRVDKWWGNRKELATVRTICSHVQNMIKGVTLGFRYKMRSVYAHFPINVVIQENGSLVEIRNFLGEKYIRRVRMRPGVACSVSQAQKDELILEGNDIELVSNSAALIQQATT

SEQ ID NO: 74201 - protein, 91 aa, Homo sapiens
  Payload ID: 14674
  Gene Symbol: RPL9
  Gene Name: ribosomal protein L9
  ENSP ID: ENSP00000424796
  MOD_RES (1)..(1): Any amino acid
XLRVDKWWGNRKELATVRTICSHVQNMIKGVACSVSQAQKDELILEGNDIELVSNSAALIQQATTVKNKDIRKFLDGIYVSEKGTVQQADE

SEQ ID NO: 74202 - protein, 189 aa, Homo sapiens
  Payload ID: 14674
  Gene Symbol: RPL9
  Gene Name: ribosomal protein L9
  ENSP ID: ENSP00000425250
  MOD_RES (1)..(1): Any amino acid
XTDVLSLLRLLRVDITLKGRTVIVKGPRGTLRRDFNHINVELSLLGKKKKRLRVDKWWGNRKELATVRTICSHVQNMIKGVTLGFRYKMRSVYAHFPINVVIQENGSLVEIRNFLGEKYIRRVRMRPGVACSVSQAQKDELILEGNDIELVSNSAALIQQATTVKNKDIRKFLDGIYVSEKGTVQQADE

SEQ ID NO: 74203 - protein, 165 aa, Homo sapiens
  Payload ID: 14675
  Gene Symbol: RPS10
  Gene Name: ribosomal protein S10
  Uniprot ID: P46783
  ENSP ID: ENSP00000347271
MLMPKKNRIAIYELLFKEGVMVAKKDVHMPKHPELADKNVPNLHVMKAMQSLKSRGYVKEQFAWRHFYWYLTNEGIQYLRDYLHLPPEIVPATLRRSRPETGRPRPKGLEGERPARLTRGEADRDTYRRSAVPPGADKKAEAGAGSATEFQFRGGFGRGRGQPPQ

SEQ ID NO: 74204 - protein, 172 aa, Homo sapiens
  Payload ID: 14675
  Gene Symbol: RPS10
  Gene Name: ribosomal protein S10
  ENSP ID: ENSP00000363169
MLMPKKNRIAIYELLFKEGVMVAKKDVHMPKHPELADKNVPNLHVMKAMQSLKSRGYVKEQFAWRHFYWYLTNEGIQYLRDYLHLPPEIVPATLRRSRPETGRPRPKGLEGERPARLTRGEADRDTYRRSAVPPGADKKAEAGAGSATEFQFVLIAHDCSQIMSFVKRKHVQ

SEQ ID NO: 74205 - protein, 165 aa, Homo sapiens; identical to SEQ ID NO: 74203
  Payload ID: 14675
  Gene Symbol: RPS10
  Gene Name: ribosomal protein S10
  Uniprot ID: P46783
  ENSP ID: ENSP00000481646

SEQ ID NO: 74206 - protein, 158 aa, Homo sapiens [sequence omitted]

SEQ ID NO: 74207 - protein, 82 aa, Homo sapiens
  Payload ID: 14676
  Gene Symbol: RPS11
  Gene Name: ribosomal protein S11
  ENSP ID: ENSP00000470375
IQVRTRGWMPGLSVPTKSSRPSFKTRRGSCWEKLARRSSRGTTRTSVWASRHPRRLLRAPTLTRNAPSLVMCPFEGGSSLAW

SEQ ID NO: 74208 - protein, 118 aa, Homo sapiens
  Payload ID: 14676
  Gene Symbol: RPS11
  Gene Name: ribosomal protein S11
  ENSP ID: ENSP00000470447
MADIQTERAYQKQPTIFQNKKRVLLGETGKEKLPRYYKNIGLGFKTPKEAIEGTYIDKKCPFTGNVSIRGRILSGVVTKMKMQRTIVIRRDYLHYIRKYNRFEKRHKNMSVHLSPCFR

SEQ ID NO: 74209 - protein, 79 aa, Homo sapiens
  Payload ID: 14676
  Gene Symbol: RPS11
  Gene Name: ribosomal protein S11
  ENSP ID: ENSP00000471873
MKMQRTIVIRRDYLHYIRKYNRFEKRHKNMSVHLSPCFRDVQIGDIVTVGECRPLSKTVRFNVLKVTKAAGTKKQFQKF

SEQ ID NO: 74210 - protein, 88 aa, Homo sapiens
  Payload ID: 14676
  Gene Symbol: RPS11
  Gene Name: ribosomal protein S11
  ENSP ID: ENSP00000471874
MADIQTERAYQKQPTIFQNKKRVLLGETGKEKLPRADPLWRGDQDEDAEDHCHPPRLSALHPQVQPLREAPQEHVCTPVPLLQGRPDR

SEQ ID NO: 74211 - protein, 132 aa, Homo sapiens [sequence omitted]

SEQ ID NO: 74212 - protein, 148 aa, Homo sapiens
  Payload ID: 14678
  Gene Symbol: RPS13
  Gene Name: ribosomal protein S13
  ENSP ID: ENSP00000228140
MGRMHAPGKGLSQSALPYRRSVPTWLKLTSDDVKEQIYKLAKKGLTPSQIGVILRDSHGVAQVRFVTGNKILRILKSKGLAPDLPEDLYHLIKKAVAVRKHLERNRKRAGFTVWLDIIRPSESSLPIGNMNHLQPLPWSHKFVCVLKQ

SEQ ID NO: 74213 - protein, 116 aa, Homo sapiens
  Payload ID: 14678
  Gene Symbol: RPS13
  Gene Name: ribosomal protein S13
  ENSP ID: ENSP00000432096
MGRMHAPGKGLSQSALPYRRSVPTWLKLTSDDVKEQIYKLAKKGLTPSQIVLLLSPSLECSGAISAHCNLHLLDSSDSPASASRIGVILRDSHGVAQVRFVTGNKILRILKSKGLA

SEQ ID NO: 74214 - protein, 151 aa, Homo sapiens [sequence omitted]

SEQ ID NO: 74215 - protein, 151 aa, Homo sapiens [sequence omitted]

SEQ ID NO: 74216 - protein, 151 aa, Homo sapiens [sequence omitted]

SEQ ID NO: 74217 - protein, 151 aa, Homo sapiens [sequence omitted]

SEQ ID NO: 74218 - protein, 151 aa, Homo sapiens [sequence omitted]

SEQ ID NO: 74219 - protein, 120 aa, Homo sapiens
  Payload ID: 14679
  Gene Symbol: RPS14
  Gene Name: ribosomal protein S14
  ENSP ID: ENSP00000428536
  MOD_RES (1)..(1): Any amino acid
XMKVKADRDESSPYAAMLAAQDVAQRCKELGITALHIKLRATGGNRTKTPGPGAQSALRALARSGMKIGRIGKCPPLANAWVYFEALAPKSTCCAQWMCSGWSGHFWQLSLLREAARGTL

SEQ ID NO: 74220 - protein, 134 aa, Homo sapiens
  Payload ID: 14679
  Gene Symbol: RPS14
  Gene Name: ribosomal protein S14
  ENSP ID: ENSP00000429856
MAPRKGKEKKEEQVISLGPQVAEGENVFGVCHIFASFNDTFVHVTDLSGKETICRVTGGMKVKADRDESSPYAAMLAAQDVAQRCKELGITALHIKLRATGGNRTKTPGPGAQSALRALARSGMKIGRIEKTVG

SEQ ID NO: 74221 - protein, 129 aa, Homo sapiens
  Payload ID: 14680
  Gene Symbol: RPS15
  Gene Name: ribosomal protein S15
  ENSP ID: ENSP00000465055
MAEVEQKKKRTFRKFTYRGVDLDQLLDMSYEQLMQLYSARQRRRLNRGLRRKQHSLLKRLRKAKKEAPPMEKPEVVKTHLRDMIILPEMVGSMVGVYNGKTFNQVEIKVCAAVPAGWGGLGSPDAGGIS

SEQ ID NO: 74222 - protein, 152 aa, Homo sapiens [sequence omitted]

SEQ ID NO: 74223 - protein, 112 aa, Homo sapiens
  Payload ID: 14680
  Gene Symbol: RPS15
  Gene Name: ribosomal protein S15
  ENSP ID: ENSP00000466366
MQLYSARQRRRLNRGLRRKQHSLLKRLRKAKKEAPPMEKPEVVKTHLRDMIILPEMVGSMVGVYNGKTFNQVEIKPEMIGHYLGEFSITYKPVKHGRPGIGATHSSRFIPLK

SEQ ID NO: 74224 - protein, 145 aa, Homo sapiens [sequence omitted]

SEQ ID NO: 74225 - protein, 112 aa, Homo sapiens; identical to SEQ ID NO: 74223
  Payload ID: 14680
  Gene Symbol: RPS15
  Gene Name: ribosomal protein S15
  ENSP ID: ENSP00000467676

SEQ ID NO: 74226 - protein, 141 aa, Homo sapiens
  Payload ID: 14680
  Gene Symbol: RPS15
  Gene Name: ribosomal protein S15
  ENSP ID: ENSP00000467855
MAEVEQKKKRTFRKFTYRGVDLDQLLDMSYEQLMQLYSARQRRRLNRGLRRKQHSLLKRLRKAKKEAPPMEKPEVVKTHLRDMIILPEMVGSMVGVYNGKTFNQPEMIGHYLGEFSITYKPVKHGRPGIGATHSSRFIPLK

SEQ ID NO: 74227 - protein, 118 aa, Homo sapiens
  Payload ID: 14680
  Gene Symbol: RPS15
  Gene Name: ribosomal protein S15
  ENSP ID: ENSP00000473953
MSYEQLMQLYSARQRRRLNRGLRRKQHSLLKRLRKAKKEAPPMEKPEVVKTHLRDMIILPEMVGSMVGVYNGKTFNQVEIKPEMIGHYLGEFSITYKPVKHGRPGIGATHSSRFIPLK

SEQ ID NO: 74228 - protein, 118 aa, Homo sapiens; identical to SEQ ID NO: 74227
  Payload ID: 14680
  Gene Symbol: RPS15
  Gene Name: ribosomal protein S15
  ENSP ID: ENSP00000474433

SEQ ID NO: 74229 - protein, 112 aa, Homo sapiens; identical to SEQ ID NO: 74223
  Payload ID: 14680
  Gene Symbol: RPS15
  Gene Name: ribosomal protein S15
  ENSP ID: ENSP00000474543

SEQ ID NO: 74230 - protein, 135 aa, Homo sapiens
  Payload ID: 14680
  Gene Symbol: RPS15
  Gene Name: ribosomal protein S15
  ENSP ID: ENSP00000474970
MRRVSPGRAAHKTAWCILPSEQLMQLYSARQRRRLNRGLRRKQHSLLKRLRKAKKEAPPMEKPEVVKTHLRDMIILPEMVGSMVGVYNGKTFNQVEIKPEMIGHYLGEFSITYKPVKHGRPGIGATHSSRFIPLK

SEQ ID NO: 74231 - protein, 68 aa, Homo sapiens
  Payload ID: 14680
  Gene Symbol: RPS15
  Gene Name: ribosomal protein S15
  ENSP ID: ENSP00000475096
MQLYSARQRRRLNRGLRRKQHSLLKRLRKAKKEAPPMEKPEVVKTHLRDMIILPEMVGSMVGVYNGKT

SEQ ID NO: 74232 - protein, 7 aa, Homo sapiens
  Payload ID: 14680
  Gene Symbol: RPS15
  Gene Name: ribosomal protein S15
  ENSP ID: ENSP00000483399
MQLYSAR

SEQ ID NO: 74233 - protein, 130 aa, Homo sapiens [sequence omitted]

SEQ ID NO: 74234 - protein, 130 aa, Homo sapiens [sequence omitted]

SEQ ID NO: 74235 - protein, 50 aa, Homo sapiens
  Payload ID: 14681
  Gene Symbol: RPS15A
  Gene Name: ribosomal protein S15a
  ENSP ID: ENSP00000457001
MVRMNVLADALKSINNAEKRGKRQVLIRPCSKVIVRFLTVMMKHELGKLL

SEQ ID NO: 74236 - protein, 49 aa, Homo sapiens
  Payload ID: 14681
  Gene Symbol: RPS15A
  Gene Name: ribosomal protein S15a
  ENSP ID: ENSP00000457924
MVRMNVLADALKSINNAEKRGKRQVLIRPCSKVIVRFLTVMMKHVSYLL

SEQ ID NO: 74237 - protein, 58 aa, Homo sapiens
  Payload ID: 14681
  Gene Symbol: RPS15A
  Gene Name: ribosomal protein S15a
  ENSP ID: ENSP00000458052
  MOD_RES (1)..(1): Any amino acid
XCGVISPRFDVQLKDLEKWQNNLLPSRQFGIYTLQIMRLVPWLKVFSLHGCCITVSLY

SEQ ID NO: 74238 - protein, 130 aa, Homo sapiens [sequence omitted]

SEQ ID NO: 74239 - protein, 130 aa, Homo sapiens [sequence omitted]

SEQ ID NO: 74240 - protein, 111 aa, Homo sapiens
  Payload ID: 14681
  Gene Symbol: RPS15A
  Gene Name: ribosomal protein S15a
  ENSP ID: ENSP00000459373
MVRMNVLADALKSINNAEKRGKRQVLIRPCSKVIVRFLTVMMKHGYIGEFEIIDDHRAGKIVVNLTGRLNKVGVQWHDLGYCNLCLPGSSDSPASASLVAEITVWGDQPQI

SEQ ID NO: 74241 - protein, 111 aa, Homo sapiens; identical to SEQ ID NO: 74240
  Payload ID: 14681
  Gene Symbol: RPS15A
  Gene Name: ribosomal protein S15a
  ENSP ID: ENSP00000459554

SEQ ID NO: 74242 - protein, 52 aa, Homo sapiens
  Payload ID: 14681
  Gene Symbol: RPS15A
  Gene Name: ribosomal protein S15a
  ENSP ID: ENSP00000460069
MVRMNVLADALKSINNAEKRGKRQVLIRPCSKVIVRFLTVMMKHVWGDQPQI

SEQ ID NO: 74243 - protein, 100 aa, Homo sapiens
  Payload ID: 14681
  Gene Symbol: RPS15A
  Gene Name: ribosomal protein S15a
  ENSP ID: ENSP00000460618
MVRMNVLADALKSINNAEKRGKRQVLIRPCSKVIVRFLTVMMKHGYIGEFEIIDDHRAGKIVVNLTGRLNKCGVISPRFDVQLKDLEKWQNNLLPSRQFG

SEQ ID NO: 74244 - protein, 146 aa, Homo sapiens [sequence omitted]

SEQ ID NO: 74245 - protein, 152 aa, Homo sapiens
  Payload ID: 14682
  Gene Symbol: RPS16
  Gene Name: ribosomal protein S16
  ENSP ID: ENSP00000367806
MPSKGPLQSVQVFGRKKTATAVAHCKRGNGLIKVNGRPLEMIEPRTLQYKLLEPVLLLGKERFAGVDIRVRVKGGGHVAQIYGESQELGAWRRWLWEGGLHSAPVPFNCVSFSQLSVSPSPKPWWPITRNMWMRLPRRRSKTSSSSMTGPCW

SEQ ID NO: 74246 - protein, 50 aa, Homo sapiens
  Payload ID: 14682
  Gene Symbol: RPS16
  Gene Name: ribosomal protein S16
  ENSP ID: ENSP00000468957
LLEPVLLLGKERFAGVDIRVRVKGGGHVAQIYAIRQSISKALVAYYQKCE

SEQ ID NO: 74247 - protein, 85 aa, Homo sapiens
  Payload ID: 14682
  Gene Symbol: RPS16
  Gene Name: ribosomal protein S16
  ENSP ID: ENSP00000471983
TATAVAHCKRGNGLIKVNGRPLEMIEPRTLQYKLLEPVLLLGKERFAGVDIRVRVKGGGHVAQIYAIRQSISKALVAYYQKCECG

SEQ ID NO: 74248 - protein, 129 aa, Homo sapiens
  Payload ID: 14682
  Gene Symbol: RPS16
  Gene Name: ribosomal protein S16
  ENSP ID: ENSP00000472231
MPSKGPLQSVQVFGRKKTATAVAHCKRGNGLIKLLEPVLLLGKERFAGVDIRVRVKGGGHVAQIYAIRQSISKALVAYYQKYVDEASKKEIKDILIQYDRTLLVADPRRCESKKFGGPGARARYQKSYR

SEQ ID NO: 74249 - protein, 100 aa, Homo sapiens
  Payload ID: 14682
  Gene Symbol: RPS16
  Gene Name: ribosomal protein S16
  ENSP ID: ENSP00000473220
MPSKGPLQSVQVFGRKKTATAVAHCKRGNGLIKVNGRPLEMIEPRTLQYKLLEPVLLLGKERFAGVDIRVRVKGGGHVAQIYAIRQSISKALVAYYQKCE

SEQ ID NO: 74250 - protein, 135 aa, Homo sapiens [sequence omitted]

SEQ ID NO: 74251 - protein, 191 aa, Homo sapiens
  Payload ID: 14683
  Gene Symbol: RPS17
  Gene Name: ribosomal protein S17
  ENSP ID: ENSP00000452889
MGRVRTKTVKKAARVIIEKYYTRLGNDFHTNKRVCEEIAIIPSKKLRNKIAGYVTHLMKRIQRGPVRGISIKLQEEERERRDNYVPEVSALDQEIIEVDPDTKEMLKLLLAYVAPFVSALAESACFSSVKAFLWCLHANHSEMSFGPFPGLRQSVQPSGHSAYSWDEFQNASGTCLNFFCSAVLFSINLGQ

SEQ ID NO: 74252 - protein, 59 aa, Homo sapiens
  Payload ID: 14683
  Gene Symbol: RPS17
  Gene Name: ribosomal protein S17
  ENSP ID: ENSP00000453894
  MOD_RES (1)..(1): Any amino acid
XRVRTKTVKKAARVIIEKYYTRLGNDFHTNKRVCEEIAIIPSKKLRNKIAGCSYCSRDL

SEQ ID NO: 74253 - protein, 136 aa, Homo sapiens
  Payload ID: 14683
  Gene Symbol: RPS17
  Gene Name: ribosomal protein S17
  ENSP ID: ENSP00000453910
MGRVRTKTVKKAARVIIEKYYTRLGNDFHTNKRVCEEIAIIPSKKLRNKIAGYVTHLMKRIQRGPVRGISIKLQEEERERRDNYVPEVSALDQEIIEVDPDTKEMLKLLVSVCWIPKVVFSWSKTISRSYYPRSPS

SEQ ID NO: 74254 - protein, 135 aa, Homo sapiens [sequence omitted]

SEQ ID NO: 74255 - protein, 59 aa, Homo sapiens; identical to SEQ ID NO: 74252
  Payload ID: 14683
  Gene Symbol: RPS17
  Gene Name: ribosomal protein S17
  ENSP ID: ENSP00000487741
  MOD_RES (1)..(1): Any amino acid

SEQ ID NO: 74256 - protein, 136 aa, Homo sapiens; identical to SEQ ID NO: 74253
  Payload ID: 14683
  Gene Symbol: RPS17
  Gene Name: ribosomal protein S17
  ENSP ID: ENSP00000488464

SEQ ID NO: 74257 - protein, 152 aa, Homo sapiens [sequence omitted]

SEQ ID NO: 74258 - protein, 34 aa, Homo sapiens
  Payload ID: 14684
  Gene Symbol: RPS18
  Gene Name: ribosomal protein S18
  ENSP ID: ENSP00000392349
MSLVIPEKFQHILRVLNTNIDGRRKIAFAITAIK

SEQ ID NO: 74259 - protein, 152 aa, Homo sapiens [sequence omitted]

SEQ ID NO: 74260 - protein, 152 aa, Homo sapiens [sequence omitted]

SEQ ID NO: 74261 - protein, 152 aa, Homo sapiens [sequence omitted]

SEQ ID NO: 74262 - protein, 152 aa, Homo sapiens [sequence omitted]

SEQ ID NO: 74263 - protein, 82 aa, Homo sapiens
  Payload ID: 14684
  Gene Symbol: RPS18
  Gene Name: ribosomal protein S18
  ENSP ID: ENSP00000431721
MQNPRQYKIPDWFLNRQKDVKDGKYSQVLANGLDNKLREDLERLKKIRAHRGLRHFWGLRVRGQHTKTTGRRGRTVGVSKKK

SEQ ID NO: 74264 - protein, 82 aa, Homo sapiens; identical to SEQ ID NO: 74263
  Payload ID: 14684
  Gene Symbol: RPS18
  Gene Name: ribosomal protein S18
  ENSP ID: ENSP00000431986

SEQ ID NO: 74265 - protein, 82 aa, Homo sapiens; identical to SEQ ID NO: 74263
  Payload ID: 14684
  Gene Symbol: RPS18
  Gene Name: ribosomal protein S18
  ENSP ID: ENSP00000432580

SEQ ID NO: 74266 - protein, 82 aa, Homo sapiens; identical to SEQ ID NO: 74263
  Payload ID: 14684
  Gene Symbol: RPS18
  Gene Name: ribosomal protein S18
  ENSP ID: ENSP00000434786

SEQ ID NO: 74267 - protein, 82 aa, Homo sapiens; identical to SEQ ID NO: 74263
  Payload ID: 14684
  Gene Symbol: RPS18
  Gene Name: ribosomal protein S18
  ENSP ID: ENSP00000434837

SEQ ID NO: 74268 - protein, 82 aa, Homo sapiens; identical to SEQ ID NO: 74263
  Payload ID: 14684
  Gene Symbol: RPS18
  Gene Name: ribosomal protein S18
  ENSP ID: ENSP00000437050

SEQ ID NO: 74269 - protein, 33 aa, Homo sapiens
  Payload ID: 14684
  Gene Symbol: RPS18
  Gene Name: ribosomal protein S18
  ENSP ID: ENSP00000485840
SLVIPEKFQHILRVLNTNIDGRRKIAFAITAIK

SEQ ID NO: 74270 - protein, 71 aa, Homo sapiens
  Payload ID: 14685
  Gene Symbol: RPS19
  Gene Name: ribosomal protein S19
  ENSP ID: ENSP00000221975
MTKIYGGRQRNGVMPSHFSRGSKSVARRVLQALEGLKMVEKDQDGGRKLTPQGQRDLDRIAGQVAAANKKH

SEQ ID NO: 74271 - protein, 76 aa, Homo sapiens
  Payload ID: 14685
  Gene Symbol: RPS19
  Gene Name: ribosomal protein S19
  ENSP ID: ENSP00000469228
MPGVTVKDVNQQEFVRALAAFLKKSGKLKVPEWVDTVKLAKHKELAPYDENWFYTRAASTARHLYLRGGAGVGSMT

SEQ ID NO: 74272 - protein, 100 aa, Homo sapiens
  Payload ID: 14685
  Gene Symbol: RPS19
  Gene Name: ribosomal protein S19
  ENSP ID: ENSP00000469798
MPGVTVKDVNQQEFVRALAAFLKKSGKLKVPEWVDTVKLAKHKELAPYDENWFYTRAGEELSFHSAAPVPPGWRWGWLHDQDLWGTSEKRRHAQPLQPRL

SEQ ID NO: 74273 - protein, 145 aa, Homo sapiens [sequence omitted]

SEQ ID NO: 74274 - protein, 145 aa, Homo sapiens [sequence omitted]

SEQ ID NO: 74275 - protein, 102 aa, Homo sapiens
  Payload ID: 14685
  Gene Symbol: RPS19
  Gene Name: ribosomal protein S19
  ENSP ID: ENSP00000471621
MPGVTVKDVNQQEFVRALAAFLKKSGKLKVPEWVDTVKLAKHKELAPYDENWFYTRAGGLILSIYTEADSLGLDPSFTSGCVSSASTARHLYLRGGAGVGSM

SEQ ID NO: 74276 - protein, 71 aa, Homo sapiens
  Payload ID: 14685
  Gene Symbol: RPS19
  Gene Name: ribosomal protein S19
  ENSP ID: ENSP00000472660
PGVTVKDVNQQEFVRALAAFLKKSGKLKVPEWVDTVKLAKHKELAPYDENWFYTRAELHCHQAGVHWCRLG

SEQ ID NO: 74277 - protein, 136 aa, Homo sapiens
  Payload ID: 14686
  Gene Symbol: RPS19BP1
  Gene Name: ribosomal protein S19 binding protein 1
  Uniprot ID: Q86WX3
  ENSP ID: ENSP00000333948
MSAALLRRGLELLAASEAPRDPPGQAKPRGAPVKRPRKTKAIQAQKLRNSAKGKVPKSALDEYRKRECRDHLRVNLKFLTRTRSTVAESVSQQILRQNRGRKACDRPVAKTKKKKAEGTVFTEEDFQKFQQEYFGS

SEQ ID NO: 74278 - protein, 69 aa, Homo sapiens
  Payload ID: 14686
  Gene Symbol: RPS19BP1
  Gene Name: ribosomal protein S19 binding protein 1
  ENSP ID: ENSP00000399304
MSAALLRRGLELLAASEAPRDPPGQAKPRGAPVKRPRKTKAIQAQKLRNSAKGKVPKSALDGVSPCWPR

SEQ ID NO: 74279 - protein, 293 aa, Homo sapiens [sequence omitted]

SEQ ID NO: 74280 - protein, 218 aa, Homo sapiens
  Payload ID: 14687
  Gene Symbol: RPS2
  Gene Name: ribosomal protein S2
  ENSP ID: ENSP00000433034
MADDAGAAGGPGGPGGPGMGNRGGFRGGFGSGIRGRGRGRGRGRGRGRGARGGKAEDKEWMPVTKLGRLVKDMKIKSLEEIYLFSLPIKESEIIDFFLGASLKDEVLKIMPVQKQTRAGQRTRFKAFVAIGDYNGHVGLGVKCSKEVATAIRGAIILAKLSIVPVRRGYWGNKIGKPHTVPCKVTGRCGSVLVRLIPAPRGTGIVSAPVPKKLLMMAG

SEQ ID NO: 74281 - protein, 209 aa, Homo sapiens
  Payload ID: 14687
  Gene Symbol: RPS2
  Gene Name: ribosomal protein S2
  ENSP ID: ENSP00000433170
MADDAGAAGGPGGPGGPGMGNRGGFRGGFGSGIRGRGRGRGRGRGRGRGARGGKAEDKEESEIIDFFLGASLKDEVLKIMPVQKQTRAGQRTRFKAFVAIGDYNGHVGLGVKCSKEVATAIRGAIILAKLSIVPVRRGYWGNKIGKPHTVPCKVTGRCGSVLVRLIPAPRGTGIVSAPVPKKLLMMAGIDDCYTSARGCTATLGNFGHL

SEQ ID NO: 74282 - protein, 63 aa, Homo sapiens
  Payload ID: 14687
  Gene Symbol: RPS2
  Gene Name: ribosomal protein S2
  ENSP ID: ENSP00000434846
  MOD_RES (1)..(1): Any amino acid
XWMPVTKLGRLVKDMKIKSLEEIYLFSLPIKQGTVVMARPKLDKAKGNLSGKPHLTKQEKKGK

SEQ ID NO: 74283 - protein, 195 aa, Homo sapiens
  Payload ID: 14687
  Gene Symbol: RPS2
  Gene Name: ribosomal protein S2
  ENSP ID: ENSP00000436227
VTKLGRLVKDMKIKSLEEIYLFSLPIKAFVAIGDYNGHVGLGVKCSKEVATAIRGAIILAKLSIVPVRRGYWGNKIGKPHTVPCKVTGRCGSVLVRLIPAPRGTGIVSAPVPKKLLMMAGIDDCYTSARGCTATLGNFAKATFDAISKTYSYLTPDLWKETVFTKSPYQEFTDHLVKTHTRVSVQRTQAPAVATT

SEQ ID NO: 74284 - protein, 197 aa, Homo sapiens
  Payload ID: 14687
  Gene Symbol: RPS2
  Gene Name: ribosomal protein S2
  ENSP ID: ENSP00000436356
MADDAGAAGGPGGPGGPGMGNRGGFRGGFGSGIRGRGRGRGRGRGRGRGARGGKAEDKEWMPVTKLGRLVKDMKIKSLEEIYLFSLPIKESEIIDFFLGASLKDEVLKIMPVQKQTRAGQRTRFKAFVAIGDYNGHVGLGVKCSKEVATAIRGAIILAKLSIVPVRRGYWGNKIGKPHTVPCKPRPPLMPFLRPTAT

SEQ ID NO: 74285 - protein, 235 aa, Homo sapiens
  Payload ID: 14687
  Gene Symbol: RPS2
  Gene Name: ribosomal protein S2
  ENSP ID: ENSP00000436865
MADDAGAAGGPGGPGGPGMGNRGGFRGGFGSGIRGRGRGRGRGRGRGRGARGGKAEDKEWMPVTKLGRLVKDMKIKSLEEIYLFSLPIKESEIIDFFLGASLKDEVLKIMPVQKQTRAGQRTRFKVTGRCGSVLVRLIPAPRGTGIVSAPVPKKLLMMAGIDDCYTSARGCTATLGNFAKATFDAISKTYSYLTPDLWKETVFTKSPYQEFTDHLVKTHTRVSVQRTQAPAVATT

SEQ ID NO: 74286 - protein, 44 aa, Homo sapiens
  Payload ID: 14687
  Gene Symbol: RPS2
  Gene Name: ribosomal protein S2
  ENSP ID: ENSP00000454837
MPVTKLGRLVKDMKIKSLEEIYLFSLPIKESEIIDFFLGASLKD

SEQ ID NO: 74287 - protein, 155 aa, Homo sapiens
  Payload ID: 14687
  Gene Symbol: RPS2
  Gene Name: ribosomal protein S2
  ENSP ID: ENSP00000460860
ESEIIDFFLGASLKDEVLKIMPVQKQTRAGQRTRFKAFVAIGDYNGHVGLGVKCSKEVATAIRGAIILAKLSIVPVRRGYWGNKIGKPHTVPCKVTGRCGSVLVRLIPAPRGTGIVSAPVPKKLLMMAGIDDCYTSARGCTATLGNFGRWSTHGA

SEQ ID NO: 74288 - protein, 119 aa, Homo sapiens [sequence omitted]

SEQ ID NO: 74289 - protein, 119 aa, Homo sapiens [sequence omitted]

SEQ ID NO: 74290 - protein, 64 aa, Homo sapiens
  Payload ID: 14688
  Gene Symbol: RPS20
  Gene Name: ribosomal protein S20
  ENSP ID: ENSP00000427860
MPTKTLRITTRKTPCGEGSKTWDRFQMRIHKRLIDLHSPSEIVKQITSISIEPGVEVEVTIADA

SEQ ID NO: 74291 - protein, 61 aa, Homo sapiens
  Payload ID: 14688
  Gene Symbol: RPS20
  Gene Name: ribosomal protein S20
  ENSP ID: ENSP00000428104
MAFKDTGKTPVEPEVAIHRIRITLTSRNVKSLEKVCADLIRGAKEKNLKVKGPVRMPTKVK

SEQ ID NO: 74292 - protein, 61 aa, Homo sapiens; identical to SEQ ID NO: 74291
  Payload ID: 14688
  Gene Symbol: RPS20
  Gene Name: ribosomal protein S20
  ENSP ID: ENSP00000428146

SEQ ID NO: 74293 - protein, 64 aa, Homo sapiens; identical to SEQ ID NO: 74290
  Payload ID: 14688
  Gene Symbol: RPS20
  Gene Name: ribosomal protein S20
  ENSP ID: ENSP00000429049

SEQ ID NO: 74294 - protein, 46 aa, Homo sapiens
  Payload ID: 14688
  Gene Symbol: RPS20
  Gene Name: ribosomal protein S20
  ENSP ID: ENSP00000429333
MAFKDTGKTPVEPEVAIHRIRITLTSRNVKSLEKDFENHYKKNSLW

SEQ ID NO: 74295 - protein, 142 aa, Homo sapiens
  Payload ID: 14688
  Gene Symbol: RPS20
  Gene Name: ribosomal protein S20
  Uniprot ID: P60866
  ENSP ID: ENSP00000429374
MAFKDTGKTPVEPEVAIHRIRITLTSRNVKSLEKVCADLIRGAKEKNLKVKGPVRMPTKTLRITTRKTPCGEGSKTWDRFQMRIHKRLIDLHSPSEIVKQITSISIEPGVELIESTDAEPMDTEGQQYTLRSVFESPGTCPF

SEQ ID NO: 74296 - protein, 142 aa, Homo sapiens; identical to SEQ ID NO: 74295
  Payload ID: 14688
  Gene Symbol: RPS20
  Gene Name: ribosomal protein S20
  Uniprot ID: P60866
  ENSP ID: ENSP00000478703

SEQ ID NO: 74297 - protein, 83 aa, Homo sapiens
  Payload ID: 14689
  Gene Symbol: RPS21
  Gene Name: ribosomal protein S21
  Uniprot ID: P63220
  ENSP ID: ENSP00000345957
MQNDAGEFVDLYVPRKCSASNRIIGAKDHASIQMNVAEVDKVTGRFNGQFKTYAICGAIRRMGESDDSILRLAKADGIVSKNF

SEQ ID NO: 74298 - protein, 66 aa, Homo sapiens
  Payload ID: 14689
  Gene Symbol: RPS21
  Gene Name: ribosomal protein S21
  ENSP ID: ENSP00000359593
MQNDAGEFVDLYVPRKCSASNRIIGAKDHASIQMNVAEVSWEPGRREGCDICAGKAGCPIVEEPLG

SEQ ID NO: 74299 - protein, 90 aa, Homo sapiens
  Payload ID: 14689
  Gene Symbol: RPS21
  Gene Name: ribosomal protein S21
  ENSP ID: ENSP00000359624
MQNDAGEFVDLYVPRKCSASNRIIGAKDHASIQMNVAEVDKVTGRFNGQFKTYAICGAIRRMVSVSLGFAHHFGTSWTLPCALECVMVPE

SEQ ID NO: 74300 - protein, 81 aa, Homo sapiens
  Payload ID: 14689
  Gene Symbol: RPS21
  Gene Name: ribosomal protein S21
  ENSP ID: ENSP00000388332
MQNDAGEFVDLYVPRKCSASNRIIGAKDHASIQMNVAEVDKVTGRFNGQFKTYAICGAIRRMGESDDSILRLAKADGIVSK

SEQ ID NO: 74301 - protein, 143 aa, Homo sapiens [sequence omitted]

SEQ ID NO: 74302 - protein, 55 aa, Homo sapiens
  Payload ID: 14690
  Gene Symbol: RPS23
  Gene Name: ribosomal protein S23
  ENSP ID: ENSP00000420900
MGKCRGLRTARKLRSHRRDQKWHDKQYKKAHLGTALKANPFGGASHAKGIVLEKV

SEQ ID NO: 74303 - protein, 123 aa, Homo sapiens
  Payload ID: 14690
  Gene Symbol: RPS23
  Gene Name: ribosomal protein S23
  ENSP ID: ENSP00000422071
MGKCRGLRTARKLRSHRRDQKWHDKQYKKAHLGTALKANPFGGASHAKGIVLEKVGVEAKQPNSAIRKCVRVQLIKNGKKITAFVPNDGCLNFIEVSISTLSYLLFLGWPPSHFYLMQGSFLT

SEQ ID NO: 74304 - protein, 85 aa, Homo sapiens
  Payload ID: 14690
  Gene Symbol: RPS23
  Gene Name: ribosomal protein S23
  ENSP ID: ENSP00000425833
MGKCRGLRTARKLRSHRRDQKWHDKQYKKAHLGTALKANPFGGASHAKGIVLEKVGVEAKQPNSAIRKCVRVQLIKNGKKERPRS

SEQ ID NO: 74305 - protein, 134 aa, Homo sapiens
  Payload ID: 14690
  Gene Symbol: RPS23
  Gene Name: ribosomal protein S23
  ENSP ID: ENSP00000425865
MGKCRGLRTARKLRSHRRDQKWHDKQYKKAHLGTALKANPFGGASHAKGIVLEKVGVEAKQPNSAIRKCVRVQLIKNGKKITAFVPNDGCLNFIEENDEVLVAGFGRKGHAVGDIPGVRFKSFHGYSGMVEMKL

SEQ ID NO: 74306 - protein, 134 aa, Homo sapiens; identical to SEQ ID NO: 74305
  Payload ID: 14690
  Gene Symbol: RPS23
  Gene Name: ribosomal protein S23
  ENSP ID: ENSP00000427043

SEQ ID NO: 74307 - protein, 130 aa, Homo sapiens
  Payload ID: 14691
  Gene Symbol: RPS24
  Gene Name: ribosomal protein S24
  Uniprot ID: P62847
  ENSP ID: ENSP00000354074
MNDTVTIRTRKFMTNRLLQRKQMVIDVLHPGKATVPKTEIREKLAKMYKTTPDVIFVFGFRTHFGGGKTTGFGMIYDSLDYAKKNEPKHRLARHGLYEKKKTSRKQRKERKNRMKKVRGTAKANVGAGKK

SEQ ID NO: 74308 - protein, 133 aa, Homo sapiens [sequence omitted]

SEQ ID NO: 74309 - protein, 289 aa, Homo sapiens
  Payload ID: 14691
  Gene Symbol: RPS24
  Gene Name: ribosomal protein S24
  Uniprot ID: P62847
  ENSP ID: ENSP00000414321
MNDTVTIRTRKFMTNRLLQRKQMVIDVLHPGKATVPKTEIREKLAKMYKTTPDVIFVFGFRTHFGGGKTTGFGMIYDSLDYAKKNEPKHRLARHGLYEKKKTSRKQRKERKNRMKKVRGTAKANVGAGKKMRELGLGVQALGRISQEERCTDVKNSKARESRGVVWQVEVPGPWSVWTCGRLRRGCGKYLQVAVTWRKTENREQCCQACLLERALVRNGAFMSPASPAPAGSPHPVDGDLVLHLPEALSATLTLSPHIQAINKSFGPFFEIHQESSCFSPPSCLSGLGH

SEQ ID NO: 74310 - protein, 131 aa, Homo sapiens
  Payload ID: 14691
  Gene Symbol: RPS24
  Gene Name: ribosomal protein S24
  ENSP ID: ENSP00000415549
MNDTVTIRTRKFMTNRLLQRKQMVIDVLHPGKATVPKTEIREKLAKMYKTTPDVIFVFGFRTHFGGGKTTGFGMIYDSLDYAKKNEPKHRLARHGLYEKKKTSRKQRKERKNRMKKVRGTAKANVGAGKKQ

SEQ ID NO: 74311 - protein, 132 aa, Homo sapiens
  Payload ID: 14691
  Gene Symbol: RPS24
  Gene Name: ribosomal protein S24
  ENSP ID: ENSP00000478869
MNDTVTIRTRKFMTNRLLQRKQMVIDVLHPGKATVPKTEIREKLAKMYKTTPDVIFVFGFRTHFGGGKTTGFGMIYDSLDYAKKNEPKHRLARHGLYEKKKTSRKQRKERKNRMKKVRGTAKANVGAGKKKR

SEQ ID NO: 74312 - protein, 39 aa, Homo sapiens
  Payload ID: 14692
  Gene Symbol: RPS25
  Gene Name: ribosomal protein S25
  ENSP ID: ENSP00000431634
MPPKDDKKKKDAGKSAKKDKDPVNKSGGKAKKKVEIRPL

SEQ ID NO: 74313 - protein, 125 aa, Homo sapiens [sequence omitted]

SEQ ID NO: 74314 - protein, 39 aa, Homo sapiens
  Payload ID: 14692
  Gene Symbol: RPS25
  Gene Name: ribosomal protein S25
  ENSP ID: ENSP00000436193
MPPKDDKKKKDAGKSAKKDKDPVNKSGGKAKKKLWSLRD

SEQ ID NO: 74315 - protein, 39 aa, Homo sapiens; identical to SEQ ID NO: 74314
  Payload ID: 14692
  Gene Symbol: RPS25
  Gene Name: ribosomal protein S25
  ENSP ID: ENSP00000486011

SEQ ID NO: 74316 - protein, 125 aa, Homo sapiens [sequence omitted]

SEQ ID NO: 74317 - protein, 39 aa, Homo sapiens; identical to SEQ ID NO: 74312
  Payload ID: 14692
  Gene Symbol: RPS25
  Gene Name: ribosomal protein S25
  ENSP ID: ENSP00000486686

SEQ ID NO: 74318 - protein, 115 aa, Homo sapiens [sequence omitted]

SEQ ID NO: 74319 - protein, 115 aa, Homo sapiens [sequence omitted]

SEQ ID NO: 74320 - protein, 84 aa, Homo sapiens
  Payload ID: 14694
  Gene Symbol: RPS27
  Gene Name: ribosomal protein S27
  Uniprot ID: P42677
  ENSP ID: ENSP00000357555
MPLAKDLLHPSPEEEKRKHKKKRLVQSPNSYFMDVKCPGCYKITTVFSHAQTVVLCVGCSTVLCQPTGGKARLTEGCSFRRKQH

SEQ ID NO: 74321 - protein, 66 aa, Homo sapiens
  Payload ID: 14694
  Gene Symbol: RPS27
  Gene Name: ribosomal protein S27
  ENSP ID: ENSP00000376341
MPLAKDLLHPSPEEEKRKHKKKRLVQSPNSYFMDVKCPGEETACCSGESTGPQQLENVVVLAVSYP

SEQ ID NO: 74322 - protein, 156 aa, Homo sapiens
  Payload ID: 14695
  Gene Symbol: RPS27A
  Gene Name: ribosomal protein S27a
  Uniprot ID: P62979
  ENSP ID: ENSP00000272317
MQIFVKTLTGKTITLEVEPSDTIENVKAKIQDKEGIPPDQQRLIFAGKQLEDGRTLSDYNIQKESTLHLVLRLRGGAKKRKKKSYTTPKKNKHKRKKVKLAVLKYYKVDENGKISRLRRECPSDECGAGVFMASHFDRHYCGKCCLTYCFNKPEDK

SEQ ID NO: 74323 - protein, 156 aa, Homo sapiens; identical to SEQ ID NO: 74322
  Payload ID: 14695
  Gene Symbol: RPS27A
  Gene Name: ribosomal protein S27a
  Uniprot ID: P62979
  ENSP ID: ENSP00000383981

SEQ ID NO: 74324 - protein, 156 aa, Homo sapiens; identical to SEQ ID NO: 74322
  Payload ID: 14695
  Gene Symbol: RPS27A
  Gene Name: ribosomal protein S27a
  Uniprot ID: P62979
  ENSP ID: ENSP00000385659

SEQ ID NO: 74325 - protein, 106 aa, Homo sapiens
  Payload ID: 14695
  Gene Symbol: RPS27A
  Gene Name: ribosomal protein S27a
  ENSP ID: ENSP00000408482
MQIFVKTLTGKTITLEVEPSDTIENVKAKIQDKEGIPPDQQRLIFAGKQLEDGRTLSDYNIQKESTLHLVLRLRGGAKKRKKKSYTTPKKNKHKRKKVKLAVLKYY

SEQ ID NO: 74326 - protein, 84 aa, Homo sapiens
  Payload ID: 14696
  Gene Symbol: RPS27L
  Gene Name: ribosomal protein S27-like
  Uniprot ID: Q71UM5
  ENSP ID: ENSP00000331019
MPLARDLLHPSLEEEKKKHKKKRLVQSPNSYFMDVKCPGCYKITTVFSHAQTVVLCVGCSTVLCQPTGGKARLTEGCSFRRKQH

SEQ ID NO: 74327 - protein, 97 aa, Homo sapiens
  Payload ID: 14696
  Gene Symbol: RPS27L
  Gene Name: ribosomal protein S27-like
  ENSP ID: ENSP00000402423
MPLARDLLHPSLEEEKKKHKKKRLVQSPNSYFMDVKCPGCYKITTVFSHAQTVVLCVGCSTVLCQPTGGKARLTEGISFGILQPSDEIDDYKCLYLH

SEQ ID NO: 74328 - protein, 52 aa, Homo sapiens
  Payload ID: 14696
  Gene Symbol: RPS27L
  Gene Name: ribosomal protein S27-like
  ENSP ID: ENSP00000405300
MDVKCPGCYKITTVFSHAQTVVLCVGCSTVLCQPTGGKARLTEGCSFRRKQH

SEQ ID NO: 74329 - protein, 52 aa, Homo sapiens; identical to SEQ ID NO: 74328
  Payload ID: 14696
  Gene Symbol: RPS27L
  Gene Name: ribosomal protein S27-like
  ENSP ID: ENSP00000412026

SEQ ID NO: 74330 - protein, 100 aa, Homo sapiens
  Payload ID: 14696
  Gene Symbol: RPS27L
  Gene Name: ribosomal protein S27-like
  ENSP ID: ENSP00000453764
MCQRCGLKLIVIICFFVQLARDLLHPSLEEEKKKHKKKRLVQSPNSYFMDVKCPGCYKITTVFSHAQTVVLCVGCSTVLCQPTGGKARLTEGCSFRRKQH

SEQ ID NO: 74331 - protein, 52 aa, Homo sapiens; identical to SEQ ID NO: 74328
  Payload ID: 14696
  Gene Symbol: RPS27L
  Gene Name: ribosomal protein S27-like
  ENSP ID: ENSP00000489261

SEQ ID NO: 74332 - protein, 69 aa, Homo sapiens [sequence omitted]

SEQ ID NO: 74333 - protein, 56 aa, Homo sapiens [sequence omitted]

SEQ ID NO: 74334 - protein, 67 aa, Homo sapiens
  Payload ID: 14698
  Gene Symbol: RPS29
  Gene Name: ribosomal protein S29
  Uniprot ID: P62273
  ENSP ID: ENSP00000379339
MGHQQLYWSHPRKFGQGSRSCRVCSNRHGLIRKYGLNMCRQCFRQYAKDIGFIKKDLSCLPWHCLWR

SEQ ID NO: 74335 - protein, 53 aa, Homo sapiens
  Payload ID: 14698
  Gene Symbol: RPS29
  Gene Name: ribosomal protein S29
  ENSP ID: ENSP00000478117
MAVFDLAIPAEQIIFHGGRVCSNRHGLIRKYGLNMCRQCFRQYAKDIGFIKLD

SEQ ID NO: 74336 - protein, 56 aa, Homo sapiens [sequence omitted]

SEQ ID NO: 74337 - protein, 259 aa, Homo sapiens
  Payload ID: 14699
  Gene Symbol: RPS3
  Gene Name: ribosomal protein S3
  Uniprot ID: P23396
  ENSP ID: ENSP00000278572
MAVQISKKRKFVADGIFKAELNEFLTRELAEDGYSGVEVRVTPTRTEIIILATRTQNVLGEKGRRIRELTAVVQKRFGFPEGSVELKIMVMVTGYPLLPLKLYAEKVATRGLCAIAQAESLRYKLLGGLAVRRACYGVLRFIMESGAKGCEVVVSGKLRGQRAKSMKFVDGLMIHSGDPVNYYVDTAVRHVLLRQGVLGIKVKIMLPWDPTGKIGPKKPLPDHVSIVEPKDEILPTTPISEQKGGKPEPPAMPQPVPTA

SEQ ID NO: 74338 - protein, 103 aa, Homo sapiens
  Payload ID: 14699
  Gene Symbol: RPS3
  Gene Name: ribosomal protein S3
  ENSP ID: ENSP00000416745
MESGAKGCEVVVSGKLRGQRAKSMKFVDGLMIHSGDPVNYYVDTAVRHVLLRQGVLGIKVKIMLPWDPTGKIGPKKPLPDHVSIVEPKDEILPTTPISEQKGG

SEQ ID NO: 74339 - protein, 135 aa, Homo sapiens
  Payload ID: 14699
  Gene Symbol: RPS3
  Gene Name: ribosomal protein S3
  ENSP ID: ENSP00000431737
QISKKRKFVADGIFKAELNEFLTRELAEDGYSGVEVRVTPTRTEIIILATRTQNVLGEKGRRIRELTAVVQKRFGFPEGSVELYAEKVATRGLCAIAQAESLRYKLLGGLAVRRVGPKAARLWCLGNSEDRGLNP

SEQ ID NO: 74340 - protein, 115 aa, Homo sapiens
  Payload ID: 14699
  Gene Symbol: RPS3
  Gene Name: ribosomal protein S3
  ENSP ID: ENSP00000431834
MAVQISKKRKFVADGIFKAELNEFLTRELAEDGYSGVEVRVTPTRTEIIILATRTQNVLGEKGRRIRELTAVVQKRFGFPEGSVEGLLWCAAVHHGEWGQRLRGCGVWETPRTEG

SEQ ID NO: 74341 - protein, 44 aa, Homo sapiens
  Payload ID: 14699
  Gene Symbol: RPS3
  Gene Name: ribosomal protein S3
  ENSP ID: ENSP00000432458
MAVQISKKRKFVADGIFKAELNEFLTRELAEDGYSGVENTECSW

SEQ ID NO: 74342 - protein, 91 aa, Homo sapiens
  Payload ID: 14699
  Gene Symbol: RPS3
  Gene Name: ribosomal protein S3
  ENSP ID: ENSP00000432542
MAVQISKKRKFVADGIFKAELNEFLTRELAEDGYSGVEVRVTPTRTEIIILATRTQNVLGEKGRRIRELTAVVQKRFGFPEGSVEHCGTQR

SEQ ID NO: 74343 - protein, 117 aa, Homo sapiens
  Payload ID: 14699
  Gene Symbol: RPS3
  Gene Name: ribosomal protein S3
  ENSP ID: ENSP00000433155
MAVQISKKRKFVADGIFKAELNEFLTRELAEDGYSGVEVRVTPTRTEIIILATRTQNVLGEKGRRIRELTAVVQKRFGFPEGSVELYAEKVATRGLCAIAQAESLRYKLLGGLAVRR

SEQ ID NO: 74344 - protein, 231 aa, Homo sapiens
  Payload ID: 14699
  Gene Symbol: RPS3
  Gene Name: ribosomal protein S3
  ENSP ID: ENSP00000433421
MAVQISKKRKFVADGIFKAELNEFLTRELAEDGYSGVEVRVTPTRTEIIILATRTQNVLGEKGRRIRELTAVVQKRFGFPEGSLCAIAQAESLRYKLLGGLAVRRACYGVLRFIMESGAKGCEVVVSGKLRGQRAKSMKFVDGLMIHSGDPVNYYVDTAVRHVLLRQGVLGIKVKIMLPWDPTGKIGPKKPLPDHVSIVEPKDEILPTTPISEQKGGKPEPPAMPQPVPTA

SEQ ID NO: 74345 - protein, 243 aa, Homo sapiens
  Payload ID: 14699
  Gene Symbol: RPS3
  Gene Name: ribosomal protein S3
  Uniprot ID: P23396
  ENSP ID: ENSP00000433821
MAVQISKKRKFVADGIFKAELNEFLTRELAEDGYSGVEVRVTPTRTEIIILATRTQNVLGEKGRRIRELTAVVQKRFGFPEGSVELYAEKVATRGLCAIAQAESLRYKLLGGLAVRRACYGVLRFIMESGAKGCEVVVSGKLRGQRAKSMKFVDGLMIHSGDPVNYYVDTAVRHVLLRQGVLGIKVKIMLPWDPTGKIGPKKPLPDHVSIVEPKDEILPTTPISEQKGGKPEPPAMPQPVPTA

SEQ ID NO: 74346 - protein, 243 aa, Homo sapiens; identical to SEQ ID NO: 74345
  Payload ID: 14699
  Gene Symbol: RPS3
  Gene Name: ribosomal protein S3
  Uniprot ID: P23396
  ENSP ID: ENSP00000434643

SEQ ID NO: 74347 - protein, 128 aa, Homo sapiens
  Payload ID: 14699
  Gene Symbol: RPS3
  Gene Name: ribosomal protein S3
  ENSP ID: ENSP00000435457
MAVQISKKRKFVADGIFKAELNEFLTRELAEDGYSGVEVRVTPTRTEIIILATRTQNVLGEKGRRIRELTAVVQKRSVCHCPGRVSALQTPRRACCAEGLLWCAAVHHGEWGQRLRGCGVWETPRTEG

SEQ ID NO: 74348 - protein, 36 aa, Homo sapiens
  Payload ID: 14699
  Gene Symbol: RPS3
  Gene Name: ribosomal protein S3
  ENSP ID: ENSP00000435566
MESGAKGCEVVVSGKLRGQRAKSMKFVDGLMIHSGD

SEQ ID NO: 74349 - protein, 158 aa, Homo sapiens
  Payload ID: 14699
  Gene Symbol: RPS3
  Gene Name: ribosomal protein S3
  ENSP ID: ENSP00000436335
MAVQISKKRKFVADGIFKAELNEFLTRELAEDGYSGVEVRVTPTRTEIIILATRTQNVLGEKGRRIRELTAVVQKRFGFPEGSVELYAEKVATRGVLGIKVKIMLPWDPTGKIGPKKPLPDHVSIVEPKDEILPTTPISEQKGGKPEPPAMPQPVPTA

SEQ ID NO: 74350 - protein, 33 aa, Homo sapiens
  Payload ID: 14699
  Gene Symbol: RPS3
  Gene Name: ribosomal protein S3
  ENSP ID: ENSP00000436476
  MOD_RES (1)..(1): Any amino acid
XFVADGIFKAELNEFLTRELAEDGYSGVERRPC

SEQ ID NO: 74351 - protein, 171 aa, Homo sapiens
  Payload ID: 14699
  Gene Symbol: RPS3
  Gene Name: ribosomal protein S3
  ENSP ID: ENSP00000436556
  MOD_RES (1)..(1): Any amino acid
XFVADGIFKAELNEFLTRELAEDGYSGVEVRVTPTRTEIIILATRACYGVLRFIMESGAKGCEVVVSGKLRGQRAKSMKFVDGLMIHSGDPVNYYVDTAVRHVLLRQGVLGIKVKIMLPWDPTGKIGPKKPLPDHVSIVEPKDEILPTTPISEQKGGKPEPPAMPQPVPTA

SEQ ID NO: 74352 - protein, 243 aa, Homo sapiens; identical to SEQ ID NO: 74345
  Payload ID: 14699
  Gene Symbol: RPS3
  Gene Name: ribosomal protein S3
  Uniprot ID: P23396
  ENSP ID: ENSP00000436971

SEQ ID NO: 74353 - protein, 123 aa, Homo sapiens
  Payload ID: 14699
  Gene Symbol: RPS3
  Gene Name: ribosomal protein S3
  ENSP ID: ENSP00000437105
  MOD_RES (1)..(1): Any amino acid
XVADGIFKAELNEFLTRELAEDGYSGVEVRVTPTRTEIIILATRTQNVLGEKGRRIRELTAVVQKRFGFPEGSVELYAEKVATRGLCAIAQAESLRYKLLGGLAVRRCAGHQGEDHAALGPNW

SEQ ID NO: 74354 - protein, 264 aa, Homo sapiens [sequence omitted]

SEQ ID NO: 74355 - protein, 65 aa, Homo sapiens
  Payload ID: 14700
  Gene Symbol: RPS3A
  Gene Name: ribosomal protein S3A
  ENSP ID: ENSP00000421277
MFNIRNIGKTLVTRTQGTKIASDGLKGRVFEVSLADLQNDEVAFRKFKLITEDVQGKNCLTNFHG

SEQ ID NO: 74356 - protein, 190 aa, Homo sapiens
  Payload ID: 14700
  Gene Symbol: RPS3A
  Gene Name: ribosomal protein S3A
  ENSP ID: ENSP00000421457
NKRLTKGGKKGAKKKVVDPFSKKDWYDVKAPAMFNIRNIGKTLVTRTQGTKIASDGLKGRVFEVSLADLQNDEVAFRKFKLITEDVQGKNCLTNFHGMDLTRDKMCSMVKKWQTMIEAHVDVKTTDGYLLRLFCVGFTKKRNNQIRKTSYAQHQQVRQIRKKMMEIMTREDSRQHWKRHRKGLPIYLSSP

SEQ ID NO: 74357 - protein, 227 aa, Homo sapiens
  Payload ID: 14700
  Gene Symbol: RPS3A
  Gene Name: ribosomal protein S3A
  ENSP ID: ENSP00000421770
MFNIRNIGKTLVTRTQGTKIASDGLKGRVFEVSLADLQNDEVAFRKFKLITEDVQGKNCLTNFHGMDLTRDKMCSMVKKWQTMIEAHVDVKTTDGYLLRLFCVGFTKKRNNQIRKTSYAQHQQVRQIRKKMMEIMTREVQTNDLKEVVNKLIPDSIGKDIEKACQSIYPLHDVFVRKVKMLKKPKFELGKLMELHGEGSSSGKATGDETGAKVERADGYEPPVQESV

SEQ ID NO: 74358 - protein, 125 aa, Homo sapiens
  Payload ID: 14700
  Gene Symbol: RPS3A
  Gene Name: ribosomal protein S3A
  ENSP ID: ENSP00000421776
MFNIRNIGKTLVTRTQGTKIASDGLKGRVFEVSLADLQNDEVAFRKFKLITEDVQGKNCLTNFHGMDLTRDKMCSMVKKWQTMIEAHVDVKTTDGYLLRLFCVGFTKKRNNQIRKTSYAQHQQVR

SEQ ID NO: 74359 - protein, 145 aa, Homo sapiens
  Payload ID: 14700
  Gene Symbol: RPS3A
  Gene Name: ribosomal protein S3A
  ENSP ID: ENSP00000422994
MIEAHVDVKTTDGYLLRLFCVGFTKKRNNQIRKTSYAQHQQVRQIRKKMMEIMTREVQTNDLKEVVNKLIPDSIGKDIEKACQSIYPLHDVFVRKVKMLKKPKFELGKLMELHGEGSSSGKATGDETGAKVERADGYEPPVQESV

SEQ ID NO: 74360 - protein, 205 aa, Homo sapiens
  Payload ID: 14700
  Gene Symbol: RPS3A
  Gene Name: ribosomal protein S3A
  ENSP ID: ENSP00000423953
MAVGKNKRLTKGGKKGAKKKVVDPFSKKDWYDVKAPAMFNIRNIGKTLVTRTQGTKIASDGLKGRVFEVSLADLQNDEVAFRKFKLITEDVQGKNCLTNFHGMDLTRDKMCSMVKKWQTMIEAHVDVKTTDGYLLRLFCVGFTKKRNNQIRKTSYAQHQQVRQIRKKMMEIMTREVQTNDLKEVVNKLQHWKRHRKGLPIYLSSP

SEQ ID NO: 74361 - protein, 193 aa, Homo sapiens
  Payload ID: 14700
  Gene Symbol: RPS3A
  Gene Name: ribosomal protein S3A
  ENSP ID: ENSP00000424547
MFNIRNIGKTLVTRTQGTKIASDGLKGRVFEVSLADLQNDEVAFRKFKLITEDVQGKNCLTNFHGMDLTRDKMCSMVKKWQTMIEAHVDVKTTDGYLLRLFCVGFTKKRNNQIRKTSYAQHQQVRQIRKKMMEIMTREVQTNDLKEVVNKLIPDSIGKDIEKACQSIYPLHDVFVRKVKMLKKPKFELGKLME

SEQ ID NO: 74362 - protein, 101 aa, Homo sapiens
  Payload ID: 14700
  Gene Symbol: RPS3A
  Gene Name: ribosomal protein S3A
  ENSP ID: ENSP00000425024
MFNIRNIGKTLVTRTQGTKIASDGLKGRVFEVSLADLQNDEVAFRKFKLITEDVQGKNCLTNFHGMDLTRDKMCSMVKKWQTMIEAHVDVKTTDGYLLRLF

SEQ ID NO: 74363 - protein, 208 aa, Homo sapiens
  Payload ID: 14700
  Gene Symbol: RPS3A
  Gene Name: ribosomal protein S3A
  ENSP ID: ENSP00000425508
KRLTKGGKKGAKKKVVDPFSKKDWYDVKAPAMFNIRNIGKTLVTRTQGTKIASDGLKGRVFETMIEAHVDVKTTDGYLLRLFCVGFTKKRNNQIRKTSYAQHQQVRQIRKKMMEIMTREVQTNDLKEVVNKLIPDSIGKDIEKACQSIYPLHDVFVRKVKMLKKPKFELGKLMELHGEGSSSGKATGDETGAKVERADGYEPPVQESV

SEQ ID NO: 74364 - protein, 95 aa, Homo sapiens
  Payload ID: 14700
  Gene Symbol: RPS3A
  Gene Name: ribosomal protein S3A
  ENSP ID: ENSP00000425978
MAVGKNKRLTKGGKKGAKKKVVDPFSKKDWYDVKAPAMFNIRNIGKTLVTRTQGTKIASDGLKGRVFEVSLADLQNDEVAFRKFKLITEDVQDND

SEQ ID NO: 74365 - protein, 227 aa, Homo sapiens; identical to SEQ ID NO: 74357
  Payload ID: 14700
  Gene Symbol: RPS3A
  Gene Name: ribosomal protein S3A
  ENSP ID: ENSP00000426282

SEQ ID NO: 74366 - protein, 223 aa, Homo sapiens
  Payload ID: 14700
  Gene Symbol: RPS3A
  Gene Name: ribosomal protein S3A
  ENSP ID: ENSP00000426466
MVDPFSKKDWYDVKAPAMFNIRNIGKTLVTRTQGTKIASDGLKGRVFEVSLADLQNDEVAFRKFKLITEDVQGKNCLTNFHGMDLTRDKMCSMVKKWQTMIEAHVDVKTTDGYLLRLFCVGFTKKRNNQIRKTSYAQHQQVRQIRKKMMEIMTREVQTNDLKEVVNKLIPDSIGKDIEKACQSIYPLHDVFVRKVKMLKKPKFELGKLMELHGEGSSSGKATG

SEQ ID NO: 74367 - protein, 263 aa, Homo sapiens [sequence omitted]

SEQ ID NO: 74368 - protein, 263 aa, Homo sapiens
  Payload ID: 14702
  Gene Symbol: RPS4Y1
  Gene Name: ribosomal protein S4, Y-linked 1
  Uniprot ID: P22090
  ENSP ID: ENSP00000250784
MARGPKKHLKRVAAPKHWMLDKLTGVFAPRPSTGPHKLRECLPLIVFLRNRLKYALTGDEVKKICMQRFIKIDGKVRVDVTYPAGFMDVISIEKTGEHFRLVYDTKGRFAVHRITVEEAKYKLCKVRKITVGVKGIPHLVTHDARTIRYPDPVIKVNDTVQIDLGTGKIINFIKFDTGNLCMVIGGANLGRVGVITNRERHPGSFDVVHVKDANGNSFATRLSNIFVIGNGNKPWISLPRGKGIRLTVAEERDKRLATKQSSG

SEQ ID NO: 74369 - protein, 262 aa, Homo sapiens
  Payload ID: 14702
  Gene Symbol: RPS4Y1
  Gene Name: ribosomal protein S4, Y-linked 1
  ENSP ID: ENSP00000415317
MLGRPAKFSKARGPKKHLKRVAAPKHWMLDKLTGVFAPRPSTGPHKLRECLPLIVFLRNRLKYALTGDEVKKICMQRFIKIDGKVRVDVTYPAGFMDVISIEKTGEHFRLVYDTKGRFAVHRITVEEAKYKLCKVRKITVGVKGIPHLVTHDARTIRYPDPVIKVNDTVQIDLGTGKIINFIKFDTGNLCMVIGGANLGRVGVITNRERHPGSFDVVHVKDANGNSFATRLSNIFVIGNGNKPWISLPRGKGIRLTVAEERD

SEQ ID NO: 74370 - protein, 263 aa, Homo sapiens
  Payload ID: 14703
  Gene Symbol: RPS4Y2
  Gene Name: ribosomal protein S4, Y-linked 2
  Uniprot ID: Q8TD47
  ENSP ID: ENSP00000486252
MARGPKKHLKRVAAPKHWMLDKLTGVFAPRPSTGPHKLRECLPLIVFLRNRLKYALTGDEVKKICMQHFLKIDGKVRVDITYPAGFIDVISIEKTGEHFRLVYNTKGCFAVHRITVEEAKYKLCKVRKITVGTKGIPHLVTHDARTIRYPDPLIKVNDTVQIDLGTGKITSFIKFDTGNVCMVIAGANLGRVGVITNRERHPGSCDVVHVKDANGNSFATRISNIFVIGNGNKPWISLPRGKGIRLTIAEERDKRLAAKQSSG

SEQ ID NO: 74371 - protein, 204 aa, Homo sapiens [sequence omitted]

SEQ ID NO: 74372 - protein, 204 aa, Homo sapiens [sequence omitted]

SEQ ID NO: 74373 - protein, 134 aa, Homo sapiens
  Payload ID: 14704
  Gene Symbol: RPS5
  Gene Name: ribosomal protein S5
  ENSP ID: ENSP00000470660
MTEWETAAPAVAETPDIKLFGKWSTDDVQINDISLQNPLQVLVNAIINSGPREDSTRIGRAGTVRRQAVDVSPLRRVNQAIWLLCTGAREAAFRNIKTIAECLADELINAAKGSSNSYAIKKKDELERVAKSNR

SEQ ID NO: 74374 - protein, 200 aa, Homo sapiens
  Payload ID: 14704
  Gene Symbol: RPS5
  Gene Name: ribosomal protein S5
  ENSP ID: ENSP00000471185
MTEWETAAPAVAETPDIKLFGKWSTDDVQINDISLQDYIAVKEKYAKYLPHSAGRYAAKRFRKAQCPIVERLTNSMMMHGRNNGKKLMTVRIVKHAFEIIHLLTGENPLQVLVNAIINSGPREDSTRIGRAGTVRRQAVDVSPLRRVNQAIWLLCTGAREAAFRNIKTIAECLADELINAAKGSSNSYAIKKKDELERVA

SEQ ID NO: 74375 - protein, 225 aa, Homo sapiens
  Payload ID: 14704
  Gene Symbol: RPS5
  Gene Name: ribosomal protein S5
  ENSP ID: ENSP00000471388
MTEWETAAPAVAETPDIKLFGKWSTDDVQINDISLQMTTTSVMRGLLHQKEHHISHMDYIAVKEKYAKYLPHSAGRYAAKRFRKAQCPIVERLTNSMMMHGRNNGKKLMTVRIVKHAFEIIHLLTGENPLQVLVNAIINSGPREDSTRIGRAGTVRRQAVDVSPLRRVNQAIWLLCTGAREAAFRNIKTIAECLADELINAAKGSSNSYAIKKKDELERVAKSNR

SEQ ID NO: 74376 - protein, 204 aa, Homo sapiens [sequence omitted]

SEQ ID NO: 74377 - protein, 91 aa, Homo sapiens
  Payload ID: 14705
  Gene Symbol: RPS6
  Gene Name: ribosomal protein S6
  ENSP ID: ENSP00000369741
MKLNISFPATGCQKLIEVDDERKLRTFYEKRMATEVAADALGEEWKVKVDKLLQVFKSETVNAIGNWYLEWGSDSGFWLLTFGKLLPNATL

SEQ ID NO: 74378 - protein, 218 aa, Homo sapiens
  Payload ID: 14705
  Gene Symbol: RPS6
  Gene Name: ribosomal protein S6
  ENSP ID: ENSP00000369743
MATEVAADALGEEWKGYVVRISGGNDKQGFPMKQGVLTHGRVRLLLSKGHSCYRPRRTGERKRKSVRGCIVDANLSVLNLVIVKKGEKDIPGLTDTTVPRRLGPKRASRIRKLFNLSKEDDVRQYVVRKPLNKEGKKPRTKAPKIQRLVTPRVLQHKRRRIALKKQRTKKNKEEAAEYAKLLAKRMKEAKEKRQEQIAKRRRLSSLRASTSKSESSQK

SEQ ID NO: 74379 - protein, 218 aa, Homo sapiens; identical to SEQ ID NO: 74378
  Payload ID: 14705
  Gene Symbol: RPS6
  Gene Name: ribosomal protein S6
  ENSP ID: ENSP00000369745

SEQ ID NO: 74380 - protein, 249 aa, Homo sapiens
  Payload ID: 14705
  Gene Symbol: RPS6
  Gene Name: ribosomal protein S6
  Uniprot ID: P62753
  ENSP ID: ENSP00000369757
MKLNISFPATGCQKLIEVDDERKLRTFYEKRMATEVAADALGEEWKGYVVRISGGNDKQGFPMKQGVLTHGRVRLLLSKGHSCYRPRRTGERKRKSVRGCIVDANLSVLNLVIVKKGEKDIPGLTDTTVPRRLGPKRASRIRKLFNLSKEDDVRQYVVRKPLNKEGKKPRTKAPKIQRLVTPRVLQHKRRRIALKKQRTKKNKEEAAEYAKLLAKRMKEAKEKRQEQIAKRRRLSSLRASTSKSESSQK

SEQ ID NO: 74381 - protein, 1054 aa, Homo sapiens
  Payload ID: 14706
  Gene Symbol: RPS6KC1
  Gene Name: ribosomal protein S6 kinase, 52kDa, polypeptide 1
  Uniprot ID: Q96S38
  ENSP ID: ENSP00000355926
MTSYRERSADLARFYTVTEPQRHPRGYTVYKVTARIIVWKRYSDFKKLHKELWQIHKNLFRHSELFPPFAKGIVFGRFDETVIEERRQCAEDLLQFSANIPALYNSKQLEDFFKGGIINDSSELIGPAEAHSDSLIDTFPECSTEGFSSDSDLVSLTVDVDSLAELDDGMASNQNSPIRTFGLNLSSDSSALGAVASDSEQSKTEEERESRSLFPGSLKPKLGKRDYLEKAGELIKLALKKEEEDDYEAASDFYRKGVDLLLEGVQGESSPTRREAVKRRTAEYLMRAESISSLYGKPQLDDVSQPPGSLSSRPLWNLRSPAEELKAFRVLGVIDKVLLVMDTRTEQTFILKGLRKSSEYSRNRKTIIPRCVPNMVCLHKYIISEESVFLVLQHAEGGKLWSYISKFLNRSPEESFDIKEVKKPTLAKVHLQQPTSSPQDSSSFESRGSDGGSMLKALPLKSSLTPSSQDDSNQEDDGQDSSPKWPDSGSSSEEECTTSYLTLCNEYGQEKIEPGSLNEEPFMKTEGNGVDTKAIKSFPAHLAADSDSPSTQLRAHELKFFPNDDPEAVSSPRTSDSLSRSKNSPMEFFRIDSKDSASELLGLDFGEKLYSLKSEPLKPFFTLPDGDSASRSFNTSESKVEFKAQDTISRGSDDSVPVISFKDAAFDDVSGTDEGRPDLLVNLPGELESTREAAAMGPTKFTQTNIGIIENKLLEAPDVLCLRLSTEQCQAHEEKGIEELSDPSGPKSYSITEKHYAQEDPRMLFVAAVDHSSSGDMSLLPSSDPKFQGLGVVESAVTANNTEESLFRICSPLSGANEYIASTDTLKTEEVLLFTDQTDDLAKEEPTSLFQRDSETKGESGLVLEGDKEIHQIFEDLDKKLALASRFYIPEGCIQRWAAEMVVALDALHREGIVCRDLNPNNILLNDRGHIQLTYFSRWSEVEDSCDSDAIERMYCAPEVGAITEETEACDWWSLGAVLFELLTGKTLVECHPAGINTHTTLNMPECVSEEARSLIQQLLQFNPLERLGAGVAGVEDIKSHPFFTPVDWAELMR

SEQ ID NO: 74382 - protein, 1066 aa, Homo sapiens
  Payload ID: 14706
  Gene Symbol: RPS6KC1
  Gene Name: ribosomal protein S6 kinase, 52kDa, polypeptide 1
  Uniprot ID: Q96S38
  ENSP ID: ENSP00000355927
MTSYRERSADLARFYTVTEPQRHPRGYTVYKVTARVVSRRNPEDVQEIIVWKRYSDFKKLHKELWQIHKNLFRHSELFPPFAKGIVFGRFDETVIEERRQCAEDLLQFSANIPALYNSKQLEDFFKGGIINDSSELIGPAEAHSDSLIDTFPECSTEGFSSDSDLVSLTVDVDSLAELDDGMASNQNSPIRTFGLNLSSDSSALGAVASDSEQSKTEEERESRSLFPGSLKPKLGKRDYLEKAGELIKLALKKEEEDDYEAASDFYRKGVDLLLEGVQGESSPTRREAVKRRTAEYLMRAESISSLYGKPQLDDVSQPPGSLSSRPLWNLRSPAEELKAFRVLGVIDKVLLVMDTRTEQTFILKGLRKSSEYSRNRKTIIPRCVPNMVCLHKYIISEESVFLVLQHAEGGKLWSYISKFLNRSPEESFDIKEVKKPTLAKVHLQQPTSSPQDSSSFESRGSDGGSMLKALPLKSSLTPSSQDDSNQEDDGQDSSPKWPDSGSSSEEECTTSYLTLCNEYGQEKIEPGSLNEEPFMKTEGNGVDTKAIKSFPAHLAADSDSPSTQLRAHELKFFPNDDPEAVSSPRTSDSLSRSKNSPMEFFRIDSKDSASELLGLDFGEKLYSLKSEPLKPFFTLPDGDSASRSFNTSESKVEFKAQDTISRGSDDSVPVISFKDAAFDDVSGTDEGRPDLLVNLPGELESTREAAAMGPTKFTQTNIGIIENKLLEAPDVLCLRLSTEQCQAHEEKGIEELSDPSGPKSYSITEKHYAQEDPRMLFVAAVDHSSSGDMSLLPSSDPKFQGLGVVESAVTANNTEESLFRICSPLSGANEYIASTDTLKTEEVLLFTDQTDDLAKEEPTSLFQRDSETKGESGLVLEGDKEIHQIFEDLDKKLALASRFYIPEGCIQRWAAEMVVALDALHREGIVCRDLNPNNILLNDRGHIQLTYFSRWSEVEDSCDSDAIERMYCAPEVGAITEETEACDWWSLGAVLFELLTGKTLVECHPAGINTHTTLNMPECVSEEARSLIQQLLQFNPLERLGAGVAGVEDIKSHPFFTPVDWAELMR

SEQ ID NO: 74383 - protein, 885 aa, Homo sapiens
  Payload ID: 14706
  Gene Symbol: RPS6KC1
  Gene Name: ribosomal protein S6 kinase, 52kDa, polypeptide 1
  ENSP ID: ENSP00000439282
MASNQNSPIRTFGLNLSSDSSALGAVASDSEQSKTEEERESRSLFPGSLKPKLGKRDYLEKAGELIKLALKKEEEDDYEAASDFYRKGVDLLLEGVQGESSPTRREAVKRRTAEYLMRAESISSLYGKPQLDDVSQPPGSLSSRPLWNLRSPAEELKAFRVLGVIDKVLLVMDTRTEQTFILKGLRKSSEYSRNRKTIIPRCVPNMVCLHKYIISEESVFLVLQHAEGGKLWSYISKFLNRSPEESFDIKEVKKPTLAKVHLQQPTSSPQDSSSFESRGSDGGSMLKALPLKSSLTPSSQDDSNQEDDGQDSSPKWPDSGSSSEEECTTSYLTLCNEYGQEKIEPGSLNEEPFMKTEGNGVDTKAIKSFPAHLAADSDSPSTQLRAHELKFFPNDDPEAVSSPRTSDSLSRSKNSPMEFFRIDSKDSASELLGLDFGEKLYSLKSEPLKPFFTLPDGDSASRSFNTSESKVEFKAQDTISRGSDDSVPVISFKDAAFDDVSGTDEGRPDLLVNLPGELESTREAAAMGPTKFTQTNIGIIENKLLEAPDVLCLRLSTEQCQAHEEKGIEELSDPSGPKSYSITEKHYAQEDPRMLFVAAVDHSSSGDMSLLPSSDPKFQGLGVVESAVTANNTEESLFRICSPLSGANEYIASTDTLKTEEVLLFTDQTDDLAKEEPTSLFQRDSETKGESGLVLEGDKEIHQIFEDLDKKLALASRFYIPEGCIQRWAAEMVVALDALHREGIVCRDLNPNNILLNDRGHIQLTYFSRWSEVEDSCDSDAIERMYCAPEVGAITEETEACDWWSLGAVLFELLTGKTLVECHPAGINTHTTLNMPECVSEEARSLIQQLLQFNPLERLGAGVAGVEDIKSHPFFTPVDWAELMR

SEQ ID NO: 74384 - protein, 854 aa, Homo sapiens
  Payload ID: 14706
  Gene Symbol: RPS6KC1
  Gene Name: ribosomal protein S6 kinase, 52kDa, polypeptide 1
  ENSP ID: ENSP00000442306
MASNQNSPIRTFGLNLSSDSSALGAVASDSEQSKTEEERESRSLFPGSLKPKLGKRDYLEKAGELIKLALKKEEEDDYEAASDFYRKGVDLLLEGVQGESSPTRREAVKRRTAEYLMRAESISSLYGKPQLDDVSQVLLVMDTRTEQTFILKGLRKSSEYSRNRKTIIPRCVPNMVCLHKYIISEESVFLVLQHAEGGKLWSYISKFLNRSPEESFDIKEVKKPTLAKVHLQQPTSSPQDSSSFESRGSDGGSMLKALPLKSSLTPSSQDDSNQEDDGQDSSPKWPDSGSSSEEECTTSYLTLCNEYGQEKIEPGSLNEEPFMKTEGNGVDTKAIKSFPAHLAADSDSPSTQLRAHELKFFPNDDPEAVSSPRTSDSLSRSKNSPMEFFRIDSKDSASELLGLDFGEKLYSLKSEPLKPFFTLPDGDSASRSFNTSESKVEFKAQDTISRGSDDSVPVISFKDAAFDDVSGTDEGRPDLLVNLPGELESTREAAAMGPTKFTQTNIGIIENKLLEAPDVLCLRLSTEQCQAHEEKGIEELSDPSGPKSYSITEKHYAQEDPRMLFVAAVDHSSSGDMSLLPSSDPKFQGLGVVESAVTANNTEESLFRICSPLSGANEYIASTDTLKTEEVLLFTDQTDDLAKEEPTSLFQRDSETKGESGLVLEGDKEIHQIFEDLDKKLALASRFYIPEGCIQRWAAEMVVALDALHREGIVCRDLNPNNILLNDRGHIQLTYFSRWSEVEDSCDSDAIERMYCAPEVGAITEETEACDWWSLGAVLFELLTGKTLVECHPAGINTHTTLNMPECVSEEARSLIQQLLQFNPLERLGAGVAGVEDIKSHPFFTPVDWAELMR

SEQ ID NO: 74385 - protein, 854 aa, Homo sapiens; identical to SEQ ID NO: 74384
  Payload ID: 14706
  Gene Symbol: RPS6KC1
  Gene Name: ribosomal protein S6 kinase, 52kDa, polypeptide 1
  ENSP ID: ENSP00000483873

SEQ ID NO: 74386 - protein, 601 aa, Homo sapiens
  Payload ID: 14706
  Gene Symbol: RPS6KC1
  Gene Name: ribosomal protein S6 kinase, 52kDa, polypeptide 1
  ENSP ID: ENSP00000484471
MLKALPLKSSLTPSSQDDSNQEDDGQDSSPKWPDSGSSSEEECTTSYLTLCNEYGQEKIEPGSLNEEPFMKTEGNGVDTKAIKSFPAHLAADSDSPSTQLRAHELKFFPNDDPEAVSSPRTSDSLSRSKNSPMEFFRIDSKDSASELLGLDFGEKLYSLKSEPLKPFFTLPDGDSASRSFNTSESKVEFKAQDTISRGSDDSVPVISFKDAAFDDVSGTDEGRPDLLVNLPGELESTREAAAMGPTKFTQTNIGIIENKLLEAPDVLCLRLSTEQCQAHEEKGIEELSDPSGPKSYSITEKHYAQEDPRMLFVAAVDHSSSGDMSLLPSSDPKFQGLGVVESAVTANNTEESLFRICSPLSGANEYIASTDTLKTEEVLLFTDQTDDLAKEEPTSLFQRDSETKGESGLVLEGDKEIHQIFEDLDKKLALASRFYIPEGCIQRWAAEMVVALDALHREGIVCRDLNPNNILLNDRGHIQLTYFSRWSEVEDSCDSDAIERMYCAPEVGAITEETEACDWWSLGAVLFELLTGKTLVECHPAGINTHTTLNMPECVSEEARSLIQQLLQFNPLERLGAGVAGVEDIKSHPFFTPVDWAELMR

SEQ ID NO: 74387 - protein, 525 aa, Homo sapiens
  Payload ID: 14707
  Gene Symbol: RPS6KB1
  Gene Name: ribosomal protein S6 kinase, 70kDa, polypeptide 1
  Uniprot ID: P23443
  ENSP ID: ENSP00000225577
MRRRRRRDGFYPAPDFRDREAEDMAGVFDIDLDQPEDAGSEDELEEGGQLNESMDHGGVGPYELGMEHCEKFEISETSVNRGPEKIRPECFELLRVLGKGGYGKVFQVRKVTGANTGKIFAMKVLKKAMIVRNAKDTAHTKAERNILEEVKHPFIVDLIYAFQTGGKLYLILEYLSGGELFMQLEREGIFMEDTACFYLAEISMALGHLHQKGIIYRDLKPENIMLNHQGHVKLTDFGLCKESIHDGTVTHTFCGTIEYMAPEILMRSGHNRAVDWWSLGALMYDMLTGAPPFTGENRKKTIDKILKCKLNLPPYLTQEARDLLKKLLKRNAASRLGAGPGDAGEVQAHPFFRHINWEELLARKVEPPFKPLLQSEEDVSQFDSKFTRQTPVDSPDDSTLSESANQVFLGFTYVAPSVLESVKEKFSFEPKIRSPRRFIGSPRTPVSPVKFSPGDFWGRGASASTANPQTPVEYPMETSGIEQMDVTMSGEASAPLPIRQPNSGPYKKQAFPMISKRPEHLRMNL

SEQ ID NO: 74388 - protein, 472 aa, Homo sapiens
  Payload ID: 14707
  Gene Symbol: RPS6KB1
  Gene Name: ribosomal protein S6 kinase, 70kDa, polypeptide 1
  Uniprot ID: P23443
  ENSP ID: ENSP00000376744
MDHGGVGPYELGMEHCEKFEISETSVNRGPEKIRPECFELLRVLGKGGYGKVFQVRKVTGANTGKIFAMKVLKKAMIVRNAKDTAHTKAERNILEEVKHPFIVDLIYAFQTGGKLYLILEYLSGGELFMQLEREGIFMEDTACFYLAEISMALGHLHQKGIIYRDLKPENIMLNHQGHVKLTDFGLCKESIHDGTVTHTFCGTIEYMAPEILMRSGHNRAVDWWSLGALMYDMLTGAPPFTGENRKKTIDKILKCKLNLPPYLTQEARDLLKKLLKRNAASRLGAGPGDAGEVQAHPFFRHINWEELLARKVEPPFKPLLQSEEDVSQFDSKFTRQTPVDSPDDSTLSESANQVFLGFTYVAPSVLESVKEKFSFEPKIRSPRRFIGSPRTPVSPVKFSPGDFWGRGASASTANPQTPVEYPMETSGIEQMDVTMSGEASAPLPIRQPNSGPYKKQAFPMISKRPEHLRMNL

SEQ ID NO: 74389 - protein, 451 aa, Homo sapiens
  Payload ID: 14707
  Gene Symbol: RPS6KB1
  Gene Name: ribosomal protein S6 kinase, 70kDa, polypeptide 1
  Uniprot ID: P23443
  ENSP ID: ENSP00000384335
MRRRRRRDGFYPAPDFRDREAEDMAGVFDIDLDQPEDAGSEDELEEGGQLNESMDHGGVGPYELGMEHCEKFEISETSVNRGPEKIRPECFELLRVLGKGGYGKVFQVRKVTGANTGKIFAMKVLKKAMIVRNAKDTAHTKAERNILEEVKHPFIVDLIYAFQTGGKLYLILEYLSGGELFMQLEREGIFMEDTACFYLAEISMALGHLHQKGIIYRDLKPENIMLNHQGHVKLTDFGLCKESIHDGTVTHTFCGTIEYMAPEILMRSGHNRAVDWWSLGALMYDMLTGAPPFTGENRKKTIDKILKCKLNLPPYLTQEARDLLKKLLKRNAASRLGAGPGDAGEVQAHPFFRHINWEELLARKVEPPFKPLLQSEEDVSQFDSKFTRQTPVDSPDDSTLSESANQVFLGFTYVAPSVLESVKEKFSFEPKIRSPRRFIGSPRTPVSTAMC

SEQ ID NO: 74390 - protein, 502 aa, Homo sapiens
  Payload ID: 14707
  Gene Symbol: RPS6KB1
  Gene Name: ribosomal protein S6 kinase, 70kDa, polypeptide 1
  Uniprot ID: P23443
  ENSP ID: ENSP00000441993
MRRRRRRDGFYPAPDFRDREAEDMAGVFDIDLDQPEDAGSEDELEEGGQLNESMDHGGVGPYELGMEHCEKFEISETSVNRGPEKIRPECFELLRVLGKGGYGKAMIVRNAKDTAHTKAERNILEEVKHPFIVDLIYAFQTGGKLYLILEYLSGGELFMQLEREGIFMEDTACFYLAEISMALGHLHQKGIIYRDLKPENIMLNHQGHVKLTDFGLCKESIHDGTVTHTFCGTIEYMAPEILMRSGHNRAVDWWSLGALMYDMLTGAPPFTGENRKKTIDKILKCKLNLPPYLTQEARDLLKKLLKRNAASRLGAGPGDAGEVQAHPFFRHINWEELLARKVEPPFKPLLQSEEDVSQFDSKFTRQTPVDSPDDSTLSESANQVFLGFTYVAPSVLESVKEKFSFEPKIRSPRRFIGSPRTPVSPVKFSPGDFWGRGASASTANPQTPVEYPMETSGIEQMDVTMSGEASAPLPIRQPNSGPYKKQAFPMISKRPEHLRMNL

SEQ ID NO: 74391 - protein, 62 aa, Homo sapiens
  Payload ID: 14707
  Gene Symbol: RPS6KB1
  Gene Name: ribosomal protein S6 kinase, 70kDa, polypeptide 1
  ENSP ID: ENSP00000464805
MDHGGVGPYELGMEHCEKFEISETSVNRGPEKIRPECFELLRVLGKGGYGKVFQVRKVTGAN

SEQ ID NO: 74392 - protein, 52 aa, Homo sapiens
  Payload ID: 14707
  Gene Symbol: RPS6KB1
  Gene Name: ribosomal protein S6 kinase, 70kDa, polypeptide 1
  ENSP ID: ENSP00000466562
MRRRRRRDGFYPAPDFRDREAEDMAGVFDIDLDQPEDAGSEDELEEGEALSC

SEQ ID NO: 74393 - protein, 140 aa, Homo sapiens
  Payload ID: 14707
  Gene Symbol: RPS6KB1
  Gene Name: ribosomal protein S6 kinase, 70kDa, polypeptide 1
  ENSP ID: ENSP00000468058
MRRRRRRDGFYPAPDFRDREAEDMAGVFDIDLDQPEDAGSEDELEEGGQLNESMDHGGVGPYELGMEHCEKFEISETSVNRGPEKIRPECFELLRVLGKGGYGKVFQVRKVTGANTGKIFAMKVLKKMISFPLGNDSKKC

SEQ ID NO: 74394 - protein, 482 aa, Homo sapiens
  Payload ID: 14708
  Gene Symbol: RPS6KB2
  Gene Name: ribosomal protein S6 kinase, 70kDa, polypeptide 2
  Uniprot ID: Q9UBS0
  ENSP ID: ENSP00000308413
MAAVFDLDLETEEGSEGEGEPELSPADACPLAELRAAGLEPVGHYEEVELTETSVNVGPERIGPHCFELLRVLGKGGYGKVFQVRKVQGTNLGKIYAMKVLRKAKIVRNAKDTAHTRAERNILESVKHPFIVELAYAFQTGGKLYLILECLSGGELFTHLEREGIFLEDTACFYLAEITLALGHLHSQGIIYRDLKPENIMLSSQGHIKLTDFGLCKESIHEGAVTHTFCGTIEYMAPEILVRSGHNRAVDWWSLGALMYDMLTGSPPFTAENRKKTMDKIIRGKLALPPYLTPDARDLVKKFLKRNPSQRIGGGPGDAADVQRHPFFRHMNWDDLLAWRVDPPFRPCLQSEEDVSQFDTRFTRQTPVDSPDDTALSESANQAFLGFTYVAPSVLDSIKEGFSFQPKLRSPRRLNSSPRAPVSPLKFSPFEGFRPSPSLPEPTELPLPPLLPPPPPSTTAPLPIRPPSGTKKSKRGRGRPGR

SEQ ID NO: 74395 - protein, 20 aa, Homo sapiens
  Payload ID: 14708
  Gene Symbol: RPS6KB2
  Gene Name: ribosomal protein S6 kinase, 70kDa, polypeptide 2
  ENSP ID: ENSP00000410175
MLSSQGHIKLTDFGLCKESI

SEQ ID NO: 74396 - protein, 154 aa, Homo sapiens
  Payload ID: 14708
  Gene Symbol: RPS6KB2
  Gene Name: ribosomal protein S6 kinase, 70kDa, polypeptide 2
  Uniprot ID: Q9UBS0
  ENSP ID: ENSP00000432847
MAAVFDLDLETEEGSEGEGEPELSPADACPLAELRAAGLEPVGHYEEVELTETSVNVGPERIGPHCFELLRVLGKGGYGKVFQVRKVQGTNLGKIYAMKVLRKAKIVRNAKDTAHTRAERNILESVKHPFIVELAYAFQTGGKLYLILECLSVD

SEQ ID NO: 74397 - protein, 138 aa, Homo sapiens
  Payload ID: 14708
  Gene Symbol: RPS6KB2
  Gene Name: ribosomal protein S6 kinase, 70kDa, polypeptide 2
  ENSP ID: ENSP00000436811
MAAVFDLDLETEEGSEGEGEPELSPASNLNGSGEVSWHLPWLLPLGFSQDACPLAELRAAGLEPVGHYEEVELTETSVNVGPERIGPHCFELLRVLGKGGYGKVFQVRKVQGTNLGKIYAMKVLRKAKIVRNAKDTAH

SEQ ID NO: 74398 - protein, 153 aa, Homo sapiens
  Payload ID: 14708
  Gene Symbol: RPS6KB2
  Gene Name: ribosomal protein S6 kinase, 70kDa, polypeptide 2
  ENSP ID: ENSP00000450621
MAAVFDLDLETEEGSEGEGEPELSPADACPLAELRAAGLEPVGHYEEVELTETSVNVGPERIGPHCFELLRVLGKGGYGKVFQVRKVQGTNLGKIYAMKVLRKAKIVRNAKDTAHTRAERNILESVKHPFIVELAYAFQTGGKLYLILECLSD

SEQ ID NO: 74399 - protein, 107 aa, Homo sapiens
  Payload ID: 14708
  Gene Symbol: RPS6KB2
  Gene Name: ribosomal protein S6 kinase, 70kDa, polypeptide 2
  ENSP ID: ENSP00000473485
VFQVRKVQGTNLGKIYAMKVLRKAKIVRNAKDTAHTRAERNILESVKHPFIVELAYAFQTGGKLYLILECLSGGELFTHLEREGIFLEDTAWPHQTDRLWTLQGVYP

SEQ ID NO: 74400 - protein, 111 aa, Homo sapiens
  Payload ID: 14709
  Gene Symbol: RPS6KA1
  Gene Name: ribosomal protein S6 kinase, 90kDa, polypeptide 1
  ENSP ID: ENSP00000355831
MQTPADFPRVERDLVPCPRKVQQQEPTALPLTPSWGSLPCCLPVCLPGVRPICPRMRASSRRSPSRTTSRLALRRLIHPISSSSRFWARDPLAKSSWCGKSPGLTVGTCML

SEQ ID NO: 74401 - protein, 204 aa, Homo sapiens
  Payload ID: 14709
  Gene Symbol: RPS6KA1
  Gene Name: ribosomal protein S6 kinase, 90kDa, polypeptide 1
  ENSP ID: ENSP00000363278
MEQDPKPPRLRLWALIPWLPRKQRPRISQTSLPVPGPGSGPQRDSDEGVLKEISITHHVKAGSEKADPSHFELLKVLGQGSFGKVFLVRKVTRPDSGHLYAMKVLKKATLKVRDRVRTKMERDILADVNHPFVVKLHYAFQTEGKLYLILDFLRGGDLFTRLSKEVIYMIQKKNIHEEVFLPPQPPLFPSIGDVHGGGCEVLPG

SEQ ID NO: 74402 - protein, 724 aa, Homo sapiens
  Payload ID: 14709
  Gene Symbol: RPS6KA1
  Gene Name: ribosomal protein S6 kinase, 90kDa, polypeptide 1
  ENSP ID: ENSP00000363281
MPLAQLKEPWPLMELVPLDPENGQTSGEEAGLQPSKDEGVLKEISITHHVKAGSEKADPSHFELLKVLGQGSFGKVFLVRKVTRPDSGHLYAMKVLKKATLKVRDRVRTKMERDILADVNHPFVVKLHYAFQTEGKLYLILDFLRGGDLFTRLSKEVMFTEEDVKFYLAELALGLDHLHSLGIIYRDLKPENILLDEEGHIKLTDFGLSKEAIDHEKKAYSFCGTVEYMAPEVVNRQGHSHSADWWSYGVLMGKDRKETMTLILKAKLGMPQFLSTEAQSLLRALFKRNPANRLGSGPDGAEEIKRHVFYSTIDWNKLYRREIKPPFKPAVAQPDDTFYFDTEFTSRTPKDSPGIPPSAGAHQLFRGFSFVATGLMEDDGKPRAPQAPLHSVVQQLHGKNLVFSDGYVVKETIGVGSYSECKRCVHKATNMEYAVKVIDKSKRDPSEEIEILLRYGQHPNIITLKDVYDDGKHVYLVTELMRGGELLDKILRQKFFSEREASFVLHTIGKTVEYLHSQGVVHRDLKPSNILYVDESGNPECLRICDFGFAKQLRAENGLLMTPCYTANFVAPEVLKRQGYDEGCDIWSLGILLYTMLAGYTPFANGPSDTPEEILTRIGSGKFTLSGGNWNTVSETAKDLVSKMLHVDPHQRLTAKQVLQHPWVTQKDKLPQSQLSHQDLQLVKGAMAATYSALNSSKPTPQLKPIESSILAQRRVRKLPSTTL

SEQ ID NO: 74403 - protein, 735 aa, Homo sapiens
  Payload ID: 14709
  Gene Symbol: RPS6KA1
  Gene Name: ribosomal protein S6 kinase, 90kDa, polypeptide 1
  Uniprot ID: Q15418
  ENSP ID: ENSP00000363283
MPLAQLKEPWPLMELVPLDPENGQTSGEEAGLQPSKDEGVLKEISITHHVKAGSEKADPSHFELLKVLGQGSFGKVFLVRKVTRPDSGHLYAMKVLKKATLKVRDRVRTKMERDILADVNHPFVVKLHYAFQTEGKLYLILDFLRGGDLFTRLSKEVMFTEEDVKFYLAELALGLDHLHSLGIIYRDLKPENILLDEEGHIKLTDFGLSKEAIDHEKKAYSFCGTVEYMAPEVVNRQGHSHSADWWSYGVLMFEMLTGSLPFQGKDRKETMTLILKAKLGMPQFLSTEAQSLLRALFKRNPANRLGSGPDGAEEIKRHVFYSTIDWNKLYRREIKPPFKPAVAQPDDTFYFDTEFTSRTPKDSPGIPPSAGAHQLFRGFSFVATGLMEDDGKPRAPQAPLHSVVQQLHGKNLVFSDGYVVKETIGVGSYSECKRCVHKATNMEYAVKVIDKSKRDPSEEIEILLRYGQHPNIITLKDVYDDGKHVYLVTELMRGGELLDKILRQKFFSEREASFVLHTIGKTVEYLHSQGVVHRDLKPSNILYVDESGNPECLRICDFGFAKQLRAENGLLMTPCYTANFVAPEVLKRQGYDEGCDIWSLGILLYTMLAGYTPFANGPSDTPEEILTRIGSGKFTLSGGNWNTVSETAKDLVSKMLHVDPHQRLTAKQVLQHPWVTQKDKLPQSQLSHQDLQLVKGAMAATYSALNSSKPTPQLKPIESSILAQRRVRKLPSTTL

SEQ ID NO: 74404 - protein, 166 aa, Homo sapiens
  Payload ID: 14709
  Gene Symbol: RPS6KA1
  Gene Name: ribosomal protein S6 kinase, 90kDa, polypeptide 1
  ENSP ID: ENSP00000383967
AQPDDTFYFDTEFTSRTPKDSPGIPPSAGAHQLFRGFSFVATGLMEDDGKPRAPQAPLHSVVQVIDKSKRDPSEEIEILLRYGQHPNIITLKDVYDDGKHVYLVTELMRGGELLDKILRQKFFSEREASFVLHTIGKTVEYLHSQGVVHRDLKPSNILYVDESGNP

SEQ ID NO: 74405 - protein, 115 aa, Homo sapiens
  Payload ID: 14709
  Gene Symbol: RPS6KA1
  Gene Name: ribosomal protein S6 kinase, 90kDa, polypeptide 1
  ENSP ID: ENSP00000403548
NTVSETAKDLVSKMLHVDPHQRLTAKQVLQHPWVTQKDKLPQSQLSHQDLQLVKGAMAATYSALNSSKPTPQLKPIESSILAQRRVRKLPSTTLMDSSRLRLCWWKAIHCINFFL

SEQ ID NO: 74406 - protein, 643 aa, Homo sapiens
  Payload ID: 14709
  Gene Symbol: RPS6KA1
  Gene Name: ribosomal protein S6 kinase, 90kDa, polypeptide 1
  Uniprot ID: Q15418
  ENSP ID: ENSP00000431651
MKVLKKATLKVRDRVRTKMERDILADVNHPFVVKLHYAFQTEGKLYLILDFLRGGDLFTRLSKEVMFTEEDVKFYLAELALGLDHLHSLGIIYRDLKPENILLDEEGHIKLTDFGLSKEAIDHEKKAYSFCGTVEYMAPEVVNRQGHSHSADWWSYGVLMFEMLTGSLPFQGKDRKETMTLILKAKLGMPQFLSTEAQSLLRALFKRNPANRLGSGPDGAEEIKRHVFYSTIDWNKLYRREIKPPFKPAVAQPDDTFYFDTEFTSRTPKDSPGIPPSAGAHQLFRGFSFVATGLMEDDGKPRAPQAPLHSVVQQLHGKNLVFSDGYVVKETIGVGSYSECKRCVHKATNMEYAVKVIDKSKRDPSEEIEILLRYGQHPNIITLKDVYDDGKHVYLVTELMRGGELLDKILRQKFFSEREASFVLHTIGKTVEYLHSQGVVHRDLKPSNILYVDESGNPECLRICDFGFAKQLRAENGLLMTPCYTANFVAPEVLKRQGYDEGCDIWSLGILLYTMLAGYTPFANGPSDTPEEILTRIGSGKFTLSGGNWNTVSETAKDLVSKMLHVDPHQRLTAKQVLQHPWVTQKDKLPQSQLSHQDLQLVKGAMAATYSALNSSKPTPQLKPIESSILAQRRVRKLPSTTL

SEQ ID NO: 74407 - protein, 719 aa, Homo sapiens
  Payload ID: 14709
  Gene Symbol: RPS6KA1
  Gene Name: ribosomal protein S6 kinase, 90kDa, polypeptide 1
  Uniprot ID: Q15418
  ENSP ID: ENSP00000432281
MQTPADFPRVERDLVPCPRKDEGVLKEISITHHVKAGSEKADPSHFELLKVLGQGSFGKVFLVRKVTRPDSGHLYAMKVLKKATLKVRDRVRTKMERDILADVNHPFVVKLHYAFQTEGKLYLILDFLRGGDLFTRLSKEVMFTEEDVKFYLAELALGLDHLHSLGIIYRDLKPENILLDEEGHIKLTDFGLSKEAIDHEKKAYSFCGTVEYMAPEVVNRQGHSHSADWWSYGVLMFEMLTGSLPFQGKDRKETMTLILKAKLGMPQFLSTEAQSLLRALFKRNPANRLGSGPDGAEEIKRHVFYSTIDWNKLYRREIKPPFKPAVAQPDDTFYFDTEFTSRTPKDSPGIPPSAGAHQLFRGFSFVATGLMEDDGKPRAPQAPLHSVVQQLHGKNLVFSDGYVVKETIGVGSYSECKRCVHKATNMEYAVKVIDKSKRDPSEEIEILLRYGQHPNIITLKDVYDDGKHVYLVTELMRGGELLDKILRQKFFSEREASFVLHTIGKTVEYLHSQGVVHRDLKPSNILYVDESGNPECLRICDFGFAKQLRAENGLLMTPCYTANFVAPEVLKRQGYDEGCDIWSLGILLYTMLAGYTPFANGPSDTPEEILTRIGSGKFTLSGGNWNTVSETAKDLVSKMLHVDPHQRLTAKQVLQHPWVTQKDKLPQSQLSHQDLQLVKGAMAATYSALNSSKPTPQLKPIESSILAQRRVRKLPSTTL

SEQ ID NO: 74408 - protein, 112 aa, Homo sapiens
  Payload ID: 14709
  Gene Symbol: RPS6KA1
  Gene Name: ribosomal protein S6 kinase, 90kDa, polypeptide 1
  ENSP ID: ENSP00000433039
MKVLKKATLKVRDRVRTKMERDILADVNHPFVVKLHYAFQTEGKLYLILDFLRGGDLFTRLSKEVMFTEEDVKFYLAELALGLDHLHSLGIIYRDLKPENILLDEEGHIKLT

SEQ ID NO: 74409 - protein, 56 aa, Homo sapiens
  Payload ID: 14709
  Gene Symbol: RPS6KA1
  Gene Name: ribosomal protein S6 kinase, 90kDa, polypeptide 1
  ENSP ID: ENSP00000434616
MPLAQLKEPWPLMELVPLDPEKQLLTSLEGSVAPVPKRAEGHLFLCLLTPGSRSSP

SEQ ID NO: 74410 - protein, 744 aa, Homo sapiens
  Payload ID: 14709
  Gene Symbol: RPS6KA1
  Gene Name: ribosomal protein S6 kinase, 90kDa, polypeptide 1
  Uniprot ID: Q15418
  ENSP ID: ENSP00000435412
MEQDPKPPRLRLWALIPWLPRKQRPRISQTSLPVPGPGSGPQRDSDEGVLKEISITHHVKAGSEKADPSHFELLKVLGQGSFGKVFLVRKVTRPDSGHLYAMKVLKKATLKVRDRVRTKMERDILADVNHPFVVKLHYAFQTEGKLYLILDFLRGGDLFTRLSKEVMFTEEDVKFYLAELALGLDHLHSLGIIYRDLKPENILLDEEGHIKLTDFGLSKEAIDHEKKAYSFCGTVEYMAPEVVNRQGHSHSADWWSYGVLMFEMLTGSLPFQGKDRKETMTLILKAKLGMPQFLSTEAQSLLRALFKRNPANRLGSGPDGAEEIKRHVFYSTIDWNKLYRREIKPPFKPAVAQPDDTFYFDTEFTSRTPKDSPGIPPSAGAHQLFRGFSFVATGLMEDDGKPRAPQAPLHSVVQQLHGKNLVFSDGYVVKETIGVGSYSECKRCVHKATNMEYAVKVIDKSKRDPSEEIEILLRYGQHPNIITLKDVYDDGKHVYLVTELMRGGELLDKILRQKFFSEREASFVLHTIGKTVEYLHSQGVVHRDLKPSNILYVDESGNPECLRICDFGFAKQLRAENGLLMTPCYTANFVAPEVLKRQGYDEGCDIWSLGILLYTMLAGYTPFANGPSDTPEEILTRIGSGKFTLSGGNWNTVSETAKDLVSKMLHVDPHQRLTAKQVLQHPWVTQKDKLPQSQLSHQDLQLVKGAMAATYSALNSSKPTPQLKPIESSILAQRRVRKLPSTTL

SEQ ID NO: 74411 - protein, 52 aa, Homo sapiens
  Payload ID: 14709
  Gene Symbol: RPS6KA1
  Gene Name: ribosomal protein S6 kinase, 90kDa, polypeptide 1
  ENSP ID: ENSP00000436990
MPLAQLKEPWPLMELVPLDPENGQTSGEEAGLQPSKYVTASGPRWRETSWLM

SEQ ID NO: 74412 - protein, 56 aa, Homo sapiens; identical to SEQ ID NO: 74409
  Payload ID: 14709
  Gene Symbol: RPS6KA1
  Gene Name: ribosomal protein S6 kinase, 90kDa, polypeptide 1
  ENSP ID: ENSP00000485797

SEQ ID NO: 74413 - protein, 724 aa, Homo sapiens; identical to SEQ ID NO: 74402
  Payload ID: 14709
  Gene Symbol: RPS6KA1
  Gene Name: ribosomal protein S6 kinase, 90kDa, polypeptide 1
  ENSP ID: ENSP00000486031

SEQ ID NO: 74414 - protein, 52 aa, Homo sapiens; identical to SEQ ID NO: 74411
  Payload ID: 14709
  Gene Symbol: RPS6KA1
  Gene Name: ribosomal protein S6 kinase, 90kDa, polypeptide 1
  ENSP ID: ENSP00000486119

SEQ ID NO: 74415 - protein, 166 aa, Homo sapiens; identical to SEQ ID NO: 74404
  Payload ID: 14709
  Gene Symbol: RPS6KA1
  Gene Name: ribosomal protein S6 kinase, 90kDa, polypeptide 1
  ENSP ID: ENSP00000486179

SEQ ID NO: 74416 - protein, 204 aa, Homo sapiens; identical to SEQ ID NO: 74401
  Payload ID: 14709
  Gene Symbol: RPS6KA1
  Gene Name: ribosomal protein S6 kinase, 90kDa, polypeptide 1
  ENSP ID: ENSP00000486849

SEQ ID NO: 74417 - protein, 735 aa, Homo sapiens; identical to SEQ ID NO: 74403
  Payload ID: 14709
  Gene Symbol: RPS6KA1
  Gene Name: ribosomal protein S6 kinase, 90kDa, polypeptide 1
  Uniprot ID: Q15418
  ENSP ID: ENSP00000486881

SEQ ID NO: 74418 - protein, 111 aa, Homo sapiens; identical to SEQ ID NO: 74400
  Payload ID: 14709
  Gene Symbol: RPS6KA1
  Gene Name: ribosomal protein S6 kinase, 90kDa, polypeptide 1
  ENSP ID: ENSP00000487154

SEQ ID NO: 74419 - protein, 643 aa, Homo sapiens; identical to SEQ ID NO: 74406
  Payload ID: 14709
  Gene Symbol: RPS6KA1
  Gene Name: ribosomal protein S6 kinase, 90kDa, polypeptide 1
  Uniprot ID: Q15418
  ENSP ID: ENSP00000487166

SEQ ID NO: 74420 - protein, 115 aa, Homo sapiens; identical to SEQ ID NO: 74405
  Payload ID: 14709
  Gene Symbol: RPS6KA1
  Gene Name: ribosomal protein S6 kinase, 90kDa, polypeptide 1
  ENSP ID: ENSP00000487207

SEQ ID NO: 74421 - protein, 112 aa, Homo sapiens; identical to SEQ ID NO: 74408
  Payload ID: 14709
  Gene Symbol: RPS6KA1
  Gene Name: ribosomal protein S6 kinase, 90kDa, polypeptide 1
  ENSP ID: ENSP00000487239

SEQ ID NO: 74422 - protein, 744 aa, Homo sapiens; identical to SEQ ID NO: 74410
  Payload ID: 14709
  Gene Symbol: RPS6KA1
  Gene Name: ribosomal protein S6 kinase, 90kDa, polypeptide 1
  Uniprot ID: Q15418
  ENSP ID: ENSP00000487349

SEQ ID NO: 74423 - protein, 719 aa, Homo sapiens; identical to SEQ ID NO: 74407
  Payload ID: 14709
  Gene Symbol: RPS6KA1
  Gene Name: ribosomal protein S6 kinase, 90kDa, polypeptide 1
  Uniprot ID: Q15418
  ENSP ID: ENSP00000487553

SEQ ID NO: 74424 - protein, 733 aa, Homo sapiens
  Payload ID: 14710
  Gene Symbol: RPS6KA2
  Gene Name: ribosomal protein S6 kinase, 90kDa, polypeptide 2
  Uniprot ID: Q15349
  ENSP ID: ENSP00000265678
MDLSMKKFAVRRFFSVYLRRKSRSKSSSLSRLEEEGVVKEIDISHHVKEGFEKADPSQFELLKVLGQGSYGKVFLVRKVKGSDAGQLYAMKVLKKATLKVRDRVRSKMERDILAEVNHPFIVKLHYAFQTEGKLYLILDFLRGGDLFTRLSKEVMFTEEDVKFYLAELALALDHLHSLGIIYRDLKPENILLDEEGHIKITDFGLSKEAIDHDKRAYSFCGTIEYMAPEVVNRRGHTQSADWWSFGVLMFEMLTGSLPFQGKDRKETMALILKAKLGMPQFLSGEAQSLLRALFKRNPCNRLGAGIDGVEEIKRHPFFVTIDWNTLYRKEIKPPFKPAVGRPEDTFHFDPEFTARTPTDSPGVPPSANAHHLFRGFSFVASSLIQEPSQQDLHKVPVHPIVQQLHGNNIHFTDGYEIKEDIGVGSYSVCKRCVHKATDTEYAVKIIDKSKRDPSEEIEILLRYGQHPNIITLKDVYDDGKFVYLVMELMRGGELLDRILRQRYFSEREASDVLCTITKTMDYLHSQGVVHRDLKPSNILYRDESGSPESIRVCDFGFAKQLRAGNGLLMTPCYTANFVAPEVLKRQGYDAACDIWSLGILLYTMLAGFTPFANGPDDTPEEILARIGSGKYALSGGNWDSISDAAKDVVSKMLHVDPHQRLTAMQVLKHPWVVNREYLSPNQLSRQDVHLVKGAMAATYFALNRTPQAPRLEPVLSSNLAQRRGMKRLTSTRL

SEQ ID NO: 74425 - protein, 644 aa, Homo sapiens
  Payload ID: 14710
  Gene Symbol: RPS6KA2
  Gene Name: ribosomal protein S6 kinase, 90kDa, polypeptide 2
  ENSP ID: ENSP00000386050
MKVLKKATLKVRDRVRSKMERDILAEVNHPFIVKLHYAFQTEGKLYLILDFLRGGDLFTRLSKEVMFTEEDVKFYLAELALALDHLHSLGIIYRDLKPENILLDEEGHIKITDFGLSKEAIDHDKRAYSFCGTIEYMAPEVVNRRGHTQSADWWSFGVLMFEMLTGSLPFQGKDRKETMALILKAKLGMPQFLSGEAQSLLRALFKRNPCNRLGAGIDGVEEIKRHPFFVTIDWNTLYRKEIKPPFKPAVGRPEDTFHFDPEFTARTPTDSPGVPPSANAHHLFRGFSFVASSLIQEPSQQDLHKVPVHPIVQQLHGNNIHFTDGYEIKEDIGVGSYSVCKRCVHKATDTEYAVKIIDKSKRDPSEEIEILLRYGQHPNIITLKDVYDDGKFVYLVMELMRGGELLDRILRQRYFSEREASDVLCTITKTMDYLHSQGVVHRDLKPSNILYRDESGSPESIRVCDFGFAKQLRAGNGLLMTPCYTANFVAPEVLKRQGYDAACDIWSLGILLYTMLAGFTPFANGPDDTPEEILARIGSGKYALSGGNWDSISDAAKDVVSKMLHVDPHQRLTAMQVLKHPWVVNREYLSPNQLSRQDVHLVKGAMAATYFALNRTPQAPRLEPVLSSNLAQRRGMKRLTSTRL

SEQ ID NO: 74426 - protein, 125 aa, Homo sapiens
  Payload ID: 14710
  Gene Symbol: RPS6KA2
  Gene Name: ribosomal protein S6 kinase, 90kDa, polypeptide 2
  ENSP ID: ENSP00000422197
MKVLKKATLKVRDRVRSKMERDILAEVNHPFIVKLHYAFQTEGKLYLILDFLRGGDLFTRLSKEVMFTEEDVKFYLAELALALDHLHSLGIIYRDLKPENILLDEEGHIKITDFGLSKEAIDHDK

SEQ ID NO: 74427 - protein, 758 aa, Homo sapiens
  Payload ID: 14710
  Gene Symbol: RPS6KA2
  Gene Name: ribosomal protein S6 kinase, 90kDa, polypeptide 2
  ENSP ID: ENSP00000422435
MPIAQLLELWKKIEVEPMEIETTEEDLNLDVEPTTEDTAEEGKSDSAACKTKVAGSVEEEGVVKEIDISHHVKEGFEKADPSQFELLKVLGQGSYGKVFLVRKVKGSDAGQLYAMKVLKKATLKVRDRVRSKMERDILAEVNHPFIVKLHYAFQTEGKLYLILDFLRGGDLFTRLSKEVMFTEEDVKFYLAELALALDHLHSLGIIYRDLKPENILLDEEGHIKITDFGLSKEAIDHDKRAYSFCGTIEYMAPEVVNRRGHTQSADWWSFGVLMFEMLTGSLPFQGKDRKETMALILKAKLGMPQFLSGEAQSLLRALFKRNPCNRLGAGIDGVEEIKRHPFFVTIDWNTLYRKEIKPPFKPAVGRPEDTFHFDPEFTARTPTDSPGVPPSANAHHLFRGFSFVASSLIQEPSQQDLHKVPVHPIVQQLHGNNIHFTDGYEIKEDIGVGSYSVCKRCVHKATDTEYAVKIIDKSKRDPSEEIEILLRYGQHPNIITLKDVYDDGKFVYLVMELMRGGELLDRILRQRYFSEREASDVLCTITKTMDYLHSQGVVHRDLKPSNILYRDESGSPESIRVCDFGFAKQLRAGNGLLMTPCYTANFVAPEVLKRQGYDAACDIWSLGILLYTMLAGFTPFANGPDDTPEEILARIGSGKYALSGGNWDSISDAAKDVVSKMLHVDPHQRLTAMQVLKHPWVVNREYLSPNQLSRQDVHLVKGAMAATYFALNRTPQAPRLEPVLSSNLAQRRGMKRLTSTRL

SEQ ID NO: 74428 - protein, 644 aa, Homo sapiens; identical to SEQ ID NO: 74425
  Payload ID: 14710
  Gene Symbol: RPS6KA2
  Gene Name: ribosomal protein S6 kinase, 90kDa, polypeptide 2
  ENSP ID: ENSP00000422484

SEQ ID NO: 74429 - protein, 141 aa, Homo sapiens
  Payload ID: 14710
  Gene Symbol: RPS6KA2
  Gene Name: ribosomal protein S6 kinase, 90kDa, polypeptide 2
  ENSP ID: ENSP00000423114
MMIRLPHKKLQRLFLRKEEGVVKEIDISHHVKEGFEKADPSQFELLKVLGQGSYGKVFLVRKVKGSDAGQLYAMKVLKKATLKVRDRVRSKMERDILAEVNHPFIVKLHYAFQTEGKLYLILDFLRGGDLFTRLSKEVMFT

SEQ ID NO: 74430 - protein, 171 aa, Homo sapiens
  Payload ID: 14710
  Gene Symbol: RPS6KA2
  Gene Name: ribosomal protein S6 kinase, 90kDa, polypeptide 2
  ENSP ID: ENSP00000425148
MPIAQLLELWKKIEVEPMEIETTEEDLNLDVEPTTEDTAEEGKSDSAACKTKVAGSVEEEGVVKEIDISHHVKEGFEKADPSQFELLKVLGQGSYGKVFLVRKVKGSDAGQLYAMKVLKKATLKVRDRVRSKMERDILAEVNHPFIVKLHYAFQTEGKLYLILDFLRGGDL

SEQ ID NO: 74431 - protein, 36 aa, Homo sapiens
  Payload ID: 14710
  Gene Symbol: RPS6KA2
  Gene Name: ribosomal protein S6 kinase, 90kDa, polypeptide 2
  ENSP ID: ENSP00000425458
MKVLKKATLKVRDRVRSKMERDILAEVNHPFIVKLH

SEQ ID NO: 74432 - protein, 741 aa, Homo sapiens
  Payload ID: 14710
  Gene Symbol: RPS6KA2
  Gene Name: ribosomal protein S6 kinase, 90kDa, polypeptide 2
  Uniprot ID: Q15349
  ENSP ID: ENSP00000427015
MPIAQLLELWKKIEVEPMEIETTEEDLNLDVEPTTEDTAEEEEGVVKEIDISHHVKEGFEKADPSQFELLKVLGQGSYGKVFLVRKVKGSDAGQLYAMKVLKKATLKVRDRVRSKMERDILAEVNHPFIVKLHYAFQTEGKLYLILDFLRGGDLFTRLSKEVMFTEEDVKFYLAELALALDHLHSLGIIYRDLKPENILLDEEGHIKITDFGLSKEAIDHDKRAYSFCGTIEYMAPEVVNRRGHTQSADWWSFGVLMFEMLTGSLPFQGKDRKETMALILKAKLGMPQFLSGEAQSLLRALFKRNPCNRLGAGIDGVEEIKRHPFFVTIDWNTLYRKEIKPPFKPAVGRPEDTFHFDPEFTARTPTDSPGVPPSANAHHLFRGFSFVASSLIQEPSQQDLHKVPVHPIVQQLHGNNIHFTDGYEIKEDIGVGSYSVCKRCVHKATDTEYAVKIIDKSKRDPSEEIEILLRYGQHPNIITLKDVYDDGKFVYLVMELMRGGELLDRILRQRYFSEREASDVLCTITKTMDYLHSQGVVHRDLKPSNILYRDESGSPESIRVCDFGFAKQLRAGNGLLMTPCYTANFVAPEVLKRQGYDAACDIWSLGILLYTMLAGFTPFANGPDDTPEEILARIGSGKYALSGGNWDSISDAAKDVVSKMLHVDPHQRLTAMQVLKHPWVVNREYLSPNQLSRQDVHLVKGAMAATYFALNRTPQAPRLEPVLSSNLAQRRGMKRLTSTRL

SEQ ID NO: 74433 - protein, 96 aa, Homo sapiens
  Payload ID: 14710
  Gene Symbol: RPS6KA2
  Gene Name: ribosomal protein S6 kinase, 90kDa, polypeptide 2
  ENSP ID: ENSP00000427605
MKVLKKATLKVRDRVRSKMERDILAEVNHPFIVKLHYAFQTEGKLYLILDFLRGGDLFTRLSKEVMFTEEDVKFYLAELALALDHLHSLGIIYRDL

SEQ ID NO: 74434 - protein, 740 aa, Homo sapiens
  Payload ID: 14711
  Gene Symbol: RPS6KA3
  Gene Name: ribosomal protein S6 kinase, 90kDa, polypeptide 3
  Uniprot ID: P51812
  ENSP ID: ENSP00000368884
MPLAQLADPWQKMAVESPSDSAENGQQIMDEPMGEEEINPQTEEVSIKEIAITHHVKEGHEKADPSQFELLKVLGQGSFGKVFLVKKISGSDARQLYAMKVLKKATLKVRDRVRTKMERDILVEVNHPFIVKLHYAFQTEGKLYLILDFLRGGDLFTRLSKEVMFTEEDVKFYLAELALALDHLHSLGIIYRDLKPENILLDEEGHIKLTDFGLSKESIDHEKKAYSFCGTVEYMAPEVVNRRGHTQSADWWSFGVLMFEMLTGTLPFQGKDRKETMTMILKAKLGMPQFLSPEAQSLLRMLFKRNPANRLGAGPDGVEEIKRHSFFSTIDWNKLYRREIHPPFKPATGRPEDTFYFDPEFTAKTPKDSPGIPPSANAHQLFRGFSFVAITSDDESQAMQTVGVHSIVQQLHRNSIQFTDGYEVKEDIGVGSYSVCKRCIHKATNMEFAVKIIDKSKRDPTEEIEILLRYGQHPNIITLKDVYDDGKYVYVVTELMKGGELLDKILRQKFFSEREASAVLFTITKTVEYLHAQGVVHRDLKPSNILYVDESGNPESIRICDFGFAKQLRAENGLLMTPCYTANFVAPEVLKRQGYDAACDIWSLGVLLYTMLTGYTPFANGPDDTPEEILARIGSGKFSLSGGYWNSVSDTAKDLVSKMLHVDPHQRLTAALVLRHPWIVHWDQLPQYQLNRQDAPHLVKGAMAATYSALNRNQSPVLEPVGRSTLAQRRGIKKITSTAL

SEQ ID NO: 74435 - protein, 133 aa, Homo sapiens
  Payload ID: 14711
  Gene Symbol: RPS6KA3
  Gene Name: ribosomal protein S6 kinase, 90kDa, polypeptide 3
  ENSP ID: ENSP00000388512
MDEPMGEEEINPQTEEVSIKEIAITHHVKEGHEKADPSQFELLKVLGQGSFGKVFLVKKISGSDARQLYAMKVLKKATLKVRDRVRTKMERDILVEVNHPFIVKLHYAFQTEGKLYLILDFLRGGDLFTRLSK

SEQ ID NO: 74436 - protein, 227 aa, Homo sapiens
  Payload ID: 14711
  Gene Symbol: RPS6KA3
  Gene Name: ribosomal protein S6 kinase, 90kDa, polypeptide 3
  ENSP ID: ENSP00000407655
MFKFLSFRVRSIQEEVSIKEIAITHHVKEGHEKADPSQFELLKVLGQGSFGKVFLVKKISGSDARQLYAMKVLKKATLKVRDRVRTKMERDILVEVNHPFIVKLHYAFQTEGKLYLILDFLRGGDLFTRLSKEVMFTEEDVKFYLAELALALDHLHSLGIIYRDLKPENILLDEEGHIKLTDFGLSKESIDHEKKAYSFCGTVEYMAPEVVNRRGHTQSADWWSFGV

SEQ ID NO: 74437 - protein, 772 aa, Homo sapiens
  Payload ID: 14712
  Gene Symbol: RPS6KA4
  Gene Name: ribosomal protein S6 kinase, 90kDa, polypeptide 4
  Uniprot ID: O75676
  ENSP ID: ENSP00000333896
MGDEDDDESCAVELRITEANLTGHEEKVSVENFELLKVLGTGAYGKVFLVRKAGGHDAGKLYAMKVLRKAALVQRAKTQEHTRTERSVLELVRQAPFLVTLHYAFQTDAKLHLILDYVSGGEMFTHLYQRQYFKEAEVRVYGGEIVLALEHLHKLGIIYRDLKLENVLLDSEGHIVLTDFGLSKEFLTEEKERTFSFCGTIEYMAPEIIRSKTGHGKAVDWWSLGILLFELLTGASPFTLEGERNTQAEVSRRILKCSPPFPPRIGPVAQDLLQRLLCKDPKKRLGAGPQGAQEVRNHPFFQGLDWVALAARKIPAPFRPQIRSELDVGNFAEEFTRLEPVYSPPGSPPPGDPRIFQGYSFVAPSILFDHNNAVMTDGLEAPGAGDRPGRAAVARSAMMQDSPFFQQYELDLREPALGQGSFSVCRRCRQRQSGQEFAVKILSRRLEANTQREVAALRLCQSHPNVVNLHEVHHDQLHTYLVLELLRGGELLEHIRKKRHFSESEASQILRSLVSAVSFMHEEAGVVHRDLKPENILYADDTPGAPVKIIDFGFARLRPQSPGVPMQTPCFTLQYAAPELLAQQGYDESCDLWSLGVILYMMLSGQVPFQGASGQGGQSQAAEIMCKIREGRFSLDGEAWQGVSEEAKELVRGLLTVDPAKRLKLEGLRGSSWLQDGSARSSPPLRTPDVLESSGPAVRSGLNATFMAFNRGKREGFFLKSVENAPLAKRRKQKLRSATASRRGSPAPANPGRAPVASKGAPRRANGPLPPS

SEQ ID NO: 74438 - protein, 704 aa, Homo sapiens
  Payload ID: 14712
  Gene Symbol: RPS6KA4
  Gene Name: ribosomal protein S6 kinase, 90kDa, polypeptide 4
  ENSP ID: ENSP00000432945
TEANLTGHEEKVSVENFELLKVLGTGAYGKVFLVRKAGGHDAGKLYAMKVLRKAALVQRAKTQEHTRTERSVLELVRQAPFLVTLHYAFQTDAKLHLILDYVSGGEMFTHLYQRQYFKEAEVRVYGGEIVLALEHLHKLGIIYRDLKLENVLLDSEGHIVLTDFGLSKEFLTEEKERTFSFCGTIEYMAPEIIRSKTGHGKAVDWWSLGILLFELLTGASPFTLEGERNTQAEVSRRILKCSPPFPPRIGPVAQDLLQRLLCKDPKKRLGAGPQGAQEVRNHPFFQGLDWVALAARKIPAPFRPQIRSELDVGNFAEEFTRLEPVYSPPGSPPPGDPRIFQGYSFVAPSILFDHNNAVMTDGLEAPGAGDRPGRAAVARSAMMQQYELDLREPALGQGSFSVCRRCRQRQSGQEFAVKILSRRLEANTQREVAALRLCQSHPNVVNLHEVHHDQLHTYLVLELLRGGELLEHIRKKRHFSESEASQILRSLVSAVSFMHEEAGVVHRDLKPENILYADDTPGAPVKIIDFGFARLRPQSPGVPMQTPCFTLQYAAPELLAQQGYDESCDLWSLGVILYMMLSGQVPFQGASGQGGQSQAAEIMCKIREGRFSLDGEAWQGVSEEAKELVRGLLTVDPAKRLKLEGLRGSSWLQDGSARSSPPLRTPDVLESSGPAVRSGLNATFMAFNRGKREGFFLKSVENAP

SEQ ID NO: 74439 - protein, 48 aa, Homo sapiens
  Payload ID: 14712
  Gene Symbol: RPS6KA4
  Gene Name: ribosomal protein S6 kinase, 90kDa, polypeptide 4
  ENSP ID: ENSP00000435314
MGDEDDDESCAVELRITEANLTGHEEKPTARCSWCGRRAGTTRGSCTP

SEQ ID NO: 74440 - protein, 765 aa, Homo sapiens
  Payload ID: 14712
  Gene Symbol: RPS6KA4
  Gene Name: ribosomal protein S6 kinase, 90kDa, polypeptide 4
  ENSP ID: ENSP00000435580
MGDEDDDESCAVELRITEANLTGHEEKVSVENFELLKVLGTGAYGKVFLVRKAGGHDAGKLYAMKVLRKAALVQRAKTQEHTRTERSVLELVRQAPFLVTLHYAFQTDAKLHLILDYVSGGEMFTHLYQRQYFKEAEVRVYGGEIVLALEHLHKLGIIYRDLKLENVLLDSEGHIVLTDFGLSKEFLTEEKERTFSFCGTIEYMAPEIIRSKTGHGKAVDWWSLGILLFELLTGASPFTLEGERNTQAEVSRRILKCSPPFPPRIGPVAQDLLQRLLCKDPKKRLGAGPQGAQEVRNHPFFQGLDWVALAARKIPAPFRPQIRSELDVGNFAEEFTRLEPVYSPPGSPPPGDPRIFQGYSFVAPSILFDHNNAVMTDGLEAPGAGDRPGRAAVARSAMMQYELDLREPALGQGSFSVCRRCRQRQSGQEFAVKILSRRLEANTQREVAALRLCQSHPNVVNLHEVHHDQLHTYLVLELLRGGELLEHIRKKRHFSESEASQILRSLVSAVSFMHEEAGVVHRDLKPENILYADDTPGAPVKIIDFGFARLRPQSPGVPMQTPCFTLQYAAPELLAQQGYDESCDLWSLGVILYMMLSGQVPFQGASGQGGQSQAAEIMCKIREGRFSLDGEAWQGVSEEAKELVRGLLTVDPAKRLKLEGLRGSSWLQDGSARSSPPLRTPDVLESSGPAVRSGLNATFMAFNRGKREGFFLKSVENAPLAKRRKQKLRSATASRRGSPAPANPGRAPVASKGAPRRANGPLPPS

SEQ ID NO: 74441 - protein, 807 aa, Homo sapiens
  Payload ID: 14713
  Gene Symbol: RPS6KA5
  Gene Name: ribosomal protein S6 kinase, 90kDa, polypeptide 5
  ENSP ID: ENSP00000261991
MEEEGGSSGGAAGTSADGGDGGEQLLTVKHELRTANLTGHAEKVGIENFELLKVLGTGAYGKVFLVRKISGHDTGKLYAMKVLKKATIVQKAKTTEHTRTERQVLEHIRQSPFLVTLHYAFQTETKLHLILDYINGGELFTHLSQRERFTEHEVQIYVGEIVLALEHLHKLGIIYRDIKLENILLDSNGHVVLTDFGLSKEFVADETERAYSFCGTIEYMAPDIVRGGDSGHDKAVDWWSLGVLMYELLTGASPFTVDGEKNSQAEISRRILKSEPPYPQEMSALAKDLIQRLLMKDPKKRLGCGPRDADEIKEHLFFQKINWDDLAAKKVPAPFKPVIRDELDVSNFAEEFTEMDPTYSPAALPQSSEKLFQGYSFVAPSILFKRNAAVIDPLQFHMGVERPGVTNVARSAMMKDSPFYQHYDLDLKDKPLGEGSFSICRKCVHKKSNQAFAVKIISKRMEANTQKEITALKLCEGHPNIVKLHEVFHDQLHTFLVMELLNGGELFEALRKKHFSETEASYIMRKLVSAVSHMHDVGVVHRDLKPENLLFTDENDNLEIKIIDFGFARLKPPDNQPLKTPCFTLHYAAPELLNQNGYDESCDLWSLGVILYTMLSGQVPFQSHDRSLTCTSAVEIMKKIKKGDFSFEGEAWKNVSQEAKDLIQGLLTVDPNKRLKMSGLRYNEWLQDGSQLSSNPLMTPDILGSSGAAVHTCVKATFHAFNKYKREGFCLQNVDKAPLAKRRKMKKTSTSTETRSSSSESSHSSSSHSHGKTTPTKTLQPSNPADSNNPETLFQFSDSLRHGRSYQ

SEQ ID NO: 74442 - protein, 549 aa, Homo sapiens
  Payload ID: 14713
  Gene Symbol: RPS6KA5
  Gene Name: ribosomal protein S6 kinase, 90kDa, polypeptide 5
  Uniprot ID: O75582
  ENSP ID: ENSP00000402787
MEEEGGSSGGAAGTSADGGDGGEQLLTVKHELRTANLTGHAEKVGIENFELLKVLGTGAYGKVFLVRKISGHDTGKLYAMKVLKKATIVQKAKTTEHTRTERQVLEHIRQSPFLVTLHYAFQTETKLHLILDYINGGELFTHLSQRERFTEHEVQIYVGEIVLALEHLHKLGIIYRDIKLENILLDSNGHVVLTDFGLSKEFVADETERAYSFCGTIEYMAPDIVRGGDSGHDKAVDWWSLGVLMYELLTGASPFTVDGEKNSQAEISRRILKSEPPYPQEMSALAKDLIQRLLMKDPKKRLGCGPRDADEIKEHLFFQKINWDDLAAKKVPAPFKPVIRDELDVSNFAEEFTEMDPTYSPAALPQSSEKLFQGYSFVAPSILFKRNAAVIDPLQFHMGVERPGVTNVARSAMMKDSPFYQHYDLDLKDKPLGEGSFSICRKCVHKKSNQAFAVKIISKRMEANTQKEITALKLCEGHPNIVKLHEVFHDQLHTFLVMELLNGGELFERIKKKKHFSETEASYIMRKLVSAVSHMHDVGVVHRDLKPEV

SEQ ID NO: 74443 - protein, 723 aa, Homo sapiens
  Payload ID: 14713
  Gene Symbol: RPS6KA5
  Gene Name: ribosomal protein S6 kinase, 90kDa, polypeptide 5
  Uniprot ID: O75582
  ENSP ID: ENSP00000442803
MKVLKKATIVQKAKTTEHTRTERQVLEHIRQSPFLVTLHYAFQTETKLHLILDYINGGELFTHLSQRERFTEHEVQIYVGEIVLALEHLHKLGIIYRDIKLENILLDSNGHVVLTDFGLSKEFVADETERAYSFCGTIEYMAPDIVRGGDSGHDKAVDWWSLGVLMYELLTGASPFTVDGEKNSQAEISRRILKSEPPYPQEMSALAKDLIQRLLMKDPKKRLGCGPRDADEIKEHLFFQKINWDDLAAKKVPAPFKPVIRDELDVSNFAEEFTEMDPTYSPAALPQSSEKLFQGYSFVAPSILFKRNAAVIDPLQFHMGVERPGVTNVARSAMMKDSPFYQHYDLDLKDKPLGEGSFSICRKCVHKKSNQAFAVKIISKRMEANTQKEITALKLCEGHPNIVKLHEVFHDQLHTFLVMELLNGGELFERIKKKKHFSETEASYIMRKLVSAVSHMHDVGVVHRDLKPENLLFTDENDNLEIKIIDFGFARLKPPDNQPLKTPCFTLHYAAPELLNQNGYDESCDLWSLGVILYTMLSGQVPFQSHDRSLTCTSAVEIMKKIKKGDFSFEGEAWKNVSQEAKDLIQGLLTVDPNKRLKMSGLRYNEWLQDGSQLSSNPLMTPDILGSSGAAVHTCVKATFHAFNKYKREGFCLQNVDKAPLAKRRKMKKTSTSTETRSSSSESSHSSSSHSHGKTTPTKTLQPSNPADSNNPETLFQFSDSVA

SEQ ID NO: 74444 - protein, 219 aa, Homo sapiens
  Payload ID: 14713
  Gene Symbol: RPS6KA5
  Gene Name: ribosomal protein S6 kinase, 90kDa, polypeptide 5
  ENSP ID: ENSP00000450591
MEEEGGSSGGAAGTSADGGDGGEQLLTVKHELRTANLTGHAEKVGIENFELLKVLGTGAYGKVFLVRKISGHDTGKLYAMKVLKKATIVQKAKTTEHTRTERQVLEHIRQSPFLVTLHYAFQTETKLHLILDYINGGELFTHLSQRERFTEHEVQIYVGEIVLALEHLHKLGIIYRDIKLENILLDSNGHVVLTDFGLSKEFVADELEIKSLFCLFVQD

SEQ ID NO: 74445 - protein, 79 aa, Homo sapiens
  Payload ID: 14713
  Gene Symbol: RPS6KA5
  Gene Name: ribosomal protein S6 kinase, 90kDa, polypeptide 5
  ENSP ID: ENSP00000451305
  MOD_RES (1)..(1): Any amino acid
XYGKVFLVRKISGHDTGKLYAMKVLKKATIVQKAKTTEHTRTERQVLEHIRQSPFLVTLHYAFQTETKLHLILVGDYIS

SEQ ID NO: 74446 - protein, 83 aa, Homo sapiens
  Payload ID: 14713
  Gene Symbol: RPS6KA5
  Gene Name: ribosomal protein S6 kinase, 90kDa, polypeptide 5
  ENSP ID: ENSP00000451736
MEEEGGSSGGAAGTSADGGDGGEQLLTVKHELRTETSLLCCPGWSVVLISAHYNLRLLGSSDSPASASQVAGITGTHYHTQLI

SEQ ID NO: 74447 - protein, 802 aa, Homo sapiens
  Payload ID: 14713
  Gene Symbol: RPS6KA5
  Gene Name: ribosomal protein S6 kinase, 90kDa, polypeptide 5
  Uniprot ID: O75582
  ENSP ID: ENSP00000479667
MEEEGGSSGGAAGTSADGGDGGEQLLTVKHELRTANLTGHAEKVGIENFELLKVLGTGAYGKVFLVRKISGHDTGKLYAMKVLKKATIVQKAKTTEHTRTERQVLEHIRQSPFLVTLHYAFQTETKLHLILDYINGGELFTHLSQRERFTEHEVQIYVGEIVLALEHLHKLGIIYRDIKLENILLDSNGHVVLTDFGLSKEFVADETERAYSFCGTIEYMAPDIVRGGDSGHDKAVDWWSLGVLMYELLTGASPFTVDGEKNSQAEISRRILKSEPPYPQEMSALAKDLIQRLLMKDPKKRLGCGPRDADEIKEHLFFQKINWDDLAAKKVPAPFKPVIRDELDVSNFAEEFTEMDPTYSPAALPQSSEKLFQGYSFVAPSILFKRNAAVIDPLQFHMGVERPGVTNVARSAMMKDSPFYQHYDLDLKDKPLGEGSFSICRKCVHKKSNQAFAVKIISKRMEANTQKEITALKLCEGHPNIVKLHEVFHDQLHTFLVMELLNGGELFERIKKKKHFSETEASYIMRKLVSAVSHMHDVGVVHRDLKPENLLFTDENDNLEIKIIDFGFARLKPPDNQPLKTPCFTLHYAAPELLNQNGYDESCDLWSLGVILYTMLSGQVPFQSHDRSLTCTSAVEIMKKIKKGDFSFEGEAWKNVSQEAKDLIQGLLTVDPNKRLKMSGLRYNEWLQDGSQLSSNPLMTPDILGSSGAAVHTCVKATFHAFNKYKREGFCLQNVDKAPLAKRRKMKKTSTSTETRSSSSESSHSSSSHSHGKTTPTKTLQPSNPADSNNPETLFQFSDSVA

SEQ ID NO: 74448 - protein, 745 aa, Homo sapiens
  Payload ID: 14714
  Gene Symbol: RPS6KA6
  Gene Name: ribosomal protein S6 kinase, 90kDa, polypeptide 6
  Uniprot ID: Q9UK32
  ENSP ID: ENSP00000262752
MLPFAPQDEPWDREMEVFSGGGASSGEVNGLKMVDEPMEEGEADSCHDEGVVKEIPITHHVKEGYEKADPAQFELLKVLGQGSFGKVFLVRKKTGPDAGQLYAMKVLKKASLKVRDRVRTKMERDILVEVNHPFIVKLHYAFQTEGKLYLILDFLRGGDVFTRLSKEVLFTEEDVKFYLAELALALDHLHQLGIVYRDLKPENILLDEIGHIKLTDFGLSKESVDQEKKAYSFCGTVEYMAPEVVNRRGHSQSADWWSYGVLMFEMLTGTLPFQGKDRNETMNMILKAKLGMPQFLSAEAQSLLRMLFKRNPANRLGSEGVEEIKRHLFFANIDWDKLYKREVQPPFKPASGKPDDTFCFDPEFTAKTPKDSPGLPASANAHQLFKGFSFVATSIAEEYKITPITSANVLPIVQINGNAAQFGEVYELKEDIGVGSYSVCKRCIHATTNMEFAVKIIDKSKRDPSEEIEILMRYGQHPNIITLKDVFDDGRYVYLVTDLMKGGELLDRILKQKCFSEREASDILYVISKTVDYLHCQGVVHRDLKPSNILYMDESASADSIRICDFGFAKQLRGENGLLLTPCYTANFVAPEVLMQQGYDAACDIWSLGVLFYTMLAGYTPFANGPNDTPEEILLRIGNGKFSLSGGNWDNISDGAKDLLSHMLHMDPHQRYTAEQILKHSWITHRDQLPNDQPKRNDVSHVVKGAMVATYSALTHKTFQPVLEPVAASSLAQRRSMKKRTSTGL

SEQ ID NO: 74449 - protein, 745 aa, Homo sapiens
  Payload ID: 14714
  Gene Symbol: RPS6KA6
  Gene Name: ribosomal protein S6 kinase, 90kDa, polypeptide 6
  Uniprot ID: Q9UK32
  ENSP ID: ENSP00000483896
MGLSTSAIWKNTRVEIVNPYEVKRKVKVNGLKMVDEPMEEGEADSCHDEGVVKEIPITHHVKEGYEKADPAQFELLKVLGQGSFGKVFLVRKKTGPDAGQLYAMKVLKKASLKVRDRVRTKMERDILVEVNHPFIVKLHYAFQTEGKLYLILDFLRGGDVFTRLSKEVLFTEEDVKFYLAELALALDHLHQLGIVYRDLKPENILLDEIGHIKLTDFGLSKESVDQEKKAYSFCGTVEYMAPEVVNRRGHSQSADWWSYGVLMFEMLTGTLPFQGKDRNETMNMILKAKLGMPQFLSAEAQSLLRMLFKRNPANRLGSEGVEEIKRHLFFANIDWDKLYKREVQPPFKPASGKPDDTFCFDPEFTAKTPKDSPGLPASANAHQLFKGFSFVATSIAEEYKITPITSANVLPIVQINGNAAQFGEVYELKEDIGVGSYSVCKRCIHATTNMEFAVKIIDKSKRDPSEEIEILMRYGQHPNIITLKDVFDDGRYVYLVTDLMKGGELLDRILKQKCFSEREASDILYVISKTVDYLHCQGVVHRDLKPSNILYMDESASADSIRICDFGFAKQLRGENGLLLTPCYTANFVAPEVLMQQGYDAACDIWSLGVLFYTMLAGYTPFANGPNDTPEEILLRIGNGKFSLSGGNWDNISDGAKDLLSHMLHMDPHQRYTAEQILKHSWITHRDQLPNDQPKRNDVSHVVKGAMVATYSALTHKTFQPVLEPVAASSLAQRRSMKKRTSTGL

SEQ ID NO: 74450 - protein, 549 aa, Homo sapiens
  Payload ID: 14715
  Gene Symbol: RPS6KL1
  Gene Name: ribosomal protein S6 kinase-like 1
  Uniprot ID: Q9Y6S9
  ENSP ID: ENSP00000346644
MSLVACECLPSPGLEPEPCSRARSQAHVYLEQIRNRVALGVPDMTKRDYLVDAATQIRLALERDVSEDYEAAFNHYQNGVDVLLRGIHVDPNKERREAVKLKITKYLRRAEEIFNCHLQRPLSSGASPSAGFSSLRLRPIRTLSSAVEQLRGCRVVGVIEKVQLVQDPATGGTFVVKSLPRCHMVSRERLTIIPHGVPYMTKLLRYFVSEDSIFLHLEHVQGGTLWSHLLSQAHSRHSGLSSGSTQERMKAQLNPHLNLLTPARLPSGHAPGQDRIALEPPRTSPNLLLAGEAPSTRPQREAEGEPTARTSTSGSSDLPKAPGGHLHLQARRAGQNSDAGPPRGLTWVPEGAGPVLGGCGRGMDQSCLSADGAGRGCGRATWSVREEQVKQWAAEMLVALEALHEQGVLCRDLHPGNLLLDQAGHIRLTYFGQWSEVEPQCCGEAVDNLYSAPEVGGISELTEACDWWSFGSLLYELLTGMALSQSHPSGIQAHTQLQLPEWLSRPAASLLTELLQFEPTRRLGMGEGGVSKLKSHPFFSTIQWSKLVG

SEQ ID NO: 74451 - protein, 549 aa, Homo sapiens; identical to SEQ ID NO: 74450
  Payload ID: 14715
  Gene Symbol: RPS6KL1
  Gene Name: ribosomal protein S6 kinase-like 1
  Uniprot ID: Q9Y6S9
  ENSP ID: ENSP00000450567

SEQ ID NO: 74452 - protein, 541 aa, Homo sapiens
  Payload ID: 14715
  Gene Symbol: RPS6KL1
  Gene Name: ribosomal protein S6 kinase-like 1
  Uniprot ID: Q9Y6S9
  ENSP ID: ENSP00000450660
MSLVACECLPSPGLEPEPCSRARSQAHVYLEQIRNRVALGVPDMTKRDYLVDAATQIRLALERDVSEDYEAAFNHYQNGVDVLLRGIHVDPNKERREAVKLKITKYLRRAEEIFNCHLQRPLSSGASPSAVQLVQDPATGGTFVVKSLPRCHMVSRERLTIIPHGVPYMTKLLRYFVSEDSIFLHLEHVQGGTLWSHLLSQAHSRHSGLSSGSTQERMKAQLNPHLNLLTPARLPSGHAPGQDRIALEPPRTSPNLLLAGEAPSTRPQREAEGEPTARTSTSGSSDLPKAPGGHLHLQARRAGQNSDAGPPRGLTWVPEGAGPVLGGCGRGMDQSCLSADGAGRGCGRATWSVREEQVKQWAAEMLVALEALHEQGVLCRDLHPGNLLLDQAGHIRLTYFGQWSEVEPQCCGEAVDNLYSAPEVGGISELTEACDWWSFGSLLYELLTGMALSQSHPSGIQAHTQLQLPEWLSRPAASLLTELLQFEPTRRLGMGEGGVSKLKSHPFFSTIQWSKLVGTSLETHLRTLIHWLSGPKPDCPG

SEQ ID NO: 74453 - protein, 157 aa, Homo sapiens
  Payload ID: 14715
  Gene Symbol: RPS6KL1
  Gene Name: ribosomal protein S6 kinase-like 1
  ENSP ID: ENSP00000450846
TIIPHGVPYMTKLLRYFVSEDSIFLHLEHVQGHIRLTYFGQWSEVEPQCCGEAVDNLYSAPEVGGISELTEACDWWSFGSLLYELLTGMALSQSHPSGIQAHTQLQLPEWLSRPAASLLTELLQFEPTRRLGMGEGGVSKLKSHPFFSTIQWSKLVG

SEQ ID NO: 74454 - protein, 45 aa, Homo sapiens
  Payload ID: 14715
  Gene Symbol: RPS6KL1
  Gene Name: ribosomal protein S6 kinase-like 1
  ENSP ID: ENSP00000450968
ALSQSHPSGIQAHTQLQLPEWLSRPAASLLTEVRCSPARGSSCLA

SEQ ID NO: 74455 - protein, 104 aa, Homo sapiens
  Payload ID: 14715
  Gene Symbol: RPS6KL1
  Gene Name: ribosomal protein S6 kinase-like 1
  ENSP ID: ENSP00000451152
  MOD_RES (1)..(1): Any amino acid
XIFLHLEHVQGHIRLTYFGQWSEVEPQCCGEAVDNLYSAPEVGGISELTEACDWWSFGSLLYELLTGMLLQFEPTRRLGMGEGGVSKLKSHPFFSTIQWSKLVG

SEQ ID NO: 74456 - protein, 8 aa, Homo sapiens
  Payload ID: 14715
  Gene Symbol: RPS6KL1
  Gene Name: ribosomal protein S6 kinase-like 1
  ENSP ID: ENSP00000451338
MSLVACEC

SEQ ID NO: 74457 - protein, 74 aa, Homo sapiens
  Payload ID: 14715
  Gene Symbol: RPS6KL1
  Gene Name: ribosomal protein S6 kinase-like 1
  ENSP ID: ENSP00000451795
  MOD_RES (1)..(1): Any amino acid
XSVREEQVKQWAAEMLVALEALHEQGVLCRDLHPGNLLLDQAVVRGGAPVLRGGRGQSLQRPRGGWDFRADGSL

SEQ ID NO: 74458 - protein, 48 aa, Homo sapiens
  Payload ID: 14715
  Gene Symbol: RPS6KL1
  Gene Name: ribosomal protein S6 kinase-like 1
  ENSP ID: ENSP00000451986
  MOD_RES (1)..(1): Any amino acid
XAASLLTELLQFEPTRRLGMGEGGVSKLKSHPFFSTIQWSKLVGQQTR

SEQ ID NO: 74459 - protein, 549 aa, Homo sapiens; identical to SEQ ID NO: 74450
  Payload ID: 14715
  Gene Symbol: RPS6KL1
  Gene Name: ribosomal protein S6 kinase-like 1
  Uniprot ID: Q9Y6S9
  ENSP ID: ENSP00000452027

SEQ ID NO: 74460 - protein, 194 aa, Homo sapiens [sequence omitted]

SEQ ID NO: 74461 - protein, 194 aa, Homo sapiens [sequence omitted]

SEQ ID NO: 74462 - protein, 194 aa, Homo sapiens [sequence omitted]

SEQ ID NO: 74463 - protein, 187 aa, Homo sapiens
  Payload ID: 14716
  Gene Symbol: RPS7
  Gene Name: ribosomal protein S7
  ENSP ID: ENSP00000385729
MFSSSAKIVKPNGEKPDEFESGISQALLELEMNSDLKAQLRELNITAAKEIEVGGGRKAIIIFVPVPQLKSFQKIQVRLVRELEKKFSGKHVVFIAQRRILPKPTRKSRTKNKQKRPRSRTLTAVHDAILEDLVFPSEIVGKRIRVKLDGSRLIKVHLDKAQQNNVEHKVIGQHFIMERFSHSESGF

SEQ ID NO: 74464 - protein, 188 aa, Homo sapiens
  Payload ID: 14717
  Gene Symbol: RPS8
  Gene Name: ribosomal protein S8
  ENSP ID: ENSP00000361283
MGISRDNWHKRRKTGGKRKPYHKKRKYELGRPAANTKIGPRRIHTVRVRGGCTRKTRIIDVVYNASNNELVRTKTLVKNCIVLIDSTPYRQWYESHYALPLGRKKGAKLTPEEEEILNKKRSKKIQKKYDERKKNAKISSLLEEQFQQGKLLACIASRPGQCGRADGYVLEGKELEFYLRKIKARKGK

SEQ ID NO: 74465 - protein, 208 aa, Homo sapiens [sequence omitted]

SEQ ID NO: 74466 - protein, 194 aa, Homo sapiens [sequence omitted]

SEQ ID NO: 74467 - protein, 79 aa, Homo sapiens
  Payload ID: 14718
  Gene Symbol: RPS9
  Gene Name: ribosomal protein S9
  ENSP ID: ENSP00000375631
MPVARSWVCRKTYVTPRRPFEKSRLDQELKLIGEYGLRNKREVWRVKFTLAKIRKAARELLTLDEKDPRRLFEGSASRW

SEQ ID NO: 74468 - protein, 194 aa, Homo sapiens [sequence omitted]

SEQ ID NO: 74469 - protein, 194 aa, Homo sapiens [sequence omitted]

SEQ ID NO: 74470 - protein, 139 aa, Homo sapiens; identical to SEQ ID NO: 1038
  Payload ID: 14718
  Gene Symbol: RPS9
  Gene Name: ribosomal protein S9
  ENSP ID: ENSP00000383937

SEQ ID NO: 74471 - protein, 139 aa, Homo sapiens; identical to SEQ ID NO: 1038
  Payload ID: 14718
  Gene Symbol: RPS9
  Gene Name: ribosomal protein S9
  ENSP ID: ENSP00000391823

SEQ ID NO: 74472 - protein, 77 aa, Homo sapiens
  Payload ID: 14718
  Gene Symbol: RPS9
  Gene Name: ribosomal protein S9
  ENSP ID: ENSP00000399623
MPVARSWVCRKTYVTPRRPFEKSRLDQELKLIGEYGLRNKREVWRVKFTLAKIRKAARELLTLDEKDPRRLFEGGSL

SEQ ID NO: 74473 - protein, 139 aa, Homo sapiens; identical to SEQ ID NO: 1038
  Payload ID: 14718
  Gene Symbol: RPS9
  Gene Name: ribosomal protein S9
  ENSP ID: ENSP00000406159

SEQ ID NO: 74474 - protein, 156 aa, Homo sapiens
  Payload ID: 14718
  Gene Symbol: RPS9
  Gene Name: ribosomal protein S9
  ENSP ID: ENSP00000414314
MPVARSWVCRKTYVTPRRPFEKSRLDQELKLIGEYGLRNKREVWRVKFTLAKIRKAARELLTLDEKDPRRLFEGNALLRRLVRIGVLDEGKMKLDYILGLKIEDFLERRLQTQVFKLGLAKSIHHARVLIRQRHIRYHLGWAPESSSTCPSDGCPH

SEQ ID NO: 74475 - protein, 139 aa, Homo sapiens; identical to SEQ ID NO: 1038
  Payload ID: 14718
  Gene Symbol: RPS9
  Gene Name: ribosomal protein S9
  ENSP ID: ENSP00000479899

SEQ ID NO: 74476 - protein, 194 aa, Homo sapiens [sequence omitted]

SEQ ID NO: 74477 - protein, 194 aa, Homo sapiens [sequence omitted]

SEQ ID NO: 74478 - protein, 156 aa, Homo sapiens; identical to SEQ ID NO: 74474
  Payload ID: 14718
  Gene Symbol: RPS9
  Gene Name: ribosomal protein S9
  ENSP ID: ENSP00000480805

SEQ ID NO: 74479 - protein, 77 aa, Homo sapiens; identical to SEQ ID NO: 74472
  Payload ID: 14718
  Gene Symbol: RPS9
  Gene Name: ribosomal protein S9
  ENSP ID: ENSP00000480878

SEQ ID NO: 74480 - protein, 194 aa, Homo sapiens [sequence omitted]

SEQ ID NO: 74481 - protein, 194 aa, Homo sapiens [sequence omitted]

SEQ ID NO: 74482 - protein, 194 aa, Homo sapiens [sequence omitted]

SEQ ID NO: 74483 - protein, 194 aa, Homo sapiens [sequence omitted]

SEQ ID NO: 74484 - protein, 79 aa, Homo sapiens; identical to SEQ ID NO: 74467
  Payload ID: 14718
  Gene Symbol: RPS9
  Gene Name: ribosomal protein S9
  ENSP ID: ENSP00000481941

SEQ ID NO: 74485 - protein, 194 aa, Homo sapiens [sequence omitted]

SEQ ID NO: 74486 - protein, 194 aa, Homo sapiens [sequence omitted]

SEQ ID NO: 74487 - protein, 139 aa, Homo sapiens; identical to SEQ ID NO: 1038
  Payload ID: 14718
  Gene Symbol: RPS9
  Gene Name: ribosomal protein S9
  ENSP ID: ENSP00000482953

SEQ ID NO: 74488 - protein, 194 aa, Homo sapiens [sequence omitted]

SEQ ID NO: 74489 - protein, 139 aa, Homo sapiens; identical to SEQ ID NO: 1038
  Payload ID: 14718
  Gene Symbol: RPS9
  Gene Name: ribosomal protein S9
  ENSP ID: ENSP00000483297

SEQ ID NO: 74490 - protein, 139 aa, Homo sapiens; identical to SEQ ID NO: 1038
  Payload ID: 14718
  Gene Symbol: RPS9
  Gene Name: ribosomal protein S9
  ENSP ID: ENSP00000485771

SEQ ID NO: 74491 - protein, 139 aa, Homo sapiens; identical to SEQ ID NO: 1038
  Payload ID: 14718
  Gene Symbol: RPS9
  Gene Name: ribosomal protein S9
  ENSP ID: ENSP00000486703

SEQ ID NO: 74492 - protein, 139 aa, Homo sapiens; identical to SEQ ID NO: 1038
  Payload ID: 14718
  Gene Symbol: RPS9
  Gene Name: ribosomal protein S9
  ENSP ID: ENSP00000486704

SEQ ID NO: 74493 - protein, 139 aa, Homo sapiens; identical to SEQ ID NO: 1038
  Payload ID: 14718
  Gene Symbol: RPS9
  Gene Name: ribosomal protein S9
  ENSP ID: ENSP00000487085

SEQ ID NO: 74494 - protein, 295 aa, Homo sapiens [sequence omitted]

SEQ ID NO: 74495 - protein, 300 aa, Homo sapiens
  Payload ID: 14719
  Gene Symbol: RPSA
  Gene Name: ribosomal protein SA
  ENSP ID: ENSP00000389351
MSGALDVLQMKEEDVLKFLAAGTHLGGTNLDFQMEQYIYKRKSDGIYIINLKRTWEKLLLAARAIVAIENPADVSVISSRNTGQVCGTVRAVLKFAAATGATPIAGRFTPGTFTNQIQAAFREPRLLVVTDPRADHQPLTEASYVNLPTIALCNTDSPLRYVDIAIPCNNKGAHSVGLMWWMLAREVLRMRGTISREHPWEVMPDLYFYRDPEEIEKEEQAAAEKAVTKEEFQGEWTAPAPEFTATQPEVADWSEGVQVPSVPIQQFPTEDWSAQPATEDWSAAPTAQATEWVGATTDWS

SEQ ID NO: 74496 - protein, 116 aa, Homo sapiens
  Payload ID: 14719
  Gene Symbol: RPSA
  Gene Name: ribosomal protein SA
  ENSP ID: ENSP00000396716
MSGALDVLQMKEEDVLKFLAAGTHLGGTNLDFQMEQYIYKRKSDGIYIINLKRTWEKLLLAARAIVAIENPADVSVISSRNTGQRAVLKFAAATGATPIAGRFTPGTFTNQIQAAF

SEQ ID NO: 74497 - protein, 263 aa, Homo sapiens
  Payload ID: 14719
  Gene Symbol: RPSA
  Gene Name: ribosomal protein SA
  ENSP ID: ENSP00000410848
MSGALDVLQMKEEDVLKFLAAGTHLGGTNLDFQMEQYIYKRKSDGIYIINLKRTWEKLLLAARAIVAIENPADVSVISSRNTGQRAVLKFAAATGATPIAGRFTPGTFTNQIQAAFREPRLLVVTDPRADHQPLTEASYVNLPTIALCNTDSPLRYVDIAIPCNNKGAHSVGLMWWMLAREVLRMRGTISREHPWEVMPDLYFYRDPEEIEKEEQAAAEKAVTKEEFQGEWTAPAPEFTATQPEVADWSEGVQVPSVPIQQFP

SEQ ID NO: 74498 - protein, 317 aa, Homo sapiens
  Payload ID: 14720
  Gene Symbol: RPLP0
  Gene Name: ribosomal protein, large, P0
  Uniprot ID: P05388
  ENSP ID: ENSP00000339027
MPREDRATWKSNYFLKIIQLLDDYPKCFIVGADNVGSKQMQQIRMSLRGKAVVLMGKNTMMRKAIRGHLENNPALEKLLPHIRGNVGFVFTKEDLTEIRDMLLANKVPAAARAGAIAPCEVTVPAQNTGLGPEKTSFFQALGITTKISRGTIEILSDVQLIKTGDKVGASEATLLNMLNISPFSFGLVIQQVFDNGSIYNPEVLDITEETLHSRFLEGVRNVASVCLQIGYPTVASVPHSIINGYKRVLALSVETDYTFPLAEKVKAFLADPSAFVAAAPVAAATTAAPAAAAAPAKVEAKEESEESDEDMGFGLFD

SEQ ID NO: 74499 - protein, 255 aa, Homo sapiens
  Payload ID: 14720
  Gene Symbol: RPLP0
  Gene Name: ribosomal protein, large, P0
  Uniprot ID: P05388
  ENSP ID: ENSP00000366471
MPREDRATWKSNYFLKIIQLLDDYPKCFIVGADNVGSKQMQQIRMSLRGKAVVLMGKNTMMRKAIRGHLENNPALEKLLPHIRGNVGFVFTKEDLTEIRDMLLANKVPAAARAGAIAPCEVTVPAQNTGLGPEKTSFFQALGITTKISRGTIEILGVRNVASVCLQIGYPTVASVPHSIINGYKRVLALSVETDYTFPLAEKVKAFLADPSAFVAAAPVAAATTAAPAAAAAPAKVEAKEESEESDEDMGFGLFD

SEQ ID NO: 74500 - protein, 317 aa, Homo sapiens; identical to SEQ ID NO: 74498
  Payload ID: 14720
  Gene Symbol: RPLP0
  Gene Name: ribosomal protein, large, P0
  Uniprot ID: P05388
  ENSP ID: ENSP00000376299

SEQ ID NO: 74501 - protein, 107 aa, Homo sapiens
  Payload ID: 14720
  Gene Symbol: RPLP0
  Gene Name: ribosomal protein, large, P0
  ENSP ID: ENSP00000446777
MKSSLPQGVRNVASVCLQIGYPTVASVPHSIINGYKRVLALSVETDYTFPLAEKVKAFLADPSAFVAAAPVAAATTAAPAAAAAPAKVEAKEESEESDEDMGFGLFD

SEQ ID NO: 74502 - protein, 246 aa, Homo sapiens
  Payload ID: 14720
  Gene Symbol: RPLP0
  Gene Name: ribosomal protein, large, P0
  ENSP ID: ENSP00000447311
MPREDRATWKSNYFLKIIQLLDDYPKCFIVGADNVGSKQMQQIRMSLRGKAVVLMGKNTMMRKAIRGHLENNPALEKLLPHIRGNVGFVFTKEDLTEIRDMLLANKSDVQLIKTGDKVGASEATLLNMLNISPFSFGLVIQQVFDNGSIYNPEVLDITEETLHSRFLEGVRNVASVCLQIGYPTVASVPHSIINGYKRVLALSVETDYTFPLAEKVKAFLADPSAFVAAAPVAAATTAAPAAAAAP

SEQ ID NO: 74503 - protein, 247 aa, Homo sapiens
  Payload ID: 14720
  Gene Symbol: RPLP0
  Gene Name: ribosomal protein, large, P0
  ENSP ID: ENSP00000448046
MPREDRATWKSNYFLKIIQLLDDYPKCFIVGADNVGSKQMQQIRMSLRGKAVVLMGKNTMMRKAIRGHLENNPALEKLLPHIRGNVGFVFTKEDLTEIRDMLLANKVPAAARAGAIAPCEVTVPAQNTGLGPEKTSFFQALGITTKISRGTIEILSDVQLIKTGDKVGASEATLLNMLNISPFSFGLVIQQVFDNGSIYNPEVLDITEETLHSRFLEGVRNVASVCLQIGYPTVASVPHSIINGYKR

SEQ ID NO: 74504 - protein, 121 aa, Homo sapiens
  Payload ID: 14720
  Gene Symbol: RPLP0
  Gene Name: ribosomal protein, large, P0
  ENSP ID: ENSP00000448223
MPREDRATWKSNYFLKIIQLLDDYPKCFIVGADNVGSKQMQQIRMSLRGKAVVLMGKNTMMRKAIRGHLENNPALEKLLPHIRGNVGFVFTKEDLTEIRDMLLANKLLPVLVPLPHVKSLC

SEQ ID NO: 74505 - protein, 156 aa, Homo sapiens
  Payload ID: 14720
  Gene Symbol: RPLP0
  Gene Name: ribosomal protein, large, P0
  ENSP ID: ENSP00000448639
MPREDRATWKSNYFLKIIQLLDDYPKCFIVGADNVGSKQMQQIRMSLRGKAVVLMGKNTMMRKAIRGHLENNPALEKLLPHIRGNVGFVFTKEDLTEIRDMLLANKVPAAARAGAIAPCEVTVPAQNTGLGPEKTSFFQALGVYCPTIIWFRVMCS

SEQ ID NO: 74506 - protein, 57 aa, Homo sapiens
  Payload ID: 14720
  Gene Symbol: RPLP0
  Gene Name: ribosomal protein, large, P0
  ENSP ID: ENSP00000448919
MPREDRATWKSNYFLKIIVSAGNYWMIIRNVSLWEQTMWAPSRCSRSACPFAGRLWC

SEQ ID NO: 74507 - protein, 281 aa, Homo sapiens
  Payload ID: 14720
  Gene Symbol: RPLP0
  Gene Name: ribosomal protein, large, P0
  ENSP ID: ENSP00000449205
MPREDRATWKSNYFLKIIQLLDDYPKCFIVGADNVGSKQMQQIRMSLRGKAVVLMGKNTMMRKAIRGHLENNPALEKLLPHIRGNVGFVFTKEDLTEIRDMLLANKVPAAARAGAIAPCEVTVPAQNTGLGPEKTSFFQALGITTKISRGTIEILVFDNGSIYNPEVLDITEETLHSRFLEGVRNVASVCLQIGYPTVASVPHSIINGYKRVLALSVETDYTFPLAEKVKAFLADPSAFVAAAPVAAATTAAPAAAAAPAKVEAKEESEESDEDMGFGLFD

SEQ ID NO: 74508 - protein, 317 aa, Homo sapiens; identical to SEQ ID NO: 74498
  Payload ID: 14720
  Gene Symbol: RPLP0
  Gene Name: ribosomal protein, large, P0
  Uniprot ID: P05388
  ENSP ID: ENSP00000449328

SEQ ID NO: 74509 - protein, 111 aa, Homo sapiens
  Payload ID: 14720
  Gene Symbol: RPLP0
  Gene Name: ribosomal protein, large, P0
  ENSP ID: ENSP00000449765
MAFEQLLDDYPKCFIVGADNVGSKQMQQIRMSLRGKAVVLMGKNTMMRKAIRGHLENNPALEKLLPHIRGNVGFVFTKEDLTEIRDMLLANKVPAAARAGAIAPCEVTVPA

SEQ ID NO: 74510 - protein, 244 aa, Homo sapiens
  Payload ID: 14720
  Gene Symbol: RPLP0
  Gene Name: ribosomal protein, large, P0
  ENSP ID: ENSP00000449854
MPREDRATWKSNYFLKIIQMQQIRMSLRGKAVVLMGKNTMMRKAIRGHLENNPALEKLLPHIRGNVGFVFTKEDLTEIRDMLLANKVPAAARAGAIAPCEVTVPAQNTGLGPEKTSFFQALGITTKISRGTIEILSDVQLIKTGDKVGASEATLLNMLNISPFSFGLVIQQVFDNGSIYNPEVLDITEETLHSRFLEGVRNVASVCLQIGYPTVASVPHSIINGYKRVLALSVETDYTFPLAEK

SEQ ID NO: 74511 - protein, 166 aa, Homo sapiens
  Payload ID: 14720
  Gene Symbol: RPLP0
  Gene Name: ribosomal protein, large, P0
  ENSP ID: ENSP00000450019
MPREDRATWKSNYFLKIIQLLDDYPKCFIVGADNVGSKQMQQIRMSLRGKAVVLMGKNTMMRKAIRGHLENNPALEKLLPHIRGNVGFVFTKEDLTEIRDMLLANKVPAAARAGAIAPCEVTVPAQNTGLGPEKTSFFQALGITTKISRGTIEILVFTAPLLSGSE

SEQ ID NO: 74512 - protein, 153 aa, Homo sapiens
  Payload ID: 14720
  Gene Symbol: RPLP0
  Gene Name: ribosomal protein, large, P0
  ENSP ID: ENSP00000450121
MAFEQLLDDYPKCFIVGADNVGSKQMQQIRMSLRGKAVVLMGKNTMMRKAIRGHLENNPALEKLLPHIRGNVGFVFTKEDLTEIRDMLLANKVPAAARAGAIAPCEVTVPAQNTGLGPEKTSFFQALGITTKISRGTIEILSDVQLIKTGDKV

SEQ ID NO: 74513 - protein, 142 aa, Homo sapiens
  Payload ID: 14720
  Gene Symbol: RPLP0
  Gene Name: ribosomal protein, large, P0
  ENSP ID: ENSP00000450222
MPREDRATWKSNYFLKIIQLLDDYPKCFIVGADNVGSKQMQQIRMSLRGKAVVLMGKNTMMRKAIRGHLENNPALEKLLPHIRGNVGFVFTKEDLTEIRDMLLANKVPAAARAGAIAPCEVTVPAQNTGLGPEKTSFFQALE

SEQ ID NO: 74514 - protein, 114 aa, Homo sapiens
  Payload ID: 14721
  Gene Symbol: RPLP1
  Gene Name: ribosomal protein, large, P1
  Uniprot ID: P05386
  ENSP ID: ENSP00000346037
MASVSELACIYSALILHDDEVTVTEDKINALIKAAGVNVEPFWPGLFAKALANVNIGSLICNVGAGGPAPAAGAAPAGGPAPSTAAAPAEEKKVEAKKEESEESDDDMGFGLFD

SEQ ID NO: 74515 - protein, 89 aa, Homo sapiens
  Payload ID: 14721
  Gene Symbol: RPLP1
  Gene Name: ribosomal protein, large, P1
  Uniprot ID: P05386
  ENSP ID: ENSP00000350437
MASVSELACIYSALILHDDEVTVTALANVNIGSLICNVGAGGPAPAAGAAPAGGPAPSTAAAPAEEKKVEAKKEESEESDDDMGFGLFD

SEQ ID NO: 74516 - protein, 54 aa, Homo sapiens
  Payload ID: 14721
  Gene Symbol: RPLP1
  Gene Name: ribosomal protein, large, P1
  ENSP ID: ENSP00000453067
MASVSELACIYSALILHDDEVTVTLRRRKWKQRKKNPRSLMMTWALVFLTKPLL

SEQ ID NO: 74517 - protein, 115 aa, Homo sapiens
  Payload ID: 14722
  Gene Symbol: RPLP2
  Gene Name: ribosomal protein, large, P2
  Uniprot ID: P05387
  ENSP ID: ENSP00000322419
MRYVASYLLAALGGNSSPSAKDIKKILDSVGIEADDDRLNKVISELNGKNIEDVIAQGIGKLASVPAGGAVAVSAAPGSAAPAAGSAPAAAEEKKDEKKEESEESDDDMGFGLFD

SEQ ID NO: 74518 - protein, 115 aa, Homo sapiens; identical to SEQ ID NO: 74517
  Payload ID: 14722
  Gene Symbol: RPLP2
  Gene Name: ribosomal protein, large, P2
  Uniprot ID: P05387
  ENSP ID: ENSP00000431240

SEQ ID NO: 74519 - protein, 92 aa, Homo sapiens
  Payload ID: 14722
  Gene Symbol: RPLP2
  Gene Name: ribosomal protein, large, P2
  ENSP ID: ENSP00000433443
  MOD_RES (1)..(1): Any amino acid
XGGNSSPSAKDIKKILDSVISELNGKNIEDVIAQGIGKLASVPAGGAVAVSAAPGSAAPAAGSAPAAAEEKKDEKKEESEESDDDMGFGLFD

SEQ ID NO: 74520 - protein, 475 aa, Homo sapiens
  Payload ID: 14723
  Gene Symbol: RRNAD1
  Gene Name: ribosomal RNA adenine dimethylase domain containing 1
  Uniprot ID: Q96FB5
  ENSP ID: ENSP00000357199
MPGISARGLSHEGRKQLAVNLTRVLALYRSILDAYIIEFFTDNLWDTLPCSWQEALDGLKPPQLATMLLGMPGEGEVVRYRSVWPLTLLALKSTACALAFTRMPGFQTPSEFLENPSQSSRLTAPFRKHVRPKKQHEIRRLGELVKKLSDFTGCTQVVDVGSGQGHLSRFMALGLGLMVKSIEGDQRLVERAQRLDQELLQALEKEEKRNPQVVQTSPRHSPHHVVRWVDPTALCEELLLPLENPCQGRARLLLTGLHACGDLSVALLRHFSCCPEVVALASVGCCYMKLSDPGGYPLSQWVAGLPGYELPYRLREGACHALEEYAERLQKAGPGLRTHCYRAALETVIRRARPELRRPGVQGIPRVHELKIEEYVQRGLQRVGLDPQLPLNLAALQAHVAQENRVVAFFSLALLLAPLVETLILLDRLLYLQEQGFHAELLPIFSPELSPRNLVLVATKMPLGQALSVLETEDS

SEQ ID NO: 74521 - protein, 277 aa, Homo sapiens
  Payload ID: 14723
  Gene Symbol: RRNAD1
  Gene Name: ribosomal RNA adenine dimethylase domain containing 1
  Uniprot ID: Q96FB5
  ENSP ID: ENSP00000357201
MPGISARGLSHEGRKQLAVNLTRVLALYRSILDAYIIEFFTDNLWDTLPCSWQEALDGLKPPQLATMLLGMPGEGEVVRYRSVWPLTLLALKSTACALAFTRMPGFQTPSEFLENPSQSSRLTAPFRKHVRPKKQHEIRRLGELVKKLSDFTGCTQVVDVGSGQGHLSRFMALGLGLMVKSIEGDQRLVERAQRLDQELLQALEKEEKRNPQICAAGATASGARSPAATESGCPSGPRGPGEPCGGLLQPGSTACPTGGDAYSTGPAAVPSGTGFPC

SEQ ID NO: 74522 - protein, 100 aa, Homo sapiens
  Payload ID: 14723
  Gene Symbol: RRNAD1
  Gene Name: ribosomal RNA adenine dimethylase domain containing 1
  ENSP ID: ENSP00000429053
MPGFQTPSEFLENPSQSSRLTAPFRKHVRPKKQHEIRRLGELVKKLSDFTGCTQVVDVGSGQGHLSRFMALGLGLMVKSIEGDQRLVERAQRLDQELLQA

SEQ ID NO: 74523 - protein, 94 aa, Homo sapiens
  Payload ID: 14723
  Gene Symbol: RRNAD1
  Gene Name: ribosomal RNA adenine dimethylase domain containing 1
  ENSP ID: ENSP00000429389
MPGISARGLSHEGRKQLAVNLTRVLALYRSILDAYIIVQVSVATHPAGPEVHGVCPGLYPDAWLSDPLRIPGEPQPELPTNSSIPETCQAQEAA

SEQ ID NO: 74524 - protein, 345 aa, Homo sapiens
  Payload ID: 14723
  Gene Symbol: RRNAD1
  Gene Name: ribosomal RNA adenine dimethylase domain containing 1
  ENSP ID: ENSP00000429756
MPGISARGLSHEGRKQLAVNLTRVLALYRSILDAYIIEFFTDNLWDTLPCSWQEALDGLKPPQLATMLLGMPGEGEVVRYRSVWPLTLLALKSTACALAFTRMPGFQTPSEFLENPSQSSRLTAPFRKHVRPKKQHEIRRLGEGHLSRFMALGLGLMVKSIEGDQRLVERAQRLDQELLQALEKEEKRNPQVVQTSPRHSPHHVVRWVDPTALCEELLLPLENPCQGRARLLLTGLHACGDLSVALLRHFSCCPEVVALASVGCCYMKLSDPGGYPLSQWVAGLPGYELPYRLREGACHALEEYAERLQKAGPGLRTHCYRAALETVIRRARPELRRPGVQGIPR

SEQ ID NO: 74525 - protein, 139 aa, Homo sapiens
  Payload ID: 14723
  Gene Symbol: RRNAD1
  Gene Name: ribosomal RNA adenine dimethylase domain containing 1
  ENSP ID: ENSP00000429800
  MOD_RES (1)..(1): Any amino acid
XNPSQSSRLTAPFRKHVRPKKQHEIRRLGELVKKLSDFTGCTQVVDVGSGQGHLSRFMALGLGLMVKSIEGDQRLVERAQRLDQELLQALEKEEKRNPQVVQTSPRHSPHHVVRYVQRGLQRVGLDPQLPLNLAALQAH

SEQ ID NO: 74526 - protein, 154 aa, Homo sapiens
  Payload ID: 14723
  Gene Symbol: RRNAD1
  Gene Name: ribosomal RNA adenine dimethylase domain containing 1
  ENSP ID: ENSP00000430787
MPGFQTPSEFLENPSQSSRLTAPFRKHVRPKKQHEIRRLGEGHLSRFMALGLGLMVKSIEGDQRLVERAQRLDQELLQALEKEEKRNPQICAAGATASGARSPAATESGCPSGPRGPGEPCGGLLQPGSTACPTGGDAYSTGPAAVPSGTGFPC

SEQ ID NO: 74527 - protein, 461 aa, Homo sapiens
  Payload ID: 14724
  Gene Symbol: RRP1
  Gene Name: ribosomal RNA processing 1
  Uniprot ID: P56182
  ENSP ID: ENSP00000417464
MVSRVQLPPEIQLAQRLAGNEQVTRDRAVRKLRKYIVARTQRAAGGFTHDELLKVWKGLFYCMWMQDKPLLQEELGRTISQLVHAFQTTEAQHLFLQAFWQTMNREWTGIDRLRLDKFYMLMRMVLNESLKVLKMQGWEERQIEELLELLMTEILHPSSQAPNGVKSHFIEIFLEELTKVGAEELTADQNLKFIDPFCRIAARTKDSLVLNNITRGIFETIVEQAPLAIEDLLNELDTQDEEVASDSDESSEGGERGDALSQKRSEKPPAGSICRAEPEAGEEQAGDDRDSGGPVLQFDYEAVANRLFEMASRQSTPSQNRKRLYKVIRKLQDLAGGIFPEDEIPEKACRRLLEGRRQKKTKKQKRLLRLQQERGKGEKEPPSPGMERKRSRRRGVGADPEARAEAGEQPGTAERALLRDQPRGRGQRGARQRRRTPRPLTSARAKAANVQEPEKKKKRRE

SEQ ID NO: 74528 - protein, 45 aa, Homo sapiens
  Payload ID: 14724
  Gene Symbol: RRP1
  Gene Name: ribosomal RNA processing 1
  ENSP ID: ENSP00000426898
MVSRVQLPPEIQLAQRLAGNEQVTRDRAVRKLRKYIVARTQRAAD

SEQ ID NO: 74529 - protein, 1197 aa, Homo sapiens
  Payload ID: 14725
  Gene Symbol: RRP12
  Gene Name: ribosomal RNA processing 12 homolog
  Uniprot ID: Q5JTH9
  ENSP ID: ENSP00000324315
MGRSGKLPSGVSAKLKRWKKGHSSDSNPAICRHRQAARSRFFSRPSGRSDLTVDAVKLHNELQSGSLRLGKSEAPETPMEEEAELVLTEKSSGTFLSGLSDCTNVTFSKVQRFWESNSAAHKEICAVLAAVTEVIRSQGGKETETEYFAALIRKAAQHGVCSVLKGSEFMFEKAPAHHPAAISTAKFCIQEIEKSGGSKEATTTLHMLTLLKDLLPCFPEGLVKSCSETLLRVMTLSHVLVTACAMQAFHSLFHARPGLSTLSAELNAQIITALYDYVPSENDLQPLLAWLKVMEKAHINLVRLQWDLGLGHLPRFFGTAVTCLLSPHSQVLTAATQSLKEILKECVAPHMADIGSVTSSASGPAQSVAKMFRAVEEGLTYKFHAAWSSVLQLLCVFFEACGRQAHPVMRKCLQSLCDLRLSPHFPHTAALDQAVGAAVTSMGPEVVLQAVPLEIDGSEETLDFPRSWLLPVIRDHVQETRLGFFTTYFLPLANTLKSKAMDLAQAGSTVESKIYDTLQWQMWTLLPGFCTRPTDVAISFKGLARTLGMAISERPDLRVTVCQALRTLITKGCQAEADRAEVSRFAKNFLPILFNLYGQPVAAGDTPAPRRAVLETIRTYLTITDTQLVNSLLEKASEKVLDPASSDFTRLSVLDLVVALAPCADEAAISKLYSTIRPYLESKAHGVQKKAYRVLEEVCASPQGPGALFVQSHLEDLKKTLLDSLRSTSSPAKRPRLKCLLHIVRKLSAEHKEFITALIPEVILCTKEVSVGARKNAFALLVEMGHAFLRFGSNQEEALQCYLVLIYPGLVGAVTMVSCSILALTHLLFEFKGLMGTSTVEQLLENVCLLLASRTRDVVKSALGFIKVAVTVMDVAHLAKHVQLVMEAIGKLSDDMRRHFRMKLRNLFTKFIRKFGFELVKRLLPEEYHRVLVNIRKAEARAKRHRALSQAAVEEEEEEEEEEEPAQGKGDSIEEILADSEDEEDNEEEERSRGKEQRKLARQRSRAWLKEGGGDEPLNFLDPKVAQRVLATQPGPGRGRKKDHGFKVSADGRLIIREEADGNKMEEEEGAKGEDEEMADPMEDVIIRNKKHQKLKHQKEAEEEELEIPPQYQAGGSGIHRPVAKKAMPGAEYKAKKAKGDVKKKGRPDPYAYIPLNRSKLNRRKKMKLQGQFKGLVKAARRGSQVGHKNRRKDRRP

SEQ ID NO: 74530 - protein, 1297 aa, Homo sapiens
  Payload ID: 14725
  Gene Symbol: RRP12
  Gene Name: ribosomal RNA processing 12 homolog
  Uniprot ID: Q5JTH9
  ENSP ID: ENSP00000360031
MGRSGKLPSGVSAKLKRWKKGHSSDSNPAICRHRQAARSRFFSRPSGRSDLTVDAVKLHNELQSGSLRLGKSEAPETPMEEEAELVLTEKSSGTFLSGLSDCTNVTFSKVQRFWESNSAAHKEICAVLAAVTEVIRSQGGKETETEYFAALMTTMEAVESPESLAAVAYLLNLVLKRVPSPVLIKKFSDTSKAFMDIMSAQASSGSTSVLRWVLSCLATLLRKQDLEAWGYPVTLQVYHGLLSFTVHPKPKIRKAAQHGVCSVLKGSEFMFEKAPAHHPAAISTAKFCIQEIEKSGGSKEATTTLHMLTLLKDLLPCFPEGLVKSCSETLLRVMTLSHVLVTACAMQAFHSLFHARPGLSTLSAELNAQIITALYDYVPSENDLQPLLAWLKVMEKAHINLVRLQWDLGLGHLPRFFGTAVTCLLSPHSQVLTAATQSLKEILKECVAPHMADIGSVTSSASGPAQSVAKMFRAVEEGLTYKFHAAWSSVLQLLCVFFEACGRQAHPVMRKCLQSLCDLRLSPHFPHTAALDQAVGAAVTSMGPEVVLQAVPLEIDGSEETLDFPRSWLLPVIRDHVQETRLGFFTTYFLPLANTLKSKAMDLAQAGSTVESKIYDTLQWQMWTLLPGFCTRPTDVAISFKGLARTLGMAISERPDLRVTVCQALRTLITKGCQAEADRAEVSRFAKNFLPILFNLYGQPVAAGDTPAPRRAVLETIRTYLTITDTQLVNSLLEKASEKVLDPASSDFTRLSVLDLVVALAPCADEAAISKLYSTIRPYLESKAHGVQKKAYRVLEEVCASPQGPGALFVQSHLEDLKKTLLDSLRSTSSPAKRPRLKCLLHIVRKLSAEHKEFITALIPEVILCTKEVSVGARKNAFALLVEMGHAFLRFGSNQEEALQCYLVLIYPGLVGAVTMVSCSILALTHLLFEFKGLMGTSTVEQLLENVCLLLASRTRDVVKSALGFIKVAVTVMDVAHLAKHVQLVMEAIGKLSDDMRRHFRMKLRNLFTKFIRKFGFELVKRLLPEEYHRVLVNIRKAEARAKRHRALSQAAVEEEEEEEEEEEPAQGKGDSIEEILADSEDEEDNEEEERSRGKEQRKLARQRSRAWLKEGGGDEPLNFLDPKVAQRVLATQPGPGRGRKKDHGFKVSADGRLIIREEADGNKMEEEEGAKGEDEEMADPMEDVIIRNKKHQKLKHQKEAEEEELEIPPQYQAGGSGIHRPVAKKAMPGAEYKAKKAKGDVKKKGRPDPYAYIPLNRSKLNRRKKMKLQGQFKGLVKAARRGSQVGHKNRRKDRRP

SEQ ID NO: 74531 - protein, 64 aa, Homo sapiens
  Payload ID: 14725
  Gene Symbol: RRP12
  Gene Name: ribosomal RNA processing 12 homolog
  ENSP ID: ENSP00000401102
MGRSGKLPSGVSAKLKRWKKGHSSDSNPAICRHRQAARSRFFSRPSGRSDLTVDAVKLHNELQS

SEQ ID NO: 74532 - protein, 1236 aa, Homo sapiens
  Payload ID: 14725
  Gene Symbol: RRP12
  Gene Name: ribosomal RNA processing 12 homolog
  Uniprot ID: Q5JTH9
  ENSP ID: ENSP00000414863
MGRSGKLPSGVSAKLKRWKKGHSSDSNPAICRHRQAARSRFFSRPSGRSDLTVDAVKLHNELQSGSLRLGKSEAPETPMEEEAELVLTEKSSGTFLSGLSDCTNVTFSKVQRFWESNSAAHKEICAVLAAVTEVIRSQGGKETETEYFAALVLSCLATLLRKQDLEAWGYPVTLQVYHGLLSFTVHPKPKIRKAAQHGVCSVLKGSEFMFEKAPAHHPAAISTAKFCIQEIEKSGGSKEATTTLHMLTLLKDLLPCFPEGLVKSCSETLLRVMTLSHVLVTACAMQAFHSLFHARPGLSTLSAELNAQIITALYDYVPSENDLQPLLAWLKVMEKAHINLVRLQWDLGLGHLPRFFGTAVTCLLSPHSQVLTAATQSLKEILKECVAPHMADIGSVTSSASGPAQSVAKMFRAVEEGLTYKFHAAWSSVLQLLCVFFEACGRQAHPVMRKCLQSLCDLRLSPHFPHTAALDQAVGAAVTSMGPEVVLQAVPLEIDGSEETLDFPRSWLLPVIRDHVQETRLGFFTTYFLPLANTLKSKAMDLAQAGSTVESKIYDTLQWQMWTLLPGFCTRPTDVAISFKGLARTLGMAISERPDLRVTVCQALRTLITKGCQAEADRAEVSRFAKNFLPILFNLYGQPVAAGDTPAPRRAVLETIRTYLTITDTQLVNSLLEKASEKVLDPASSDFTRLSVLDLVVALAPCADEAAISKLYSTIRPYLESKAHGVQKKAYRVLEEVCASPQGPGALFVQSHLEDLKKTLLDSLRSTSSPAKRPRLKCLLHIVRKLSAEHKEFITALIPEVILCTKEVSVGARKNAFALLVEMGHAFLRFGSNQEEALQCYLVLIYPGLVGAVTMVSCSILALTHLLFEFKGLMGTSTVEQLLENVCLLLASRTRDVVKSALGFIKVAVTVMDVAHLAKHVQLVMEAIGKLSDDMRRHFRMKLRNLFTKFIRKFGFELVKRLLPEEYHRVLVNIRKAEARAKRHRALSQAAVEEEEEEEEEEEPAQGKGDSIEEILADSEDEEDNEEEERSRGKEQRKLARQRSRAWLKEGGGDEPLNFLDPKVAQRVLATQPGPGRGRKKDHGFKVSADGRLIIREEADGNKMEEEEGAKGEDEEMADPMEDVIIRNKKHQKLKHQKEAEEEELEIPPQYQAGGSGIHRPVAKKAMPGAEYKAKKAKGDVKKKGRPDPYAYIPLNRSKLNRRKKMKLQGQFKGLVKAARRGSQVGHKNRRKDRRP

SEQ ID NO: 74533 - protein, 1297 aa, Homo sapiens; identical to SEQ ID NO: 74530
  Payload ID: 14725
  Gene Symbol: RRP12
  Gene Name: ribosomal RNA processing 12 homolog
  Uniprot ID: Q5JTH9
  ENSP ID: ENSP00000446184

SEQ ID NO: 74534 - protein, 32 aa, Homo sapiens
  Payload ID: 14725
  Gene Symbol: RRP12
  Gene Name: ribosomal RNA processing 12 homolog
  ENSP ID: ENSP00000482139
MGRSGKLPSGVSAKLKRWKKGHSSDSNPAICR

SEQ ID NO: 74535 - protein, 106 aa, Homo sapiens
  Payload ID: 14725
  Gene Symbol: RRP12
  Gene Name: ribosomal RNA processing 12 homolog
  ENSP ID: ENSP00000483365
RGKEQRKLARQRSRAWLKEGGGDEPLNFLDPKVAQRVLATQPGPGRGRKKDHGFKVSADGRLIIREEADGNKMEEEEGAKGGPNALVHSFTVFTYSFGDHLLRKRG

SEQ ID NO: 74536 - protein, 176 aa, Homo sapiens
  Payload ID: 14725
  Gene Symbol: RRP12
  Gene Name: ribosomal RNA processing 12 homolog
  ENSP ID: ENSP00000484474
MGRSGKLPSGVSAKLKRWKKGHSSDSNPAICRHRQAARSRFFSRPSGRSDLTVDAVKLHNELQSGSLRLGKSEAPETPMEEEAELVLTEKSSGTFLSGLSDCTNVTFSKVQRFWESNSAAHKEICAVLAAVTEVIRSQGGKETETEYFAALMTTMEAVESPESLAAVAYLLNLVLK

SEQ ID NO: 74537 - protein, 282 aa, Homo sapiens
  Payload ID: 14726
  Gene Symbol: RRP15
  Gene Name: ribosomal RNA processing 15 homolog
  Uniprot ID: Q9Y3B9
  ENSP ID: ENSP00000355899
MAAAAPDSRVSEEENLKKTPKKKMKMVTGAVASVLEDEATDTSDSEGSCGSEKDHFYSDDDAIEADSEGDAEPCDKENENDGESSVGTNMGWADAMAKVLNKKTPESKPTILVKNKKLEKEKEKLKQERLEKIKQRDKRLEWEMMCRVKPDVVQDKETERNLQRIATRGVVQLFNAVQKHQKNVDEKVKEAGSSMRKRAKLISTVSKKDFISVLRGMDGSTNETASSRKKPKAKQTEVKSEEGPGWTILRDDFMMGASMKDWDKESDGPDDSRPESASDSDT

SEQ ID NO: 74538 - protein, 758 aa, Homo sapiens
  Payload ID: 14727
  Gene Symbol: RRP1B
  Gene Name: ribosomal RNA processing 1B
  Uniprot ID: Q14684
  ENSP ID: ENSP00000339145
MAPAMQPAEIQFAQRLASSEKGIRDRAVKKLRQYISVKTQRETGGFSQEELLKIWKGLFYCMWVQDEPLLQEELANTIAQLVHAVNNSAAQHLFIQTFWQTMNREWKGIDRLRLDKYYMLIRLVLRQSFEVLKRNGWEESRIKVFLDVLMKEVLCPESQSPNGVRFHFIDIYLDELSKVGGKELLADQNLKFIDPFCKIAAKTKDHTLVQTIARGVFEAIVDQSPFVPEETMEEQKTKVGDGDLSAEEIPENEVSLRRAVSKKKTALGKNHSRKDGLSDERGRDDCGTFEDTGPLLQFDYKAVADRLLEMTSRKNTPHFNRKRLSKLIKKFQDLSEGSSISQLSFAEDISADEDDQILSQGKHKKKGNKLLEKTNLEKEKGSRVFCVEEEDSESSLQKRRRKKKKKHHLQPENPGPGGAAPSLEQNRGREPEASGLKALKARVAEPGAEATSSTGEESGSEHPPAVPMHNKRKRPRKKSPRAHREMLESAVLPPEDMSQSGPSGSHPQGPRGSPTGGAQLLKRKRKLGVVPVNGSGLSTPAWPPLQQEGPPTGPAEGANSHTTLPQRRRLQKKKAGPGSLELCGLPSQKTASLKKRKKMRVMSNLVEHNGVLESEAGQPQALGSSGTCSSLKKQKLRAESDFVKFDTPFLPKPLFFRRAKSSTATHPPGPAVQLNKTPSSSKKVTFGLNRNMTAEFKKTDKSILVSPTGPSRVAFDPEQKPLHGVLKTPTSSPASSPLVAKKPLTTTPRRRPRAMDFF

SEQ ID NO: 74539 - protein, 259 aa, Homo sapiens
  Payload ID: 14728
  Gene Symbol: RRP36
  Gene Name: ribosomal RNA processing 36
  Uniprot ID: Q96EU6
  ENSP ID: ENSP00000244496
MPGANYRAGAGAGAGARRPRGARDREEDGGGLEPAAVARDLLRGTSNMSFEELLELQSQVGTKTYKQLVAGNSPKKQASRPPIQNACVADKHRPLEMSAKIRVPFLRQVVPISKKVARDPRFDDLSGEYNPEVFDKTYQFLNDIRAKEKELVKKQLKKHLSGEEHEKLQQLLQRMEQQEMAQQERKQQQELHLALKQERRAQAQQGHRPYFLKKSEQRQLALAEKFKELKRSKKLENFLSRKRRRNAGKDRRHLPLSKE

SEQ ID NO: 74540 - protein, 29 aa, Homo sapiens
  Payload ID: 14728
  Gene Symbol: RRP36
  Gene Name: ribosomal RNA processing 36
  ENSP ID: ENSP00000475391
EYNPEVFDKTYQFLNDIRAKEKELTFAEC

SEQ ID NO: 74541 - protein, 280 aa, Homo sapiens
  Payload ID: 14729
  Gene Symbol: RRP7A
  Gene Name: ribosomal RNA processing 7 homolog A
  Uniprot ID: Q9Y3A4
  ENSP ID: ENSP00000321449
MVARRRKCAARDPEDRIPSPLGYAAIPIKFSEKQQASHYLYVRAHGVRQGTKSTWPQKRTLFVLNVPPYCTEESLSRLLSTCGLVQSVELQEKPDLAESPKESRSKFFHPKPVPGFQVAYVVFQKPSGVSAALALKGPLLVSTESHPVKSGIHKWISDYADSVPDPEALRVEVDTFMEAYDQKIAEEEAKAKEEEGVPDEEGWVKVTRRGRRPVLPRTEAASLRVLERERRKRSRKELLNFYAWQHRESKMEHLAQLRKKFEEDKQRIELLRAQRKFRPY

SEQ ID NO: 74542 - protein, 53 aa, Homo sapiens
  Payload ID: 14729
  Gene Symbol: RRP7A
  Gene Name: ribosomal RNA processing 7 homolog A
  ENSP ID: ENSP00000405547
MVARRRKCAARDPEDRIPSPLGYAASRLLREAVKAQAVGSELAGGAEVMLRLS

SEQ ID NO: 74543 - protein, 456 aa, Homo sapiens
  Payload ID: 14730
  Gene Symbol: RRP8
  Gene Name: ribosomal RNA processing 8, methyltransferase, homolog (yeast)
  Uniprot ID: O43159
  ENSP ID: ENSP00000254605
MFEEPEWAEAAPVAAGLGPVISRPPPAASSQNKGSKRRQLLATLRALEAASLSQHPPSLCISDSEEEEEERKKKCPKKASFASASAEVGKKGKKKCQKQGPPCSDSEEEVERKKKCHKQALVGSDSAEDEKRKRKCQKHAPINSAQHLDNVDQTGPKAWKGSTTNDPPKQSPGSTSPKPPHTLSRKQWRNRQKNKRRCKNKFQPPQVPDQAPAEAPTEKTEVSPVPRTDSHEARAGALRARMAQRLDGARFRYLNEQLYSGPSSAAQRLFQEDPEAFLLYHRGFQSQVKKWPLQPVDRIARDLRQRPASLVVADFGCGDCRLASSIRNPVHCFDLASLDPRVTVCDMAQVPLEDESVDVAVFCLSLMGTNIRDFLEEANRVLKPGGLLKVAEVSSRFEDVRTFLRAVTKLGFKIVSKDLTNSHFFLFDFQKTGPPLVGPKAQLSGLQLQPCLYKRR

SEQ ID NO: 74544 - protein, 78 aa, Homo sapiens
  Payload ID: 14730
  Gene Symbol: RRP8
  Gene Name: ribosomal RNA processing 8, methyltransferase, homolog (yeast)
  ENSP ID: ENSP00000435873
MFEEPEWAEAAPVAAGLGPVISRPPPAASSQNKASSILFRPTVIPCFPPGLQAPPALGHITGPRGSISFPASPQPMYK

SEQ ID NO: 74545 - protein, 306 aa, Homo sapiens
  Payload ID: 14730
  Gene Symbol: RRP8
  Gene Name: ribosomal RNA processing 8, methyltransferase, homolog (yeast)
  ENSP ID: ENSP00000436246
MFEEPEWAEAAPVAAGLGPVISRPPPAASSQNKGSKRRQLLATLRALEAASLSQHPPSLCISDSEEEEEERKKKCPKKASFASASAEVGKKGKKKCQKQGPPCSDSEEEVERKKKCHKQALVGSDSAEDEKRKRKCQKHAPINSAQHLDNVDQTGPKAWKGSTTNDPPKQSPGSTSPKPPHTLSRKQWRNRQKNKRRCKNKFQPPQVPDQAPAEAPTEKTEVSPVPRTDSHEARAGALRARMAQRLDGARFRYLNEQLYSGPSSAAQRLFQEDPEAFLLYHRGFQSQVKKWPLQPVDRIARDLRQR

SEQ ID NO: 74546 - protein, 140 aa, Homo sapiens
  Payload ID: 14730
  Gene Symbol: RRP8
  Gene Name: ribosomal RNA processing 8, methyltransferase, homolog (yeast)
  ENSP ID: ENSP00000436960
MFEEPEWAEAAPVAAGLGPVISRPPPAASSQNKVPLEDESVDVAVFCLSLMGTNIRDFLEEANRVLKPGGLLKVAEVSSRFEDVRTFLRAVTKLGFKIVSKDLTNSHFFLFDFQKTGPPLVGPKAQLSGLQLQPCLYKRR

SEQ ID NO: 74547 - protein, 475 aa, Homo sapiens
  Payload ID: 14731
  Gene Symbol: RRP9
  Gene Name: ribosomal RNA processing 9, small subunit (SSU) processome component, homolog (yeast)
  Uniprot ID: O43818
  ENSP ID: ENSP00000232888
MSATAAARKRGKPASGAGAGAGAGKRRRKADSAGDRGKSKGGGKMNEEISSDSESESLAPRKPEEEEEEELEETAQEKKLRLAKLYLEQLRQQEEEKAEARAFEEDQVAGRLKEDVLEQRGRLQKLVAKEIQAPASADIRVLRGHQLSITCLVVTPDDSAIFSAAKDCSIIKWSVESGRKLHVIPRAKKGAEGKPPGHSSHVLCMAISSDGKYLASGDRSKLILIWEAQSCQHLYTFTGHRDAVSGLAFRRGTHQLYSTSHDRSVKVWNVAENSYVETLFGHQDAVAALDALSRECCVTAGGRDGTVRVWKIPEESQLVFYGHQGSIDCIHLINEEHMVSGADDGSVALWGLSKKRPLALQREAHGLRGEPGLEQPFWISSVAALLNTDLVATGSHSSCVRLWQCGEGFRQLDLLCDIPLVGFINSLKFSSSGDFLVAGVGQEHRLGRWWRIKEARNSVCIIPLRRVPVPPAAGS

SEQ ID NO: 74548 - protein, 242 aa, Homo sapiens
  Payload ID: 14732
  Gene Symbol: RBFA
  Gene Name: ribosome binding factor A (putative)
  Uniprot ID: Q8N0V3
  ENSP ID: ENSP00000262197
MWAAAGGLWRSRAGLRALFRSRDAALFPGCERGLHCSAVSCKNWLKKFASKTKKKVWYESPSLGSHSTYKPSKLEFLMRSTSKKTRKEDHARLRALNGLLYKALTDLLCTPEVSQELYDLNVELSKVSLTPDFSACRAYWKTTLSAEQNAHMEAVLQRSAAHMSLISYWQSQTLDPGMKETTLYKMISGTLMPHNPAAPQSRPQAPVCVGSIMRRSTSRLWSTKGGKIKGSGAWCGRGRWLS

SEQ ID NO: 74549 - protein, 343 aa, Homo sapiens
  Payload ID: 14732
  Gene Symbol: RBFA
  Gene Name: ribosome binding factor A (putative)
  Uniprot ID: Q8N0V3
  ENSP ID: ENSP00000305696
MWAAAGGLWRSRAGLRALFRSRDAALFPGCERGLHCSAVSCKNWLKKFASKTKKKVWYESPSLGSHSTYKPSKLEFLMRSTSKKTRKEDHARLRALNGLLYKALTDLLCTPEVSQELYDLNVELSKVSLTPDFSACRAYWKTTLSAEQNAHMEAVLQRSAAHMRHLLMSQQTLRNVPPIVFVQDKGNAALAELDQLLAVADFGPRDERDNFVQNDFRDPDAPQPCGTTEPTTSSSLCGIDHEALNKQIMEYKRRKDKGLGGLVWQGQVAELTTQMKKGRKRAKPRLEQDSSLKSYLSGEEVEDDLDLVGAPEYECYAPDTEELEAERGGGRTEDGHSCGASRE

SEQ ID NO: 74550 - protein, 1410 aa, Homo sapiens
  Payload ID: 14733
  Gene Symbol: RRBP1
  Gene Name: ribosome binding protein 1
  ENSP ID: ENSP00000246043
MDIYDTQTLGVVVFGGFMVVSAIGIFLVSTFSMKETSYEEALANQRKEMAKTHHQKVEKKKKEKTVEKKGKTKKKEEKPNGKIPDHDPAPNVTVLLREPVRAPAVAVAPTPVQPPIIVAPVATVPAMPQEKLASSPKDKKKKEKKVAKVEPAVSSVVNSIQVLTSKAAILETAPKEVPMVVVPPVGAKGNTPATGTTQGKKAEGTQNQSKKAEGAPNQGRKAEGTPNQGKKTEGTPNQGKKAEGTPNQGKKAEGTPNQGKKAEGAQNQGKKVDTTPNQGKKVEGAPTQGRKAEGAQNQAKKVEGAQNQGKKAEGAQNQGKKGEGAQNQGKKAEGAQNQGKKAEGAQNQGKKAEGAQNQGKKAEGAQNQGKKAEGAQNQGKKAEGAQNQGKKVEGAQNQGKKAEGAQNQGKKAEGAQNQGKKAEGAQNQGKKAEGAQNQGKKAEGAQNQGKKAEGAQNQGKKAEGAQNQGKKVEGAQNQGKKAEGAQNQGKKAEGAQNQGKKAEGAQNQGQKGEGAQNQGKKTEGAQGKKAERSPNQGKKGEGAPIQGKKADSVANQGTKVEGITNQGKKAEGSPSEGKKAEGSPNQGKKADAAANQGKKTESASVQGRNTDVAQSPEAPKQEAPAKKKSGSKKKGEPGPPDADGPLYLPYKTLVSTVGSMVFNEGEAQRLIEILSEKAGIIQDTWHKATQKGDPVAILKRQLEEKEKLLATEQEDAAVAKSKLRELNKEMAAEKAKAAAGEAKVKKQLVAREQEITAVQARMQASYREHVKEVQQLQGKIRTLQEQLENGPNTQLARLQQENSILRDALNQATSQVESKQNAELAKLRQELSKVSKELVEKSEAVRQDEQQRKALEAKAAAFEKQVLQLQASHRESEEALQKRLDEVSRELCHTQSSHASLRADAEKAQEQQQQMAELHSKLQSSEAEVRSKCEELSGLHGQLQEARAENSQLTERIRSIEALLEAGQARDAQDVQASQAEADQQQTRLKELESQVSGLEKEAIELREAVEQQKVKNNDLREKNWKAMEALATAEQACKEKLLSLTQAKEESEKQLCLIEAQTMEALLALLPELSVLAQQNYTEWLQDLKEKGPTLLKHPPAPAEPSSDLASKLREAEETQSTLQAECDQYRSILAETEGMLRDLQKSVEEEEQVWRAKVGAAEEELQKSRVTVKHLEEIVEKLKGELESSDQVREHTSHLEAELEKHMAAASAECQNYAKEVAGLRQLLLESQSQLDAAKSEAQKQSDELALVRQQLSEMKSHVEDGDIAGAPASSPEAPPAEQDPVQLKTQLEWTEAILEDEQTQRQKLTAEFEEAQTSACRLQEELEKLRTAGPLESSETEEASQLKERLEKEKKLTSDLGRAATRLQELLKTTQEQLAREKDTVKKLQEQLEKAEDGSSSKEGTSV

SEQ ID NO: 74551 - protein, 977 aa, Homo sapiens
  Payload ID: 14733
  Gene Symbol: RRBP1
  Gene Name: ribosome binding protein 1
  Uniprot ID: Q9P2E9
  ENSP ID: ENSP00000354045
MDIYDTQTLGVVVFGGFMVVSAIGIFLVSTFSMKETSYEEALANQRKEMAKTHHQKVEKKKKEKTVEKKGKTKKKEEKPNGKIPDHDPAPNVTVLLREPVRAPAVAVAPTPVQPPIIVAPVATVPAMPQEKLASSPKDKKKKEKKVAKVEPAVSSVVNSIQVLTSKAAILETAPKEGRNTDVAQSPEAPKQEAPAKKKSGSKKKGPPDADGPLYLPYKTLVSTVGSMVFNEGEAQRLIEILSEKAGIIQDTWHKATQKGDPVAILKRQLEEKEKLLATEQEDAAVAKSKLRELNKEMAAEKAKAAAGEAKVKKQLVAREQEITAVQARMQASYREHVKEVQQLQGKIRTLQEQLENGPNTQLARLQQENSILRDALNQATSQVESKQNAELAKLRQELSKVSKELVEKSEAVRQDEQQRKALEAKAAAFEKQVLQLQASHRESEEALQKRLDEVSRELCHTQSSHASLRADAEKAQEQQQQMAELHSKLQSSEAEVRSKCEELSGLHGQLQEARAENSQLTERIRSIEALLEAGQARDAQDVQASQAEADQQQTRLKELESQVSGLEKEAIELREAVEQQKVKNNDLREKNWKAMEALATAEQACKEKLLSLTQAKEESEKQLCLIEAQTMEALLALLPELSVLAQQNYTEWLQDLKEKGPTLLKHPPAPAEPSSDLASKLREAEETQSTLQAECDQYRSILAETEGMLRDLQKSVEEEEQVWRAKVGAAEEELQKSRVTVKHLEEIVEKLKGELESSDQVREHTSHLEAELEKHMAAASAECQNYAKEVAGLRQLLLESQSQLDAAKSEAQKQSDELALVRQQLSEMKSHVEDGDIAGAPASSPEAPPAEQDPVQLKTQLEWTEAILEDEQTQRQKLTAEFEEAQTSACRLQEELEKLRTAGPLESSETEEASQLKERLEKEKKLTSDLGRAATRLQELLKTTQEQLAREKDTVKKLQEQLEKAEDGSSSKEGTSV

SEQ ID NO: 74552 - protein, 977 aa, Homo sapiens; identical to SEQ ID NO: 74551
  Payload ID: 14733
  Gene Symbol: RRBP1
  Gene Name: ribosome binding protein 1
  Uniprot ID: Q9P2E9
  ENSP ID: ENSP00000367038

SEQ ID NO: 74553 - protein, 1410 aa, Homo sapiens; identical to SEQ ID NO: 74550
  Payload ID: 14733
  Gene Symbol: RRBP1
  Gene Name: ribosome binding protein 1
  ENSP ID: ENSP00000367044

SEQ ID NO: 74554 - protein, 300 aa, Homo sapiens
  Payload ID: 14733
  Gene Symbol: RRBP1
  Gene Name: ribosome binding protein 1
  ENSP ID: ENSP00000381762
MDIYDTQTLGVVVFGGFMVVSAIGIFLVSTFSMKETSYEEALANQRKEMAKTHHQKVEKKKKEKTVEKKGKTKKKEEKPNGKIPDHDPAPNVTVLLREPVRAPAVAVAPTPVQPPIIVAPVATVPAMPQEKLASSPKDKKKKEKKVAKVEPAVSSVVNSIQVLTSKAAILETAPKEVPMVVVPPVGAKGNTPATGTTQGKKAEGTQNQSKKAEGAPNQGRKAEGTPNQGKKTEGTPNQGKKAEGTPNQGKKAEGTPNQGKKAEGAQNQGKKVDTTPNQGKKVEGAPTQGRKAEGAQNQAK

SEQ ID NO: 74555 - protein, 751 aa, Homo sapiens
  Payload ID: 14733
  Gene Symbol: RRBP1
  Gene Name: ribosome binding protein 1
  ENSP ID: ENSP00000401206
MVFNEGEAQRLIEILSEKAGIIQDTWHKATQKGDPVAILKRQLEEKEKLLATEQEDAAVAKSKLRELNKEMAAEKAKAAAGEAKVKKQLVAREQEITAVQARMQASYREHVKEVQQLQGKIRTLQEQLENGPNTQLARLQQENSILRDALNQATSQVESKQNAELAKLRQELSKVSKELVEKSEAVRQDEQQRKALEAKAAAFEKQVLQLQASHRESEEALQKRLDEVSRELCHTQSSHASLRADAEKAQEQQQQMAELHSKLQSSEAEVRSKCEELSGLHGQLQEARAENSQLTERIRSIEALLEAGQARDAQDVQASQAEADQQQTRLKELESQVSGLEKEAIELREAVEQQKVKNNDLREKNWKAMEALATAEQACKEKLLSLTQAKEESEKQLCLIEAQTMEALLALLPELSVLAQQNYTEWLQDLKEKGPTLLKHPPAPAEPSSDLASKLREAEETQSTLQAECDQYRSILAETEGMLRDLQKSVEEEEQVWRAKVGAAEEELQKSRVTVKHLEEIVEKLKGELESSDQVREHTSHLEAELEKHMAAASAECQNYAKEVAGLRQLLLESQSQLDAAKSEAQKQSDELALVRQQLSEMKSHVEDGDIAGAPASSPEAPPAEQDPVQLKTQLEWTEAILEDEQTQRQKLTAEFEEAQTSACRLQEELEKLRTAGPLESSETEEASQLKERLEKEKKLTSDLGRAATRLQELLKTTQEQLAREKDTVKKLQEQLEKAEDGSSSKEGTSV

SEQ ID NO: 74556 - protein, 229 aa, Homo sapiens
  Payload ID: 14733
  Gene Symbol: RRBP1
  Gene Name: ribosome binding protein 1
  ENSP ID: ENSP00000476483
QGKKAERSPNQGKKGEGAPIQGKKADSVANQGTKVEGITNQGKKAEGSPSEGKKAEGSPNQGKKADAAANQGKKTESASVQGRNTDVAQSPEAPKQEAPAKKKSGSKKKGEPGRTQSWPSFGRSSARSAKSWWRSQRLCGKMSSSGKLWKPRQLPSRSRSCSCRRPTGRVRRPCRSAWTRSAGSCATRRAATPASGRMPRRPRSNSSRWPSCTASYSPPRRRCAANARS

SEQ ID NO: 74557 - protein, 346 aa, Homo sapiens
  Payload ID: 14733
  Gene Symbol: RRBP1
  Gene Name: ribosome binding protein 1
  ENSP ID: ENSP00000478324
MEALLALLPELSVLAQQNYTEWLQDLKEKGPTLLKHPPAPAEPSSDLASKLREAEETQSTLQAECDQYRSILAETEGMLRDLQKSVEEEEQVWRAKVGAAEEELQKSRVTVKHLEEIVEKLKGELESSDQVREHTSHLEAELEKHMAAASAECQNYAKEVAGLRQLLLESQSQLDAAKSEAQKQSDELALVRQQLSEMKSHVEDGDIAGAPASSPEAPPAEQDPVQLKTQLEWTEAILEDEQTQRQKLTAEFEEAQTSACRLQEELEKLRTAGPLESSETEEASQLKERLEKEKKLTSDLGRAATRLQELLKTTQEQLAREKDTVKKLQEQLEKEDGSSSKEGTSV

SEQ ID NO: 74558 - protein, 934 aa, Homo sapiens
  Payload ID: 14733
  Gene Symbol: RRBP1
  Gene Name: ribosome binding protein 1
  ENSP ID: ENSP00000479709
MVVVPPVGAKGNTPATGTTQGKKAEGTQNQSKKAEGAPNQGRKAEGTPNQGKKTEGTPNQGKKAEGAPIQGKKADSVANQGTKVEGITNQGKKAEGSPSEGKKAEGSPNQGKKADAAANQGKKTESASVQGRNTDVAQSPEAPKQEAPAKKKSGSKKKGEPGPPDADGPLYLPYKTLVSTVGSMVFNEGEAQRLIEILSEKAGIIQDTWHKATQKGDPVAILKRQLEEKEKLLATEQEDAAVAKSKLRELNKEMAAEKAKAAAGEAKVKKQLVAREQEITAVQARMQASYREHVKEVQQLQGKIRTLQEQLENGPNTQLARLQQENSILRDALNQATSQVESKQNAELAKLRQELSKVSKELVEKSEAVRQDEQQRKALEAKAAAFEKQVLQLQASHRESEEALQKRLDEVSRELCHTQSSHASLRADAEKAQEQQQQMAELHSKLQSSEAEVRSKCEELSGLHGQLQEARAENSQLTERIRSIEALLEAGQARDAQDVQASQAEADQQQTRLKELESQVSGLEKEAIELREAVEQQKVKNNDLREKNWKAMEALATAEQACKEKLLSLTQAKEESEKQLCLIEAQTMEALLALLPELSVLAQQNYTEWLQDLKEKGPTLLKHPPAPAEPSSDLASKLREAEETQSTLQAECDQYRSILAETEGMLRDLQKSVEEEEQVWRAKVGAAEEELQKSRVTVKHLEEIVEKLKGELESSDQVREHTSHLEAELEKHMAAASAECQNYAKEVAGLRQLLLESQSQLDAAKSEAQKQSDELALVRQQLSEMKSHVEDGDIAGAPASSPEAPPAEQDPVQLKTQLEWTEAILEDEQTQRQKLTAEFEEAQTSACRLQEELEKLRTAGPLESSETEEASQLKERLEKEKKLTSDLGRAATRLQELLKTTQEQLAREKDTVKKLQEQLEKAEDGSSSKEGTSV

SEQ ID NO: 74559 - protein, 365 aa, Homo sapiens
  Payload ID: 14734
  Gene Symbol: RRS1
  Gene Name: ribosome biogenesis regulator homolog
  Uniprot ID: Q15050
  ENSP ID: ENSP00000322396
MEGQSVEELLAKAEQDEAEKLQRITVHKELELQFDLGNLLASDRNPPTGLRCAGPTPEAELQALARDNTQLLINQLWQLPTERVEEAIVARLPEPTTRLPREKPLPRPRPLTRWQQFARLKGIRPKKKTNLVWDEVSGQWRRRWGYQRARDDTKEWLIEVPGNADPLEDQFAKRIQAKKERVAKNELNRLRNLARAHKMQLPSAAGLHPTGHQSKEELGRAMQVAKVSTASVGRFQERLPKEKVPRGSGKKRKFQPLFGDFAAEKKNQLELLRVMNSKKPQLDVTRATNKQMREEDQEEAAKRRKMSQKGKRKGGRQGPGGKRKGGPPSQGGKRKGGLGGKMNSGPPGLGGKRKGGQRPGGKRRK

SEQ ID NO: 74560 - protein, 349 aa, Homo sapiens
  Payload ID: 14735
  Gene Symbol: RPF1
  Gene Name: ribosome production factor 1 homolog
  Uniprot ID: Q9H9Y2
  ENSP ID: ENSP00000359688
MAKAGDKSSSSGKKSLKRKAAAEELQEAAGAGDGATENGVQPPKAAAFPPGFSISEIKNKQRRHLMFTRWKQQQRKEKLAAKKKLKKEREALGDKAPPKPVPKTIDNQRVYDETTVDPNDEEVAYDEATDEFASYFNKQTSPKILITTSDRPHGRTVRLCEQLSTVIPNSHVYYRRGLALKKIIPQCIARDFTDLIVINEDRKTPNGLILSHLPNGPTAHFKMSSVRLRKEIKRRGKDPTEHIPEIILNNFTTRLGHSIGRMFASLFPHNPQFIGRQVATFHNQRDYIFFRFHRYIFRSEKKVGIQELGPRFTLKLRSLQKGTFDSKYGEYEWVHKPREMDTSRRKFHL

SEQ ID NO: 74561 - protein, 129 aa, Homo sapiens
  Payload ID: 14735
  Gene Symbol: RPF1
  Gene Name: ribosome production factor 1 homolog
  ENSP ID: ENSP00000359690
MAKAGDKSSSSGKKSLKRKAAAEELQEAAGAGDGATENGVQPPKAAAFPPGFSISEIKNKQRRHLMFTRWKQQQRKEKLAAKKKLKKEREALGDKAPPKPVPKTIDNQRVYDETTVDPNDEEVMLEVLN

SEQ ID NO: 74562 - protein, 76 aa, Homo sapiens
  Payload ID: 14736
  Gene Symbol: RPF2
  Gene Name: ribosome production factor 2 homolog
  ENSP ID: ENSP00000357857
MDTLDRVVKPKTKRAKRFLEKREPKLNENIKNAMLIKGGNANATVTKVLKDVNVFCFESYKFCFTVCTEKTIRCTI

SEQ ID NO: 74563 - protein, 306 aa, Homo sapiens
  Payload ID: 14736
  Gene Symbol: RPF2
  Gene Name: ribosome production factor 2 homolog
  Uniprot ID: Q9H7B2
  ENSP ID: ENSP00000402338
MDTLDRVVKPKTKRAKRFLEKREPKLNENIKNAMLIKGGNANATVTKVLKDVYALKKPYGVLYKKKNITRPFEDQTSLEFFSKKSDCSLFMFGSHNKKRPNNLVIGRMYDYHVLDMIELGIENFVSLKDIKNSKCPEGTKPMLIFAGDDFDVTEDYRRLKSLLIDFFRGPTVSNIRLAGLEYVLHFTALNGKIYFRSYKLLLKKSGCRTPRIELEEMGPSLDLVLRRTHLASDDLYKLSMKMPKALKPKKKKNISHDTFGTTYGRIHMQKQDLSKLQTRKMKGLKKRPAERITEDHEKKSKRIKKN

SEQ ID NO: 74564 - protein, 214 aa, Homo sapiens
  Payload ID: 14736
  Gene Symbol: RPF2
  Gene Name: ribosome production factor 2 homolog
  ENSP ID: ENSP00000414026
MLIKGGNANATVTKVLKDVYALKKPYGVLYKKKNITRPFEDQTSLEFFSKKSDCSLFMFGSHNKKRPNNLVIGRMYDYHVLDMIELGIENFVSLKDIKNSKCPEGTKPMLIFAGDDFDVTEDYRRLKSLLIDFFRGPTVSNIRLAGLEYVLHFTALNGKIYFRSYKLLLKKSGCRTPRIELEEMGPSLDLVLRRTHLASDDLYKLSMKMPKALK

SEQ ID NO: 74565 - protein, 59 aa, Homo sapiens
  Payload ID: 14736
  Gene Symbol: RPF2
  Gene Name: ribosome production factor 2 homolog
  ENSP ID: ENSP00000476081
MDTLDRVVKPKTKRAKRFLEKREPKLNENIKNAMLIKGGNANATVTKVLKDVEKYYKTF

SEQ ID NO: 74566 - protein, 199 aa, Homo sapiens
  Payload ID: 14737
  Gene Symbol: RPE
  Gene Name: ribulose-5-phosphate-3-epimerase
  Uniprot ID: Q96AT9
  ENSP ID: ENSP00000346501
MASGCKIGPSILNSDLANLGAECLRMLDSGADYLHLDVMDGHFVPNITFGHPVVESLRKQLGQDPFFDMHMMVSKPEQWVKPMAVAGANQYTFHLEATENPGALIKDIRENGMKVGLAIKPGTSVEYLAPWANQIDMALVMTVEPGFGGQKFMEDMMPKAGANMIVSGSAIMRSEDPRSVINLLRNVCSEAAQKRSLDR

SEQ ID NO: 74567 - protein, 228 aa, Homo sapiens
  Payload ID: 14737
  Gene Symbol: RPE
  Gene Name: ribulose-5-phosphate-3-epimerase
  Uniprot ID: Q96AT9
  ENSP ID: ENSP00000352401
MASGCKIGPSILNSDLANLGAECLRMLDSGADYLHLDVMDGHFVPNITFGHPVVESLRKQLGQDPFFDMHMMVSKPEQWVKPMAVAGANQYTFHLEATENPGALIKDIRENGMKVGLAIKPGTSVEYLAPWANQIDMALVMTVEPGFGGQKFMEDMMPKVHWLRTQFPSLDIEVDGGVGPDTVHKCAEAGANMIVSGSAIMRSEDPRSVINLLRNVCSEAAQKRSLDR

SEQ ID NO: 74568 - protein, 159 aa, Homo sapiens
  Payload ID: 14737
  Gene Symbol: RPE
  Gene Name: ribulose-5-phosphate-3-epimerase
  ENSP ID: ENSP00000386194
MHMMVSKPEQWVKPMAVAGANQYTFHLEATENPGALIKDIRENGMKVGLAIKPGTSVEYLAPWANQIDMALVMTVEPGFGGQKFMEDMMPKVHWLRTQFPSLDIEVDGGVGPDTVHKCAEAGANMIVSGSAIMRSEDPRSVINLLRNVCSEAAQKRSLD

SEQ ID NO: 74569 - protein, 160 aa, Homo sapiens
  Payload ID: 14737
  Gene Symbol: RPE
  Gene Name: ribulose-5-phosphate-3-epimerase
  Uniprot ID: Q96AT9
  ENSP ID: ENSP00000389411
MHMMVSKPEQWVKPMAVAGANQYTFHLEATENPGALIKDIRENGMKVGLAIKPGTSVEYLAPWANQIDMALVMTVEPGFGGQKFMEDMMPKVHWLRTQFPSLDIEVDGGVGPDTVHKCAEAGANMIVSGSAIMRSEDPRSVINLLRNVCSEAAQKRSLDR

SEQ ID NO: 74570 - protein, 141 aa, Homo sapiens
  Payload ID: 14737
  Gene Symbol: RPE
  Gene Name: ribulose-5-phosphate-3-epimerase
  ENSP ID: ENSP00000392279
MHMMVSKPEQWVKPMAVAGANQYTFHLEATENPGALIKDIRENGMKVGLAIKPGTSVEYLAPWANQIDMALVMTVEPGFGGQKFMEDMMPKVHWLRTQFPSLDIEVDGGVGPDTVHKCAEPFGRSLSFTALEVRNFSKIRN

SEQ ID NO: 74571 - protein, 178 aa, Homo sapiens
  Payload ID: 14737
  Gene Symbol: RPE
  Gene Name: ribulose-5-phosphate-3-epimerase
  Uniprot ID: Q96AT9
  ENSP ID: ENSP00000394455
MHMMVSKPEQWVKPMAVAGANQYTFHLEATENPGALIKDIRENGMKSCSVTQAEVQWHSQGPLQVGLAIKPGTSVEYLAPWANQIDMALVMTVEPGFGGQKFMEDMMPKVHWLRTQFPSLDIEVDGGVGPDTVHKCAEAGANMIVSGSAIMRSEDPRSVINLLRNVCSEAAQKRSLDR

SEQ ID NO: 74572 - protein, 147 aa, Homo sapiens
  Payload ID: 14737
  Gene Symbol: RPE
  Gene Name: ribulose-5-phosphate-3-epimerase
  ENSP ID: ENSP00000397674
MHMMVSKPEQWVKPMAVAGANQYTFHLEATENPGALIKDIRENGMKSCSVTQAEVQWHSQGPLQVGLAIKPGTSVEYLAPWANQIDMALVMTVEPGFGGQKFMEDMMPKVHWLRTQFPSLDIEVDGGVGPDTVHKCAEIGVQWRDLC

SEQ ID NO: 74573 - protein, 225 aa, Homo sapiens
  Payload ID: 14737
  Gene Symbol: RPE
  Gene Name: ribulose-5-phosphate-3-epimerase
  ENSP ID: ENSP00000400449
MASGCKIGPSILNSDLANLGAECLRMLDSGADYLHLDVMDGHFVPNITFGHPVVESLRKQLGQDPFFDMHMMVSKPEQWVKPMAVAGANQYTFHLEATENPGALIKDIRENGMKVGLAIKPGTSVEYLAPWANQIDMALVMTVEPGFGGQKFMEDMMPKVHWLRTQFPSLDIEVDGGVGPDTVHKCAEIGVQWRDLCSLQSLPAGFKRFSCLSLLSSWDYRQELT

SEQ ID NO: 74574 - protein, 178 aa, Homo sapiens; identical to SEQ ID NO: 74571
  Payload ID: 14737
  Gene Symbol: RPE
  Gene Name: ribulose-5-phosphate-3-epimerase
  Uniprot ID: Q96AT9
  ENSP ID: ENSP00000401838

SEQ ID NO: 74575 - protein, 160 aa, Homo sapiens; identical to SEQ ID NO: 74569
  Payload ID: 14737
  Gene Symbol: RPE
  Gene Name: ribulose-5-phosphate-3-epimerase
  Uniprot ID: Q96AT9
  ENSP ID: ENSP00000402061

SEQ ID NO: 74576 - protein, 178 aa, Homo sapiens; identical to SEQ ID NO: 74571
  Payload ID: 14737
  Gene Symbol: RPE
  Gene Name: ribulose-5-phosphate-3-epimerase
  Uniprot ID: Q96AT9
  ENSP ID: ENSP00000403808

SEQ ID NO: 74577 - protein, 157 aa, Homo sapiens
  Payload ID: 14737
  Gene Symbol: RPE
  Gene Name: ribulose-5-phosphate-3-epimerase
  ENSP ID: ENSP00000405695
MHMMVSKPEQWVKPMAVAGANQYTFHLEATENPGALIKDIRENGMKVGLAIKPGTSVEYLAPWANQIDMALVMTVEPGFGGQKFMEDMMPKVHWLRTQFPSLDIEVDGGVGPDTVHKCAEIGVQWRDLCSLQSLPAGFKRFSCLSLLSSWDYRQELT

SEQ ID NO: 74578 - protein, 191 aa, Homo sapiens
  Payload ID: 14737
  Gene Symbol: RPE
  Gene Name: ribulose-5-phosphate-3-epimerase
  ENSP ID: ENSP00000411186
MASGCKIGPSILNSDLANLGAECLRMLDSGADYLHLDVMDGHFVPNITFGHPVVESLRKQLGQDPFFDMHMMVSKPEQWVKPMAVAGANQYTFHLEATENPGALIKDIRENGMKVGLAIKPGTSVEYLAPWANQIDMALVMTVEPGFGGQKFMEDMMPKVHWLRTQFPSLDIEVDGGVGPDTVHKCAEELT

SEQ ID NO: 74579 - protein, 60 aa, Homo sapiens
  Payload ID: 14737
  Gene Symbol: RPE
  Gene Name: ribulose-5-phosphate-3-epimerase
  ENSP ID: ENSP00000411405
MASGCKIGPSILNSDLANLGAECLRMLDSGADYLHLDAPCSSGRSVFCILFPTSPLVTLW

SEQ ID NO: 74580 - protein, 94 aa, Homo sapiens
  Payload ID: 14737
  Gene Symbol: RPE
  Gene Name: ribulose-5-phosphate-3-epimerase
  ENSP ID: ENSP00000412245
MHMMVSKPEQWVKPMAVAGANQYTFHLEATENPGALIKDIRENGMKSCSVTQAEVQWHSQGPLQVGLAIKPGTSVEYLAPWANQIDMALVMTVE

SEQ ID NO: 74581 - protein, 107 aa, Homo sapiens
  Payload ID: 14737
  Gene Symbol: RPE
  Gene Name: ribulose-5-phosphate-3-epimerase
  ENSP ID: ENSP00000416805
MHMMVSKPEQWVKPMAVAGANQYTFHLEATENPGALIKDIRENGMKVGLAIKPGTSVEYLAPWANQIDMALVMTVEPGFGGQKFMEDMMPKVHWLRTQFPSLDIEVD

SEQ ID NO: 74582 - protein, 228 aa, Homo sapiens
  Payload ID: 14738
  Gene Symbol: RPEL1
  Gene Name: ribulose-5-phosphate-3-epimerase-like 1
  Uniprot ID: Q2QD12
  ENSP ID: ENSP00000476672
MASGCKIGPSILNSDLANLGAKCLQMLDSGADYLHLDVMDGHFVPNITFGHPVVESLRKQLGQDPFFDMHMMVSKPEQWVKPMAVAEANQYTFHLEATENPGTLIKDIRENGMKVGLAIKPGTSVEYLAPWANQIDMALVMTVEPGFGEQKFMEDMMPKVHWLRTQFPSLDIEGDGGVGSDTVHKCAEAGANMTVSGSAIMRSEDPRSVINLLRNICSEAAQKRSLDR

SEQ ID NO: 74583 - protein, 1165 aa, Homo sapiens
  Payload ID: 14739
  Gene Symbol: RIC1
  Gene Name: RIC1 homolog, RAB6A GEF complex partner 1
  Uniprot ID: Q4ADV7
  ENSP ID: ENSP00000251879
MYFLSGWPKRLLCPLGSPAEAPFHVQSDPQRAFFAVLAAARLSIWYSRPSVLIVTYKEPAKSSTQFGSYKQAEWRPDSTMIAVSTANGYILFFHITSTRGDKYLYEPVYPKGSPQMKGTPHFKEEQCAPALNLEMRKILDLQAPIMSLQSVLEDLLVATSDGLLHLIHWEGMTNGRKAINLCTVPFSVDLQSSRVGSFLGFTDVHIRDMEYCATLDGFAVVFNDGKVGFITPVSSRFTAEQLHGVWPQDVVDGTCVAVNNKYRLMAFGCVSGSVQVYTIDNSTGAMLLSHKLELTAKQYPDIWNKTGAVKLMRWSPDNSVVIVTWEYGGLSLWSVFGAQLICTLGGDFAYRSDGTKKDPLKINSMSWGAEGYHLWVISGFGSQNTEIESDLRSVVKQPSILLFQFIKSVLTVNPCMSNQEQVLLQGEDRLYLNCGEASQTQNPRSSSTHSEHKPSREKSPFADGGLESQGLSTLLGHRHWHVVQISSTYLESNWPIRFSAIDKLGQNIAVVGKFGFAHYSLLTKKWKLFGNITQEQNMIVTGGLAWWNDFMVLACYNINDRQEELRVYLRTSNLDNAFAHVTKAQAETLLLSVFQDMVIVFRADCSICLYSIERKSDGPNTTAGIQVLQEVSMSRYIPHPFLVVSVTLTSVSTENGITLKMPQQARGAESIMLNLAGQLIMMQRDRSGPQIREKDSNPNNQRKLLPFCPPVVLAQSVENVWTTCRANKQKRHLLEALWLSCGGAGMKVWLPLFPRDHRKPHSFLSQRIMLPFHINIYPLAVLFEDALVLGAVNDTLLYDSLYTRNNAREQLEVLFPFCVVERTSQIYLHHILRQLLVRNLGEQALLLAQSCATLPYFPHVLELMLHEVLEEEATSREPIPDPLLPTVAKFITEFPLFLQTVVHCARKTEYALWNYLFAAVGNPKDLFEECLMAQDLDTAASYLIILQNMEVPAVSRQHATLLFNTALEQGKWDLCRHMIRFLKAIGSGESETPPSTPTAQEPSSSGGFEFFRNRSISLSQSAENVPASKFSLQKTLSMPSGPSGKRWSKDSDCAENMYIDMMLWRHARRLLEDVRLKDLGCFAAQLGFELISWLCKERTRAARVDNFVIALKRLHKDFLWPLPIIPASSISSPFKNGKYRTGNVDFMSLVQGELYFTPCIYTFCY

SEQ ID NO: 74584 - protein, 1386 aa, Homo sapiens
  Payload ID: 14739
  Gene Symbol: RIC1
  Gene Name: RIC1 homolog, RAB6A GEF complex partner 1
  Uniprot ID: Q4ADV7
  ENSP ID: ENSP00000402240
MYFLSGWPKRLLCPLGSPAEAPFHVQSDPQRAFFAVLAAARLSIWYSRPSVLIVTYKEPAKSSTQFGSYKQAEWRPDSTMIAVSTANGYILFFHITSTRGDKYLYEPVYPKGSPQMKGTPHFKEEQCAPALNLEMRKILDLQAPIMSLQSVLEDLLVATSDGLLHLIHWEGMTNGRKAINLCTVPFSVDLQSSRVGSFLGFTDVHIRDMEYCATLDGFAVVFNDGKVGFITPVSSRFTAEQLHGVWPQDVVDGTCVAVNNKYRLMAFGCVSGSVQVYTIDNSTGAMLLSHKLELTAKQYPDIWNKTGAVKLMRWSPDNSVVIVTWEYGGLSLWSVFGAQLICTLGGDFAYRSDGTKKDPLKINSMSWGAEGYHLWVISGFGSQNTEIESDLRSVVKQPSILLFQFIKSVLTVNPCMSNQEQVLLQGEDRLYLNCGEASQTQNPRSSSTHSEHKPSREKSPFADGGLESQGLSTLLGHRHWHVVQISSTYLESNWPIREQNMIVTGGLAWWNDFMVLACYNINDRQEELRVYLRTSNLDNAFAHVTKAQAETLLLSVFQDMVIVFRADCSICLYSIERKSDGPNTTAGIQVLQEVSMSRYIPHPFLVVSVTLTSVSTENGITLKMPQQARGAESIMLNLAGQLIMMQRDRSGPQIREKDSNPNNQRKLLPFCPPVVLAQSVENVWTTCRANKQKRHLLEALWLSCGGAGMKVWLPLFPRDHRKPHSFLSQRIMLPFHINIYPLAVLFEDALVLGAVNDTLLYDSLYTRNNAREQLEVLFPFCVVERTSQIYLHHILRQLLVRNLGEQALLLAQSCATLPYFPHVLELMLHEVLEEEATSREPIPDPLLPTVAKFITEFPLFLQTVVHCARKTEYALWNYLFAAVGNPKDLFEECLMAQDLDTAASYLIILQNMEVPAVSRQHATLLFNTALEQGKWDLCRHMIRFLKAIGSGESETPPSTPTAQEPSSSGGFEFFRNRSISLSQSAENVPASKFSLQKTLSMPSGPSGKRWSKDSDCAENMYIDMMLWRHARRLLEDVRLKDLGCFAAQLGFELISWLCKERTRAARVDNFVIALKRLHKDFLWPLPIIPASSISSPFKNGKYRTVGEQLLKSQSADPFLNLEMDAGISNIQRSQSWLSNIGPTHHEIDTASSHGPQMQDAFLSPLSNKGDECSIGSATDLTESSSMVDGDWTMVDENFSTLSLTQSELEHISMELASKGPHKSQVQLRYLLHIFMEAGCLDWCIVIGLILRESSIINQILVITQSSEVDGEMLQNIKTGLHAVDRWASTDCPGYKPFLNIIKPQLQKLSEITEEQVQPDAFQPITMGKTPEQTSPRAEESRGSSSHGSIPQGEVGSSNMVSRKEEDTAQAEEEEPFQDGTYDCSVS

SEQ ID NO: 74585 - protein, 1423 aa, Homo sapiens
  Payload ID: 14739
  Gene Symbol: RIC1
  Gene Name: RIC1 homolog, RAB6A GEF complex partner 1
  Uniprot ID: Q4ADV7
  ENSP ID: ENSP00000416696
MYFLSGWPKRLLCPLGSPAEAPFHVQSDPQRAFFAVLAAARLSIWYSRPSVLIVTYKEPAKSSTQFGSYKQAEWRPDSTMIAVSTANGYILFFHITSTRGDKYLYEPVYPKGSPQMKGTPHFKEEQCAPALNLEMRKILDLQAPIMSLQSVLEDLLVATSDGLLHLIHWEGMTNGRKAINLCTVPFSVDLQSSRVGSFLGFTDVHIRDMEYCATLDGFAVVFNDGKVGFITPVSSRFTAEQLHGVWPQDVVDGTCVAVNNKYRLMAFGCVSGSVQVYTIDNSTGAMLLSHKLELTAKQYPDIWNKTGAVKLMRWSPDNSVVIVTWEYGGLSLWSVFGAQLICTLGGDFAYRSDGTKKDPLKINSMSWGAEGYHLWVISGFGSQNTEIESDLRSVVKQPSILLFQFIKSVLTVNPCMSNQEQVLLQGEDRLYLNCGEASQTQNPRSSSTHSEHKPSREKSPFADGGLESQGLSTLLGHRHWHVVQISSTYLESNWPIRFSAIDKLGQNIAVVGKFGFAHYSLLTKKWKLFGNITQEQNMIVTGGLAWWNDFMVLACYNINDRQEELRVYLRTSNLDNAFAHVTKAQAETLLLSVFQDMVIVFRADCSICLYSIERKSDGPNTTAGIQVLQEVSMSRYIPHPFLVVSVTLTSVSTENGITLKMPQQARGAESIMLNLAGQLIMMQRDRSGPQIREKDSNPNNQRKLLPFCPPVVLAQSVENVWTTCRANKQKRHLLEALWLSCGGAGMKVWLPLFPRDHRKPHSFLSQRIMLPFHINIYPLAVLFEDALVLGAVNDTLLYDSLYTRNNAREQLEVLFPFCVVERTSQIYLHHILRQLLVRNLGEQALLLAQSCATLPYFPHVLELMLHEVLEEEATSREPIPDPLLPTVAKFITEFPLFLQTVVHCARKTEYALWNYLFAAVGNPKDLFEECLMAQDLDTAASYLIILQNMEVPAVSRQHATLLFNTALEQGKWDLCRHMIRFLKAIGSGESETPPSTPTAQEPSSSGGFEFFRNRSISLSQSAENVPASKFSLQKTLSMPSGPSGKRWSKDSDCAENMYIDMMLWRHARRLLEDVRLKDLGCFAAQLGFELISWLCKERTRAARVDNFVIALKRLHKDFLWPLPIIPASSISSPFKNGKYRTVGEQLLKSQSADPFLNLEMDAGISNIQRSQSWLSNIGPTHHEIDTASSHGPQMQDAFLSPLSNKGDECSIGSATDLTESSSMVDGDWTMVDENFSTLSLTQSELEHISMELASKGPHKSQVQLRYLLHIFMEAGCLDWCIVIGLILRESSIINQILVITQSSEVDGEMLQNIKTGLHAVDRWASTDCPGYKPFLNIIKPQLQKLSEITEEQVQPDAFQPITMGKTPEQTSPRAEESRGSSSHGSIPQGEVGSSNMVSRKEEDTAQAEEEEPFQDGTYDCSVS

SEQ ID NO: 74586 - protein, 147 aa, Homo sapiens
  Payload ID: 14739
  Gene Symbol: RIC1
  Gene Name: RIC1 homolog, RAB6A GEF complex partner 1
  ENSP ID: ENSP00000438005
HEIDTASSHGPQMQDAFLSPLSNKGDECSIGSATDLTESSSMVDGDWTMVDENFSTLSLTQSELEHISMELASKGPHKSQVQLRYLLHIFMEAGCLDWCIVIGLILRESSIINQILVITQSSEVDGEMLQNIKTGLHAVDRWASTDW

SEQ ID NO: 74587 - protein, 1315 aa, Homo sapiens
  Payload ID: 14739
  Gene Symbol: RIC1
  Gene Name: RIC1 homolog, RAB6A GEF complex partner 1
  ENSP ID: ENSP00000439488
  MOD_RES (1)..(1): Any amino acid
XEWRPDSTMIAVSTANGYILFFHITSTRGDKYLYEPVYPKGSPQMKGTPHFKEEQCAPALNLEMRKILDLQAPIMSLQSVLEDLLVATSDGLLHLIHWEGMTNGRKAINLCTVPFSVDLQSSRVGSFLGFTDVHIRDMEYCATLDGFAVVFNDGKVGFITPVSSRFTAEQLHGVWPQDVVDGTCVAVNNKYRLMAFGCVSGSVQVYTIDNSTGAMLLSHKLELTAKQYPDIWNKTGAVKLMRWSPDNSVVIVTWEYGGLSLWSVFGAQLICTLGGDFAYRSDGTKKDPLKINSMSWGAEGYHLWVISGFGSQNTEIESDLRSVVKQPSILLFQFIKSVLTVNPCMSNQEQVLLQGEDRLYLNCGEASQTQNPRSSSTHSEHKPSREKSPFADGGLESQGLSTLLGHRHWHVVQISSTYLESNWPIREQNMIVTGGLAWWNDFMVLACYNINDRQEELRVYLRTSNLDNAFAHVTKAQAETLLLSVFQDMVIVFRADCSICLYSIERKSDGPNTTAGIQVLQEVSMSRYIPHPFLVVSVTLTSVSTENGITLKMPQQARGAESIMLNLAGQLIMMQRDRSGPQIREKDSNPNNQRKLLPFCPPVVLAQSVENVWTTCRANKQKRHLLEALWLSCGGAGMKVWLPLFPRDHRKPHSFLSQRIMLPFHINIYPLAVLFEDALVLGAVNDTLLYDSLYTRNNAREQLEVLFPFCVVERTSQIYLHHILRQLLVRNLGEQALLLAQSCATLPYFPHVLELMLHEVLEEEATSREPIPDPLLPTVAKFITEFPLFLQTVVHCARKTEYALWNYLFAAVGNPKDLFEECLMAQDLDTAASYLIILQNMEVPAVSRQHATLLFNTALEQGKWDLCRHMIRFLKAIGSGESETPPSTPTAQEPSSSGGFEFFRNRSISLSQSAENVPASKFSLQKTLSMPSGPSGKRWSKDSDCAENMYIDMMLWRHARRLLEDVRLKDLGCFAAQLGFELISWLCKERTRAARVDNFVIALKRLHKDFLWPLPIIPASSISSPFKNGKYRTVGEQLLKSQSADPFLNLEMDAGISNIQRSQSWLSNIGPTHHEIDTASSHGPQMQDAFLSPLSNKGDECSIGSATDLTESSSMVDGDWTMVDENFSTLSLTQSELEHISMELASKGPHKSQVQLRYLLHIFMEAGCLDWCIVIGLILRESSIINQILVITQSSEVDGEMLQNIKTGLHAVDRWASTDCPGYKPFLNIIKPQLQKLSEITEEQVQPDAFQPITMGKTPEQTSPRAEESRGSSSHGSIPQGEVGSSNMVSRKEEDTAQAEEEEPFQDGTYDCSVS

SEQ ID NO: 74588 - protein, 163 aa, Homo sapiens
  Payload ID: 14739
  Gene Symbol: RIC1
  Gene Name: RIC1 homolog, RAB6A GEF complex partner 1
  ENSP ID: ENSP00000442632
  MOD_RES (1)..(1): Any amino acid
XAVNDTLLYDSLYTRNNAREQLEVLFPFCVVERTSQIYLHHILRQLLVRNLGEQALLLAQSCATLPYFPHVLELMLHEVLEEEATSREPIPDPLLPTVAKFITEFPLFLQTVVHCARKTEYALWNYLFAAVGNPKDLFEECLMAQDLDTAASYLIILQMEQRQ

SEQ ID NO: 74589 - protein, 369 aa, Homo sapiens
  Payload ID: 14740
  Gene Symbol: RIC3
  Gene Name: RIC3 acetylcholine receptor chaperone
  Uniprot ID: Q7Z5B4
  ENSP ID: ENSP00000308820
MAYSTVQRVALASGLVLALSLLLPKAFLSRGKRQEPPPTPEGKLGRFPPMMHHHQAPSDGQTPGARFQRSHLAEAFAKAKGSGGGAGGGGSGRGLMGQIIPIYGFGIFLYILYILFKLSKGKTTAEDGKCYTAMPGNTHRKITSFELAQLQEKLKETEAAMEKLINRVGPNGESRAQTVTSDQEKRLLHQLREITRVMKEGKFIDRFSPEKEAEEAPYMEDWEGYPEETYPIYDLSDCIKRRQETILVDYPDPKELSAEEIAERMGMIEEEESDHLGWESLPTDPRAQEDNSVTSCDPKPETCSCCFHEDEDPAVLAENAGFSADSYPEQEETTKEEWSQDFKDEGLGISTDKAYTGSMLRKRNPQGLE

SEQ ID NO: 74590 - protein, 187 aa, Homo sapiens
  Payload ID: 14740
  Gene Symbol: RIC3
  Gene Name: RIC3 acetylcholine receptor chaperone
  Uniprot ID: Q7Z5B4
  ENSP ID: ENSP00000333988
MAYSTVQRVALASGLVLALSLLLPKAFLSRGKRQEPPPTPEGYPEETYPIYDLSDCIKRRQETILVDYPDPKELSAEEIAERMGMIEEEESDHLGWESLPTDPRAQEDNSVTSCDPKPETCSCCFHEDEDPAVLAENAGFSADSYPEQEETTKEEWSQDFKDEGLGISTDKAYTGSMLRKRNPQGLE

SEQ ID NO: 74591 - protein, 368 aa, Homo sapiens
  Payload ID: 14740
  Gene Symbol: RIC3
  Gene Name: RIC3 acetylcholine receptor chaperone
  Uniprot ID: Q7Z5B4
  ENSP ID: ENSP00000344904
MAYSTVQRVALASGLVLALSLLLPKAFLSRGKRQEPPPTPEGKLGRFPPMMHHHQAPSDGQTPGARFQRSHLAEAFAKAKGSGGGAGGGGSGRGLMGQIIPIYGFGIFLYILYILFKLSKGKTTAEDGKCYTAMPGNTHRKITSFELAQLQEKLKETEAAMEKLINRVGPNGERAQTVTSDQEKRLLHQLREITRVMKEGKFIDRFSPEKEAEEAPYMEDWEGYPEETYPIYDLSDCIKRRQETILVDYPDPKELSAEEIAERMGMIEEEESDHLGWESLPTDPRAQEDNSVTSCDPKPETCSCCFHEDEDPAVLAENAGFSADSYPEQEETTKEEWSQDFKDEGLGISTDKAYTGSMLRKRNPQGLE

SEQ ID NO: 74592 - protein, 288 aa, Homo sapiens
  Payload ID: 14740
  Gene Symbol: RIC3
  Gene Name: RIC3 acetylcholine receptor chaperone
  Uniprot ID: Q7Z5B4
  ENSP ID: ENSP00000395320
MAYSTVQRVALASGLVLALSLLLPKAFLSRGKRQEPPPTPEGKLGRFPPMMHHHQAPSDGQTPGARFQRSHLAEAFAKAKGSGGGAGGGGSGRGLMGQIIPIYGFGIFLYILYILFKLSKGKTTAEDGKCYTAMPGNTHRKISYPEETYPIYDLSDCIKRRQETILVDYPDPKELSAEEIAERMGMIEEEESDHLGWESLPTDPRAQEDNSVTSCDPKPETCSCCFHEDEDPAVLAENAGFSADSYPEQEETTKEEWSQDFKDEGLGISTDKAYTGSMLRKRNPQGLE

SEQ ID NO: 74593 - protein, 128 aa, Homo sapiens
  Payload ID: 14740
  Gene Symbol: RIC3
  Gene Name: RIC3 acetylcholine receptor chaperone
  Uniprot ID: Q7Z5B4
  ENSP ID: ENSP00000404415
MAYSTVQRVALASGLVLALSLLLPKAFLSRGKRQEPPPTPEGKLGRFPPMMHHHQAPSDGQTPGARFQRSHLAEAFAKAKGSGGGAGGGGSGRGLMGQIIPIYGFGIFLYILYILFKVSRIILIILHQ

SEQ ID NO: 74594 - protein, 328 aa, Homo sapiens
  Payload ID: 14740
  Gene Symbol: RIC3
  Gene Name: RIC3 acetylcholine receptor chaperone
  ENSP ID: ENSP00000431658
MAYSTVQRVALASGLVLALSLLLPKAFLSRGKRQEPPPTPEGKLGRFPPMMHHHQAPSDGQTPGARFQRSHLAEAFAKAKGSGGGAGGGGSGRGLMGQIIPIYGFGIFLYILYILFKLSKGKTTAEDGKCYTAMPGNTHRKITSFELAQLQEKLKETEAAMEKLINRVGPNGESTQTDHSDVYVHCLGVFTTKWLDCLIFLSRAQTVTSDQEKRLLHQLREITRVMKEGKFIDRFSPEKEAEEAPYMEDWEGYPEETYPIYDLSDCIKRRQETILVDYPDPKELSAEEIAERMGMIEEEESDHLGWESLPTDPRAQEDNSVTSCDPKP

SEQ ID NO: 74595 - protein, 45 aa, Homo sapiens
  Payload ID: 14740
  Gene Symbol: RIC3
  Gene Name: RIC3 acetylcholine receptor chaperone
  ENSP ID: ENSP00000434787
MAYSTVQRVALASGLVLALSLLLPKAFLSRGKRQEPPPTPEEHRL

SEQ ID NO: 74596 - protein, 43 aa, Homo sapiens
  Payload ID: 14740
  Gene Symbol: RIC3
  Gene Name: RIC3 acetylcholine receptor chaperone
  ENSP ID: ENSP00000435244
MAYSTVQRVALASGLVLALSLLLPKAFLSRGKRQEPPPTPEEN

SEQ ID NO: 74597 - protein, 537 aa, Homo sapiens
  Payload ID: 14741
  Gene Symbol: RIC8A
  Gene Name: RIC8 guanine nucleotide exchange factor A
  Uniprot ID: Q9NPQ8
  ENSP ID: ENSP00000325941
MEPRAVAEAVETGEEDVIMEALRSYNQEHSQSFTFDDAQQEDRKRLAELLVSVLEQGLPPSHRVIWLQSVRILSRDRNCLDPFTSRQSLQALACYADISVSEGSVPESADMDVVLESLKCLCNLVLSSPVAQMLAAEARLVVKLTERVGLYRERSFPHDVQFFDLRLLFLLTALRTDVRQQLFQELKGVRLLTDTLELTLGVTPEGNPPPTLLPSQETERAMEILKVLFNITLDSIKGEVDEEDAALYRHLGTLLRHCVMIATAGDRTEEFHGHAVNLLGNLPLKCLDVLLTLEPHGDSTEFMGVNMDVIRALLIFLEKRLHKTHRLKESVAPVLSVLTECARMHRPARKFLKAQGWPPPQVLPPLRDVRTRPEVGEMLRNKLVRLMTHLDTDVKRVAAEFLFVLCSESVPRFIKYTGYGNAAGLLAARGLMAGGRPEGQYSEDEDTDTDEYKEAKASINPVTGRVEEKPPNPMEGMTEEQKEHEAMKLVTMFDKLSRNRVIQPMGMSPRGHLTSLQDAMCETMEQQLSSDPDSDPD

SEQ ID NO: 74598 - protein, 147 aa, Homo sapiens
  Payload ID: 14741
  Gene Symbol: RIC8A
  Gene Name: RIC8 guanine nucleotide exchange factor A
  ENSP ID: ENSP00000431163
  MOD_RES (1)..(1): Any amino acid
XAAGLLAARGLMAGGRPEGQYSEDEDTDTDEYKEAKASINPVTGRVEEKPPNPMEGMTEEQKEHEAMKLVTMFDKLSRMPCARLWSSSSPRTLTRTLTEDGSSSAPPSGLVLLPETSLGLQPGEATSHWIHTRPHFSILETPSLDSR

SEQ ID NO: 74599 - protein, 531 aa, Homo sapiens
  Payload ID: 14741
  Gene Symbol: RIC8A
  Gene Name: RIC8 guanine nucleotide exchange factor A
  Uniprot ID: Q9NPQ8
  ENSP ID: ENSP00000432008
MEPRAVAEAVETGEEDVIMEALRSYNQEHSQSFTFDDAQQEDRKRLAELLVSVLEQGLPPSHRVIWLQSVRILSRDRNCLDPFTSRQSLQALACYADISVSEGSVPESADMDVVLESLKCLCNLVLSSPVAQMLAAEARLVVKLTERVGLYRERSFPHDVQFFDLRLLFLLTALRTDVRQQLFQELKGVRLLTDTLELTLGVTPEGNPPPTLLPSQETERAMEILKVLFNITLDSIKGEVDEEDAALYRHLGTLLRHCVMIATAGDRTEEFHGHAVNLLGNLPLKCLDVLLTLEPHGDSTEFMGVNMDVIRALLIFLEKRLHKTHRLKESVAPVLSVLTECARMHRPARKFLKAQVLPPLRDVRTRPEVGEMLRNKLVRLMTHLDTDVKRVAAEFLFVLCSESVPRFIKYTGYGNAAGLLAARGLMAGGRPEGQYSEDEDTDTDEYKEAKASINPVTGRVEEKPPNPMEGMTEEQKEHEAMKLVTMFDKLSRNRVIQPMGMSPRGHLTSLQDAMCETMEQQLSSDPDSDPD

SEQ ID NO: 74600 - protein, 44 aa, Homo sapiens
  Payload ID: 14741
  Gene Symbol: RIC8A
  Gene Name: RIC8 guanine nucleotide exchange factor A
  ENSP ID: ENSP00000433009
MDVVLESLKCLCNLVLSSPVAQMLAAEARLVVKLTERVGLYRER

SEQ ID NO: 74601 - protein, 183 aa, Homo sapiens
  Payload ID: 14741
  Gene Symbol: RIC8A
  Gene Name: RIC8 guanine nucleotide exchange factor A
  ENSP ID: ENSP00000433968
MEPRAVAEAVETGEEDVIMEALRSYNQEFSLQHSQSFTFDDAQQEDRKRLAELLVSVLEQGLPPSHRVIWLQSVRILSRDRNCLDPFTSRQSLQALACYADISVSEGSVPESADMDVVLESLKCLCNLVLSSPVAQMLAAEARLVVKLTERVGLYRERSFPHDVQFFDLRLLFLLTALRTDVR

SEQ ID NO: 74602 - protein, 525 aa, Homo sapiens
  Payload ID: 14741
  Gene Symbol: RIC8A
  Gene Name: RIC8 guanine nucleotide exchange factor A
  Uniprot ID: Q9NPQ8
  ENSP ID: ENSP00000434833
MMPNRRTGRWVLAQGVKGQGRVAPGRRAWWSRSSPCPQRLAELLVSVLEQGLPPSHRVIWLQSVRILSRDRNCLDPFTSRQSLQALACYADISVSEGSVPESADMDVVLESLKCLCNLVLSSPVAQMLAAEARLVVKLTERVGLYRERSFPHDVQFFDLRLLFLLTALRTDVRQQLFQELKGVRLLTDTLELTLGVTPEGNPPPTLLPSQETERAMEILKVLFNITLDSIKGEVDEEDAALYRHLGTLLRHCVMIATAGDRTEEFHGHAVNLLGNLPLKCLDVLLTLEPHGDSTEFMGVNMDVIRALLIFLEKRLHKTHRLKESVAPVLSVLTECARMHRPARKFLKAQVLPPLRDVRTRPEVGEMLRNKLVRLMTHLDTDVKRVAAEFLFVLCSESVPRFIKYTGYGNAAGLLAARGLMAGGRPEGQYSEDEDTDTDEYKEAKASINPVTGRVEEKPPNPMEGMTEEQKEHEAMKLVTMFDKLSRNRVIQPMGMSPRGHLTSLQDAMCETMEQQLSSDPDSDPD

SEQ ID NO: 74603 - protein, 147 aa, Homo sapiens
  Payload ID: 14741
  Gene Symbol: RIC8A
  Gene Name: RIC8 guanine nucleotide exchange factor A
  ENSP ID: ENSP00000434896
  MOD_RES (1)..(1): Any amino acid
XEFLFVLCSESVPRFIKYTGYGNAAGLLAARGLMAGGRPEGQYSEDEDTDTDEYKEAKASINPVTGRVEEKPPNPMEGMTEEQKEHEAMKLVTMFDKLSSPTAPFPNRNRVIQPMGMSPRGHLTSLQDAMCETMEQQLSSDPDSDPD

SEQ ID NO: 74604 - protein, 52 aa, Homo sapiens
  Payload ID: 14741
  Gene Symbol: RIC8A
  Gene Name: RIC8 guanine nucleotide exchange factor A
  ENSP ID: ENSP00000435167
MEPRAVAEAVETGEEDVIMEALRSYNQEWLLPELEANRPPASADADPTPLWI

SEQ ID NO: 74605 - protein, 286 aa, Homo sapiens
  Payload ID: 14741
  Gene Symbol: RIC8A
  Gene Name: RIC8 guanine nucleotide exchange factor A
  ENSP ID: ENSP00000436192
  MOD_RES (1)..(1): Any amino acid
XCLCNLVLSSPVAQMLAAEARLVVKLTERVGLYRERSFPHDVQFFDLRLLFLLTALRTDVRQQLFQELKGVRLLTDTLELTLGVTPEGNPPPTLLPSQETERAMEILKVLFNITLDSIKGEVDEHYPESPRKTPGDQEDAALYRHLGTLLRHCVMIATAGDRTEEFHGHAVNLLGNLPLKCLDVLLTLEPHGDSTEFMGVNMDVIRALLIFLEKRLHKTHRLKESVAPVLSVLTECARMHRPARKFLKAQVLPPLRDVRTRPEVGEMLRNKLVRLMTHLDTDVKRV

SEQ ID NO: 74606 - protein, 148 aa, Homo sapiens
  Payload ID: 14741
  Gene Symbol: RIC8A
  Gene Name: RIC8 guanine nucleotide exchange factor A
  ENSP ID: ENSP00000436610
MEPRAVAEAVETGEEDVIMEALRSYNQEHSQSFTFDDAQQEDRKSVRILSRDRNCLDPFTSRQSLQALACYADISVSEGSVPESADMDVVLESLKCLCNLVLSSPVAQMLAAEARLVVKLTERVGLYRERSFPHDVQFFDLRLLFLLT

SEQ ID NO: 74607 - protein, 52 aa, Homo sapiens; identical to SEQ ID NO: 74604
  Payload ID: 14741
  Gene Symbol: RIC8A
  Gene Name: RIC8 guanine nucleotide exchange factor A
  ENSP ID: ENSP00000487470

SEQ ID NO: 74608 - protein, 496 aa, Homo sapiens
  Payload ID: 14742
  Gene Symbol: RIC8B
  Gene Name: RIC8 guanine nucleotide exchange factor B
  Uniprot ID: Q9NVN3
  ENSP ID: ENSP00000347662
MLASKLCEGIFKVLIKDIPTTCQVSCLEVLRILSRDKKVLVPVTTKENMQILLRLAKLNELDDSLEKVSEFPVIVESLKCLCNIVFNSQMAQQLSLELNLAAKLCNLLRKCKDRKFINDIKCFDLRLLFLLSLLHTDIRSQLRYELQGLPLLTQILESAFSIKWTDEYESAIDHNGPPLSPQETDCAIEALKALFNVTVDSWKVHKESDSHQFRVMAAVLRHCLLIVGPTEDKTEELHSNAVNLLSNVPVSCLDVLICPLTHEETAQEATTLDELPSNKTAEKETVLKNNTMVYNGMNMEAIHVLLNFMEKRIDKGSSYREGLTPVLSLLTECSRAHRNIRKFLKDQVLPPLRDVTNRPEVGSTVRNKLVRLMTHVDLGVKQIAAEFLFVLCKERVDSLLKYTGYGNAAGLLAARGLLAGGRGDNWYSEDEDTDTEEYKNAKPNINLITGHLEEPMPNPIDEMTEEQKEYEAMKLVNMLDKLSRRADVKDLHQDGG

SEQ ID NO: 74609 - protein, 560 aa, Homo sapiens
  Payload ID: 14742
  Gene Symbol: RIC8B
  Gene Name: RIC8 guanine nucleotide exchange factor B
  ENSP ID: ENSP00000376582
MDEERALYIVRAGEAGAIERVLRDYSDKHRATFKFESTDEDKRKKLCEGIFKVLIKDIPTTCQVSCLEVLRILSRDKKVLVPVTTKENMQILLRLAKLNELDDSLEKVSEFPVIVESLKCLCNIVFNSQMAQQLSLELNLAAKLCNLLRKCKDRKFINDIKCFDLRLLFLLSLLHTDIRSQLRYELQGLPLLTQILESAFSIKWTDEYESAIDHNGPPLSPQETDCAIEALKALFNVTVDSWKVHKESDSHQFRVMAAVLRHCLLIVGPTEDKTEELHSNAVNLLSNVPVSCLDVLICPLTHEETAQEATTLDELPSNKTAEKETVLKNNTMVYNGMNMEAIHVLLNFMEKRIDKGSSYREGLTPVLSLLTECSRAHRNIRKFLKDQVLPPLRDVTNRPEVGSTVRNKLVRLMTHVDLGVKQIAAEFLFVLCKERVDSLLKYTGYGNAAGLLAARGLLAGGRGDNWYSEDEDTDTEEYKNAKPNINLITGHLEEPMPNPIDEMTEEQKEYEAMKLVNMLDKLSREELLKPMGLKPDGTITPLEEALNQYSVIEETSSDTD

SEQ ID NO: 74610 - protein, 520 aa, Homo sapiens
  Payload ID: 14742
  Gene Symbol: RIC8B
  Gene Name: RIC8 guanine nucleotide exchange factor B
  Uniprot ID: Q9NVN3
  ENSP ID: ENSP00000376583
MDEERALYIVRAGEAGAIERVLRDYSDKHRATFKFESTDEDKRKKLCEGIFKVLIKDIPTTCQVSCLEVLRILSRDKKVLVPVTTKENMQILLRLAKLNELDDSLEKVSEFPVIVESLKCLCNIVFNSQMAQQLSLELNLAAKLCNLLRKCKDRKFINDIKCFDLRLLFLLSLLHTDIRSQLRYELQGLPLLTQILESAFSIKWTDEYESAIDHNGPPLSPQETDCAIEALKALFNVTVDSWKVHKESDSHQFRVMAAVLRHCLLIVGPTEDKTEELHSNAVNLLSNVPVSCLDVLICPLTHEETAQEATTLDELPSNKTAEKETVLKNNTMVYNGMNMEAIHVLLNFMEKRIDKGSSYREGLTPVLSLLTECSRAHRNIRKFLKDQVLPPLRDVTNRPEVGSTVRNKLVRLMTHVDLGVKQIAAEFLFVLCKERVDSLLKYTGYGNAAGLLAARGLLAGGRGDNWYSEDEDTDTEEYKNAKPKEELLKPMGLKPDGTITPLEEALNQYSVIEETSSDTD

SEQ ID NO: 74611 - protein, 536 aa, Homo sapiens
  Payload ID: 14742
  Gene Symbol: RIC8B
  Gene Name: RIC8 guanine nucleotide exchange factor B
  Uniprot ID: Q9NVN3
  ENSP ID: ENSP00000435301
MDEERALYIVRAGEAGAIERVLRDYSDKHRATFKFESTDEDKRKKLCEGIFKVLIKDIPTTCQVSCLEVLRILSRDKKVLVPVTTKENMQILLRLAKLNELDDSLEKVSEFPVIVESLKCLCNIVFNSQMAQQLSLELNLAAKLCNLLRKCKDRKFINDIKCFDLRLLFLLSLLHTDIRSQLRYELQGLPLLTQILESAFSIKWTDEYESAIDHNGPPLSPQETDCAIEALKALFNVTVDSWKVHKESDSHQFRVMAAVLRHCLLIVGPTEDKTEELHSNAVNLLSNVPVSCLDVLICPLTHEETAQEATTLDELPSNKTAEKETVLKNNTMVYNGMNMEAIHVLLNFMEKRIDKGSSYREGLTPVLSLLTECSRAHRNIRKFLKDQVLPPLRDVTNRPEVGSTVRNKLVRLMTHVDLGVKQIAAEFLFVLCKERVDSLLKYTGYGNAAGLLAARGLLAGGRGDNWYSEDEDTDTEEYKNAKPNINLITGHLEEPMPNPIDEMTEEQKEYEAMKLVNMLDKLSRRADVKDLHQDGG

SEQ ID NO: 74612 - protein, 258 aa, Homo sapiens
  Payload ID: 14742
  Gene Symbol: RIC8B
  Gene Name: RIC8 guanine nucleotide exchange factor B
  Uniprot ID: Q9NVN3
  ENSP ID: ENSP00000436359
MLSKLEKSDSHQFRVMAAVLRHCLLIVGPTEDKTEELHSNAVNLLSNVPVSCLDVLICPLTHEETAQEATTLDELPSNKTAEKETVLKNNTMVYNGMNMEAIHVLLNFMEKRIDKGSSYREGLTPVLSLLTECSRAHRNIRKFLKDQVLPPLRDVTNRPEVGSTVRNKLVRLMTHVDLGVKQIAAEFLFVLCKERVDSLLKYTGYGNAAGLLAARGLLAGGRGDNWYSEDEDTDTEEYKNAKPNSIEFEERSHLSRGK

SEQ ID NO: 74613 - protein, 276 aa, Homo sapiens
  Payload ID: 14742
  Gene Symbol: RIC8B
  Gene Name: RIC8 guanine nucleotide exchange factor B
  ENSP ID: ENSP00000447701
  MOD_RES (1)..(1): Any amino acid
XASGGARRLPGGSGLGAQSGRGSPAPAAMDEERALYIVRAGEAGAIERVLRDYSDKHRATFKFESTDEDKRKSDSHQFRVMAAVLRHCLLIVGPTEDKTEELHSNAVNLLSNVPVSCLDVLICPLTHEETAQEATTLDELPSNKTAEKETVLKNNTMVYNGMNMEAIHVLLNFMEKRIDKGSSYREGLTPVLSLLTECSRAHRNIRKFLKDQVLPPLRDVTNRPEVGSTVRNKLVRLMTHVDLGVKQIAAEFLFVLCKERVDSLLKYTGYGNAAGL

SEQ ID NO: 74614 - protein, 41 aa, Homo sapiens
  Payload ID: 14742
  Gene Symbol: RIC8B
  Gene Name: RIC8 guanine nucleotide exchange factor B
  ENSP ID: ENSP00000447801
MDEERALYIVRAGEAGAIERVLRDYSDKSVYRVDGIILPIL

SEQ ID NO: 74615 - protein, 118 aa, Homo sapiens
  Payload ID: 14742
  Gene Symbol: RIC8B
  Gene Name: RIC8 guanine nucleotide exchange factor B
  ENSP ID: ENSP00000448743
MDEERALYIVRAGEAGAIERVLRDYSDKKLCEGIFKVLIKDIPTTCQVSCLEVLRILSRDKKVLVPVTTKENMQILLRLAKLNELDDSLEKVSEFPVIVESLKCLCNIVFNSQMAQQL

SEQ ID NO: 74616 - protein, 30 aa, Homo sapiens
  Payload ID: 14742
  Gene Symbol: RIC8B
  Gene Name: RIC8 guanine nucleotide exchange factor B
  ENSP ID: ENSP00000450396
MGLKPDGTITPLEEALNQYSVIEETSSDTD

SEQ ID NO: 74617 - protein, 46 aa, Homo sapiens
  Payload ID: 14742
  Gene Symbol: RIC8B
  Gene Name: RIC8 guanine nucleotide exchange factor B
  ENSP ID: ENSP00000464118
  MOD_RES (1)..(1): Any amino acid
XINLITGHLEEPMPNPIDEMTEEQKEYEAMKLVNMLDKLSRGIHIF

SEQ ID NO: 74618 - protein, 157 aa, Homo sapiens
  Payload ID: 14743
  Gene Symbol: RFESD
  Gene Name: Rieske (Fe-S) domain containing
  Uniprot ID: Q8TAC1
  ENSP ID: ENSP00000309229
MNLDGSAQDPEKREYSSVCVGREDDIKKSERMTAVVHDREVVIFYHKGEYHAMDIRCYHSGGPLHLGDIEDFDGRPCIVCPWHKYKITLATGEGLYQSINPKDPSAKPKWCSKGIKQRIHTVTVDNGNIYVTLSNEPFKCDSDFYATGDFKVIKSSS

SEQ ID NO: 74619 - protein, 210 aa, Homo sapiens
  Payload ID: 14743
  Gene Symbol: RFESD
  Gene Name: Rieske (Fe-S) domain containing
  Uniprot ID: Q8TAC1
  ENSP ID: ENSP00000369341
MLKCFRNCLRPSSLSTLPLQYGILFPKLLACLVHLHFGHFSSAVISVTSFYLSMNLDGSAQDPEKREYSSVCVGREDDIKKSERMTAVVHDREVVIFYHKGEYHAMDIRCYHSGGPLHLGDIEDFDGRPCIVCPWHKYKITLATGEGLYQSINPKDPSAKPKWCSKGIKQRIHTVTVDNGNIYVTLSNEPFKCDSDFYATGDFKVIKSSS

SEQ ID NO: 74620 - protein, 210 aa, Homo sapiens; identical to SEQ ID NO: 74619
  Payload ID: 14743
  Gene Symbol: RFESD
  Gene Name: Rieske (Fe-S) domain containing
  Uniprot ID: Q8TAC1
  ENSP ID: ENSP00000413592

SEQ ID NO: 74621 - protein, 118 aa, Homo sapiens
  Payload ID: 14743
  Gene Symbol: RFESD
  Gene Name: Rieske (Fe-S) domain containing
  ENSP ID: ENSP00000422520
MNLDGSAQDPEKREYSSVCVGREDDIKKSERMTAVVHDREVVIFYHKGEYHAMDIRCYHSGGPLHLGDIEDFDGRPCIVCPWHKYKITLATGEGLYQSINPKDPSAKPKWCSKGIKQR

SEQ ID NO: 74622 - protein, 60 aa, Homo sapiens
  Payload ID: 14743
  Gene Symbol: RFESD
  Gene Name: Rieske (Fe-S) domain containing
  ENSP ID: ENSP00000425632
MNLDGSAQDPEKREYSSVCVGREDDIKKSERMTAVVHDREVVIFYHKGEYHAMDIRCYRF

SEQ ID NO: 74623 - protein, 1052 aa, Homo sapiens
  Payload ID: 14744
  Gene Symbol: RIMBP2
  Gene Name: RIMS binding protein 2
  Uniprot ID: O15034
  ENSP ID: ENSP00000261655
MREAAERRQQLQLEHDQALAVLSAKQQEIDLLQKSKVRELEEKCRTQSEQFNLLSRDLEKFRQHAGKIDLLGGSAVAPLDISTAPSKPFPQFMNGLATSLGKGQESAIGGSSAIGEYIRPLPQPGDRPEPLSAKPTFLSRSGSARCRSESDMENERNSNTSKQRYSGKVHLCVARYSYNPFDGPNENPEAELPLTAGKYLYVYGDMDEDGFYEGELLDGQRGLVPSNFVDFVQDNESRLASTLGNEQDQNFINHSGIGLEGEHILDLHSPTHIDAGITDNSAGTLDVNIDDIGEDIVPYPRKITLIKQLAKSVIVGWEPPAVPPGWGTVSSYNVLVDKETRMNLTLGSRTKALIEKLNMAACTYRISVQCVTSRGSSDELQCTLLVGKDVVVAPSHLRVDNITQISAQLSWLPTNSNYSHVIFLNEEEFDIVKAARYKYQFFNLRPNMAYKVKVLAKPHQMPWQLPLEQREKKEAFVEFSTLPAGPPAPPQDVTVQAGVTPATIRVSWRPPVLTPTGLSNGANVTGYGVYAKGQRVAEVIFPTADSTAVELVRLRSLEAKGVTVRTLSAQGESVDSAVAAVPPELLVPPTPHPRPAPQSKPLASSGVPETKDEHLGPHARMDEAWEQSRAPGPVHGHMLEPPVGPGRRSPSPSRILPQPQGTPVSTTVAKAMAREAAQRVAESSRLEKRSVFLERSSAGQYAASDEEDAYDSPDFKRRGASVDDFLKGSELGKQPHCCHGDEYHTESSRGSDLSDIMEEDEEELYSEMQLEDGGRRRPSGTSHNALKILGNPASAGRVDHMGRRFPRGSAGPQRSRPVTVPSIDDYGRDRLSPDFYEESETDPGAEELPARIFVALFDYDPLTMSPNPDAAEEELPFKEGQIIKVYGDKDADGFYRGETCARLGLIPCNMVSEIQADDEEMMDQLLRQGFLPLNTPVEKIERSRRSGRRHSVSTRRMVALYDYDPRESSPNVDVEAELTFCTGDIITVFGEIDEDGFYYGELNGQKGLVPSNFLEEVPDDVEVYLSDAPSHYSQDTPMRSKAKRKKSVHFTP

SEQ ID NO: 74624 - protein, 157 aa, Homo sapiens
  Payload ID: 14744
  Gene Symbol: RIMBP2
  Gene Name: RIMS binding protein 2
  ENSP ID: ENSP00000439030
MSPNPDAAEEELPFKEGQIIKVYGDKDADGFYRGETCARLGLIPCNMVSEIQADDEEMMDQLLRQGFLPLNTPVEKIERSRRSGRRHSVSTRRMVALYDYDPRESSPNVDVEAELTFCTGDIITVFGEIDEDGFYYGELNGQKGLVPSNFLEEVPDD

SEQ ID NO: 74625 - protein, 645 aa, Homo sapiens
  Payload ID: 14744
  Gene Symbol: RIMBP2
  Gene Name: RIMS binding protein 2
  Uniprot ID: O15034
  ENSP ID: ENSP00000439159
MNGLATSLGKGQESAIGGSSAIGEYIRPLPQPGDRPEPLSAKPTFLSRSGSARCRSESDMENERNSNTSKQRYSGKVHLCVARYSYNPFDGPNENPEAELPLTAGKYLYVYGDMDEDGFYEGELLDGQRGLVPSNFVDFVQDNESRLASTLGNEQDQNFINHSGIGLEGEHILDLHSPTHIDAGITDNSAGTLDVNIDDIGEDIVPYPRKITLIKQLAKSVIVGWEPPAVPPGWGTVSSYNVLVDKETRMNLTLGSRTKALIEKLNMAACTYRISVQCVTSRGSSDELQCTLLVGKDVVVAPSHLRVDNITQISAQLSWLPTNSNYSHVIFLNEEEFDIVKAARYKYQFFNLRPNMAYKVKVLAKPHQMPWQLPLEQREKKEAFVEFSTLPAGPPAPPQDVTVQAGVTPATIRVSWRPPVLTPTGLSNGANVTGYGVYAKGQRVAEVIFPTADSTAVELVRLRSLEAKGVTVRTLSAQGESVDSAVAAVPPELLVPPTPHPRPAPQSKPLASSGVPETKDEHLGPHARMDEAWEQSRAPGPVHGHMLEPPVGPGRRSPSPSRILPQPQGTPVSTTVAKAMAREAAQRVAESSRLEKRSVFLERSSAGQYAASDEEDAYDSPDFKRRGASVDDFLKGSELGKQMVS

SEQ ID NO: 74626 - protein, 62 aa, Homo sapiens
  Payload ID: 14744
  Gene Symbol: RIMBP2
  Gene Name: RIMS binding protein 2
  ENSP ID: ENSP00000439437
  MOD_RES (1)..(1): Any amino acid
XREAGEVAGVIRYRRGEWWPCMTTTPEKARPTSMSRPNLHFAQEILLQFLVKLMKMDFIMGS

SEQ ID NO: 74627 - protein, 645 aa, Homo sapiens; identical to SEQ ID NO: 74625
  Payload ID: 14744
  Gene Symbol: RIMBP2
  Gene Name: RIMS binding protein 2
  Uniprot ID: O15034
  ENSP ID: ENSP00000440347

SEQ ID NO: 74628 - protein, 1639 aa, Homo sapiens
  Payload ID: 14745
  Gene Symbol: RIMBP3
  Gene Name: RIMS binding protein 3
  Uniprot ID: Q9UFD9
  ENSP ID: ENSP00000483386
MAKDSPSPLGASPKKPGCSSPAAAVLENQRRELEKLRAELEAERAGWRAERRRFAARERQLREEAERERRQLADRLRSKWEAQRSRELRQLQEEMQREREAEIRQLLRWKEAEQRQLQQLLHRERDGVVRQARELQRQLAEELVNRGHCSRPGASEVSAAQCRCRLQEVLAQLRWQTDGEQAARIRYLQAALEVERQLFLKYILAHFRGHPALSGSPDPQAVHSLEEPLPQTSSGSCHAPKPACQLGSLDSLSAEVGVRSRSLGLVSSACSSSPDGLLSTHASSLDCFAPACSRSLDSTRSLPKASKSEERPSSPDTSTPGSRRLSPPPSPLPPPPPPSAHRKLSNPRGGEGSESQPCEVLTPSPPGLGHHELIKLNWLLAKALWVLARRCYTLQAENKQLRRAGCPYQADEKVKRLKVKRAELTGLARRLADRARKLQETNLRAVSAPIPGESCAGLELCQVFARQRARDLSEQASAPLAKDKQIEELRQECHLLQARVASGPCSDLHTGRGGPCTQWLNVRDLDRLQRESQREVLRLQRQLMLQQGNGGAWPEAGGQSATCEEVRRQMLALERELDQRRRECQELGAQAAPARRRGEEAETQLQAALLKNAWLAEENGRLQAKTDWVRKVEAENSEVRGHLGRACQERDASGLIAEQLLQQAARGQDRQQQLQRDPQKALCDLHPSWKEIQALQCRPGHPPEQPWETSQMPESQVKGSRRPKFHARPEDYAVSQPNRDIQEKREASLEESPVALGESASVPQVSETVPASQPLSKKTSSQSNSSSEGSMWATVPSSPTLDRDTASEVDDLEPDSVSLALEMGGSAAPAAPKLKIFMAQYNYNPFEGPNDHPEGELPLTAGDYIYIFGDMDEDGFYEGELEDGRRGLVPSNFVEQIPDSYIPGCLPAKSPDLGPSQLPAGQDEALEEDSLLSGKAQGVVDRGLCQMVRVGSKTEVATEILDTKTEACQLGLLQSMGKQGLSRPLLGTKGVLRMAPMQLHLQNVTATSANITWVYSSHRHPHVVYLDDREHALTPAGVSCYTFQGLCPGTHYRARVEVRLPRDLLQVYWGTMSSTVTFDTLLAGPPYPPLDVLVERHASPGVLVVSWLPVTIDSAGSSNGVQVTGYAVYADGLKVCEVADATAGSTLLEFSQLQVPLTWQKVSVRTMSLCGESLDSVPAQIPEDFFMCHRWPETPPFSYTCGDPSTYRVTFPVCPQKLSLAPPSAKASPHNPGSCGEPQAKFLEAFFEEPPRRQSPVSNLGSEGECPSSGAGSQAQELAEAWEGCRKDLLFQKSPQNHRPPSVSDQPGEKENCSQHMGTSKSPAPGFIHLRTECGPRKEPCQEKAALERVLRQKQDAQGFTPPQLGASQQYASDFHNVLKEEQEALCLDLWGTERREERREPEPHSRQGQALGVKRGCQLHEPSSALCPAPSAKVIKMPRGGPQQLGTGANTPARVFVALSDYNPLVMSANLKAAEEELVFQKRQLLRVWGSQDTHDFYLSECNRQVGNIPGRLVAEMEVGTEQTDRRWRSPAQGNLPSVAHLEDFQGLTIPQGSSLVLQGNSKRLPLWTPKIMIAALDYDPGDGQMGGQGKGRLALRAGDVVMVYGPMDDQGFYYGELGGHRGLVPAHLLDHMSLHGH

SEQ ID NO: 74629 - protein, 1639 aa, Homo sapiens
  Payload ID: 14746
  Gene Symbol: RIMBP3B
  Gene Name: RIMS binding protein 3B
  Uniprot ID: A6NNM3
  ENSP ID: ENSP00000479326
MAKDSPSPLGASPKKPGCSSPAAAVLENQRRELEKLRAELEAERAGWRAERRRFAARERQLREEAERERRQLADRLRSKWEAQRSRELRQLQEEMQREREAEIRQLLRWKEAEQRQLQQLLHRERDGVVRQARELQRQLAEELVNRGHCSRPGASEVSAAQCRCRLQEVLAQLRWQTDGEQAARIRYLQAALEVERQLFLKYILAHFRGHPALSGSPDPQAVHSLEEPLPQTSSGSCHAPKPACQLGSLDSLSAEVGVRSRSLGLVSSACSSSPDGLLSTHASSLDCFAPACSRSLDSTRSLPKASKSEERPSSPDTSTPGSRRLSPPPSPLPPPPPPSAHRKLSNPRGGEGSESQPCEVLTPSPPGLGHHELIKLNWLLAKALWVLARRCYTLQEENKQLRRAGCPYQADEKVKRLKVKRAELTGLARRLADRARELQETNLRAVSAPIPGESCAGLELCQVFARQRARDLSEQASAPLAKDKQIEELRQECHLLQARVASGPCSDLHTGRGGPCTQWLNVRDLDRLQRESQREVLRLQRQLMLQQGNGGAWPEAGGQSATCEEVRRQMLALERELDQRRRECQELGTQAAPARRRGEEAETQLQAALLKNAWLAEENGRLQAKTDWVRKVEAENSEVRGHLGRACQERDASGLIAEQLLQQAARGQDRQQQLQRDPQKALCDLHPSWKEIQALQCRPGHPPEQPWETSQMPESQVKGSRRPKFHARPEDYAVSQPNRDIQEKREASLEESPVALGESASVPQVSETVPASQPLSKKTSSQSNSSSEGSMWATVPSSPTLDRDTASEVDDLEPDSVSLALEMGGSAAPAAPKLKIFMAQYNYNPFEGPNDHPEGELPLTAGDYIYIFGDMDEDGFYEGELDDGRRGLVPSNFVEQIPDSYIPGCLPAKSPDLGPSQLPAGQDEALEEDSLLSGKAQGMVDRGLCQMVRVGSKTEVATEILDTKTEACQLGLLQSMGKQGLSRPLLGTKGVLRMAPMQLHLQNVTATSANITWVYSSHRHPHVVYLDDREHALTPAGVSCYTFQGLCPGTHYRVRVEVRLPWDLLQVYWGTMSSTVTFDTLLAGPPYPPLEVLVERHASPGVLVVSWLPVTIDSAGSSNGVQVTGYAVYADGLKVCEVADATAGSTVLEFSQLQVPLTWQKVSVRTMSLCGESLDSVPAQIPEDFFMCHRWPETPPFSYTCGDPSTYRVTFPVCPQKLSLAPPSAKASPHNPGSCGEPQAKFLEAFFEEPPRRQSPVSNLGSEGECPSSGAGSQAQELAEAWEGCRKDLLFQKSPQNHRPPSVSDQPGEKENCYQHMGTSKSPAPGFIHLRTECGPRKEPCQEKAALERVLRQKQDAQGFTPPQLGASQQYASDFHNVLKEEQEALCLDLRGTERREERREPEPHSRQGQALGVKRGCQLHEPSSALCPAPSAKVIKMPRGGPQQLGTGANTPARVFVALSDYNPLVMSANLKAAEEELVFQKRQLLRVWGSQDTHDFYLSECNRQVGNIPGRLVAEMEVGTEQTDRRWRSPAQGHLPSVAHLEDFQGLTIPQGSSLVLQGNSKRLPLWTPKIMIAALDYDPGDGQMGGQGKGRLALRAGDVVMVYGPMDDQGFYYGELGGHRGLVPAHLLDHMSLHGH

SEQ ID NO: 74630 - protein, 1545 aa, Homo sapiens
  Payload ID: 14747
  Gene Symbol: RIMBP3C
  Gene Name: RIMS binding protein 3C
  ENSP ID: ENSP00000350885
MQREREAEIRQLLRWKEAEQRQLQQLLHRERDGVVRQARELQRQLAEELVNRGHCSRPGASEVSAAQCRCRLQEVLAQLRWQTDGEQAARIRYLQAALEVERQLFLKYILAHFRGHPALSGSPDPQAVHSLEEPLPQTSSGSCHAPKPACQLGSLDSLSAEVGVRSRSLGLVSSACSSSPDGLLSTHASSLDCFAPACSRSLDSTRSLPKASKSEERPSSPDTSTPGSRRLSPPPSPLPPPPPPSAHRKLSNPRGGEGSESQPCEVLTPSPPGLGHHELIKLNWLLAKALWVLARRCYTLQEENKQLRRAGCPYQADEKVKRLKVKRAELTGLARRLADRARELQETNLRAVSAPIPGESCAGLELCQVFARQRARDLSEQASAPLAKDKQIEELRQECHLLQARVASGPCSDLHTGRGGPCTQWLNVRDLDRLQRESQREVLRLQRQLMLQQGNGGAWPEAGGQSATCEEVRRQMLALERELDQRRRECQELGTQAAPARRRGEEAETQLQAALLKNAWLAEENGRLQAKTDWVRKVEAENSEVRGHLGRACQERDASGLIAEQLLQQAARGQDRQQQLQRDPQKALCDLHPSWKEIQALQCRPGHPPEQPWETSQMPESQVKGSRRPKFHARPEDYAVSQPNRDIQEKREASLEESPVALGESASVPQVSETVPASQPLSKKTSSQSNSSSEGSMWATVPSSPTLDRDTASEVDDLEPDSVSLALEMGGSAAPAAPKLKIFMAQYNYNPFEGPNDHPEGELPLTAGDYIYIFGDMDEDGFYEGELDDGRRGLVPSNFVEQIPDSYIPGCLPAKSPDLGPSQLPAGQDEALEEDSLLSGKAQGMVDRGLCQMVRVGSKTEVATEILDTKTEACQLGLLQSMGKQGLSRPLLGTKGVLRMAPMQLHLQNVTATSANITWVYSSHRHPHVVYLDDREHALTPAGVSCYTFQGLCPGTHYRVRVEVRLPWDLLQVYWGTMSSTVTFDTLLAGPPYPPLDVLVERHASPGVLVVSWLPVTIDSAGSSNGVQVTGYAVYADGLKVCEVADATAGSTVLEFSQLQVPLTWQKVSVRTMSLCGESLDSVPAQIPEDFFMCHRWPETPPFSYTCGDPSTYRVTFPVCPQKLSLAPPSAKASPHNPGSCGEPQAKFLEAFFEEPPRRQSPVSNLGSEGECPSSGAGSQAQELAEAWEGCRKDLLFQKSPQNHRPPSVSDQPGEKENCYQHMGTSKSPAPGFIHLRTECGPRKEPCQEKAALERVLRQKQDAQGFTPPQLGASQQYASDFHNVLKEEQEALCLDLRGTERREERREPEPHSRQGQALGVKRGCQLHEPSSALCPAPSAKVIKMPRGGPQQLGTGANTPARVFVALSDYNPLVMSANLKAAEEELVFQKRQLLRVWGSQDTHDFYLSECNRQVGNIPGRLVAEMEVGTEQTDRRWRSPAQGHLPSVAHLEDFQGLIIPQGSSLVLQGNSKRLPLWTPKIMIAALDYDPGDGQMGGQGKGRLALRAGDVVMVYGPMDDQGFYYGELGGHRGLVPAHLLDHMSLHGH

SEQ ID NO: 74631 - protein, 1639 aa, Homo sapiens
  Payload ID: 14747
  Gene Symbol: RIMBP3C
  Gene Name: RIMS binding protein 3C
  Uniprot ID: A6NJZ7
  ENSP ID: ENSP00000390630
MAKDSPSPLGASPKKPGCSSPAAAVLENQRRELEKLRAELEAERAGWRAERRRFAARERQLREEAERERRQLADRLRSKWEAQRSRELRQLQEEMQREREAEIRQLLRWKEAEQRQLQQLLHRERDGVVRQARELQRQLAEELVNRGHCSRPGASEVSAAQCRCRLQEVLAQLRWQTDGEQAARIRYLQAALEVERQLFLKYILAHFRGHPALSGSPDPQAVHSLEEPLPQTSSGSCHAPKPACQLGSLDSLSAEVGVRSRSLGLVSSACSSSPDGLLSTHASSLDCFAPACSRSLDSTRSLPKASKSEERPSSPDTSTPGSRRLSPPPSPLPPPPPPSAHRKLSNPRGGEGSESQPCEVLTPSPPGLGHHELIKLNWLLAKALWVLARRCYTLQEENKQLRRAGCPYQADEKVKRLKVKRAELTGLARRLADRARELQETNLRAVSAPIPGESCAGLELCQVFARQRARDLSEQASAPLAKDKQIEELRQECHLLQARVASGPCSDLHTGRGGPCTQWLNVRDLDRLQRESQREVLRLQRQLMLQQGNGGAWPEAGGQSATCEEVRRQMLALERELDQRRRECQELGTQAAPARRRGEEAETQLQAALLKNAWLAEENGRLQAKTDWVRKVEAENSEVRGHLGRACQERDASGLIAEQLLQQAARGQDRQQQLQRDPQKALCDLHPSWKEIQALQCRPGHPPEQPWETSQMPESQVKGSRRPKFHARPEDYAVSQPNRDIQEKREASLEESPVALGESASVPQVSETVPASQPLSKKTSSQSNSSSEGSMWATVPSSPTLDRDTASEVDDLEPDSVSLALEMGGSAAPAAPKLKIFMAQYNYNPFEGPNDHPEGELPLTAGDYIYIFGDMDEDGFYEGELDDGRRGLVPSNFVEQIPDSYIPGCLPAKSPDLGPSQLPAGQDEALEEDSLLSGKAQGMVDRGLCQMVRVGSKTEVATEILDTKTEACQLGLLQSMGKQGLSRPLLGTKGVLRMAPMQLHLQNVTATSANITWVYSSHRHPHVVYLDDREHALTPAGVSCYTFQGLCPGTHYRVRVEVRLPWDLLQVYWGTMSSTVTFDTLLAGPPYPPLDVLVERHASPGVLVVSWLPVTIDSAGSSNGVQVTGYAVYADGLKVCEVADATAGSTVLEFSQLQVPLTWQKVSVRTMSLCGESLDSVPAQIPEDFFMCHRWPETPPFSYTCGDPSTYRVTFPVCPQKLSLAPPSAKASPHNPGSCGEPQAKFLEAFFEEPPRRQSPVSNLGSEGECPSSGAGSQAQELAEAWEGCRKDLLFQKSPQNHRPPSVSDQPGEKENCYQHMGTSKSPAPGFIHLRTECGPRKEPCQEKAALERVLRQKQDAQGFTPPQLGASQQYASDFHNVLKEEQEALCLDLRGTERREERREPEPHSRQGQALGVKRGCQLHEPSSALCPAPSAKVIKMPRGGPQQLGTGANTPARVFVALSDYNPLVMSANLKAAEEELVFQKRQLLRVWGSQDTHDFYLSECNRQVGNIPGRLVAEMEVGTEQTDRRWRSPAQGHLPSVAHLEDFQGLIIPQGSSLVLQGNSKRLPLWTPKIMIAALDYDPGDGQMGGQGKGRLALRAGDVVMVYGPMDDQGFYYGELGGHRGLVPAHLLDHMSLHGH

SEQ ID NO: 74632 - protein, 1133 aa, Homo sapiens
  Payload ID: 14748
  Gene Symbol: RC3H1
  Gene Name: ring finger and CCCH-type domains 1
  Uniprot ID: Q5TC82
  ENSP ID: ENSP00000258349
MPVQAPQWTDFLSCPICTQTFDETIRKPISLGCGHTVCKMCLNKLHRKACPFDQTTINTDIELLPVNSALLQLVGAQVPEQQPITLCSGVEDTKHYEEAKKCVEELALYLKPLSSARGVGLNSTTQSVLSRPMQRKLVTLVHCQLVEEEGRIRAMRAARSLGERTVTELILQHQNPQQLSSNLWAAVRARGCQFLGPAMQEEALKLVLLALEDGSALSRKVLVLFVVQRLEPRFPQASKTSIGHVVQLLYRASCFKVTKRDEDSSLMQLKEEFRTYEALRREHDSQIVQIAMEAGLRIAPDQWSSLLYGDQSHKSHMQSIIDKLQTPASFAQSVQELTIALQRTGDPANLNRLRPHLELLANIDPSPDAPPPTWEQLENGLVAVRTVVHGLVDYIQNHSKKGADQQQPPQHSKYKTYMCRDMKQRGGCPRGASCTFAHSQEELEKFRKMNKRLVPRRPLSASLGQLNEVGLPSAAILPDEGAVDLPSRKPPALPNGIVSTGNTVTQLIPRGTDPSYDSSLKPGKIDHLSSSAPGSPPDLLESVPKSISALPVNPHSIPPRGPADLPPMPVTKPLQMVPRGSQLYPAQQTDVYYQDPRGAAPPFEPAPYQQGMYYTPPPQCVSRFVRPPPSAPEPAPPYLDHYPPYLQERVVNSQYGTQPQQYPPIYPSHYDGRRVYPAPSYTREEIFRESPIPIEIPPAAVPSYVPESRERYQQIESYYPVAPHPTQIRPSYLREPPYSRLPPPPQPHPSLDELHRRRKEIMAQLEERKVISPPPFAPSPTLPPTFHPEEFLDEDLKVAGKYKGNDYSQYSPWSCDTIGSYIGTKDAKPKDVVAAGSVEMMNVESKGMRDQRLDLQRRAAETSDDDLIPFGDRPTVSRFGAISRTSKTIYQGAGPMQAMAPQGAPTKSINISDYSPYGTHGGWGASPYSPHQNIPSQGHFSERERISMSEVASHGKPLPSAEREQLRLELQQLNHQISQQTQLRGLEAVSNRLVLQREANTLAGQSQPPPPPPPKWPGMISSEQLSLELHQVEREIGKRTRELSMENQCSLDMKSKLNTSKQAENGQPEPQNKVPAEDLTLTFSDVPNGSALTQENISLLSNKTSSLNLSEDPEGGGDNNDSQRSGVTPSSAP

SEQ ID NO: 74633 - protein, 1125 aa, Homo sapiens
  Payload ID: 14748
  Gene Symbol: RC3H1
  Gene Name: ring finger and CCCH-type domains 1
  Uniprot ID: Q5TC82
  ENSP ID: ENSP00000356667
MPVQAPQWTDFLSCPICTQTFDETIRKPISLGCGHTVCKMCLNKLHRKACPFDQTTINTDIELLPVNSALLQLVGAQVPEQQPITLCSGVEDTKHYEEAKKCVEELALYLKPLSSARGVGLNSTTQSVLSRPMQRKLVTLVHCQLVEEEGRIRAMRAARSLGERTVTELILQHQNPQQLSSNLWAAVRARGCQFLGPAMQEEALKLVLLALEDGSALSRKVLVLFVVQRLEPRFPQASKTSIGHVVQLLYRASCFKVTKRDEDSSLMQLKEEFRTYEALRREHDSQIVQIAMEAGLRIAPDQWSSLLYGDQSHKSHMQSIIDKLQTPASFAQSVQELTIALQRTGDPANLNRLRPHLELLANIDPSPDAPPPTWEQLENGLVAVRTVVHGLVDYIQNHSKKGADQQQPPQHSKYKTYMCRDMKQRGGCPRGASCTFAHSQEELEKFRKMNKRLVPRRPLSASLGQLNEVGLPSAAILPDEGAVDLPSRKPPALPNGIVSTGNTVTQLIPRGTDPSYDSSLKPGKIDHLSSSAPGSPPDLLESVPKSISALPVNPHSIPPRGPADLPPMPVTKPLQMVPRGSQLYPAQQTDVYYQDPRGAAPPFEPAPYQQGMYYTPPPQCVSRFVRPPPSAPEPAPPYLDHYPPYLQERVVNSQYGTQPQQYPPIYPSHYDGRRVYPAPSYTREEIFRESPIPIEIPPAAVPSYVPESRERYQQIESYYPVAPHPTQIRPSYLREPPYSRLPPPPQPHPSLDELHRRRKEIMAQLEERKVISPPPFAPSPTLPPTFHPEEFLDEDLKVAGKYKGNDYSQYSPWSCDTIGSYIGTKDAKPKDVVAAGSVEMMNVESKGMRDQRLDLQRRAAETSDDDLIPFGDRPTVSRFGAISRTSKTIYQGAGPMQAMAPQGAPTKSINISDYSPYGTHGGWGASPYSPHQNIPSQGHFSERERISMSEVASHGKPLPSAEREQLRLELQQLNHQISQQTQLRGLEREANTLAGQSQPPPPPPPKWPGMISSEQLSLELHQVEREIGKRTRELSMENQCSLDMKSKLNTSKQAENGQPEPQNKVPAEDLTLTFSSDVPNGSALTQENISLLSNKTSSLNLSEDPEGGGDNNDSQRSGVTPSSAP

SEQ ID NO: 74634 - protein, 1133 aa, Homo sapiens; identical to SEQ ID NO: 74632
  Payload ID: 14748
  Gene Symbol: RC3H1
  Gene Name: ring finger and CCCH-type domains 1
  Uniprot ID: Q5TC82
  ENSP ID: ENSP00000356669

SEQ ID NO: 74635 - protein, 506 aa, Homo sapiens
  Payload ID: 14749
  Gene Symbol: RC3H2
  Gene Name: ring finger and CCCH-type domains 2
  ENSP ID: ENSP00000335150
MPVQAAQWTEFLSCPICYNEFDENVHKPISLGCSHTVCKTCLNKLHRKACPFDQTAINTDIDVLPVNFALLQLVGAQVPDHQSIKLSNLGENKHYEVAKKCVEDLALYLKPLSGGKGVASLNQSALSRPMQRKLVTLVNCQLVEEEGRVRAMRAARSLGERTVTELILQHQNPQQLSANLWAAVRARGCQFLGPAMQEEALKLVLLALEDGSALSRKVLVLFVVQRLEPRFPQASKTSIGHVVQLLYRASCFKVTKRDEDSSLMQLKEEFRSYEALRREHDAQIVHIAMEAGLRISPEQWSSLLYGDLAHKSHMQSIIDKLQSPESFAKSVQELTIVLQRTGDPANLNRLRPHLELLANIDPNPDAVSPTWEQLENAMVAVKTVVHGLVDFIQNYSRKGHETPQPQPNSKYKTSMCRDLRQQGGCPRGTNCTFAHSQEELEKCNPRGLYLHCCLLSSVASLGTVHNELYKQQHCDREKISVCAVKRAETCFSSQFFSPLEVPREED

SEQ ID NO: 74636 - protein, 1191 aa, Homo sapiens
  Payload ID: 14749
  Gene Symbol: RC3H2
  Gene Name: ring finger and CCCH-type domains 2
  Uniprot ID: Q9HBD1
  ENSP ID: ENSP00000349783
MPVQAAQWTEFLSCPICYNEFDENVHKPISLGCSHTVCKTCLNKLHRKACPFDQTAINTDIDVLPVNFALLQLVGAQVPDHQSIKLSNLGENKHYEVAKKCVEDLALYLKPLSGGKGVASLNQSALSRPMQRKLVTLVNCQLVEEEGRVRAMRAARSLGERTVTELILQHQNPQQLSANLWAAVRARGCQFLGPAMQEEALKLVLLALEDGSALSRKVLVLFVVQRLEPRFPQASKTSIGHVVQLLYRASCFKVTKRDEDSSLMQLKEEFRSYEALRREHDAQIVHIAMEAGLRISPEQWSSLLYGDLAHKSHMQSIIDKLQSPESFAKSVQELTIVLQRTGDPANLNRLRPHLELLANIDPNPDAVSPTWEQLENAMVAVKTVVHGLVDFIQNYSRKGHETPQPQPNSKYKTSMCRDLRQQGGCPRGTNCTFAHSQEELEKYRLRNKKINATVRTFPLLNKVGVNNTVTTTAGNVISVIGSTETTGKIVPSTNGISNAENSVSQLISRSTDSTLRALETVKKVGKVGANGQNAAGPSADSVTENKIGSPPKTPVSNVAATSAGPSNVGTELNSVPQKSSPFLTRVPVYPPHSENIQYFQDPRTQIPFEVPQYPQTGYYPPPPTVPAGVAPCVPRFVRSNNVPESSLPPASMPYADHYSTFSPRDRMNSSPYQPPPPQPYGPVPPVPSGMYAPVYDSRRIWRPPMYQRDDIIRSNSLPPMDVMHSSVYQTSLRERYNSLDGYYSVACQPPSEPRTTVPLPREPCGHLKTSCEEQIRRKPDQWAQYHTQKAPLVSSTLPVATQSPTPPSPLFSVDFRADFSESVSGTKFEEDHLSHYSPWSCGTIGSCINAIDSEPKDVIANSNAVLMDLDSGDVKRRVHLFETQRRTKEEDPIIPFSDGPIISKWGAISRSSRTGYHTTDPVQATASQGSATKPISVSDYVPYVNAVDSRWSSYGNEATSSAHYVERDRFIVTDLSGHRKHSSTGDLLSLELQQAKSNSLLLQREANALAMQQKWNSLDEGRHLTLNLLSKEIELRNGELQSDYTEDATDTKPDRDIELELSALDTDEPDGQSEPIEEILDIQLGISSQNDQLLNGMAVENGHPVQQHQKEPPKQKKQSLGEDHVILEEQKTILPVTSCFSQPLPVSISNASCLPITTSVSAGNLILKTHVMSEDKNDFLKPVANGKMVNS

SEQ ID NO: 74637 - protein, 1191 aa, Homo sapiens; identical to SEQ ID NO: 74636
  Payload ID: 14749
  Gene Symbol: RC3H2
  Gene Name: ring finger and CCCH-type domains 2
  Uniprot ID: Q9HBD1
  ENSP ID: ENSP00000362774

SEQ ID NO: 74638 - protein, 111 aa, Homo sapiens
  Payload ID: 14749
  Gene Symbol: RC3H2
  Gene Name: ring finger and CCCH-type domains 2
  ENSP ID: ENSP00000381663
LMDLDSGDVKRRVHLFETQRRTKEEDPIIPFSDGPIISKWGAISRSSRTGYHTTDPVQATASQGSATKPISVSGGVHMATRPHHQHTMLKGTDSLLLIYLVIESIPVLGTF

SEQ ID NO: 74639 - protein, 188 aa, Homo sapiens
  Payload ID: 14749
  Gene Symbol: RC3H2
  Gene Name: ring finger and CCCH-type domains 2
  ENSP ID: ENSP00000398081
  MOD_RES (1)..(1): Any amino acid
XYVNAVDSRWSSYGNEATSSAHYVERDRFIVTDLSGHRKHSSTGDLLSLELQQAKSNSLLLQREANALAMQQKWNSLDEGRHLTLNLLSKEIELRNGELQSDYTEDATDTKPDRDIELELSALDTDEPDGQSEPIEEILDIQLGISSQNDQLLNGMAVENGHPVQQHQKEPPKQKKQSLGRSKKQFCR

SEQ ID NO: 74640 - protein, 1064 aa, Homo sapiens
  Payload ID: 14749
  Gene Symbol: RC3H2
  Gene Name: ring finger and CCCH-type domains 2
  Uniprot ID: Q9HBD1
  ENSP ID: ENSP00000411767
MPVQAAQWTEFLSCPICYNEFDENVHKPISLGCSHTVCKTCLNKLHRKACPFDQTAINTDIDVLPVNFALLQLVGAQVPDHQSIKLSNLGENKHYEVAKKCVEDLALYLKPLSGGKGVASLNQSALSRPMQRKLVTLVNCQLVEEEGRVRAMRAARSLGERTVTELILQHQNPQQLSANLWAAVRARGCQFLGPAMQEEALKLVLLALEDGSALSRKVLVLFVVQRLEPRFPQASKTSIGHVVQLLYRASCFKVTKRDEDSSLMQLKEEFRSYEALRREHDAQIVHIAMEAGLRISPEQWSSLLYGDLAHKSHMQSIIDKLQSPESFAKSVQELTIVLQRTGDPANLNRLRPHLELLANIDPNPDAVSPTWEQLENAMVAVKTVVHGLVDFIQNYSRKGHETPQPQPNSKYKTSMCRDLRQQGGCPRGTNCTFAHSQEELEKYRLRNKKINATVRTFPLLNKVGVNNTVTTTAGNVISVIGSTETTGKIVPSTNGISNAENSVSQLISRSTDSTLRALETVKKVGKVGANGQNAAGPSADSVTENKIGSPPKTPVSNVAATSAGPSNVGTELNSVPQKSSPFLTRVPVYPPHSENIQYFQDPRTQIPFEVPQYPQTGYYPPPPTVPAGVAPCVPRFVRSNNVPESSLPPASMPYADHYSTFSPRDRMNSSPYQPPPPQPYGPVPPVPSGMYAPVYDSRRIWRPPMYQRDDIIRSNSLPPMDVMHSSVYQTSLRERYNSLDGYYSVACQPPSEPRTTVPLPREPCGHLKTSCEEQIRRKPDQWAQYHTQKAPLVSSTLPVATQSPTPPSPLFSVDFRADFSESVSGTKFEEDHLSHYSPWSCGTIGSCINAIDSEPKDVIANSNAVLMDLDSGDVKRRVHLFETQRRTKEEDPIIPFSDGPIISKWGAISRSSRTGYHTTDPVQATASQGSATKPISVSDYVPYVNAVDSRWSSYGNEATSSAHYVERDRFIVTDLSGHRKHSSTGDLLSLELQQAKSNSLLLQREANALAMQQKWNSLDEGRHLTLNLLSKEIELRNGEVKKLNLSASCLMYLFSAAASWLYHY

SEQ ID NO: 74641 - protein, 218 aa, Homo sapiens
  Payload ID: 14749
  Gene Symbol: RC3H2
  Gene Name: ring finger and CCCH-type domains 2
  Uniprot ID: Q9HBD1
  ENSP ID: ENSP00000474148
MPVQAAQWTEFLSCPICYNEFDENVHKPISLGCSHTVCKTCLNKLHRKACPFDQTAINTDIDVLPVNFALLQLVGAQVPDHQSIKLSNLGENKHYEVAKKCVEDLALYLKPLSGGKGVASLNQSALSRPMQRKLVTLVNCQLVEEEGRVRAMRAARSLGERTVTELILQHQNPQQLSANLWAAVRARGCQFLGPGKIGYYLTFFISYWGLRMPISGAR

SEQ ID NO: 74642 - protein, 478 aa, Homo sapiens
  Payload ID: 14749
  Gene Symbol: RC3H2
  Gene Name: ring finger and CCCH-type domains 2
  Uniprot ID: Q9HBD1
  ENSP ID: ENSP00000474709
MPVQAAQWTEFLSCPICYNEFDENVHKPISLGCSHTVCKTCLNKLHRKACPFDQTAINTDIDVLPVNFALLQLVGAQVPDHQSIKLSNLGENKHYEVAKKCVEDLALYLKPLSGGKGVASLNQSALSRPMQRKLVTLVNCQLVEEEGRVRAMRAARSLGERTVTELILQHQNPQQLSANLWAAVRARGCQFLGPAMQEEALKLVLLALEDGSALSRKVLVLFVVQRLEPRFPQASKTSIGHVVQLLYRASCFKVTKRDEDSSLMQLKEEFRSYEALRREHDAQIVHIAMEAGLRISPEQWSSLLYGDLAHKSHMQSIIDKLQSPESFAKSVQELTIVLQRTGDPANLNRLRPHLELLANIDPNPDAVSPTWEQLENAMVAVKTVVHGLVDFIQNYSRKGHETPQPQPNSKYKTSMCRDLRQQGGCPRGTNCTFAHSQEELEKYRLRNKKINATEVLKQQGKLFQVQTEFQMQKTVFPS

SEQ ID NO: 74643 - protein, 261 aa, Homo sapiens
  Payload ID: 14750
  Gene Symbol: RCHY1
  Gene Name: ring finger and CHY zinc finger domain containing 1, E3 ubiquitin protein ligase
  Uniprot ID: Q96PM5
  ENSP ID: ENSP00000321239
MAATAREDGASGQERGQRGCEHYDRGCLLKAPCCDKLYTCRLCHDNNEDHQLDRFKVKEVQCINCEKIQHAQQTCEECSTLFGEYYCDICHLFDKDKKQYHCENCGICRIGPKEDFFHCLKCNLCLAMNLQGRHKCIENVSRQNCPICLEDIHTSRVVAHVLPCGHLLHRTCYEEMLKEGYRCPLCMHSALDMTRYWRQLDDEVAQTPMPSEYQNMTVDILCNDCNGRSTVQFHILGMKCKICESYNTAQAGGRRISLDQQ

SEQ ID NO: 74644 - protein, 221 aa, Homo sapiens
  Payload ID: 14750
  Gene Symbol: RCHY1
  Gene Name: ring finger and CHY zinc finger domain containing 1, E3 ubiquitin protein ligase
  Uniprot ID: Q96PM5
  ENSP ID: ENSP00000370220
MAATAREDGASGQERGQRGCEHYDRGCLLKAQQTCEECSTLFGEYYCDICHLFDKDKKQYHCENCGICRIGPKEDFFHCLKCNLCLAMNLQGRHKCIENVSRQNCPICLEDIHTSRVVAHVLPCGHLLHRTCYEEMLKEGYRCPLCMHSALDMTRYWRQLDDEVAQTPMPSEYQNMTVDILCNDCNGRSTVQFHILGMKCKICESYNTAQAGGRRISLDQQ

SEQ ID NO: 74645 - protein, 252 aa, Homo sapiens
  Payload ID: 14750
  Gene Symbol: RCHY1
  Gene Name: ring finger and CHY zinc finger domain containing 1, E3 ubiquitin protein ligase
  Uniprot ID: Q96PM5
  ENSP ID: ENSP00000421084
MAATAREDGASGQERGQRGCEHYDRGCLLKAPCCDKLYTCRLCHDNNEDHQLDRFKVKEVQCINCEKIQHAQQTCEECSTLFGEYYCDICHLFDKDKKQYHCENCGICRIGPKEDFFHCLKCNLCLAMNLQGRHKCIENVSRQNCPICLEDIHTSRVVAHVLPCGHLLHRGYRCPLCMHSALDMTRYWRQLDDEVAQTPMPSEYQNMTVDILCNDCNGRSTVQFHILGMKCKICESYNTAQAGGRRISLDQQ

SEQ ID NO: 74646 - protein, 107 aa, Homo sapiens
  Payload ID: 14750
  Gene Symbol: RCHY1
  Gene Name: ring finger and CHY zinc finger domain containing 1, E3 ubiquitin protein ligase
  ENSP ID: ENSP00000421958
MAATAREDGASGQERGQRGCEHYDRGCLLKAPCCDKLYTCRLCHDNNEDHQLDRFKVKEVQCINCEKIQHAQQTCEECSTLFGEYYCDICHLFDKDKKQYHCENCGI

SEQ ID NO: 74647 - protein, 239 aa, Homo sapiens
  Payload ID: 14750
  Gene Symbol: RCHY1
  Gene Name: ring finger and CHY zinc finger domain containing 1, E3 ubiquitin protein ligase
  Uniprot ID: Q96PM5
  ENSP ID: ENSP00000423976
MAPAVKSEAPCCDKLYTCRLCHDNNEDHQLDRFKVKEVQCINCEKIQHAQQTCEECSTLFGEYYCDICHLFDKDKKQYHCENCGICRIGPKEDFFHCLKCNLCLAMNLQGRHKCIENVSRQNCPICLEDIHTSRVVAHVLPCGHLLHRTCYEEMLKEGYRCPLCMHSALDMTRYWRQLDDEVAQTPMPSEYQNMTVDILCNDCNGRSTVQFHILGMKCKICESYNTAQAGGRRISLDQQ

SEQ ID NO: 74648 - protein, 212 aa, Homo sapiens
  Payload ID: 14750
  Gene Symbol: RCHY1
  Gene Name: ring finger and CHY zinc finger domain containing 1, E3 ubiquitin protein ligase
  Uniprot ID: Q96PM5
  ENSP ID: ENSP00000424472
MAATAREDGASGQERGQRGCEHYDRGCLLKAQQTCEECSTLFGEYYCDICHLFDKDKKQYHCENCGICRIGPKEDFFHCLKCNLCLAMNLQGRHKCIENVSRQNCPICLEDIHTSRVVAHVLPCGHLLHRGYRCPLCMHSALDMTRYWRQLDDEVAQTPMPSEYQNMTVDILCNDCNGRSTVQFHILGMKCKICESYNTAQAGGRRISLDQQ

SEQ ID NO: 74649 - protein, 188 aa, Homo sapiens
  Payload ID: 14750
  Gene Symbol: RCHY1
  Gene Name: ring finger and CHY zinc finger domain containing 1, E3 ubiquitin protein ligase
  Uniprot ID: Q96PM5
  ENSP ID: ENSP00000424631
MAATAREDGASGQERGQRGCEHYDRGCLLKAPCCDKLYTCRLCHDNNEDHQLDRFKVKEVQCINCEKIQHAQQTCEECSTLFGEYYCDICHLFDKDKKQYHCENCGICRIGPKEDFFHCLKCNLCLAMNLQGRHKCIENVSRQNCPICLEDIHTSRVVAHVLPCGHLLHRTCYEEMLKEYDQVLETAG

SEQ ID NO: 74650 - protein, 111 aa, Homo sapiens
  Payload ID: 14750
  Gene Symbol: RCHY1
  Gene Name: ring finger and CHY zinc finger domain containing 1, E3 ubiquitin protein ligase
  ENSP ID: ENSP00000427205
SGQERGQRGCEHYDRGCLLKVTPSMDSSLTSFRQAPCCDKLYTCRLCHDNNEDHQLDRFKVKEVQCINCEKIQHAQQTCEECSTLFGEYYCDICHLFDKDKKQYHCENCGI

SEQ ID NO: 74651 - protein, 363 aa, Homo sapiens
  Payload ID: 14751
  Gene Symbol: RFFL
  Gene Name: ring finger and FYVE-like domain containing E3 ubiquitin protein ligase
  Uniprot ID: Q8WZ73
  ENSP ID: ENSP00000326170
MWATCCNWFCLDGQPEEVPPPQGARMQAYSNPGYSSFPSPTGLEPSCKSCGAHFANTARKQTCLDCKKNFCMTCSSQVGNGPRLCLLCQRFRATAFQREELMKMKVKDLRDYLSLHDISTEMCREKEELVLLVLGQQPVISQEDRTRASTLSPDFPEQQAFLTQPHSSMVPPTSPNLPSSSAQATSVPPAQVQENQQANGHVSQDQEEPVYLESVARVPAEDETQSIDSEDSFVPGRRASLSDLTDLEDIEGLTVRQLKEILARNFVNYKGCCEKWELMERVTRLYKDQKGLQHLVSGAEDQNGGAVPSGLEENLCKICMDSPIDCVLLECGHMVTCTKCGKRMNECPICRQYVIRAVHVFRS

SEQ ID NO: 74652 - protein, 363 aa, Homo sapiens; identical to SEQ ID NO: 74651
  Payload ID: 14751
  Gene Symbol: RFFL
  Gene Name: ring finger and FYVE-like domain containing E3 ubiquitin protein ligase
  Uniprot ID: Q8WZ73
  ENSP ID: ENSP00000378096

SEQ ID NO: 74653 - protein, 363 aa, Homo sapiens; identical to SEQ ID NO: 74651
  Payload ID: 14751
  Gene Symbol: RFFL
  Gene Name: ring finger and FYVE-like domain containing E3 ubiquitin protein ligase
  Uniprot ID: Q8WZ73
  ENSP ID: ENSP00000389832

SEQ ID NO: 74654 - protein, 152 aa, Homo sapiens
  Payload ID: 14751
  Gene Symbol: RFFL
  Gene Name: ring finger and FYVE-like domain containing E3 ubiquitin protein ligase
  ENSP ID: ENSP00000395090
MWATCCNWFCLDGQPEEVPPPQGARMQAYSNPGYSSFPSPTGLEPSCKSCGAHFANTARKQTCLDCKKNFCMTCSSQVGNGPRLCLLCQRFRATAFQREELMKMKVKDLRDYLSLHDISTEMCREKEELVLLVLGQQPVISQEDRTRASTLS

SEQ ID NO: 74655 - protein, 355 aa, Homo sapiens
  Payload ID: 14751
  Gene Symbol: RFFL
  Gene Name: ring finger and FYVE-like domain containing E3 ubiquitin protein ligase
  Uniprot ID: Q8WZ73
  ENSP ID: ENSP00000408513
MWATCCNWFCLDGQPEEVPPPQGARMQAYSNPGYSSFPSPTGLEPSCKSCGAHFANTARKQTCLDCKKNFCMTCSSQVGNGPRLCLLCQRFRATAFQREELMKMKVKDLRDYLSLHDISTEMCREKEELVLLVLGQQPVISQEDRTRASTLSPDFPEQQAFLTQPHSSMVPPTSPNLPSSSAQATSVPPAQVQENQQANGHVSQDQEEPVYLESVARVPAEDETQSIDSEDSFVPGRRASLSDLTDLEDIEGLTVRQLKEILARNFVNYKGCCEKWELMERVTRLYKDQKGLQHLGGAVPSGLEENLCKICMDSPIDCVLLECGHMVTCTKCGKRMNECPICRQYVIRAVHVFRS

SEQ ID NO: 74656 - protein, 363 aa, Homo sapiens; identical to SEQ ID NO: 74651
  Payload ID: 14751
  Gene Symbol: RFFL
  Gene Name: ring finger and FYVE-like domain containing E3 ubiquitin protein ligase
  Uniprot ID: Q8WZ73
  ENSP ID: ENSP00000412322

SEQ ID NO: 74657 - protein, 127 aa, Homo sapiens
  Payload ID: 14751
  Gene Symbol: RFFL
  Gene Name: ring finger and FYVE-like domain containing E3 ubiquitin protein ligase
  ENSP ID: ENSP00000462499
MWATCCNWFCLDGQPEEVPPPQGARMQAYSNPGYSSFPSPTGLEPSCKSCGAHFANTARKANGHVSQDQEEPVYLESVARVPAEDETQSIDSEDSFVPGRRASLSDLTDLEDIEGLTVRQLKEILAR

SEQ ID NO: 74658 - protein, 141 aa, Homo sapiens
  Payload ID: 14751
  Gene Symbol: RFFL
  Gene Name: ring finger and FYVE-like domain containing E3 ubiquitin protein ligase
  ENSP ID: ENSP00000462656
  MOD_RES (1)..(1): Any amino acid
XTSVPPAQVQENQQSIDSEDSFVPGRRASLSDLTDLEDIEGLTVRQLKEILARNFVNYKGCCEKWELMERVTRLYKDQKGLQHLVSGAEDQNGGAVPSGLEENLCKICMDSPIDCVLLECGHMVTCTKCGKRMNECPICRQ

SEQ ID NO: 74659 - protein, 327 aa, Homo sapiens
  Payload ID: 14751
  Gene Symbol: RFFL
  Gene Name: ring finger and FYVE-like domain containing E3 ubiquitin protein ligase
  Uniprot ID: Q8WZ73
  ENSP ID: ENSP00000463035
MWATCCNWFCLDGQPEEVPPPQGARMQAYSNPGYSSFPSPTGLEPSCKSCGAHFANTARKQTCLDCKKNFCMTCSSQVGNGPRLCLLCQRFRATAFQREELMKMKVKDLRDYLSLHDISTEMCREKEELVLLVLGQQPVISQEDRTRASTLSPDFPEQQAFLTQPHSSMVPPTSPNLPSSSAQATSVPPAQVQENQQSIDSEDSFVPGRRASLSDLTDLEDIEGLTVRQLKEILARNFVNYKGCCEKWELMERVTRLYKDQKGLQHLGGAVPSGLEENLCKICMDSPIDCVLLECGHMVTCTKCGKRMNECPICRQYVIRAVHVFRS

SEQ ID NO: 74660 - protein, 60 aa, Homo sapiens
  Payload ID: 14751
  Gene Symbol: RFFL
  Gene Name: ring finger and FYVE-like domain containing E3 ubiquitin protein ligase
  ENSP ID: ENSP00000464000
MWATCCNWFCLDGQPEEVPPPQGARMQAYSNPGYSSFPSPTGLEPSCKSCGAHFANTARK

SEQ ID NO: 74661 - protein, 576 aa, Homo sapiens
  Payload ID: 14752
  Gene Symbol: RSPRY1
  Gene Name: ring finger and SPRY domain containing 1
  Uniprot ID: Q96DX4
  ENSP ID: ENSP00000377942
MIVFGWAVFLASRSLGQGLLLTLEEHIAHFLGTGGAATTMGNSCICRDDSGTDDSVDTQQQQAENSAVPTADTRSQPRDPVRPPRRGRGPHEPRRKKQNVDGLVLDTLAVIRTLVDNDQEPPYSMITLHEMAETDEGWLDVVQSLIRVIPLEDPLGPAVITLLLDECPLPTKDALQKLTEILNLNGEVACQDSSHPAKHRNTSAVLGCLAEKLAGPASIGLLSPGILEYLLQCLKLQSHPTVMLFALIALEKFAQTSENKLTISESSISDRLVTLESWANDPDYLKRQVGFCAQWSLDNLFLKEGRQLTYEKVNLSSIRAMLNSNDVSEYLKISPHGLEARCDASSFESVRCTFCVDAGVWYYEVTVVTSGVMQIGWATRDSKFLNHEGYGIGDDEYSCAYDGCRQLIWYNARSKPHIHPCWKEGDTVGFLLDLNEKQMIFFLNGNQLPPEKQVFSSTVSGFFAAASFMSYQQCEFNFGAKPFKYPPSMKFSTFNDYAFLTAEEKIILPRHRRLALLKQVSIRENCCSLCCDEVADTQLKPCGHSDLCMDCALQLETCPLCRKEIVSRIRQISHIS

SEQ ID NO: 74662 - protein, 576 aa, Homo sapiens; identical to SEQ ID NO: 74661
  Payload ID: 14752
  Gene Symbol: RSPRY1
  Gene Name: ring finger and SPRY domain containing 1
  Uniprot ID: Q96DX4
  ENSP ID: ENSP00000443176

SEQ ID NO: 74663 - protein, 172 aa, Homo sapiens
  Payload ID: 14752
  Gene Symbol: RSPRY1
  Gene Name: ring finger and SPRY domain containing 1
  ENSP ID: ENSP00000455367
MIVFGWAVFLASRSLGQGLLLTLEEHIAHFLGTGGAATTMGNSCICRDDSGTDDSVDTQQQQAENSAVPTADTRSQPRDPVRPPRRGRGPHEPRRKKQNVDGLVLDTLAVIRTLVDKRKLQNEDAYIGPCFHKSSTGIVVSLPGISLSDQEPPYSMITLHEMAETDEGWLDV

SEQ ID NO: 74664 - protein, 45 aa, Homo sapiens
  Payload ID: 14752
  Gene Symbol: RSPRY1
  Gene Name: ring finger and SPRY domain containing 1
  ENSP ID: ENSP00000455768
MITLHEMAETDEGWLDVVQSLIRVIPLEDPLGPAVITLLLDECPL

SEQ ID NO: 74665 - protein, 121 aa, Homo sapiens
  Payload ID: 14752
  Gene Symbol: RSPRY1
  Gene Name: ring finger and SPRY domain containing 1
  ENSP ID: ENSP00000455891
MIVFGWAVFLASRSLGQGLLLTLEEHIAHFLGTGGAATTMGNSCICRDDSGTDDSVDTQQQQAENSAVPTADTRSQPRDPVRPPRRGRGPHEPRRKKQNVDGLVLDTLAVIRTLVDNDQEP

SEQ ID NO: 74666 - protein, 146 aa, Homo sapiens
  Payload ID: 14752
  Gene Symbol: RSPRY1
  Gene Name: ring finger and SPRY domain containing 1
  ENSP ID: ENSP00000456646
MIVFGWAVFLASRSLGQGLLLTLEEHIAHFLGTGGAATTMGNSCICRDDSGTDDSVDTQQQQAENSAVPTADTRSQPRDPVRPPRRGRGPHEPRRKKQNVDGLVLDTLAVIRTLVDNDQEPPYSMITLHEMAETDEGWLDVVQSLI

SEQ ID NO: 74667 - protein, 146 aa, Homo sapiens; identical to SEQ ID NO: 74666
  Payload ID: 14752
  Gene Symbol: RSPRY1
  Gene Name: ring finger and SPRY domain containing 1
  ENSP ID: ENSP00000457705

SEQ ID NO: 74668 - protein, 707 aa, Homo sapiens
  Payload ID: 14753
  Gene Symbol: RFWD2
  Gene Name: ring finger and WD repeat domain 2, E3 ubiquitin protein ligase
  Uniprot ID: Q8NHY2
  ENSP ID: ENSP00000310943
MSGSRQAGSGSAGTSPGSSAASSVTSASSSLSSSPSPPSVAVSAAALVSGGVAQAAGSGGLGGPVRPVLVAPAVSGSGGGAVSTGLSRHSCAARPSAGVGGSSSSLGSGSRKRPLLAPLCNGLINSYEDKSNDFVCPICFDMIEEAYMTKCGHSFCYKCIHQSLEDNNRCPKCNYVVDNIDHLYPNFLVNELILKQKQRFEEKRFKLDHSNGHRWQIFQDWLGTDQDNLDLANVNLMLELLVQKKKQLEAESHAAQLQILMEFLKVARRNKREEMSGLYSPVSEDSTVPQFEAPSPSHSSIIDSTEYSQPPGFSGSSQTKKQPWYNSTLASRRKRLTAHFEDLEQCYFSTRMSRISDDSRTASQLDEFQECLSKFTRYNSVRPLATLSYASDLYNGSSIVSSIEFDRDCDYFAIAGVTKKIKVYEYDTVIQDAVDIHYPENEMTCNSKISCISWSSYHKNLLASSDYEGTVILWDGFTGQRSKVYQEHEKRCWSVDFNLMDPKLLASGSDDAKVKLWSTNLDNSVASIEAKANVCCVKFSPSSRYHLAFGCADHCVHYYDLRNTKQPIMVFKGHRKAVSYAKFVSGEEIVSASTDSQLKLWNVGKPYCLRSFKGHINEKNFVGLASNGDYIACGSENNSLYLYYKGLSKTLLTFKFDTVKSVLDKDRKEDDTNEFVSAVCWRALPDGESNVLIAANSQGTIKVLELV

SEQ ID NO: 74669 - protein, 566 aa, Homo sapiens
  Payload ID: 14753
  Gene Symbol: RFWD2
  Gene Name: ring finger and WD repeat domain 2, E3 ubiquitin protein ligase
  ENSP ID: ENSP00000356638
AYMTKCGHSFCYKCIHQSLEDNNRCPKCNYVVDNIDHLYPNFLVNELILKQKQRFEEKRFKLDHSVSSTNGHRWQIFQDWLGTDQDNLDLANVNLMLELLVQKKKQLEAESHAAQLQILMEFLKVARRNKREEMSGLYSPVSEDSTVPQFEAPSPSHSSIIDSTEYSQPPGFSGSSQTKKQPWYNSTLASRRKRLTAHFEDLEQCYFSTRMSRISDDSRTASQLDEFQECLSKFTRYNSVRPLATLSYASDLYNGSSIVSSIEFDRDCDYFAIAGVTKKIKVYEYDTVIQDAVDIHYPENEMTCNSKISCISWSSYHKNLLASSDYEGTVILWDGFTGQRSKVYQEHEKRCWSVDFNLMDPKLLASGSDDAKVKLWSTNLDNSVASIEAKANVCCVKFSPSSRYHLAFGCADHCVHYYDLRNTKQPIMVFKGHRKAVSYAKFVSGEEIVSASTDSQLKLWNVGKPYCLRSFKGHINEKNFVGLASNGDYIACGSENNSLYLYYKGLSKTLLTFKFDTVKSVLDKDRKEDDTNEFVSAVCWRALPDGESNVLIAANSQGTIKVLELV

SEQ ID NO: 74670 - protein, 113 aa, Homo sapiens
  Payload ID: 14753
  Gene Symbol: RFWD2
  Gene Name: ring finger and WD repeat domain 2, E3 ubiquitin protein ligase
  ENSP ID: ENSP00000356639
  MOD_RES (1)..(1): Any amino acid
XAGVGGSSSSLGSGSRKRPLLAPLCNGLINSYEDKSNDFVCPICFDMIEEAYMTKCGHSFCYKCIHQSLEDNNRCPKCNYVVDNIDHLYPNFLGITCSPTTDSYGIPQGCKKK

SEQ ID NO: 74671 - protein, 731 aa, Homo sapiens
  Payload ID: 14753
  Gene Symbol: RFWD2
  Gene Name: ring finger and WD repeat domain 2, E3 ubiquitin protein ligase
  Uniprot ID: Q8NHY2
  ENSP ID: ENSP00000356641
MSGSRQAGSGSAGTSPGSSAASSVTSASSSLSSSPSPPSVAVSAAALVSGGVAQAAGSGGLGGPVRPVLVAPAVSGSGGGAVSTGLSRHSCAARPSAGVGGSSSSLGSGSRKRPLLAPLCNGLINSYEDKSNDFVCPICFDMIEEAYMTKCGHSFCYKCIHQSLEDNNRCPKCNYVVDNIDHLYPNFLVNELILKQKQRFEEKRFKLDHSVSSTNGHRWQIFQDWLGTDQDNLDLANVNLMLELLVQKKKQLEAESHAAQLQILMEFLKVARRNKREQLEQIQKELSVLEEDIKRVEEMSGLYSPVSEDSTVPQFEAPSPSHSSIIDSTEYSQPPGFSGSSQTKKQPWYNSTLASRRKRLTAHFEDLEQCYFSTRMSRISDDSRTASQLDEFQECLSKFTRYNSVRPLATLSYASDLYNGSSIVSSIEFDRDCDYFAIAGVTKKIKVYEYDTVIQDAVDIHYPENEMTCNSKISCISWSSYHKNLLASSDYEGTVILWDGFTGQRSKVYQEHEKRCWSVDFNLMDPKLLASGSDDAKVKLWSTNLDNSVASIEAKANVCCVKFSPSSRYHLAFGCADHCVHYYDLRNTKQPIMVFKGHRKAVSYAKFVSGEEIVSASTDSQLKLWNVGKPYCLRSFKGHINEKNFVGLASNGDYIACGSENNSLYLYYKGLSKTLLTFKFDTVKSVLDKDRKEDDTNEFVSAVCWRALPDGESNVLIAANSQGTIKVLELV

SEQ ID NO: 74672 - protein, 157 aa, Homo sapiens
  Payload ID: 14753
  Gene Symbol: RFWD2
  Gene Name: ring finger and WD repeat domain 2, E3 ubiquitin protein ligase
  Uniprot ID: Q8NHY2
  ENSP ID: ENSP00000433517
MSGSRQAGSGSAGTSPGSSAASSVTSASSSLSSSPSPPSVAVSAAALVSGGVAQAAGSGGLGGPVRPVLVAPAVSGSGGGAVSTGLSRHSCAARPSAGVGGSSSSLGSGSRKRPLLAPLCNGLINSYEDKSNDFVCPICFDMIEEAYMTKCGHSFCE

SEQ ID NO: 74673 - protein, 189 aa, Homo sapiens
  Payload ID: 14753
  Gene Symbol: RFWD2
  Gene Name: ring finger and WD repeat domain 2, E3 ubiquitin protein ligase
  ENSP ID: ENSP00000433810
MIEEAYMTKCGHSFCYKCIHQSLEDNNRCPKCNYVVDNIDHLYPNFLVNELILKQKQRFEEKRFKLDHSVSSTNGHRWQIFQDWLGTDQDNLDLANVNLMLELLVQKKKQLEAESHAAQLQILMEFLKVARRNKREEMSGLYSPVSEDSTVPQFEAPSPSHSSIIDSTEYSQPPGFSGSSQTKKQPWYN

SEQ ID NO: 74674 - protein, 247 aa, Homo sapiens
  Payload ID: 14753
  Gene Symbol: RFWD2
  Gene Name: ring finger and WD repeat domain 2, E3 ubiquitin protein ligase
  ENSP ID: ENSP00000437212
  MOD_RES (1)..(1): Any amino acid
XSGLYSPVSEDSTVPQFEAPSPSHSLEFSSDMHRIFVNGILIISIIDSTEYSQPPGFSGSSQTKKQPWYNSTLASRRKRLTAHFEDLEQCYFSTRMSRISDDSRTASQLDEFQECLSKFTRYNSVRPLATLSYASDLYNGSSIVSSIEFDRDCDYFAIAGVTKKIKVYEYDTVIQDAVDIHYPENEMTCNSKISCISWSSYHKNLLASSDYEGTVILWDGFTGQRSKVYQEHEKRCWSVDFNLMDPK

SEQ ID NO: 74675 - protein, 68 aa, Homo sapiens
  Payload ID: 14753
  Gene Symbol: RFWD2
  Gene Name: ring finger and WD repeat domain 2, E3 ubiquitin protein ligase
  ENSP ID: ENSP00000437275
MIEEAYMTKCGHSFCYKCIHQSLEDNNRCPKCNYVVDNIDHLYPNFLVCILCLLLSASLGFECSLSLS

SEQ ID NO: 74676 - protein, 774 aa, Homo sapiens
  Payload ID: 14754
  Gene Symbol: RFWD3
  Gene Name: ring finger and WD repeat domain 3
  Uniprot ID: Q6PCD5
  ENSP ID: ENSP00000354361
MAHEAMEYDVQVQLNHAEQQPAPAGMASSQGGPALLQPVPADVVSSQGVPSILQPAPAEVISSQATPPLLQPAPQLSVDLTEVEVLGEDTVENINPRTSEQHRQGSDGNHTIPASSLHSMTNFISGLQRLHGMLEFLRPSSSNHSVGPMRTRRRVSASRRARAGGSQRTDSARLRAPLDAYFQVSRTQPDLPATTYDSETRNPVSEELQVSSSSDSDSDSSAEYGGVVDQAEESGAVILEEQLAGVSAEQEVTCIDGGKTLPKQPSPQKSEPLLPSASMDEEEGDTCTICLEQWTNAGDHRLSALRCGHLFGYRCISTWLKGQVRKCPQCNKKARHSDIVVLYARTLRALDTSEQERMKSSLLKEQMLRKQAELESAQCRLQLQVLTDKCTRLQRRVQDLQKLTSHQSQNLQQPRGSQAWVLSCSPSSQGQHKHKYHFQKTFTVSQAGNCRIMAYCDALSCLVISQPSPQASFLPGFGVKMLSTANMKSSQYIPMHGKQIRGLAFSSYLRGLLLSASLDNTIKLTSLETNTVVQTYNAGRPVWSCCWCLDEANYIYAGLANGSILVYDVRNTSSHVQELVAQKARCPLVSLSYMPRAASAAFPYGGVLAGTLEDASFWEQKMDFSHWPHVLPLEPGGCIDFQTENSSRHCLVTYRPDKNHTTIRSVLMEMSYRLDDTGNPICSCQPVHTFFGGPTCKLLTKNAIFQSPENDGNILVCTGDEAANSALLWDAASGSLLQDLQTDQPVLDICPFEVNRNSYLATLTEKMVHIYKWE

SEQ ID NO: 74677 - protein, 24 aa, Homo sapiens
  Payload ID: 14754
  Gene Symbol: RFWD3
  Gene Name: ring finger and WD repeat domain 3
  ENSP ID: ENSP00000459465
MDEEEGDTCTICLEQWTNAGDHRL

SEQ ID NO: 74678 - protein, 122 aa, Homo sapiens
  Payload ID: 14754
  Gene Symbol: RFWD3
  Gene Name: ring finger and WD repeat domain 3
  ENSP ID: ENSP00000459515
MAHEAMEYDVQVQLNHAEQQPAPAGMASSQGGPALLQPVPADVVSSQGVPSILQPAPAEVISSQATPPLLQPAPQLSVDLTEVEVLGEDTVENINPRTSEQHRQGSDGNHTIPASSLHSMTN

SEQ ID NO: 74679 - protein, 150 aa, Homo sapiens
  Payload ID: 14754
  Gene Symbol: RFWD3
  Gene Name: ring finger and WD repeat domain 3
  ENSP ID: ENSP00000459899
MAHEAMEYDVQVQLNHAEQQPAPAGMASSQGGPALLQPVPADVVSSQGVPSILQPAPAEVISSQATPPLLQPAPQLSVDLTEVEVLGEDTVENINPRTSEQHRQGSDGNHTIPASSLHSMTNFISGLQRLHGMLEFLRPSSSNHSVGPMR

SEQ ID NO: 74680 - protein, 774 aa, Homo sapiens; identical to SEQ ID NO: 74676
  Payload ID: 14754
  Gene Symbol: RFWD3
  Gene Name: ring finger and WD repeat domain 3
  Uniprot ID: Q6PCD5
  ENSP ID: ENSP00000460049

SEQ ID NO: 74681 - protein, 116 aa, Homo sapiens
  Payload ID: 14754
  Gene Symbol: RFWD3
  Gene Name: ring finger and WD repeat domain 3
  ENSP ID: ENSP00000461285
MAHEAMEYDVQVQLNHAEQQPAPAGMASSQGGPALLQPVPADVVSSQGVPSILQPAPAEVISSQATPPLLQPAPQLSVDLTEVEVLGEDTVENINPRTSEQHRQGSDGNHTIPASS

SEQ ID NO: 74682 - protein, 685 aa, Homo sapiens [sequence omitted]

SEQ ID NO: 74683 - protein, 685 aa, Homo sapiens [sequence omitted]

SEQ ID NO: 74684 - protein, 685 aa, Homo sapiens [sequence omitted]

SEQ ID NO: 74685 - protein, 406 aa, Homo sapiens
  Payload ID: 14756
  Gene Symbol: RING1
  Gene Name: ring finger protein 1
  Uniprot ID: Q06587
  ENSP ID: ENSP00000363787
MTTPANAQNASKTWELSLYELHRTPQEAIMDGTEIAVSPRSLHSELMCPICLDMLKNTMTTKECLHRFCSDCIVTALRSGNKECPTCRKKLVSKRSLRPDPNFDALISKIYPSREEYEAHQDRVLIRLSRLHNQQALSSSIEEGLRMQAMHRAQRVRRPIPGSDQTTTMSGGEGEPGEGEGDGEDVSSDSAPDSAPGPAPKRPRGGGAGGSSVGTGGGGTGGVGGGAGSEDSGDRGGTLGGGTLGPPSPPGAPSPPEPGGEIELVFRPHPLLVEKGEYCQTRYVKTTGNATVDHLSKYLALRIALERRQQQEAGEPGGPGGGASDTGGPDGCGGEGGGAGGGDGPEEPALPSLEGVSEKQYTIYIAPGGGAFTTLNGSLTLELVNEKFWKVSRPLELCYAPTKDPK

SEQ ID NO: 74686 - protein, 406 aa, Homo sapiens; identical to SEQ ID NO: 74685
  Payload ID: 14756
  Gene Symbol: RING1
  Gene Name: ring finger protein 1
  Uniprot ID: Q06587
  ENSP ID: ENSP00000372699

SEQ ID NO: 74687 - protein, 406 aa, Homo sapiens; identical to SEQ ID NO: 74685
  Payload ID: 14756
  Gene Symbol: RING1
  Gene Name: ring finger protein 1
  Uniprot ID: Q06587
  ENSP ID: ENSP00000396271

SEQ ID NO: 74688 - protein, 406 aa, Homo sapiens; identical to SEQ ID NO: 74685
  Payload ID: 14756
  Gene Symbol: RING1
  Gene Name: ring finger protein 1
  Uniprot ID: Q06587
  ENSP ID: ENSP00000396439

SEQ ID NO: 74689 - protein, 406 aa, Homo sapiens; identical to SEQ ID NO: 74685
  Payload ID: 14756
  Gene Symbol: RING1
  Gene Name: ring finger protein 1
  Uniprot ID: Q06587
  ENSP ID: ENSP00000400572

SEQ ID NO: 74690 - protein, 406 aa, Homo sapiens; identical to SEQ ID NO: 74685
  Payload ID: 14756
  Gene Symbol: RING1
  Gene Name: ring finger protein 1
  Uniprot ID: Q06587
  ENSP ID: ENSP00000412190

SEQ ID NO: 74691 - protein, 811 aa, Homo sapiens
  Payload ID: 14757
  Gene Symbol: RNF10
  Gene Name: ring finger protein 10
  Uniprot ID: Q8N5U6
  ENSP ID: ENSP00000322242
MPLSSPNAAATASDMDKNSGSNSSSASSGSSKGQQPPRSASAGPAGESKPKSDGKNSSGSKRYNRKRELSYPKNESFNNQSRRSSSQKSKTFNKMPPQRGGGSSKLFSSSFNGGRRDEVAEAQRAEFSPAQFSGPKKINLNHLLNFTFEPRGQTGHFEGSGHGSWGKRNKWGHKPFNKELFLQANCQFVVSEDQDYTAHFADPDTLVNWDFVEQVRICSHEVPSCPICLYPPTAAKITRCGHIFCWACILHYLSLSEKTWSKCPICYSSVHKKDLKSVVATESHQYVVGDTITMQLMKREKGVLVALPKSKWMNVDHPIHLGDEQHSQYSKLLLASKEQVLHRVVLEEKVALEQQLAEEKHTPESCFIEAAIQELKTREEALSGLAGSRREVTGVVAALEQLVLMAPLAKESVFQPRKGVLEYLSAFDEETTEVCSLDTPSRPLALPLVEEEEAVSEPEPEGLPEACDDLELADDNLKEGTICTESSQQEPITKSGFTRLSSSPCYYFYQAEDGQHMFLHPVNVRCLVREYGSLERSPEKISATVVEIAGYSMSEDVRQRHRYLSHLPLTCEFSICELALQPPVVSKETLEMFSDDIEKRKRQRQKKAREERRRERRIEIEENKKQGKYPEVHIPLENLQQFPAFNSYTCSSDSALGPTSTEGHGALSISPLSRSPGSHADFLLTPLSPTASQGSPSFCVGSLEEDSPFPSFAQMLRVGKAKADVWPKTAPKKDENSLVPPAPVDSDGESDNSDRVPVPSFQNSFSQAIEAAFMKLDTPATSDPLSEEKGGKKRKKQKQKLLFSTSVVHTK

SEQ ID NO: 74692 - protein, 816 aa, Homo sapiens
  Payload ID: 14757
  Gene Symbol: RNF10
  Gene Name: ring finger protein 10
  Uniprot ID: Q8N5U6
  ENSP ID: ENSP00000415682
MPLSSPNAAATASDMDKNSGSNSSSASSGSSKGQQPPRSASAGPAGESKPKSDGKNSSGSKRYNRKRELSYPKNESFNNQSRRSSSQKSKTFNKMPPQRGGGSSKLFSSSFNGGRRDEVAEAQRAEFSPAQFSGPKKINLNHLLNFTFEPRGQTGHFEGSGHGSWGKRNKWGHKPFNKELFLQANCQFVVSEDQDYTAHFADPDTLVNWDFVEQVRICSHEVPSCPICLYPPTAAKITRCGHIFCWACILHYLSLSEKTWSKCPICYSSVHKKDLKSVVATESHQYVVGDTITMQLMKREKGVLVALPKSKWMNVDHPIHLGDEQHSQYSKLLLASKEQVLHRVVLEEKVALEQQLAEEKHTPESCFIEAAIQELKTREEALSGLAGSRREVTGVVAALEQLVLMAPLAKESVFQPRKSLLQQGVLEYLSAFDEETTEVCSLDTPSRPLALPLVEEEEAVSEPEPEGLPEACDDLELADDNLKEGTICTESSQQEPITKSGFTRLSSSPCYYFYQAEDGQHMFLHPVNVRCLVREYGSLERSPEKISATVVEIAGYSMSEDVRQRHRYLSHLPLTCEFSICELALQPPVVSKETLEMFSDDIEKRKRQRQKKAREERRRERRIEIEENKKQGKYPEVHIPLENLQQFPAFNSYTCSSDSALGPTSTEGHGALSISPLSRSPGSHADFLLTPLSPTASQGSPSFCVGSLEEDSPFPSFAQMLRVGKAKADVWPKTAPKKDENSLVPPAPVDSDGESDNSDRVPVPSFQNSFSQAIEAAFMKLDTPATSDPLSEEKGGKKRKKQKQKLLFSTSVVHTK

SEQ ID NO: 74693 - protein, 137 aa, Homo sapiens
  Payload ID: 14757
  Gene Symbol: RNF10
  Gene Name: ring finger protein 10
  ENSP ID: ENSP00000437392
  MOD_RES (1)..(1): Any amino acid
XEQHSQYSKLLLASKEQVLHRVVLEEKVALEQQLAEEKHTPESCFIEAAIQELKTREEALSGLAGSRREVTGVVAALEQLVLMAPLAKESVFQPRKSLLQQGVLEYLSAFDEETTEVCSLDTPSRPLALPLVEEEEA

SEQ ID NO: 74694 - protein, 8 aa, Homo sapiens
  Payload ID: 14757
  Gene Symbol: RNF10
  Gene Name: ring finger protein 10
  ENSP ID: ENSP00000438638
MPLSSPNA

SEQ ID NO: 74695 - protein, 99 aa, Homo sapiens
  Payload ID: 14757
  Gene Symbol: RNF10
  Gene Name: ring finger protein 10
  ENSP ID: ENSP00000439221
MSEDVRQRHRYLSHLPLTCEFSICELALQPPVVSKETLEMFSDDIEKRKRQRQKKAREERRRERRIEIEENKKQGKYPEVHIPLENLQQFPAFNSYTCS

SEQ ID NO: 74696 - protein, 183 aa, Homo sapiens
  Payload ID: 14757
  Gene Symbol: RNF10
  Gene Name: ring finger protein 10
  ENSP ID: ENSP00000439510
  MOD_RES (1)..(1): Any amino acid
XDTLVNWDFVEQVRICSHEVPSCPICLYPPTAAKITRCGHIFCWACILHYLSLSEKTWSKCPICYSSVHKKDLKSVVATESHQYVVGDTITMQLMKREKGVLVALPKSKWMNVDHPIHLGDEQHSQYSKLLLASKEQVLHRVVLEEKVALEQQLAEEKHTPESCFIEAAIQELKGVLEYLSAF

SEQ ID NO: 74697 - protein, 211 aa, Homo sapiens
  Payload ID: 14757
  Gene Symbol: RNF10
  Gene Name: ring finger protein 10
  ENSP ID: ENSP00000439859
VSEPEPEGLPEACDDLELADDNLKEGTICTESSQQEPITKSGFTRLSSSPCYYFYQDGQHMFLHPVNVRCLVREYGSLERSPEKISATVVEIAGYSMSEDVRQRHRYLSHLPLTCEFSICELALQPPVVSKETLEMFSDDIEKRKRQRQKKAREERRRERRIEIEENKKQGKYPEVHIPLENLQQFPAFNSYTCSSDSALGPTSTEGHGAL

SEQ ID NO: 74698 - protein, 146 aa, Homo sapiens
  Payload ID: 14757
  Gene Symbol: RNF10
  Gene Name: ring finger protein 10
  ENSP ID: ENSP00000441487
RERRIEIEENKKQGKYFLLTPLSPTASQGSPSFCVGSLEEDSPFPSFAQMLRVGKAKADVWPKTAPKKDENSLVPPAPVDSDGESDNSDRVPVPSFQNSFSQAIEAAFMKLDTPATSDPLSEEKGGKKRKKQKQKLLFSTSVVHTK

SEQ ID NO: 74699 - protein, 84 aa, Homo sapiens
  Payload ID: 14757
  Gene Symbol: RNF10
  Gene Name: ring finger protein 10
  ENSP ID: ENSP00000443000
MPLSSPNAAATASDMDKNSGSNSSSASSGSSKGQQPPRSASAGPAGESKPKSELLISAGFNLLSVDSVVRPYVAPLEVLVNYSG

SEQ ID NO: 74700 - protein, 124 aa, Homo sapiens
  Payload ID: 14757
  Gene Symbol: RNF10
  Gene Name: ring finger protein 10
  ENSP ID: ENSP00000443235
MMDGKNSSGSKRYNRKRELSYPKNESFNNQSRRSSSQKSKTFNKMPPQRGGGSSKLFSSSFNGGRRDEVAEAQRAEFSPAQFSGPKKINLNHLLNFTFEPRGQTGHFEGSGHGSWGKRNKWGHK

SEQ ID NO: 74701 - protein, 104 aa, Homo sapiens
  Payload ID: 14757
  Gene Symbol: RNF10
  Gene Name: ring finger protein 10
  ENSP ID: ENSP00000443790
SNSSSASSGSSKGQQPPRSASAGPAGESKPKSDGKNSSGSKRYNRKRELSYPKNESFNNQSRRSSSQKSKTFNKMPPQRGGGSSKLFSSSFNGGRRDELPICGV

SEQ ID NO: 74702 - protein, 118 aa, Homo sapiens
  Payload ID: 14757
  Gene Symbol: RNF10
  Gene Name: ring finger protein 10
  ENSP ID: ENSP00000444770
MPLSSPNAAATASDMDKNSGSNSSSASSGSSKGQQPPRSASAGPAGESKPKSELLISAGFNLLSVDSVVRPYVAPLEEKVALEQQLAEEKHTPESCFIEAAIQELKTREEALSGLAGS

SEQ ID NO: 74703 - protein, 261 aa, Homo sapiens
  Payload ID: 14757
  Gene Symbol: RNF10
  Gene Name: ring finger protein 10
  ENSP ID: ENSP00000445160
EACDDLELADDNLKEGTICTESSQQEPITKSGFTRLSSSPCYYFYQAEDGQHMFLHPVNVRCLVREYGSLERSPEKISATVVEIAGYSMSEDVRQRHRYLSHLPLTCEFSICELALQPPVVSKETLEMFSDDIEKRKRQRQKKAREERRRERRIEIEENKKQGKYPEVHIPLENLQQFPAFNSYTCSSDSALGPTSTEGHGALSISPLSRSPGSHADFLLTPLSPTASQGSPSFCVGSLEEDSPFPSFAQEFYWPVVGSES

SEQ ID NO: 74704 - protein, 685 aa, Homo sapiens
  Payload ID: 14758
  Gene Symbol: RNF103
  Gene Name: ring finger protein 103
  Uniprot ID: O00237
  ENSP ID: ENSP00000237455
MWLKLFFLLLYFLVLFVLARFFEAIVWYETGIFATQLVDPVALSFKKLKTILECRGLGYSGLPEKKDVRELVEKSGDLMEGELYSALKEEEASESVSSTNFSGEMHFYELVEDTKDGIWLVQVIANDRSPLVGKIHWEKMVKKVSRFGIRTGTFNCSSDPRYCRRRGWVRSTLIMSVPQTSTSKGKVMLKEYSGRKIEVEHIFKWITAHAASRIKTIYNAEHLKEEWNKSDQYWLKIYLFANLDQPPAFFSALSIKFTGRVEFIFVNVENWDNKSYMTDIGIYNMPSYILRTPEGIYRYGNHTGEFISLQAMDSFLRSLQPEVNDLFVLSLVLVNLMAWMDLFITQGATIKRFVVLISTLGTYNSLLIISWLPVLGFLQLPYLDSFYEYSLKLLRYSNTTTLASWVRADWMFYSSHPALFLSTYLGHGLLIDYFEKKRRRNNNNDEVNANNLEWLSSLWDWYTSYLFHPIASFQNFPVESDWDEDPDLFLERLAFPDLWLHPLIPTDYIKNLPMWRFKCLGVQSEEEMSEGSQDTENDSESENTDTLSSEKEVFEDKQSVLHNSPGTASHCDAEACSCANKYCQTSPCERKGRSYGSYNTNEDMEPDWLTWPADMLHCTECVVCLENFENGCLLMGLPCGHVFHQNCIVMWLAGGRHCCPVCRWPSYKKKQPYAQHQPLSNDVPS

SEQ ID NO: 74705 - protein, 154 aa, Homo sapiens
  Payload ID: 14759
  Gene Symbol: RNF11
  Gene Name: ring finger protein 11
  Uniprot ID: Q9Y3C5
  ENSP ID: ENSP00000242719
MGNCLKSPTSDDISLLHESQSDRASFGEGTEPDQEPPPPYQEQVPVPVYHPTPSQTRLATQLTEEEQIRIAQRIGLIQHLPKGVYDPGRDGSEKKIRECVICMMDFVYGDPIRFLPCMHIYHLDCIDDWLMRSFTCPSCMEPVDAALLSSYETN

SEQ ID NO: 74706 - protein, 986 aa, Homo sapiens
  Payload ID: 14760
  Gene Symbol: RNF111
  Gene Name: ring finger protein 111
  Uniprot ID: Q6ZNA4
  ENSP ID: ENSP00000288199
MSQWTPEYNELYTLKVDMKSEIPSDAPKTQESLKGILLHPEPIGAAKSFPAGVEMINSKVGNEFSHLCDDSQKQEKEMNGNQQEQEKSLVVRKKRKSQQAGPSYVQNCVKENQGILGLRQHLGTPSDEDNDSSFSDCLSSPSSSLHFGDSDTVTSDEDKEVSVRHSQTILNAKSRSHSARSHKWPRTETESVSGLLMKRPCLHGSSLRRLPCRKRFVKNNSSQRTQKQKERILMQRKKREVLARRKYALLPSSSSSSENDLSSESSSSSSTEGEEDLFVSASENHQNNPAVPSGSIDEDVVVIEASSTPQVTANEEINVTSTDSEVEIVTVGESYRSRSTLGHSRSHWSQGSSSHASRPQEPRNRSRISTVIQPLRQNAAEVVDLTVDEDEPTVVPTTSARMESQATSASINNSNPSTSEQASDTASAVTSSQPSTVSETSATLTSNSTTGTSIGDDSRRTTSSAVTETGPPAMPRLPSCCPQHSPCGGSSQNHHALGHPHTSCFQQHGHHFQHHHHHHHTPHPAVPVSPSFSDPACPVERPPQVQAPCGANSSSGTSYHEQQALPVDLSNSGIRSHGSGSFHGASAFDPCCPVSSSRAAIFGHQAAAAAPSQPLSSIDGYGSSMVAQPQPQPPPQPSLSSCRHYMPPPYASLTRPLHHQASACPHSHGNPPPQTQPPPQVDYVIPHPVHAFHSQISSHATSHPVAPPPPTHLASTAAPIPQHLPPTHQPISHHIPATAPPAQRLHPHEVMQRMEVQRRRMMQHPTRAHERPPPHPHRMHPNYGHGHHIHVPQTMSSHPRQAPERSAWELGIEAGVTAATYTPGALHPHLAHYHAPPRLHHLQLGALPLMVPDMAGYPHIRYISSGLDGTSFRGPFRGNFEELIHLEERLGNVNRGASQGTIERCTYPHKYKKRKLHCKQDGEEGTEEDTEEKCTICLSILEEGEDVRRLPCMHLFHQVCVDQWLITNKKCPICRVDIEAQLPSES

SEQ ID NO: 74707 - protein, 994 aa, Homo sapiens
  Payload ID: 14760
  Gene Symbol: RNF111
  Gene Name: ring finger protein 111
  Uniprot ID: Q6ZNA4
  ENSP ID: ENSP00000452732
MSQWTPEYNELYTLKVDMKSEIPSDAPKTQESLKGILLHPEPIGAAKSFPAGVEMINSKVGNEFSHLCDDSQKQEKEMNGNQQEQEKSLVVRKKRKSQQAGPSYVQNCVKENQGILGLRQHLGTPSDEDNDSSFSDCLSSPSSSLHFGDSDTVTSDEDKEVSVRHSQTILNAKSRSHSARSHKWPRTETESVSGLLMKRPCLHGSSLRRLPCRKRFVKNNSSQRTQKQKERILMQRKKREVLARRKYALLPSSSSSSENDLSSESSSSSSTEGEEDLFVSASENHQNNPAVPSGSIDEDVVVIEASSTPQVTANEEINVTSTDSEVEIVTVGESYRSRSTLGHSRSHWSQGSSSHASRPQEPRNRSRISTVIQPLRQNAAEVVDLTVDEDEPTVVPTTSARMESQATSASINNSNPSTSEQASDTASAVTSSQPSTVSETSATLTSNSTTGTSIGDDSRRTTSSAVTETGPPAMPRLPSCCPQHSPCGGSSQNHHALGHPHTSCFQQHGHHFQHHHHHHHTPHPAVPVSPSFSDPACPVERPPQVQAPCGANSSSGTSYHEQQALPVDLSNSGIRSHGSGSFHGASAFDPCCPVSSSRAAIFGHQAAAAAPSQPLSSIDGYGSSMVAQPQPQPPPQPSLSSCRHYMPPPYASLTRPLHHQASACPHSHGNPPPQTQPPPQVDYVIPHPVHAFHSQISSHATSHPVAPPPPTHLASTAAPIPQHLPPTHQPISHHIPATAPPAQRLHPHEVMQRMEVQRRRMMQHPTRAHERPPPHPHRMHPNYGHGHHIHVPQTMSSHPRQAPERSAWELGIEAGVTAATYTPGALHPHLAHYHAPPRLHHLQLGALPLMVPDMAGYPHIRYISSGLDGTSFRGPFRGNFEELIHLEERLGNVNRGASQGTIERCTYPHKYKKVTTDWFSQRKLHCKQDGEEGTEEDTEEKCTICLSILEEGEDVRRLPCMHLFHQVCVDQWLITNKKCPICRVDIEAQLPSES

SEQ ID NO: 74708 - protein, 128 aa, Homo sapiens
  Payload ID: 14760
  Gene Symbol: RNF111
  Gene Name: ring finger protein 111
  ENSP ID: ENSP00000452842
MHVFSLIDGSSGLAVLRLSLKFPMSQWTPEYNELYTLKVDMKSEIPSDAPKTQESLKGILLHPEPIGAAKSFPAGVEMINSKVGNEFSHLCDDSQKQEKEMNGNQQEQEKSLVVRKKRKSQQAGPSYV

SEQ ID NO: 74709 - protein, 131 aa, Homo sapiens
  Payload ID: 14760
  Gene Symbol: RNF111
  Gene Name: ring finger protein 111
  ENSP ID: ENSP00000452919
MSQWTPEYNELYTLKVDMKSEIPSDAPKTQESLKGILLHPEPIGAAKSFPAGVEMINSKVGNEFSHLCDDSQKQEKEMNGNQQEQEKSLVVRKKRKSQQAGPSYVQNCVKENQGILGLRQHLGTPSDEDND

SEQ ID NO: 74710 - protein, 1003 aa, Homo sapiens
  Payload ID: 14760
  Gene Symbol: RNF111
  Gene Name: ring finger protein 111
  Uniprot ID: Q6ZNA4
  ENSP ID: ENSP00000453015
MSQWTPEYNELYTLKVDMKSEIPSDAPKTQESLKGILLHPEPIGAAKSFPAGVEMINSKVGNEFSHLCDDSQKQEKEMNGNQQEQEKSLVVRKKRKSQQAGPSYVQNCVKENQGILGLRQHLGTPSDEDNDSSFSDCLSSPSSSLHFGDSDTVTSDEDKEVSVRHSQTILNAKSRSHSARSHKWPRTETESVSGLLMKRPCLHGSSLRRLPCRKRFVKNNSSQRTQKQKERILMQRKKREVLARRKYALLPSSSSSSENDLSSESSSSSSTEGEEDLFVSASENHQNNPAVPSGSIDEDVVVIEASSTPQVTANEEINVTSTDSEVEIVTVGESYRSRSTLGHSRSHWSQGSSSHASRPQEPRNRSRISTVIQPLRQNAAEVVDLTVDEDEPTVVPTTSARMESQATSASINNSNPSTSEQASDTASAVTSSQPSTVSETSATLTSNSTTGTSIGDDSRRTTSSAVTETGPPAMPRLPSCCPQHSPCGGSSQNHHALGHPHTSCFQQHGHHFQHHHHHHHTPHPAVPVSPSFSDPACPVERPPQVQAPCGANSSSGTSYHEQQALPVDLSNSGIRSHGSGSFHGASAFDPCCPVSSSRAAIFGHQAAAAAPSQPLSSIDGYGSSMVAQPQPQPPPQPSLSSCRHYMPPPYASLTRPLHHQASACPHSHGNPPPQTQPPPQVDYVIPHPVHAFHSQISSHATSHPVAPPPPTHLASTAAPIPQHLPPTHQPISHHIPATAPPAQRLHPHEVMQRMEVQRRRMMQHPTGLFVFCVSRRAHERPPPHPHRMHPNYGHGHHIHVPQTMSSHPRQAPERSAWELGIEAGVTAATYTPGALHPHLAHYHAPPRLHHLQLGALPLMVPDMAGYPHIRYISSGLDGTSFRGPFRGNFEELIHLEERLGNVNRGASQGTIERCTYPHKYKKVTTDWFSQRKLHCKQDGEEGTEEDTEEKCTICLSILEEGEDVRRLPCMHLFHQVCVDQWLITNKKCPICRVDIEAQLPSES

SEQ ID NO: 74711 - protein, 190 aa, Homo sapiens
  Payload ID: 14760
  Gene Symbol: RNF111
  Gene Name: ring finger protein 111
  ENSP ID: ENSP00000453248
SSSTEGEEDLFVSASENHQNNPAVPSGSIDEDVVVIEASSTPQVTANEEINVTSTDSEVEIVTVGESYRSRSTLGHSRSHWSQGSSSHASRPQEPRNRSRISTVIQPLRQNAAEVVDLTVDEDEPTVVPTTSARMESQATSASINNSNPSTSEQASDTASAVTSSQPSTVSETSATLTSNSTTGTSIGGM

SEQ ID NO: 74712 - protein, 995 aa, Homo sapiens
  Payload ID: 14760
  Gene Symbol: RNF111
  Gene Name: ring finger protein 111
  Uniprot ID: Q6ZNA4
  ENSP ID: ENSP00000453872
MSQWTPEYNELYTLKVDMKSEIPSDAPKTQESLKGILLHPEPIGAAKSFPAGVEMINSKVGNEFSHLCDDSQKQEKEMNGNQQEQEKSLVVRKKRKSQQAGPSYVQNCVKENQGILGLRQHLGTPSDEDNDSSFSDCLSSPSSSLHFGDSDTVTSDEDKEVSVRHSQTILNAKSRSHSARSHKWPRTETESVSGLLMKRPCLHGSSLRRLPCRKRFVKNNSSQRTQKQKERILMQRKKREVLARRKYALLPSSSSSSENDLSSESSSSSSTEGEEDLFVSASENHQNNPAVPSGSIDEDVVVIEASSTPQVTANEEINVTSTDSEVEIVTVGESYRSRSTLGHSRSHWSQGSSSHASRPQEPRNRSRISTVIQPLRQNAAEVVDLTVDEDEPTVVPTTSARMESQATSASINNSNPSTSEQASDTASAVTSSQPSTVSETSATLTSNSTTGTSIGDDSRRTTSSAVTETGPPAMPRLPSCCPQHSPCGGSSQNHHALGHPHTSCFQQHGHHFQHHHHHHHTPHPAVPVSPSFSDPACPVERPPQVQAPCGANSSSGTSYHEQQALPVDLSNSGIRSHGSGSFHGASAFDPCCPVSSSRAAIFGHQAAAAAPSQPLSSIDGYGSSMVAQPQPQPPPQPSLSSCRHYMPPPYASLTRPLHHQASACPHSHGNPPPQTQPPPQVDYVIPHPVHAFHSQISSHATSHPVAPPPPTHLASTAAPIPQHLPPTHQPISHHIPATAPPAQRLHPHEVMQRMEVQRRRMMQHPTGLFVFCVSRRAHERPPPHPHRMHPNYGHGHHIHVPQTMSSHPRQAPERSAWELGIEAGVTAATYTPGALHPHLAHYHAPPRLHHLQLGALPLMVPDMAGYPHIRYISSGLDGTSFRGPFRGNFEELIHLEERLGNVNRGASQGTIERCTYPHKYKKRKLHCKQDGEEGTEEDTEEKCTICLSILEEGEDVRRLPCMHLFHQVCVDQWLITNKKCPICRVDIEAQLPSES

SEQ ID NO: 74713 - protein, 631 aa, Homo sapiens
  Payload ID: 14761
  Gene Symbol: RNF112
  Gene Name: ring finger protein 112
  Uniprot ID: Q9ULX5
  ENSP ID: ENSP00000454919
MPRPALSVTSFCHRLGKRERKQSFMGNSGNSWSHTPFPKLELGLGPQPMAPRELPTCSICLERLRDPISLDCGHDFCIRCFSTHRLPGCEPPCCPECRKICKQKRGLRSLGEKMKLLPQRPLPPALQETCPVRAEPLLLVRINASGGLILRMGAINRCLKHPLARDTPVCLLAVLGEQHSGKSFLLNHLLQGLPGLESGEGGRPRGGEASLQGCRWGANGLARGIWMWSHPFLLGKEGKKVAVFLVDTGDAMSPELSRETRIKLCALTTMLSSYQILSTSQELKDTDLDYLEMFVHVAEVMGKHYGMVPIQHLDLLVRDSSHPNKAGQGHVGNIFQRLSGRYPKVQELLQGKRARCCLLPAPGRRRMNQGHASPGDTDDDFRHLLGAYVSDVLSAAPQHAKSRCQGYWNEGRAVARGDRRLLTGQQLAQEIKNLSGWMGRTGPGFTSPDEMAAQLHDLRKVEAAKREFEEYVRQQDVATKRIFSALRVLPDTMRNLLSTQKDAILARHGVALLCKGRDQTLEALEAELQATAKAFMDSYTMRFCGHLAAVGGAVGAGLMGLAGGVVGAGMAAAALAAEAGMVAAGAAVGATGAAVVGGGVGAGLAATVGCMEKEEDERLLEGDREPLLQEE

SEQ ID NO: 74714 - protein, 123 aa, Homo sapiens
  Payload ID: 14761
  Gene Symbol: RNF112
  Gene Name: ring finger protein 112
  ENSP ID: ENSP00000464134
MPRPALSVTSFCHRLGKRERKQSFMGNSGNSWSHTPFPKLELGLGPQPMAPRELPTCSICLERLRDPISLDCGHDFCIRCFSTHRLPGCEPPCCPECRKICKQKRGLRSLGEKMKLLPQRPLP

SEQ ID NO: 74715 - protein, 343 aa, Homo sapiens
  Payload ID: 14762
  Gene Symbol: RNF113A
  Gene Name: ring finger protein 113A
  Uniprot ID: O15541
  ENSP ID: ENSP00000360497
MAEQLSPGKAVDQVCTFLFKKPGRKGAAGRRKRPACDPEPGESGSSSDEGCTVVRPEKKRVTHNPMIQKTRDSGKQKAAYGDLSSEEEEENEPESLGVVYKSTRSAKPVGPEDMGATAVYELDTEKERDAQAIFERSQKIQEELRGKEDDKIYRGINNYQKYMKPKDTSMGNASSGMVRKGPIRAPEHLRATVRWDYQPDICKDYKETGFCGFGDSCKFLHDRSDYKHGWQIERELDEGRYGVYEDENYEVGSDDEEIPFKCFICRQSFQNPVVTKCRHYFCESCALQHFRTTPRCYVCDQQTNGVFNPAKELIAKLEKHRATGEGGASDLPEDPDEDAIPIT

SEQ ID NO: 74716 - protein, 322 aa, Homo sapiens
  Payload ID: 14763
  Gene Symbol: RNF113B
  Gene Name: ring finger protein 113B
  Uniprot ID: Q8IZP6
  ENSP ID: ENSP00000267291
MAAPPSPGRTADQADQVCTFLFKKPGRKGAAGLRKRPACDPEHGESSSSGDEGDTVAQPPRVAPRPRGLHSWQKAAHGDRRGEEAAPESLDVVYRSTRSAKPVGPEDMGATADFEQDTEKEHHTPTILKCSQRVQEALRGREHDHIYRGIHSYLRYLKPKDTSMGNSSSGMARKGPIRAPGHLRATVRWDYQPDICKDYKETGFCGFGDSCKFLHDRSDYKLGWEIERELEEGRYCICEDENHEVGSEEEEIPFRCFICRQAFQNPVVTKCRHYFCESCALEHFRATPRCYICDQPTGGIFNPAKELMAKLQKLQAAEGKKR

SEQ ID NO: 74717 - protein, 228 aa, Homo sapiens
  Payload ID: 14764
  Gene Symbol: RNF114
  Gene Name: ring finger protein 114
  Uniprot ID: Q9Y508
  ENSP ID: ENSP00000244061
MAAQQRDCGGAAQLAGPAAEADPLGRFTCPVCLEVYEKPVQVPCGHVFCSACLQECLKPKKPVCGVCRSALAPGVRAVELERQIESTETSCHGCRKNFFLSKIRSHVATCSKYQNYIMEGVKATIKDASLQPRNVPNRYTFPCPYCPEKNFDQEGLVEHCKLFHSTDTKSVVCPICASMPWGDPNYRSANFREHIQRRHRFSYDTFVDYDVDEEDMMNQVLQRSIIDQ

SEQ ID NO: 74718 - protein, 70 aa, Homo sapiens
  Payload ID: 14764
  Gene Symbol: RNF114
  Gene Name: ring finger protein 114
  ENSP ID: ENSP00000485136
MAAQQRDCGGAAQLAGPAAEADPLGRFTCPVCLEVYEKPVQVPCGHVSSCPRSGPTWLLVPNTRITSWKV

SEQ ID NO: 74719 - protein, 49 aa, Homo sapiens
  Payload ID: 14764
  Gene Symbol: RNF114
  Gene Name: ring finger protein 114
  ENSP ID: ENSP00000485203
MAAQQRDCGGAAQLAGPAAEADPLGRFTCPVCLEVYEKPVQVPCGHVNV

SEQ ID NO: 74720 - protein, 188 aa, Homo sapiens
  Payload ID: 14764
  Gene Symbol: RNF114
  Gene Name: ring finger protein 114
  ENSP ID: ENSP00000485239
MAAQQRDCGGAAQLAGPAAEADPLGRFTCPVCLEVYEKPVQVPCGHVFCSACLQECLKPKKPVCGVCRSALAPGVRAVELERQIESTETSCHGCRKNFFLSKIRSHVATCSKYQNYIMEGVKATIKDASLQPRNVPNRYTFPCPYCPEKNFDQEGLVEHCKLFHSTDTKSVDYDVDEEDMMNQVLQRS

SEQ ID NO: 74721 - protein, 206 aa, Homo sapiens
  Payload ID: 14764
  Gene Symbol: RNF114
  Gene Name: ring finger protein 114
  ENSP ID: ENSP00000485317
MAAQQRDCGGAAQLAGPAAEADPLGRFTCPVCLEVYEKPVQVPCGHVFCSACLQECLKPKKPVCGVCRSALAPGVRAVELERQIESTETSCHGCRKNFFLSKIRSHVATCSKYQNYIMEGVKATIKDASLQPRNVPNRYTFPCPYCPEKNFDQEGLVEHCKLFHSTDTKSVVMSRVRACYLSHVTELPLHIKREIYDSCTLPVQQT

SEQ ID NO: 74722 - protein, 83 aa, Homo sapiens
  Payload ID: 14764
  Gene Symbol: RNF114
  Gene Name: ring finger protein 114
  ENSP ID: ENSP00000485575
MAAQQRDCGGAAQLAGPAAEADPLGRFTCPVCLEVYEKPVQVPCGHVALPSPVMIAAPVCGAFCKGWTLCQGSAIQTVSSQQS

SEQ ID NO: 74723 - protein, 304 aa, Homo sapiens
  Payload ID: 14765
  Gene Symbol: RNF115
  Gene Name: ring finger protein 115
  Uniprot ID: Q9Y4L5
  ENSP ID: ENSP00000463650
MAEASAAGADSGAAVAAHRFFCHFCKGEVSPKLPEYICPRCESGFIEEVTDDSSFLGGGGSRIDNTTTTHFAELWGHLDHTMFFQDFRPFLSSSPLDQDNRANERGHQTHTDFWGARPPRLPLGRRYRSRGSSRPDRSPAIEGILQHIFAGFFANSAIPGSPHPFSWSGMLHSNPGDYAWGQTGLDAIVTQLLGQLENTGPPPADKEKITSLPTVTVTQEQVDMGLECPVCKEDYTVEEEVRQLPCNHFFHSSCIVPWLELHDTCPVCRKSLNGEDSTRQSQSTEASASNRFSNDSQLHDRWTF

SEQ ID NO: 74724 - protein, 327 aa, Homo sapiens
  Payload ID: 14766
  Gene Symbol: RNF121
  Gene Name: ring finger protein 121
  Uniprot ID: Q9H920
  ENSP ID: ENSP00000354571
MAAVVEVEVGGGAAGERELDEVDMSDLSPEEQWRVEHARMHAKHRGHEAMHAEMVLILIATLVVAQLLLVQWKQRHPRSYNMVTLFQMWVVPLYFTVKLHWWRFLVIWILFSAVTAFVTFRATRKPLVQTTPRLVYKWFLLIYKISYATGIVGYMAVMFTLFGLNLLFKIKPEDAMDFGISLLFYGLYYGVLERDFAEMCADYMASTIGFYSESGMPTKHLSDSVCAVCGQQIFVDVSEEGIIENTYRLSCNHVFHEFCIRGWCIVGKKQTCPYCKEKVDLKRMFSNPWERPHVMYGQLLDWLRYLVAWQPVIIGVVQGINYILGLE

SEQ ID NO: 74725 - protein, 113 aa, Homo sapiens
  Payload ID: 14766
  Gene Symbol: RNF121
  Gene Name: ring finger protein 121
  ENSP ID: ENSP00000377314
MAAVVEVEVGGGAAGERELDEVDMSDLSPEEQWRVEHARMHAKHRGHEAMHAEMVLILIATLVVAQLLLVQWKQRHPRSYNRWGFTVLPRLVSSSWAQAIHLPQPPNVLELQE

SEQ ID NO: 74726 - protein, 205 aa, Homo sapiens
  Payload ID: 14766
  Gene Symbol: RNF121
  Gene Name: ring finger protein 121
  ENSP ID: ENSP00000377316
MRVEHARMHAKHRGHEAMHAEMVLILIATLVVAQLLLVQWKQRHPRSYNMVTLFQMWVVPLYFTVKLHWWRFLVIWILFSAVTAFVTFRATRKPLVQTTPRLVYKWFLLIYKISYATGIVGYMAVMFTLFGLNLLFKIKPEDAMDFGISLLFYGLYYGVLERDFAEMCADYMASTIGRCSASTSSASVAGASWERSKRVPTAKRR

SEQ ID NO: 74727 - protein, 295 aa, Homo sapiens
  Payload ID: 14766
  Gene Symbol: RNF121
  Gene Name: ring finger protein 121
  ENSP ID: ENSP00000431286
MRVEHARMHAKHRGHEAMHAEMVLILIATLVVAQLLLVQWKQRHPRSYNMVTLFQMWVVPLYFTVKLHWWRFLVIWILFSAVTAFVTFRATRKPLVQTTPRLVYKWFLLIYKISYATGIVGYMAVMFTLFGLNLLFKIKPEDAMDFGISLLFYGLYYGVLERDFAEMCADYMASTIGFYSESGMPTKHLSDSVCAVCGQQIFVDVSEEGIIENTYRLSCNHVFHEFCIRGWCIVGKKQTCPYCKEKVDLKRMFSNPWERPHVMYGQLLDWLRYLVAWQPVIIGVVQGINYILGLE

SEQ ID NO: 74728 - protein, 81 aa, Homo sapiens
  Payload ID: 14766
  Gene Symbol: RNF121
  Gene Name: ring finger protein 121
  ENSP ID: ENSP00000431325
MAAVVEVEVGGGAAGERELDEVDMSDLSPEEQWRVEHARMHAKHRGHEAMHAEMVLILIATLVVAQLLLVQWKQRHPRSYN

SEQ ID NO: 74729 - protein, 52 aa, Homo sapiens
  Payload ID: 14766
  Gene Symbol: RNF121
  Gene Name: ring finger protein 121
  ENSP ID: ENSP00000432898
MRVEHARMHAKHRGHEAMHAEMVLILIATLVVAQLLLVQWKQRHPRSYNVGL

SEQ ID NO: 74730 - protein, 167 aa, Homo sapiens
  Payload ID: 14766
  Gene Symbol: RNF121
  Gene Name: ring finger protein 121
  ENSP ID: ENSP00000433574
MRVEHARMHAKHRGHEAMHAEMVLILIATLVVAQLLLVQWKQRHPRSYNFYSESGMPTKHLSDSVCAVCGQQIFVDVSEEGIIENTYRLSCNHVFHEFCIRGWCIVGKKQTCPYCKEKVDLKRMFSNPWERPHVMYGQLLDWLRYLVAWQPVIIGVVQGINYILGLE

SEQ ID NO: 74731 - protein, 49 aa, Homo sapiens
  Payload ID: 14766
  Gene Symbol: RNF121
  Gene Name: ring finger protein 121
  ENSP ID: ENSP00000434127
MRVEHARMHAKHRGHEAMHAEMVLILIATLVVAQLLLVQWKQRHPRSYN

SEQ ID NO: 74732 - protein, 146 aa, Homo sapiens
  Payload ID: 14766
  Gene Symbol: RNF121
  Gene Name: ring finger protein 121
  ENSP ID: ENSP00000435859
  MOD_RES (1)..(1): Any amino acid
XEVEVGGGAAGERELDEVDMSDLSPEEQWRVEHARMHAKHRGHEAMHAEMVLILIATLVVAQLLLVQWKQRHPRSYNDQTRRCHGLWHLPSLLWPLLWSSGTGLCRNVCRLHGIYHRVLQRVGHAYQTSFRQCVCCVWAADLCGRQ

SEQ ID NO: 74733 - protein, 155 aa, Homo sapiens
  Payload ID: 14767
  Gene Symbol: RNF122
  Gene Name: ring finger protein 122
  Uniprot ID: Q9H9V4
  ENSP ID: ENSP00000256257
MHPFQWCNGCFCGLGLVSTNKSCSMPPISFQDLPLNIYMVIFGTGIFVFMLSLIFCCYFISKLRNQAQSERYGYKEVVLKGDAKKLQLYGQTCAVCLEDFKGKDELGVLPCQHAFHRKCLVKWLEVRCVCPMCNKPIASPSEATQNIGILLDELV

SEQ ID NO: 74734 - protein, 1314 aa, Homo sapiens
  Payload ID: 14768
  Gene Symbol: RNF123
  Gene Name: ring finger protein 123
  Uniprot ID: Q5XPI4
  ENSP ID: ENSP00000328287
MASKGAGMSFSRKSYRLTSDAEKSRVTGIVQEKLLNDYLNRIFSSSEHAPPAATSRKPLNFQNLPEHLDQLLQVDNEEEESQGQVEGRLGPSTVVLDHTGGFEGLLLVDDDLLGVIGHSNFGTIRSTTCVYKGKWLYEVLISSQGLMQIGWCTISCRFNQEEGVGDTHNSYAYDGNRVRKWNVTTTNYGKAWAAGDIVSCLIDLDDGTLSFCLNGVSLGTAFENLSRGLGMAYFPAISLSFKESVAFNFGSRPLRYPVAGYRPLQDPPSADLVRAQRLLGCFRAVLSVELDPVEGRLLDKESSKWRLRGQPTVLLTLAHIFHHFAPLLRKVYLVEAVLMSFLLGIVEKGTPTQAQSVVHQVLDLLWLFMEDYEVQDCLKQLMMSLLRLYRFSPIVPDLGLQIHYLRLTIAILRHEKSRKFLLSNVLFDVLRSVVFFYIKSPLRVEEAGLQELIPTTWWPHCSSREGKESTEMKEETAEERLRRRAYERGCQRLRKRIEVVEELQVQILKLLLDNKDDNGGEASRYIFLTKFRKFLQENASGRGNMPMLCPPEYMVCFLHRLISALRYYWDEYKASNPHASFSEEAYIPPQVFYNGKVDYFDLQRLGGLLSHLRKTLKDDLASKANIVIDPLELQSTAMDDLDEDEEPAPAMAQRPMQALAVGGPLPLPRPGWLSSPTLGRANRFLSTAAVSLMTPRRPLSTSEKVKVRTLSVEQRTREDIEGSHWNEGLLLGRPPEEPEQPLTENSLLEVLDGAVMMYNLSVHQQLGKMVGVSDDVNEYAMALRDTEDKLRRCPKRRKDILAELTKSQKVFSEKLDHLSRRLAWVHATVYSQEKMLDIYWLLRVCLRTIEHGDRTGSLFAFMPEFYLSVAINSYSALKNYFGPVHSMEELPGYEETLTRLAAILAKHFADARIVGTDIRDSLMQALASYVCYPHSLRAVERIPEEQRIAMVRNLLAPYEQRPWAQTNWILVRLWRGCGFGYRYTRLPHLLKTKLEDANLPSLQKPCPSTLLQQHMADLLQQGPDVAPSFLNSVLNQLNWAFSEFIGMIQEIQQAAERLERNFVDSRQLKVCATCFDLSVSLLRVLEMTITLVPEIFLDWTRPTSEMLLRRLAQLLNQVLNRVTAERNLFDRVVTLRLPGLESVDHYPILVAVTGILVQLLVRGPASEREQATSVLLADPCFQLRSICYLLGQPEPPAPGTALPAPDRKRFSLQSYADYISADELAQVEQMLAHLTSASAQAAAASLPTSEEDLCPICYAHPISAVFQPCGHKSCKACINQHLMNNKDCFFCKTTIVSVEDWEKGANTSTTSSAA

SEQ ID NO: 74735 - protein, 68 aa, Homo sapiens
  Payload ID: 14768
  Gene Symbol: RNF123
  Gene Name: ring finger protein 123
  ENSP ID: ENSP00000390856
MASKGAGMSFSRKSYRLTSDAEKSRVTGIVQEKLLNDYLNRIFSSSEHAPPAATSRQPPCELRGKDGI

SEQ ID NO: 74736 - protein, 762 aa, Homo sapiens
  Payload ID: 14768
  Gene Symbol: RNF123
  Gene Name: ring finger protein 123
  ENSP ID: ENSP00000392443
MQIGWCTISCRFNQEEGVGDTHNSYAYDGNRVRKWNVTTTNYGKAWAAGDIVSCLIDLDDGTLSFCLNGVSLGTAFENLSRGLGMAYFPAISLSFKESVAFNFGSRPLRYPVAGYRPLQDPPSADLVRAQRLLGCFRAVLSVELDPVEGRLLDKESSKWRLRGQPTVLLTLAHIFHHFAPLLRKVYLVEAVLMSFLLGIVEKGTPTQAQSVVHQVLDLLWLFMEDYEVQDCLKQLMMSLLRLYRFSPIVPDLGLQIHYLRLTIAILRHEKSRKFLLSNVLFDVLRSVVFFYIKSPLRVEEAGLQELIPTTWWPHCSSREGKESTEMKEETAEERLRRRAYERGCQRLRKRIEVVEELQVQILKLLLDNKDDNGGEASRYIFLTKFRKFLQENASGRGNMPMLCPPEYMVCFLHRLISALRYYWDEYKASNPHASFSEEAYIPPQVFYNGKVDYFDLQRLGGLLSHLRKTLKDDLASKANIVIDPLELQSTAMDDLDEDEEPAPAMAQRPMQALAVGGPLPLPRPGWLSSPTLGRANRFLSTAAVSLMTPRRPLSTSEKVKVRTLSVEQRTREDIEGSHWNEGLLLGRPPEEPEQPLTENSLLEVLDGAVMMYNLSVHQQLGKMVGVSDDVNEYAMALRDTEDKLRRCPKRRKDILAELTKSQKVFSEKLDHLSRRLAWVHATVYSQEKMLDIYWLLRVCLRTIEHGDRTGSLFAFMPEFYLSVAINSYSALKNYFGPVHSMEELPGDGTIQAEAEAEKGSLV

SEQ ID NO: 74737 - protein, 721 aa, Homo sapiens
  Payload ID: 14768
  Gene Symbol: RNF123
  Gene Name: ring finger protein 123
  ENSP ID: ENSP00000394369
MASKGAGMSFSRKSYRLTSDAEKSRVTGIVQEKLLNDYLNRIFSSSEHAPPAATSRKPLNFQNLPEHLDQLLQVDNEEEESQGQVEGRLGPSTVVLDHTGGFEGLLLVDDDLLGVIGHSNFGTIRSTTCVYKGKWLYEVLISSQGLMQIGWCTISCRFNQEEGVGDTHNSYAYDGNRVRKWNVTTTNYGKAWAAGDIVSCLIDLDDGTLSFCLNGVSLGTAFENLSRGLGMAYFPAISLSFKESVAFNFGSRPLRYPVAGYRPLQDPPSADLVRAQRLLGCFRAVLSVELDPVEGRLLDKESSKWRLRGQPTVLLTLAHIFHHFAPLLRKVYLVEAVLMSFLLGIVEKGTPTQAQSVVHQVLDLLWLFMEDYEVQDCLKQLMMSLLRLYRFSPIVPDLGLQIHYLRLTIAILRHEKSRKFLLSNVLFDVLRSVVFFYIKSPLRVEEAGLQELIPTTWWPHCSSREGKESTEMKEETAEERLRRRAYERGCQRLRKRIEVVEELQVQILKLLLDNKDDNGGEASRYIFLTKFRKFLQENASGRGNMPMLCPPEYMVCFLHRLISALRYYWDEYKASNPHASFSEEAYIPPQVFYNGKVDYFDLQRLGGLLSHLRKTLKDDLASKANIVIDPLELQSTAMDDLDEDEEPAPAMAQRPMQALAVGGPLPLPRPGWLSSPTLGRANRFLSTAAVSLMTPRRPLSTSEKVKVRTLSVEQRTREDSS

SEQ ID NO: 74738 - protein, 76 aa, Homo sapiens
  Payload ID: 14768
  Gene Symbol: RNF123
  Gene Name: ring finger protein 123
  ENSP ID: ENSP00000408490
MASKGAGMSFSRKSYRLTSDAEKSRVTGIVQEKLLNDYLNRIFSSSEHAPPAATSRKPLNFQNLPEHLDQLLQVDN

SEQ ID NO: 74739 - protein, 25 aa, Homo sapiens
  Payload ID: 14768
  Gene Symbol: RNF123
  Gene Name: ring finger protein 123
  ENSP ID: ENSP00000413794
LTRLAAILAKHFADARIVGTGVSPW

SEQ ID NO: 74740 - protein, 426 aa, Homo sapiens
  Payload ID: 14768
  Gene Symbol: RNF123
  Gene Name: ring finger protein 123
  ENSP ID: ENSP00000416156
MEHGYEETLTRLAAILAKHFADARIVGTDIRDSLMQALASYVCYPHSLRAVERIPEEQRIAMVRNLLAPYEQRPWAQTNWILVRLWRGCGFGYRYTRLPHLLKTKLEDANLPSLQKPCPSTLLQQHMADLLQQGPDVAPSFLNSVLNQLNWAFSEFIGMIQEIQQAAERLERNFVDSRQLKVCATCFDLSVSLLRVLEMTITLVPEIFLDWTRPTSEMLLRRLAQLLNQVLNRVTAERNLFDRVVTLRLPGLESVDHYPILVAVTGILVQLLVRGPASEREQATSVLLADPCFQLRSICYLLGQPEPPAPGTALPAPDRKRFSLQSYADYISADELAQVEQMLAHLTSASAQAAAASLPTSEEDLCPICYAHPISAVFQPCGHKSCKACINQHLMNNKDCFFCKTTIVSVEDWEKGANTSTTSSAA

SEQ ID NO: 74741 - protein, 68 aa, Homo sapiens; identical to SEQ ID NO: 74735
  Payload ID: 14768
  Gene Symbol: RNF123
  Gene Name: ring finger protein 123
  ENSP ID: ENSP00000487104

SEQ ID NO: 74742 - protein, 232 aa, Homo sapiens
  Payload ID: 14769
  Gene Symbol: RNF125
  Gene Name: ring finger protein 125, E3 ubiquitin protein ligase
  Uniprot ID: Q96EQ8
  ENSP ID: ENSP00000217740
MGSVLSTDSGKSAPASATARALERRRDPELPVTSFDCAVCLEVLHQPVRTRCGHVFCRSCIATSLKNNKWTCPYCRAYLPSEGVPATDVAKRMKSEYKNCAECDTLVCLSEMRAHIRTCQKYIDKYGPLQELEETAARCVCPFCQRELYEDSLLDHCITHHRSERRPVFCPLCRLIPDENPSSFSGSLIRHLQVSHTLFYDDFIDFNIIEEALIRRVLDRSLLEYVNHSNTT

SEQ ID NO: 74743 - protein, 40 aa, Homo sapiens
  Payload ID: 14769
  Gene Symbol: RNF125
  Gene Name: ring finger protein 125, E3 ubiquitin protein ligase
  ENSP ID: ENSP00000463935
  MOD_RES (1)..(1): Any amino acid
XLPSEGVPATDVAKRMKSEYKNCAECDTLVCMSLLSEGTV

SEQ ID NO: 74744 - protein, 311 aa, Homo sapiens
  Payload ID: 14770
  Gene Symbol: RNF126
  Gene Name: ring finger protein 126
  Uniprot ID: Q9BV68
  ENSP ID: ENSP00000292363
MAEASPHPGRYFCHCCSVEIVPRLPDYICPRCESGFIEELPEETRSTENGSAPSTAPTDQSRPPLEHVDQHLFTLPQGYGQFAFGIFDDSFEIPTFPPGAQADDGRDPESRRERDHPSRHRYGARQPRARLTTRRATGRHEGVPTLEGIIQQLVNGIITPATIPSLGPWGVLHSNPMDYAWGANGLDAIITQLLNQFENTGPPPADKEKIQALPTVPVTEEHVGSGLECPVCKDDYALGERVRQLPCNHLFHDGCIVPWLEQHDSCPVCRKSLTGQNTATNPPGLTGVSFSSSSSSSSSSSPSNENATSNS

SEQ ID NO: 74745 - protein, 283 aa, Homo sapiens
  Payload ID: 14770
  Gene Symbol: RNF126
  Gene Name: ring finger protein 126
  ENSP ID: ENSP00000464945
MAEASPHPGRYFCHCCSVEIVPRLPDYICPRCESGFIEELPEETRSTENGSAPSTAPTDQSRPPLEHVDQHLFTLPQGYGQFAFGIFDDSFEIPTFPPGAQADDGRDPESRRERDHPSRHRIIQQLVNGIITPATIPSLGPWGVLHSNPMDYAWGANGLDAIITQLLNQFENTGPPPADKEKIQALPTVPVTEEHVGSGLECPVCKDDYALGERVRQLPCNHLFHDGCIVPWLEQHDSCPVCRKSLTGQNTATNPPGLTGVSFSSSSSSSSSSSPSNENATSN

SEQ ID NO: 74746 - protein, 74 aa, Homo sapiens
  Payload ID: 14770
  Gene Symbol: RNF126
  Gene Name: ring finger protein 126
  ENSP ID: ENSP00000475833
MAEASPHPGRYFCHCCSVEIVPRLPDYICPRCESGFIEELPEETRSTENGSAPSTAPTDQSRPPLERPQQTARA

SEQ ID NO: 74747 - protein, 428 aa, Homo sapiens
  Payload ID: 14771
  Gene Symbol: RNF128
  Gene Name: ring finger protein 128, E3 ubiquitin protein ligase
  Uniprot ID: Q8TEB7
  ENSP ID: ENSP00000255499
MGPPPGAGVSCRGGCGFSRLLAWCFLLALSPQAPGSRGAEAVWTAYLNVSWRVPHTGVNRTVWELSEEGVYGQDSPLEPVAGVLVPPDGPGALNACNPHTNFTVPTVWGSTVQVSWLALIQRGGGCTFADKIHLAYERGASGAVIFNFPGTRNEVIPMSHPGAVDIVAIMIGNLKGTKILQSIQRGIQVTMVIEVGKKHGPWVNHYSIFFVSVSFFIITAATVGYFIFYSARRLRNARAQSRKQRQLKADAKKAIGRLQLRTLKQGDKEIGPDGDSCAVCIELYKPNDLVRILTCNHIFHKTCVDPWLLEHRTCPMCKCDILKALGIEVDVEDGSVSLQVPVSNEISNSASSHEEDNRSETASSGYASVQGTDEPPLEEHVQSTNESLQLVNHEANSVAVDVIPHVDNPTFEEDETPNQETAVREIKS

SEQ ID NO: 74748 - protein, 402 aa, Homo sapiens
  Payload ID: 14771
  Gene Symbol: RNF128
  Gene Name: ring finger protein 128, E3 ubiquitin protein ligase
  Uniprot ID: Q8TEB7
  ENSP ID: ENSP00000316127
MNQENRSSFFWLLVIFTFLLKITASFSMSAYVTVTYYNETSNYTAIETCECGVYGLASPVANAMGVVGIPKNNNYQACDHNTEFSNTKKPWIALIERGNCTFSEKIQTAGRRNADAVVIYNAPETGNQTIQMANFGAVDIVAIMIGNLKGTKILQSIQRGIQVTMVIEVGKKHGPWVNHYSIFFVSVSFFIITAATVGYFIFYSARRLRNARAQSRKQRQLKADAKKAIGRLQLRTLKQGDKEIGPDGDSCAVCIELYKPNDLVRILTCNHIFHKTCVDPWLLEHRTCPMCKCDILKALGIEVDVEDGSVSLQVPVSNEISNSASSHEEDNRSETASSGYASVQGTDEPPLEEHVQSTNESLQLVNHEANSVAVDVIPHVDNPTFEEDETPNQETAVREIKS

SEQ ID NO: 74749 - protein, 249 aa, Homo sapiens
  Payload ID: 14771
  Gene Symbol: RNF128
  Gene Name: ring finger protein 128, E3 ubiquitin protein ligase
  ENSP ID: ENSP00000412610
MSAYVTVTYYNETSNYTAIETCECGVYGLASPVANAMGVVGIPKNNNYQACDHNTEFSNTKKPWIALIERGNCTFSEKIQTAGRRNADAVVIYNAPETGNQTIQMANFGAVDIVAIMIGNLKGTKILQSIQRGIQVTMVIEVGKKHGPWVNHYSIFFVSVSFFIITAATVGYFIFYSARRLRNARAQSRKQRQLKADAKKAIGRLQLRTLKQGDKEIGPDGDSCAVCIELYKPNDLVRILTCNHIFHKT

SEQ ID NO: 74750 - protein, 381 aa, Homo sapiens
  Payload ID: 14772
  Gene Symbol: RNF13
  Gene Name: ring finger protein 13
  Uniprot ID: O43567
  ENSP ID: ENSP00000341361
MLLSIGMLMLSATQVYTILTVQLFAFLNLLPVEADILAYNFENASQTFDDLPARFGYRLPAEGLKGFLINSKPENACEPIVPPPVKDNSSGTFIVLIRRLDCNFDIKVLNAQRAGYKAAIVHNVDSDDLISMGSNDIEVLKKIDIPSVFIGESSANSLKDEFTYEKGGHLILVPEFSLPLEYYLIPFLIIVGICLILIVIFMITKFVQDRHRARRNRLRKDQLKKLPVHKFKKGDEYDVCAICLDEYEDGDKLRILPCSHAYHCKCVDPWLTKTKKTCPVCKQKVVPSQGDSDSDTDSSQEENEVTEHTPLLRPLASVSAQSFGALSESRSHQNMTESSDYEEDDNEDTDSSDAENEINEHDVVVQLQPNGERDYNIANTV

SEQ ID NO: 74751 - protein, 262 aa, Homo sapiens
  Payload ID: 14772
  Gene Symbol: RNF13
  Gene Name: ring finger protein 13
  Uniprot ID: O43567
  ENSP ID: ENSP00000355268
MLILMTSLAWDPTTVSTVEVLKKIDIPSVFIGESSANSLKDEFTYEKGGHLILVPEFSLPLEYYLIPFLIIVGICLILIVIFMITKFVQDRHRARRNRLRKDQLKKLPVHKFKKGDEYDVCAICLDEYEDGDKLRILPCSHAYHCKCVDPWLTKTKKTCPVCKQKVVPSQGDSDSDTDSSQEENEVTEHTPLLRPLASVSAQSFGALSESRSHQNMTESSDYEEDDNEDTDSSDAENEINEHDVVVQLQPNGERDYNIANTV

SEQ ID NO: 74752 - protein, 381 aa, Homo sapiens; identical to SEQ ID NO: 74750
  Payload ID: 14772
  Gene Symbol: RNF13
  Gene Name: ring finger protein 13
  Uniprot ID: O43567
  ENSP ID: ENSP00000376628

SEQ ID NO: 74753 - protein, 192 aa, Homo sapiens
  Payload ID: 14772
  Gene Symbol: RNF13
  Gene Name: ring finger protein 13
  ENSP ID: ENSP00000417294
MLLSIGMLMLSATQVYTILTVQLFAFLNLLPVEADILAYNFENASQTFDDLPARFGYRLPAEGLKGFLINSKPENACEPIVPPPVKDNSSGTFIVLIRRLDCNFDIKVLNAQRAGYKAAIVHNVDSDDLISMGSNDSKYRGHLILVPEFSLPLEYYLIPFLIIVGICLILIVIFMITKFVQDRHRARRNRLR

SEQ ID NO: 74754 - protein, 163 aa, Homo sapiens
  Payload ID: 14772
  Gene Symbol: RNF13
  Gene Name: ring finger protein 13
  ENSP ID: ENSP00000417655
MLLSIGMLMLSATQVYTILTVQLFAFLNLLPVEADILAYNFENASQTFDDLPARFGYRLPAEGLKGFLINSKPENACEPIVPPPVKDNSSGTFIVLIRRLDCNFDIKVLNAQRAGYKAAIVHNVDSDDLISMGSNDIEVLKKIDIPSVFIGESSANSLKDEFT

SEQ ID NO: 74755 - protein, 150 aa, Homo sapiens
  Payload ID: 14772
  Gene Symbol: RNF13
  Gene Name: ring finger protein 13
  ENSP ID: ENSP00000418308
MLILMTSLAWDPTTVSTVEVLKKIDIPSVFIGESSANSLKDEFTYEKGGHLILVPEFSLPLEYYLIPFLIIVGICLILIVIFMITKFVQDRHRARRNRLRKDQLKKLPVHKFKKGDEYDVCAICLDEYEDGDKLRILPCSHAYHCKCVDP

SEQ ID NO: 74756 - protein, 232 aa, Homo sapiens
  Payload ID: 14772
  Gene Symbol: RNF13
  Gene Name: ring finger protein 13
  ENSP ID: ENSP00000418863
MLILMTSLAWDPTTVSTVEVLKKIDIPSVFIGESSANSLKDEFTYEKGGHLILVPEFSLPLEYYLIPFLIIVGICLILIVIFMITKFVQDRHRARRNRLRKDQLKKLPVHKFKKGDEYDVCAICLDEYEDGDKLRILPCSHAYHCKCVDPWLTKTKKTCPVCKQKVVPSQGDSDSDTDSSQEENEVTEHTPLLRPLASVSAQSFGALSESRSHQNMTESSDYEEDDNEDTDS

SEQ ID NO: 74757 - protein, 165 aa, Homo sapiens
  Payload ID: 14772
  Gene Symbol: RNF13
  Gene Name: ring finger protein 13
  ENSP ID: ENSP00000419069
MLLSIGMLMLSATQVYTILTVQLFAFLNLLPVEADILAYNFENASQTFDDLPARFGYRLPAEGLKGFLINSKPENACEPIVPPPVKDNSSGTFIVLIRRLDCNFDIKVLNAQRAGYKAAIVHNVDSDDLISMGSNDIEVLKKIDIPSVFIGESSANSLKDEFTYE

SEQ ID NO: 74758 - protein, 72 aa, Homo sapiens
  Payload ID: 14772
  Gene Symbol: RNF13
  Gene Name: ring finger protein 13
  ENSP ID: ENSP00000419508
MLLSIGMLMLSATQVYTILTVQLFAFLNLLPVEADILAYNFENASQTFDDLPARFGYRLPAEGLKGFLINSK

SEQ ID NO: 74759 - protein, 17 aa, Homo sapiens
  Payload ID: 14772
  Gene Symbol: RNF13
  Gene Name: ring finger protein 13
  ENSP ID: ENSP00000419809
MLILMTSLAWDPTTLRY

SEQ ID NO: 74760 - protein, 80 aa, Homo sapiens
  Payload ID: 14772
  Gene Symbol: RNF13
  Gene Name: ring finger protein 13
  ENSP ID: ENSP00000419836
MLLSIGMLMLSATQVYTILTVQLFAFLNLLPVEADILAYNFENASQTFDDLPARFGYRLPAEGLKGFLINSKPENACEPI

SEQ ID NO: 74761 - protein, 115 aa, Homo sapiens
  Payload ID: 14772
  Gene Symbol: RNF13
  Gene Name: ring finger protein 13
  ENSP ID: ENSP00000420067
MLLSIGMLMLSATQVYTILTVQLFAFLNLLPVEADILAYNFENASQTFDDLPARFGYRLPAEGLKGFLINSKPENACEPIVPPPVKDNSSGTFIVLIRRLDCNFDIKVLNAQRAG

SEQ ID NO: 74762 - protein, 140 aa, Homo sapiens
  Payload ID: 14772
  Gene Symbol: RNF13
  Gene Name: ring finger protein 13
  ENSP ID: ENSP00000420124
MLLSIGMLMLSATQVYTILTVQLFAFLNLLPVEADILAYNFENASQTFDDLPARFGYRLPAEGLKGFLINSKPENACEPIVPPPVKDNSSGTFIVLIRRLDCNFDIKVLNAQRAGYKAAIVHNVDSDDLISMGSNDSKYS

SEQ ID NO: 74763 - protein, 183 aa, Homo sapiens
  Payload ID: 14772
  Gene Symbol: RNF13
  Gene Name: ring finger protein 13
  ENSP ID: ENSP00000420510
  MOD_RES (1)..(1): Any amino acid
XVPEFSLPLEYYLIPFLIIVGICLILIVIFMITKFVQDRHRARRNRLRKDQLKKLPVHKFKKAYHCKCVDPWLTKTKKTCPVCKQKVVPSQGDSDSDTDSSQEENEVTEHTPLLRPLASVSAQSFGALSESRSHQNMTESSDYEEDDNEDTDSSDAENEINEHDVVVQLQPNGERDYNIANTV

SEQ ID NO: 74764 - protein, 233 aa, Homo sapiens
  Payload ID: 14772
  Gene Symbol: RNF13
  Gene Name: ring finger protein 13
  ENSP ID: ENSP00000420667
MLILMTSLAWDPTTVSTVEVLKKIDIPSVFIGESSANSLKDEFTYEKGGHLILVPEFSLPLEYYLIPFLIIVGICLILIVIFMITKFVQDRHRARRNRLRKDQLKKLPVHKFKKGDEYDVCAICLDEYEDGDKLRILPCSHAYHCKCVDPWLTKTKKTCPVCKQKVVPSQGDSDSDTDSSQEENEVTEHTPLLRPLASVSAQSFGALSESRSHQNMTESSDYEEDDNEDTDSS

SEQ ID NO: 74765 - protein, 384 aa, Homo sapiens
  Payload ID: 14773
  Gene Symbol: RNF130
  Gene Name: ring finger protein 130
  Uniprot ID: Q86XS8
  ENSP ID: ENSP00000261947
MSCAGRAGPARLAALALLTCSLWPARADNASQEYYTALINVTVQEPGRGAPLTFRIDRGRYGLDSPKAEVRGQVLAPLPLHGVADHLGCDPQTRFFVPPNIKQWIALLQRGNCTFKEKISRAAFHNAVAVVIYNNKSKEEPVTMTHPGTGDIIAVMITELRGKDILSYLEKNISVQMTIAVGTRMPPKNFSRGSLVFVSISFIVLMIISSAWLIFYFIQKIRYTNARDRNQRRLGDAAKKAISKLTTRTVKKGDKETDPDFDHCAVCIESYKQNDVVRILPCKHVFHKSCVDPWLSEHCTCPMCKLNILKALGIVPNLPCTDNVAFDMERLTRTQAVNRRSALGDLAGDNSLGLEPLRTSGISPLPQDGELTPRTGEINIAVTR

SEQ ID NO: 74766 - protein, 419 aa, Homo sapiens
  Payload ID: 14773
  Gene Symbol: RNF130
  Gene Name: ring finger protein 130
  ENSP ID: ENSP00000429509
MSCAGRAGPARLAALALLTCSLWPARADNASQEYYTALINVTVQEPGRGAPLTFRIDRGRYGLDSPKAEVRGQVLAPLPLHGVADHLGCDPQTRFFVPPNIKQWIALLQRGNCTFKEKISRAAFHNAVAVVIYNNKSKEEPVTMTHPGTGDIIAVMITELRGKDILSYLEKNISVQMTIAVGTRMPPKNFSRGSLVFVSISFIVLMIISSAWLIFYFIQKIRYTNARDRNQRRLGDAAKKAISKLTTRTVKKGDKETDPDFDHCAVCIESYKQNDVVRILPCKHVFHKSCVDPWLSEHCTCPMCKLNILKALGIVPNLPCTDNVAFDMERLTRTQAVNRRSALGDLAGDNSLGLEPLRTSGISPLPQDGELTPRTGEINIAVTSGHFFHRNSLSPRSLVYESEFSTIEPSLDMYDENKT

SEQ ID NO: 74767 - protein, 419 aa, Homo sapiens
  Payload ID: 14773
  Gene Symbol: RNF130
  Gene Name: ring finger protein 130
  Uniprot ID: Q86XS8
  ENSP ID: ENSP00000430237
MSCAGRAGPARLAALALLTCSLWPARADNASQEYYTALINVTVQEPGRGAPLTFRIDRGRYGLDSPKAEVRGQVLAPLPLHGVADHLGCDPQTRFFVPPNIKQWIALLQRGNCTFKEKISRAAFHNAVAVVIYNNKSKEEPVTMTHPGTGDIIAVMITELRGKDILSYLEKNISVQMTIAVGTRMPPKNFSRGSLVFVSISFIVLMIISSAWLIFYFIQKIRYTNARDRNQRRLGDAAKKAISKLTTRTVKKGDKETDPDFDHCAVCIESYKQNDVVRILPCKHVFHKSCVDPWLSEHCTCPMCKLNILKALGIVPNLPCTDNVAFDMERLTRTQAVNRRSALGDLAGDNSLGLEPLRTSGISPLPQDGELTPRTGEINIAVTKEWFIIASFGLLSALTLCYMIIRATASLNANEVEWF

SEQ ID NO: 74768 - protein, 141 aa, Homo sapiens
  Payload ID: 14773
  Gene Symbol: RNF130
  Gene Name: ring finger protein 130
  ENSP ID: ENSP00000430999
MSCAGRAGPARLAALALLTCSLWPARADNASQEYYTALINVTVQEPGRGAPLTFRIDRGRYGLDSPKAEVRGQVLAPLPLHGVADHLGCDPQTRFFVPPNIKQWIALLQRGNCTFKEKISRAAFHNAVAVVIYNNKSKEEN

SEQ ID NO: 74769 - protein, 376 aa, Homo sapiens
  Payload ID: 14774
  Gene Symbol: RNF133
  Gene Name: ring finger protein 133
  Uniprot ID: Q8WVZ7
  ENSP ID: ENSP00000344489
MHLLKVGTWRNNTASSWLMKFSVLWLVSQNCCRASVVWMAYMNISFHVGNHVLSELGETGVFGRSSTLKRVAGVIVPPEGKIQNACNPNTIFSRSKYSETWLALIERGGCTFTQKIKVATEKGASGVIIYNVPGTGNQVFPMFHQAFEDVVVVMIGNLKGTEIFHLIKKGVLITAVVEVGRKHIIWMNHYLVSFVIVTTATLAYFIFYHIHRLCLARIQNRRWQRLTTDLQNTFGQLQLRVVKEGDEEINPNGDSCVICFERYKPNDIVRILTCKHFFHKNCIDPWILPHGTCPICKCDILKVLGIQVVVENGTEPLQVLMSNELPETLSPSEEETNNEVSPAGTSDKVIHVEENPTSQNNDIQPHSVVEDVHPSP

SEQ ID NO: 74770 - protein, 210 aa, Homo sapiens
  Payload ID: 14775
  Gene Symbol: RNF135
  Gene Name: ring finger protein 135
  Uniprot ID: Q8IUD6
  ENSP ID: ENSP00000323693
MAGLGLGSAVPVWLAEDDLGCIICQGLLDWPATLPCGHSFCRHCLEALWGARDARRWACPTCRQGAAQQPHLRKNTLLQDLADKYRRAAREIQAGSDPAHCPCPGSSSLSSAAARPRRRPELQRVAVEKSITEVAQELTELVEHLVDIVRSLQNQRPLSESGPDNELSILGKENSWKPRLPPHAHCLTRATLHSGELLGLLSGPSIQPLT

SEQ ID NO: 74771 - protein, 432 aa, Homo sapiens
  Payload ID: 14775
  Gene Symbol: RNF135
  Gene Name: ring finger protein 135
  Uniprot ID: Q8IUD6
  ENSP ID: ENSP00000328340
MAGLGLGSAVPVWLAEDDLGCIICQGLLDWPATLPCGHSFCRHCLEALWGARDARRWACPTCRQGAAQQPHLRKNTLLQDLADKYRRAAREIQAGSDPAHCPCPGSSSLSSAAARPRRRPELQRVAVEKSITEVAQELTELVEHLVDIVRSLQNQRPLSESGPDNELSILGKAFSSGVDLSMASPKLVTSDTAAGKIRDILHDLEEIQEKLQESVTWKEAPEAQMQGELLEAPSSSSCPLPDQSHPALRRASRFAQWAIHPTFNLKSLSCSLEVSKDSRTVTVSHRPQPYRWSCERFSTSQVLCSQALSSGKHYWEVDTRNCSHWAVGVASWEMSRDQVLGRTMDSCCVEWKGTSQLSAWHMVKETVLGSDRPGVVGIWLNLEEGKLAFYSVDNQEKLLYECTISASSPLYPAFWLYGLHPGNYLIIKQVKV

SEQ ID NO: 74772 - protein, 162 aa, Homo sapiens
  Payload ID: 14775
  Gene Symbol: RNF135
  Gene Name: ring finger protein 135
  ENSP ID: ENSP00000411965
MAGLGLGSAVPVWLAEDDLGCIICQGLLDWPATLPCGHSFCRHCLEALWGARDARRWACPTCRQGAAQQPHLRKNTLLQDLADKYRRAAREIQAGSDPAHCPCPGSSSLSSAAARPRRRPELQRENSWKPRLPPHAHCLTRATLHSGELLGLLSGPSIQPLT

SEQ ID NO: 74773 - protein, 286 aa, Homo sapiens
  Payload ID: 14775
  Gene Symbol: RNF135
  Gene Name: ring finger protein 135
  Uniprot ID: Q8IUD6
  ENSP ID: ENSP00000440470
MAGLGLGSAVPVWLAEDDLGCIICQGLLDWPATLPCGHSFCRHCLEALWGARDARRWACPTCRQGAAQQPHLRKNTLLQDLADKYRRAAREIQAGSDPAHCPCPGSSSLSSAAARPRRRPELQRVAVEKSITEVAQELTELVEHLVDIVRSLQNQRPLSESGPDNELSILGKAFSSGVDLSMASPKLVTSDTAAGKIRDILHDLEEIQEKLQESVTWKEAPEAQMQGSLLPRLECSGTITAASISQAQENSWKPRLPPHAHCLTRATLHSGELLGLLSGPSIQPLT

SEQ ID NO: 74774 - protein, 158 aa, Homo sapiens
  Payload ID: 14775
  Gene Symbol: RNF135
  Gene Name: ring finger protein 135
  ENSP ID: ENSP00000464549
  MOD_RES (1)..(1): Any amino acid
XCQGLLDWPATLPCGHSFCRHCLEALWGARDARRWACPTCRQGAAQQPHLRKNTLLQDLADKYRRAAREIQAGSDPAHCPCPGSSSLSSAAARPRRRPELQRAFSSGVDLSMASPKLVTSDTAAGKIRDILHDLEEIQEKLQESVTWKEAPEAQMQGE

SEQ ID NO: 74775 - protein, 86 aa, Homo sapiens
  Payload ID: 14775
  Gene Symbol: RNF135
  Gene Name: ring finger protein 135
  ENSP ID: ENSP00000467799
  MOD_RES (1)..(1): Any amino acid
XKEAPEAQMQGSLLPRLECSGTITAASISQAQENSWKPRLPPHAHCLTRATLHSGELLGLLSVPPRGELIAKAKQVETLDPRALRV

SEQ ID NO: 74776 - protein, 151 aa, Homo sapiens
  Payload ID: 14776
  Gene Symbol: RNF138
  Gene Name: ring finger protein 138, E3 ubiquitin protein ligase
  Uniprot ID: Q8WVD3
  ENSP ID: ENSP00000257190
MAEDLSAATSYTEDDFYCPVCQEVLKTPVRTTACQHVNRSETSTSDNTETYQENTSSSGHPTFKCPLCQESNFTRQRLLDHCNSNHLFQIVPVTCPICVSLPWGDPSQITRNFVSHLNQRHQFDYGEFVNLQLDEETQYQTAVEESFQVNI

SEQ ID NO: 74777 - protein, 245 aa, Homo sapiens
  Payload ID: 14776
  Gene Symbol: RNF138
  Gene Name: ring finger protein 138, E3 ubiquitin protein ligase
  Uniprot ID: Q8WVD3
  ENSP ID: ENSP00000261593
MAEDLSAATSYTEDDFYCPVCQEVLKTPVRTTACQHVFCRKCFLTAMRESGAHCPLCRGNVTRRERACPERALDLENIMRKFSGSCRCCAKQIKFYRMRHHYKSCKKYQDEYGVSSIIPNFQISQDSVGNSNRSETSTSDNTETYQENTSSSGHPTFKCPLCQESNFTRQRLLDHCNSNHLFQIVPVTCPICVSLPWGDPSQITRNFVSHLNQRHQFDYGEFVNLQLDEETQYQTAVEESFQVNI

SEQ ID NO: 74778 - protein, 80 aa, Homo sapiens
  Payload ID: 14776
  Gene Symbol: RNF138
  Gene Name: ring finger protein 138, E3 ubiquitin protein ligase
  ENSP ID: ENSP00000462165
MRESGAHCPLCRGNVTRRERACPERALDLENIMRKFSGSCRCCAKQIKFYRMRHHYKSCKKYQDEYGVSSIIPNFQISQD

SEQ ID NO: 74779 - protein, 108 aa, Homo sapiens
  Payload ID: 14776
  Gene Symbol: RNF138
  Gene Name: ring finger protein 138, E3 ubiquitin protein ligase
  ENSP ID: ENSP00000462498
MAEDLSAATSYTEDDFYCPVCQEVLKTPVRTTACQHVFCRKCFLTAMRESGAHCPLCRGNVTRRERACPERALDLENIMRKFSGSCRCCAKQIKFYRMRHHYKSCKKY

SEQ ID NO: 74780 - protein, 142 aa, Homo sapiens
  Payload ID: 14776
  Gene Symbol: RNF138
  Gene Name: ring finger protein 138, E3 ubiquitin protein ligase
  ENSP ID: ENSP00000463153
MAEDLSAATSYTEDDFYCPVCQEVLKTPVRTTACQHVFCRKCFLTAMRESGAHCPLCRGNVTRRERACPERALDLENIMRKFSGSCRCCAKQIKFYRMRHHYKSCKKYQDEYGVSSIIPNFQISQDSVGNSSSGHPTFKCPL

SEQ ID NO: 74781 - protein, 66 aa, Homo sapiens
  Payload ID: 14776
  Gene Symbol: RNF138
  Gene Name: ring finger protein 138, E3 ubiquitin protein ligase
  ENSP ID: ENSP00000463659
SETSTSDNTETYQENTSSSGHPTFKCPLCQESNFTRQRLLDHCNSNHLFQIVPVILARLPEISLVI

SEQ ID NO: 74782 - protein, 664 aa, Homo sapiens
  Payload ID: 14777
  Gene Symbol: RNF139
  Gene Name: ring finger protein 139
  Uniprot ID: Q8WU17
  ENSP ID: ENSP00000304051
MAAVGPPQQQVRMAHQQVWAALEVALRVPCLYIIDAIFNSYPDSSQSRFCIVLQIFLRLFGVFASSIVLILSQRSLFKFYTYSSAFLLAATSVLVNYYASLHIDFYGAYNTSAFGIELLPRKGPSLWMALIVLQLTFGIGYVTLLQIHSIYSQLIILDLLVPVIGLITELPLHIRETLLFTSSLILTLNTVFVLAVKLKWFYYSTRYVYLLVRHMYRIYGLQLLMEDTWKRIRFPDILRVFWLTRVTAQATVLMYILRMANETDSFFISWDDFWDLICNLIISGCDSTLTVLGMSAVISSVAHYLGLGILAFIGSTEEDDRRLGFVAPVLFFILALQTGLSGLRPEERLIRLSRNMCLLLTAVLHFIHGMTDPVLMSLSASHVSSFRRHFPVLFVSACLFILPVLLSYVLWHHYALNTWLFAVTAFCVELCLKVIVSLTVYTLFMIDGYYNVLWEKLDDYVYYVRSTGSIIEFIFGVVMFGNGAYTMMFESGSKIRAFMMCLHAYFNIYLQAKNGWKTFMNRRTAVKKINSLPEIKGSRLQEINDVCAICYHEFTTSARITPCNHYFHALCLRKWLYIQDTCPMCHQKVYIEDDIKDNSNVSNNNGFIPPNETPEEAVREAAAESDRELNEDDSTDCDDDVQRERNGVIQHTGAAAEEFNDDTD

SEQ ID NO: 74783 - protein, 68 aa, Homo sapiens
  Payload ID: 14777
  Gene Symbol: RNF139
  Gene Name: ring finger protein 139
  ENSP ID: ENSP00000429836
MALIVLQLTFGIGYVTLLQIHSIYSQLIILDLLVPVIGLITELPLHIRETLLFTSSLILTLNTVFVLA

SEQ ID NO: 74784 - protein, 474 aa, Homo sapiens
  Payload ID: 14778
  Gene Symbol: RNF14
  Gene Name: ring finger protein 14
  Uniprot ID: Q9UBS8
  ENSP ID: ENSP00000324956
MSSEDREAQEDELLALASIYDGDEFRKAESVQGGETRIYLDLPQNFKIFVSGNSNECLQNSGFEYTICFLPPLVLNFELPPDYPSSSPPSFTLSGKWLSPTQLSALCKHLDNLWEEHRGSVVLFAWMQFLKEETLAYLNIVSPFELKIGSQKKVQRRTAQASPNTELDFGGAAGSDVDQEEIVDERAVQDVESLSNLIQEILDFDQAQQIKCFNSKLFLCSICFCEKLGSECMYFLECRHVYCKACLKDYFEIQIRDGQVQCLNCPEPKCPSVATPGQVKELVEAELFARYDRLLLQSSLDLMADVVYCPRPCCQLPVMQEPGCTMGICSSCNFAFCTLCRLTYHGVSPCKVTAEKLMDLRNEYLQADEANKRLLDQRYGKRVIQKALEEMESKEWLEKNSKSCPCCGTPIEKLDGCNKMTCTGCMQYFCWICMGSLSRANPYKHFNDPGSPCFNRLFYAVDVDDDIWEDEVED

SEQ ID NO: 74785 - protein, 474 aa, Homo sapiens; identical to SEQ ID NO: 74784
  Payload ID: 14778
  Gene Symbol: RNF14
  Gene Name: ring finger protein 14
  Uniprot ID: Q9UBS8
  ENSP ID: ENSP00000348462

SEQ ID NO: 74786 - protein, 348 aa, Homo sapiens
  Payload ID: 14778
  Gene Symbol: RNF14
  Gene Name: ring finger protein 14
  Uniprot ID: Q9UBS8
  ENSP ID: ENSP00000378022
MQFLKEETLAYLNIVSPFELKIGSQKKVQRRTAQASPNTELDFGGAAGSDVDQEEIVDERAVQDVESLSNLIQEILDFDQAQQIKCFNSKLFLCSICFCEKLGSECMYFLECRHVYCKACLKDYFEIQIRDGQVQCLNCPEPKCPSVATPGQVKELVEAELFARYDRLLLQSSLDLMADVVYCPRPCCQLPVMQEPGCTMGICSSCNFAFCTLCRLTYHGVSPCKVTAEKLMDLRNEYLQADEANKRLLDQRYGKRVIQKALEEMESKEWLEKNSKSCPCCGTPIEKLDGCNKMTCTGCMQYFCWICMGSLSRANPYKHFNDPGSPCFNRLFYAVDVDDDIWEDEVED

SEQ ID NO: 74787 - protein, 474 aa, Homo sapiens; identical to SEQ ID NO: 74784
  Payload ID: 14778
  Gene Symbol: RNF14
  Gene Name: ring finger protein 14
  Uniprot ID: Q9UBS8
  ENSP ID: ENSP00000378027

SEQ ID NO: 74788 - protein, 474 aa, Homo sapiens; identical to SEQ ID NO: 74784
  Payload ID: 14778
  Gene Symbol: RNF14
  Gene Name: ring finger protein 14
  Uniprot ID: Q9UBS8
  ENSP ID: ENSP00000378028

SEQ ID NO: 74789 - protein, 171 aa, Homo sapiens
  Payload ID: 14778
  Gene Symbol: RNF14
  Gene Name: ring finger protein 14
  ENSP ID: ENSP00000420837
MSSEDREAQEDELLALASIYDGDEFRKAESVQGGETRIYLDLPQNFKIFVSGNSNECLQNSGFEYTICFLPPLVLNFELPPDYPSSSPPSFTLSGKWLSPTQLSALCKHLDNLWEEHRGSVVLFAWMQFLKEETLAYLNIVSPFELKIGSQKKVQRRTAQASPNTELDFGG

SEQ ID NO: 74790 - protein, 99 aa, Homo sapiens
  Payload ID: 14778
  Gene Symbol: RNF14
  Gene Name: ring finger protein 14
  ENSP ID: ENSP00000421780
MSSEDREAQEDELLALASIYDGDEFRKAESVQGGETRIYLDLPQNFKIFVSGNSNECLQNSGFEYTICFLPPLVLNFELPPDYPSSSPPSFTLSGKWLS

SEQ ID NO: 74791 - protein, 185 aa, Homo sapiens
  Payload ID: 14778
  Gene Symbol: RNF14
  Gene Name: ring finger protein 14
  ENSP ID: ENSP00000422527
MSSEDREAQEDELLALASIYDGDEFRKAESVQGGETRIYLDLPQNFKIFVSGNSNECLQNSGFEYTICFLPPLVLNFELPPDYPSSSPPSFTLSGKWLSPTQLSALCKHLDNLWEEHRGSVVLFAWMQFLKEETLAYLNIVSPFELKIGSQKKVQRRTAQASPNTELDFGGAAGSDVDQEEIVDE

SEQ ID NO: 74792 - protein, 64 aa, Homo sapiens
  Payload ID: 14778
  Gene Symbol: RNF14
  Gene Name: ring finger protein 14
  ENSP ID: ENSP00000422650
MSSEDREAQEDELLALASIYDGDEFRKAESVQGGETRIYLDLPQNFKIFVSGQRVSGSRVICPL

SEQ ID NO: 74793 - protein, 132 aa, Homo sapiens
  Payload ID: 14778
  Gene Symbol: RNF14
  Gene Name: ring finger protein 14
  ENSP ID: ENSP00000423273
MSSEDREAQEDELLALASIYDGDEFRKAESVQGGETRIYLDLPQNFKIFVSGNSNECLQNSGFEYTICFLPPLVLNFELPPDYPSSSPPSFTLSGKWLSPTQLSALCKHLDNLWEEHRGSVVLFAWMQFLKE

SEQ ID NO: 74794 - protein, 61 aa, Homo sapiens
  Payload ID: 14778
  Gene Symbol: RNF14
  Gene Name: ring finger protein 14
  ENSP ID: ENSP00000423294
MSSEDREAQEDELLALASIYDGDEFRKAESVQGGETRIYLDLPQNFKIFVSGNSNECLQNS

SEQ ID NO: 74795 - protein, 278 aa, Homo sapiens
  Payload ID: 14778
  Gene Symbol: RNF14
  Gene Name: ring finger protein 14
  ENSP ID: ENSP00000423420
MSSEDREAQEDELLALASIYDGDEFRKAESVQGGETRIYLDLPQNFKIFVSGNSNECLQNSGFEYTICFLPPLVLNFELPPDYPSSSPPSFTLSGKWLSPTQLSALCKHLDNLWEEHRGSVVLFAWMQFLKEETLAYLNIVSPFELKIGSQKKVQRRTAQASPNTELDFGGAAGSDVDQEEIVDERAVQDVESLSNLIQEILDFDQAQQIKCFNSKLFLCSICFCEKLGSECMYFLECRHVYCKACLKDYFEIQIRDGQVQCLNCPEPKCPSVATPGQ

SEQ ID NO: 74796 - protein, 15 aa, Homo sapiens
  Payload ID: 14778
  Gene Symbol: RNF14
  Gene Name: ring finger protein 14
  ENSP ID: ENSP00000425361
MSSEDREAQEDELLA

SEQ ID NO: 74797 - protein, 152 aa, Homo sapiens
  Payload ID: 14778
  Gene Symbol: RNF14
  Gene Name: ring finger protein 14
  ENSP ID: ENSP00000426832
MSSEDREAQEDELLALASIYDGDEFRKAESVQGGETRIYLDLPQNFKIFVSEKLMDLRNEYLQADEANKRLLDQRYGKRVIQKALEEMESKEWLEKNSKSCPCCGTPIEKLDGCNKMTCTGCMQYFCWICMGSLSRANPYKHFNDPGSPCFN

SEQ ID NO: 74798 - protein, 230 aa, Homo sapiens
  Payload ID: 14779
  Gene Symbol: RNF141
  Gene Name: ring finger protein 141
  Uniprot ID: Q8WVD5
  ENSP ID: ENSP00000265981
MGQQISDQTQLVINKLPEKVAKHVTLVRESGSLTYEEFLGRVAELNDVTAKVASGQEKHLLFEVQPGSDSSAFWKVVVRVVCTKINKSSGIVEASRIMNLYQFIQLYKDITSQAAGVLAQSSTSEEPDENSSSVTSCQASLWMGRVKQLTDEEECCICMDGRADLILPCAHSFCQKCIDKWSDRHRNCPICRLQMTGANESWVVSDAPTEDDMANYILNMADEAGQPHRP

SEQ ID NO: 74799 - protein, 181 aa, Homo sapiens
  Payload ID: 14779
  Gene Symbol: RNF141
  Gene Name: ring finger protein 141
  ENSP ID: ENSP00000434320
MGQQISDQTQLVINKLPEKVAKHVTLVRESGSLTYEEFLGRVAELNDVTAKVASGQEKHLLFEVQPGSDSSAFWKVVVRVVCTKINKSSGIVEASRIMNLYQFIQLYKDITSQAAGVLAQSSTSEEPDENSSSVTSCQASLWMGRVKQLTDEEECCICMDGRADLILPCAHSFCQKCIDKW

SEQ ID NO: 74800 - protein, 180 aa, Homo sapiens
  Payload ID: 14779
  Gene Symbol: RNF141
  Gene Name: ring finger protein 141
  ENSP ID: ENSP00000435086
MGQQISDQTQLVINKLPEKVAKHVTLVRESGSLTYEEFLGRVAELNDVTAKVASGQEKHLLFEVQPGSDSSAFWKVVVRVVCTKINKSSGIVEASRIMNLYQFIQLYKDITSQAAGVLAQSSTSEEPDENSSSVTSCQASLWMGRVKQLTDEEECCICMDGRADLILPCAHSFCQKCIDK

SEQ ID NO: 74801 - protein, 52 aa, Homo sapiens
  Payload ID: 14779
  Gene Symbol: RNF141
  Gene Name: ring finger protein 141
  ENSP ID: ENSP00000437167
MGQQISDQTQLVINKLPEKVAKHVTLVRESGSLTYEEFLGRVAELNDVTGYF

SEQ ID NO: 74802 - protein, 292 aa, Homo sapiens
  Payload ID: 14780
  Gene Symbol: RNF144A
  Gene Name: ring finger protein 144A
  Uniprot ID: P50876
  ENSP ID: ENSP00000321330
MTTTRYRPTWDLALDPLVSCKLCLGEYPVEQMTTIAQCQCIFCTLCLKQYVELLIKEGLETAISCPDAACPKQGHLQENEIECMVAAEIMQRYKKLQFEREVLFDPCRTWCPASTCQAVCQLQDVGLQTPQPVQCKACRMEFCSTCKASWHPGQGCPETMPITFLPGETSAAFKMEEDDAPIKRCPKCKVYIERDEGCAQMMCKNCKHAFCWYCLESLDDDFLLIHYDKGPCRNKLGHSRASVIWHRTQVVGIFAGFGLLLLVASPFLLLATPFVLCCKCKCSKGDDDPLPT

SEQ ID NO: 74803 - protein, 55 aa, Homo sapiens
  Payload ID: 14780
  Gene Symbol: RNF144A
  Gene Name: ring finger protein 144A
  ENSP ID: ENSP00000402645
MTTTRYRPTWDLALDPLVSCKLCLGEYPVEQMTTIAQCQCIFCTLCLKQYVELLI

SEQ ID NO: 74804 - protein, 264 aa, Homo sapiens
  Payload ID: 14780
  Gene Symbol: RNF144A
  Gene Name: ring finger protein 144A
  ENSP ID: ENSP00000411616
  MOD_RES (1)..(1): Any amino acid
XYRPTWDLALDPLVSCKLCLGEYPVEQMTTIAQCQCIFCTLCLKQYVELLIKEGLETAISCPDAACPKQGHLQENEIECMVAAEIMQRYKKLQFEREVLFDPCRTWCPASTCQAVCQLQDVGLQTPQPVQCKACRMEFCSTCKASWHPGQGCPETMPITFLPGETSAAFKMEEDDAPIKRCPKCKVYIERDEGCAQMMCKNCKHAFCWYCLESLDDDFLLIHYDKGPCRNKLGHSRASVIWHRTQGDAILEKCILHNTESECHL

SEQ ID NO: 74805 - protein, 55 aa, Homo sapiens; identical to SEQ ID NO: 74803
  Payload ID: 14780
  Gene Symbol: RNF144A
  Gene Name: ring finger protein 144A
  ENSP ID: ENSP00000414420

SEQ ID NO: 74806 - protein, 303 aa, Homo sapiens
  Payload ID: 14781
  Gene Symbol: RNF144B
  Gene Name: ring finger protein 144B
  Uniprot ID: Q7Z419
  ENSP ID: ENSP00000259939
MGSAGRLHYLAMTAENPTPGDLAPAPLITCKLCLCEQSLDKMTTLQECQCIFCTACLKQYMQLAIREGCGSPITCPDMVCLNHGTLQEAEIACLVPVDQFQLYQRLKFEREVHLDPYRTWCPVADCQTVCPVASSDPGQPVLVECPSCHLKFCSCCKDAWHAEVSCRDSQPIVLPTEHRALFGTDAEAPIKQCPVCRVYIERNEGCAQMMCKNCKHTFCWYCLQNLDNDIFLRHYDKGPCRNKLGHSRASVMWNRTQVVGILVGLGIIALVTSPLLLLASPCIICCVCKSCRGKKKKHDPSTT

SEQ ID NO: 74807 - protein, 691 aa, Homo sapiens
  Payload ID: 14782
  Gene Symbol: RNF145
  Gene Name: ring finger protein 145
  Uniprot ID: Q96MT1
  ENSP ID: ENSP00000274542
MMRNHRIASSLCGDQVFSKKKKKKKKNNMAAKEKLEAVLNVALRVPSIMLLDVLYRWDVSSFFQQIQRSSLSNNPLFQYKYLALNMHYVGYILSVVLLTLPRQHLVQLYLYFLTALLLYAGHQISRDYVRSELEFAYEGPMYLEPLSMNRFTTALIGQLVVCTLCSCVMKTKQIWLFSAHMLPLLARLCLVPLETIVIINKFAMIFTGLEVLYFLGSNLLVPYNLAKSAYRELVQVVEVYGLLALGMSLWNQLVVPVLFMVFWLVLFALQIYSYFSTRDQPASRERLLFLFLTSIAECCSTPYSLLGLVFTVSFVALGVLTLCKFYLQGYRAFMNDPAMNRGMTEGVTLLILAVQTGLIELQVVHRAFLLSIILFIVVASILQSMLEIADPIVLALGASRDKSLWKHFRAVSLCLFLLVFPAYMAYMICQFFHMDFWLLIIISSSILTSLQVLGTLFIYVLFMVEEFRKEPVENMDDVIYYVNGTYRLLEFLVALCVVAYGVSETIFGEWTVMGSMIIFIHSYYNVWLRAQLGWKSFLLRRDAVNKIKSLPIATKEQLEKHNDICAICYQDMKSAVITPCSHFFHAGCLKKWLYVQETCPLCHCHLKNSSQLPGLGTEPVLQPHAGAEQNVMFQEGTEPPGQEHTPGTRIQEGSRDNNEYIARRPDNQEGAFDPKEYPHSAKDEAHPVESA

SEQ ID NO: 74808 - protein, 663 aa, Homo sapiens
  Payload ID: 14782
  Gene Symbol: RNF145
  Gene Name: ring finger protein 145
  Uniprot ID: Q96MT1
  ENSP ID: ENSP00000409064
MAAKEKLEAVLNVALRVPSIMLLDVLYRWDVSSFFQQIQRSSLSNNPLFQYKYLALNMHYVGYILSVVLLTLPRQHLVQLYLYFLTALLLYAGHQISRDYVRSELEFAYEGPMYLEPLSMNRFTTALIGQLVVCTLCSCVMKTKQIWLFSAHMLPLLARLCLVPLETIVIINKFAMIFTGLEVLYFLGSNLLVPYNLAKSAYRELVQVVEVYGLLALGMSLWNQLVVPVLFMVFWLVLFALQIYSYFSTRDQPASRERLLFLFLTSIAECCSTPYSLLGLVFTVSFVALGVLTLCKFYLQGYRAFMNDPAMNRGMTEGVTLLILAVQTGLIELQVVHRAFLLSIILFIVVASILQSMLEIADPIVLALGASRDKSLWKHFRAVSLCLFLLVFPAYMAYMICQFFHMDFWLLIIISSSILTSLQVLGTLFIYVLFMVEEFRKEPVENMDDVIYYVNGTYRLLEFLVALCVVAYGVSETIFGEWTVMGSMIIFIHSYYNVWLRAQLGWKSFLLRRDAVNKIKSLPIATKEQLEKHNDICAICYQDMKSAVITPCSHFFHAGCLKKWLYVQETCPLCHCHLKNSSQLPGLGTEPVLQPHAGAEQNVMFQEGTEPPGQEHTPGTRIQEGSRDNNEYIARRPDNQEGAFDPKEYPHSAKDEAHPVESA

SEQ ID NO: 74809 - protein, 677 aa, Homo sapiens
  Payload ID: 14782
  Gene Symbol: RNF145
  Gene Name: ring finger protein 145
  Uniprot ID: Q96MT1
  ENSP ID: ENSP00000429071
MVFSKKKKKKKKNNMAAKEKLEAVLNVALRVPSIMLLDVLYRWDVSSFFQQIQRSSLSNNPLFQYKYLALNMHYVGYILSVVLLTLPRQHLVQLYLYFLTALLLYAGHQISRDYVRSELEFAYEGPMYLEPLSMNRFTTALIGQLVVCTLCSCVMKTKQIWLFSAHMLPLLARLCLVPLETIVIINKFAMIFTGLEVLYFLGSNLLVPYNLAKSAYRELVQVVEVYGLLALGMSLWNQLVVPVLFMVFWLVLFALQIYSYFSTRDQPASRERLLFLFLTSIAECCSTPYSLLGLVFTVSFVALGVLTLCKFYLQGYRAFMNDPAMNRGMTEGVTLLILAVQTGLIELQVVHRAFLLSIILFIVVASILQSMLEIADPIVLALGASRDKSLWKHFRAVSLCLFLLVFPAYMAYMICQFFHMDFWLLIIISSSILTSLQVLGTLFIYVLFMVEEFRKEPVENMDDVIYYVNGTYRLLEFLVALCVVAYGVSETIFGEWTVMGSMIIFIHSYYNVWLRAQLGWKSFLLRRDAVNKIKSLPIATKEQLEKHNDICAICYQDMKSAVITPCSHFFHAGCLKKWLYVQETCPLCHCHLKNSSQLPGLGTEPVLQPHAGAEQNVMFQEGTEPPGQEHTPGTRIQEGSRDNNEYIARRPDNQEGAFDPKEYPHSAKDEAHPVESA

SEQ ID NO: 74810 - protein, 663 aa, Homo sapiens; identical to SEQ ID NO: 74808
  Payload ID: 14782
  Gene Symbol: RNF145
  Gene Name: ring finger protein 145
  Uniprot ID: Q96MT1
  ENSP ID: ENSP00000430397

SEQ ID NO: 74811 - protein, 680 aa, Homo sapiens
  Payload ID: 14782
  Gene Symbol: RNF145
  Gene Name: ring finger protein 145
  Uniprot ID: Q96MT1
  ENSP ID: ENSP00000430753
MAEVVFSKKKKKKKKNNMAAKEKLEAVLNVALRVPSIMLLDVLYRWDVSSFFQQIQRSSLSNNPLFQYKYLALNMHYVGYILSVVLLTLPRQHLVQLYLYFLTALLLYAGHQISRDYVRSELEFAYEGPMYLEPLSMNRFTTALIGQLVVCTLCSCVMKTKQIWLFSAHMLPLLARLCLVPLETIVIINKFAMIFTGLEVLYFLGSNLLVPYNLAKSAYRELVQVVEVYGLLALGMSLWNQLVVPVLFMVFWLVLFALQIYSYFSTRDQPASRERLLFLFLTSIAECCSTPYSLLGLVFTVSFVALGVLTLCKFYLQGYRAFMNDPAMNRGMTEGVTLLILAVQTGLIELQVVHRAFLLSIILFIVVASILQSMLEIADPIVLALGASRDKSLWKHFRAVSLCLFLLVFPAYMAYMICQFFHMDFWLLIIISSSILTSLQVLGTLFIYVLFMVEEFRKEPVENMDDVIYYVNGTYRLLEFLVALCVVAYGVSETIFGEWTVMGSMIIFIHSYYNVWLRAQLGWKSFLLRRDAVNKIKSLPIATKEQLEKHNDICAICYQDMKSAVITPCSHFFHAGCLKKWLYVQETCPLCHCHLKNSSQLPGLGTEPVLQPHAGAEQNVMFQEGTEPPGQEHTPGTRIQEGSRDNNEYIARRPDNQEGAFDPKEYPHSAKDEAHPVESA

SEQ ID NO: 74812 - protein, 693 aa, Homo sapiens
  Payload ID: 14782
  Gene Symbol: RNF145
  Gene Name: ring finger protein 145
  Uniprot ID: Q96MT1
  ENSP ID: ENSP00000430955
MHRDRISPSNSPTWSLQVFSKKKKKKKKNNMAAKEKLEAVLNVALRVPSIMLLDVLYRWDVSSFFQQIQRSSLSNNPLFQYKYLALNMHYVGYILSVVLLTLPRQHLVQLYLYFLTALLLYAGHQISRDYVRSELEFAYEGPMYLEPLSMNRFTTALIGQLVVCTLCSCVMKTKQIWLFSAHMLPLLARLCLVPLETIVIINKFAMIFTGLEVLYFLGSNLLVPYNLAKSAYRELVQVVEVYGLLALGMSLWNQLVVPVLFMVFWLVLFALQIYSYFSTRDQPASRERLLFLFLTSIAECCSTPYSLLGLVFTVSFVALGVLTLCKFYLQGYRAFMNDPAMNRGMTEGVTLLILAVQTGLIELQVVHRAFLLSIILFIVVASILQSMLEIADPIVLALGASRDKSLWKHFRAVSLCLFLLVFPAYMAYMICQFFHMDFWLLIIISSSILTSLQVLGTLFIYVLFMVEEFRKEPVENMDDVIYYVNGTYRLLEFLVALCVVAYGVSETIFGEWTVMGSMIIFIHSYYNVWLRAQLGWKSFLLRRDAVNKIKSLPIATKEQLEKHNDICAICYQDMKSAVITPCSHFFHAGCLKKWLYVQETCPLCHCHLKNSSQLPGLGTEPVLQPHAGAEQNVMFQEGTEPPGQEHTPGTRIQEGSRDNNEYIARRPDNQEGAFDPKEYPHSAKDEAHPVESA

SEQ ID NO: 74813 - protein, 663 aa, Homo sapiens; identical to SEQ ID NO: 74808
  Payload ID: 14782
  Gene Symbol: RNF145
  Gene Name: ring finger protein 145
  Uniprot ID: Q96MT1
  ENSP ID: ENSP00000482720

SEQ ID NO: 74814 - protein, 358 aa, Homo sapiens
  Payload ID: 14783
  Gene Symbol: RNF146
  Gene Name: ring finger protein 146
  Uniprot ID: Q9NTX7
  ENSP ID: ENSP00000309365
MAGCGEIDHSINMLPTNRKANESCSNTAPSLTVPECAICLQTCVHPVSLPCKHVFCYLCVKGASWLGKRCALCRQEIPEDFLDKPTLLSPEELKAASRGNGEYAWYYEGRNGWWQYDERTSRELEDAFSKGKKNTEMLIAGFLYVADLENMVQYRRNEHGRRRKIKRDIIDIPKKGVAGLRLDCDANTVNLARESSADGADSVSAQSGASVQPLVSSVRPLTSVDGQLTSPATPSPDASTSLEDSFAHLQLSGDNTAERSHRGEGEEDHESPSSGRVPAPDTSIEETESDASSDSEDVSAVVAQHSLTQQRLLVSNANQTVPDRSDRSGTDRSVAGGGTVSVSVRSRRPDGQCTVTEV

SEQ ID NO: 74815 - protein, 40 aa, Homo sapiens
  Payload ID: 14783
  Gene Symbol: RNF146
  Gene Name: ring finger protein 146
  ENSP ID: ENSP00000349253
MGSSIFMLFSPLVLYDCYLYEALVITKHFFCPFLPELCKL

SEQ ID NO: 74816 - protein, 359 aa, Homo sapiens
  Payload ID: 14783
  Gene Symbol: RNF146
  Gene Name: ring finger protein 146
  Uniprot ID: Q9NTX7
  ENSP ID: ENSP00000357297
MMAGCGEIDHSINMLPTNRKANESCSNTAPSLTVPECAICLQTCVHPVSLPCKHVFCYLCVKGASWLGKRCALCRQEIPEDFLDKPTLLSPEELKAASRGNGEYAWYYEGRNGWWQYDERTSRELEDAFSKGKKNTEMLIAGFLYVADLENMVQYRRNEHGRRRKIKRDIIDIPKKGVAGLRLDCDANTVNLARESSADGADSVSAQSGASVQPLVSSVRPLTSVDGQLTSPATPSPDASTSLEDSFAHLQLSGDNTAERSHRGEGEEDHESPSSGRVPAPDTSIEETESDASSDSEDVSAVVAQHSLTQQRLLVSNANQTVPDRSDRSGTDRSVAGGGTVSVSVRSRRPDGQCTVTEV

SEQ ID NO: 74817 - protein, 42 aa, Homo sapiens
  Payload ID: 14783
  Gene Symbol: RNF146
  Gene Name: ring finger protein 146
  ENSP ID: ENSP00000476424
MCWGSSIFMLFSPLVLYDCYLYEALVITKHFFCPFLPELCKL

SEQ ID NO: 74818 - protein, 359 aa, Homo sapiens; identical to SEQ ID NO: 74816
  Payload ID: 14783
  Gene Symbol: RNF146
  Gene Name: ring finger protein 146
  Uniprot ID: Q9NTX7
  ENSP ID: ENSP00000476814

SEQ ID NO: 74819 - protein, 42 aa, Homo sapiens; identical to SEQ ID NO: 74817
  Payload ID: 14783
  Gene Symbol: RNF146
  Gene Name: ring finger protein 146
  ENSP ID: ENSP00000476867

SEQ ID NO: 74820 - protein, 9 aa, Homo sapiens
  Payload ID: 14783
  Gene Symbol: RNF146
  Gene Name: ring finger protein 146
  ENSP ID: ENSP00000476888
MAGCGEIDH

SEQ ID NO: 74821 - protein, 42 aa, Homo sapiens; identical to SEQ ID NO: 74817
  Payload ID: 14783
  Gene Symbol: RNF146
  Gene Name: ring finger protein 146
  ENSP ID: ENSP00000477019

SEQ ID NO: 74822 - protein, 358 aa, Homo sapiens; identical to SEQ ID NO: 74814
  Payload ID: 14783
  Gene Symbol: RNF146
  Gene Name: ring finger protein 146
  Uniprot ID: Q9NTX7
  ENSP ID: ENSP00000477168

SEQ ID NO: 74823 - protein, 40 aa, Homo sapiens; identical to SEQ ID NO: 74815
  Payload ID: 14783
  Gene Symbol: RNF146
  Gene Name: ring finger protein 146
  ENSP ID: ENSP00000477204

SEQ ID NO: 74824 - protein, 14 aa, Homo sapiens
  Payload ID: 14783
  Gene Symbol: RNF146
  Gene Name: ring finger protein 146
  ENSP ID: ENSP00000477440
MCWGSSIFMLFSPL

SEQ ID NO: 74825 - protein, 359 aa, Homo sapiens; identical to SEQ ID NO: 74816
  Payload ID: 14783
  Gene Symbol: RNF146
  Gene Name: ring finger protein 146
  Uniprot ID: Q9NTX7
  ENSP ID: ENSP00000479890

SEQ ID NO: 74826 - protein, 305 aa, Homo sapiens
  Payload ID: 14784
  Gene Symbol: RNF148
  Gene Name: ring finger protein 148
  Uniprot ID: Q8N7C7
  ENSP ID: ENSP00000388207
MSFLRITPSTHSSVSSGLLRLSIFLLLSFPDSNGKAIWTAHLNITFQVGNEITSELGESGVFGNHSPLERVSGVVALPEGWNQNACHPLTNFSRPKQADSWLALIERGGCTFTHKINVAAEKGANGVIIYNYQGTGSKVFPMSHQGTENIVAVMISNLKGMEILHSIQKGVYVTVIIEVGRMHMQWVSHYIMYLFTFLAATIAYFYLDCVWRLTPRVPNSFTRRRSQIKTDVKKAIDQLQLRVLKEGDEELDLNEDNCVVCFDTYKPQDVVRILTCKHFFHKACIDPWLLAHRTCPMCKCDILKT

SEQ ID NO: 74827 - protein, 101 aa, Homo sapiens
  Payload ID: 14784
  Gene Symbol: RNF148
  Gene Name: ring finger protein 148
  ENSP ID: ENSP00000412846
MSFLRITPSTHSSVSSGLLRLSIFLLLSFPDSNGKAIWTAHLNITFQGTENIVAVMISNLKGMEILHSIQKGVYVTVIIEVGRMHMQWEAKSNKDRCEESY

SEQ ID NO: 74828 - protein, 400 aa, Homo sapiens
  Payload ID: 14785
  Gene Symbol: RNF149
  Gene Name: ring finger protein 149
  Uniprot ID: Q8NC42
  ENSP ID: ENSP00000295317
MAWRRREASVGARGVLALALLALALCVPGARGRALEWFSAVVNIEYVDPQTNLTVWSVSESGRFGDSSPKEGAHGLVGVPWAPGGDLEGCAPDTRFFVPEPGGRGAAPWVALVARGGCTFKDKVLVAARRNASAVVLYNEERYGNITLPMSHAGTGNIVVIMISYPKGREILELVQKGIPVTMTIGVGTRHVQEFISGQSVVFVAIAFITMMIISLAWLIFYYIQRFLYTGSQIGSQSHRKETKKVIGQLLLHTVKHGEKGIDVDAENCAVCIENFKVKDIIRILPCKHIFHRICIDPWLLDHRTCPMCKLDVIKALGYWGEPGDVQEMPAPESPPGRDPAANLSLALPDDDGSDDSSPPSASPAESEPQCDPSFKGDAGENTALLEAGRSDSRHGGPIS

SEQ ID NO: 74829 - protein, 398 aa, Homo sapiens
  Payload ID: 14785
  Gene Symbol: RNF149
  Gene Name: ring finger protein 149
  ENSP ID: ENSP00000399090
MAWRRREASVGARGVLALALLALALCVPGARGRALEWFSAVVNIEYVDPQTNLTVWSVSESGRFGDSSPKEGAHGLVGVPWAPGGDLEGCAPDTRFFVPEPGGRGAAPWVALVARGGCTFKDKVLVAARRNASAVVLYNEERYGNITLPMSHAGTGNIVVIMISYPKGREILELVQKGIPVTMTIGVGTRHVQEFISGQSVVFVAIAFITMMIISLAWLIFYYIQRFLYTGSQIGSQSHRKETKKVIGQLLLHTVKHGEKGIDVDAENCAVCIENFKVKDIIRILPCKHIFHRICIDPWLLDHRTCPMCKLDVIKALGYWGEPGDVQEMPAPESPPGRDPAANLSLALPDDDGSDDSSPPSASPAESEPQCDPSFKGDAGENTALLGAMCSHVMWTSI

SEQ ID NO: 74830 - protein, 396 aa, Homo sapiens
  Payload ID: 14786
  Gene Symbol: RNF150
  Gene Name: ring finger protein 150
  Uniprot ID: Q9ULK6
  ENSP ID: ENSP00000304321
MAMSLIQACCSLALSTWLLSFCFVHLLCLDFTVAEKEEWYTAFVNITYAEPAPDPGAGAAGGGGAELHTEKTECGRYGEHSPKQDARGEVVMASSAHDRLACDPNTKFAAPTRGKNWIALIPKGNCTYRDKIRNAFLQNASAVVIFNVGSNTNETITMPHAGVEDIVAIMIPEPKGKEIVSLLERNITVTMYITIGTRNLQKYRRLGDAAKKAISKLQIRTIKKGDKETESDFDNCAVCIEGYKPNDVVRILPCRHLFHKSCVDPWLLDHRTCPMCKMNILKALGIPPNADCMDDLPTDFEGSLGGPPTNQITGASDTTVNESSVTLDPAVRTVGALQVVQDTDPIPQEGDVIFTTNSEQEPAVSSDSDISLIMAMEVGLSDVELSTDQDCEEVKS

SEQ ID NO: 74831 - protein, 297 aa, Homo sapiens
  Payload ID: 14786
  Gene Symbol: RNF150
  Gene Name: ring finger protein 150
  Uniprot ID: Q9ULK6
  ENSP ID: ENSP00000394581
MSSHAQPLKLISPCPYSLSSGVEDIVAIMIPEPKGKEIVSLLERNITVTMYITIGTRNLQKYVSRTSVVFVSISFIVLMIISLAWLVFYYIQRFRYANARDRNQRRLGDAAKKAISKLQIRTIKKGDKETESDFDNCAVCIEGYKPNDVVRILPCRHLFHKSCVDPWLLDHRTCPMCKMNILKALGIPPNADCMDDLPTDFEGSLGGPPTNQITGASDTTVNESSVTLDPAVRTVGALQVVQDTDPIPQEGDVIFTTNSEQEPAVSSDSDISLIMAMEVGLSDVELSTDQDCEEVKS

SEQ ID NO: 74832 - protein, 405 aa, Homo sapiens
  Payload ID: 14786
  Gene Symbol: RNF150
  Gene Name: ring finger protein 150
  Uniprot ID: Q9ULK6
  ENSP ID: ENSP00000425568
MAMSLIQACCSLALSTWLLSFCFVHLLCLDFTVAEKEEWYTAFVNITYAEPAPDPGAGAAGGGGAELHTEKTECGRYGEHSPKQDARGEVVMASSAHDRLACDPNTKFAAPTRGKNWIALIPKGNCTYRDKIRNAFLQNASAVVIFNVGSNTNETITMPHAGVEDIVAIMIPEPKGKEIVSLLERNITVTMYITIGTRNLQKYVSRTSVVFVSISFIVLMIISLAWLVFYYIQRFRYANARDRNQRRLGDAAKKAISKLQIRTIKKGDKETESDFDNCAVCIEGYKPNDVVRILPCRHLFHKSCVDPWLLDHRTCPMCKMNILKALGIPPNADCMDDLPTDFEGSLGGPPTNQITGASDTTVNESSVTLDPAVRTVGALQVVQDTDPIPQEGDVIFTTNSEFCHT

SEQ ID NO: 74833 - protein, 438 aa, Homo sapiens
  Payload ID: 14786
  Gene Symbol: RNF150
  Gene Name: ring finger protein 150
  Uniprot ID: Q9ULK6
  ENSP ID: ENSP00000425840
MAMSLIQACCSLALSTWLLSFCFVHLLCLDFTVAEKEEWYTAFVNITYAEPAPDPGAGAAGGGGAELHTEKTECGRYGEHSPKQDARGEVVMASSAHDRLACDPNTKFAAPTRGKNWIALIPKGNCTYRDKIRNAFLQNASAVVIFNVGSNTNETITMPHAGVEDIVAIMIPEPKGKEIVSLLERNITVTMYITIGTRNLQKYVSRTSVVFVSISFIVLMIISLAWLVFYYIQRFRYANARDRNQRRLGDAAKKAISKLQIRTIKKGDKETESDFDNCAVCIEGYKPNDVVRILPCRHLFHKSCVDPWLLDHRTCPMCKMNILKALGIPPNADCMDDLPTDFEGSLGGPPTNQITGASDTTVNESSVTLDPAVRTVGALQVVQDTDPIPQEGDVIFTTNSEQEPAVSSDSDISLIMAMEVGLSDVELSTDQDCEEVKS

SEQ ID NO: 74834 - protein, 230 aa, Homo sapiens
  Payload ID: 14786
  Gene Symbol: RNF150
  Gene Name: ring finger protein 150
  ENSP ID: ENSP00000425947
MIPEPKGKEIVSLLERNITVTMYITIGTRNLQKYVSRTSVVFVSISFIVLMIISLAWLVFYYIQRFRYANARDRNQRRLGDAAKKAISKLQIRTIKKGDKETESDFDNCAVCIEGYKPNDVVRILPCRHLFHKSCVDPWLLDHRTCPMCKMNILKALGIPPNADCMDDLPTDFEGSLGGPPTNQITGASDTTVNESSVTLDPAVRTVGALQVVQDTDPIPQEGDVIFTTN

SEQ ID NO: 74835 - protein, 244 aa, Homo sapiens
  Payload ID: 14787
  Gene Symbol: RNF151
  Gene Name: ring finger protein 151
  ENSP ID: ENSP00000325794
GGGYDLNLFASPPDSNFVCSVCHGVLKRPARLPCSHIFCKKCILRWLARQKTCPCCRKEVKRKKVVHMNKLRKTIGRLEVKCKNADAGCIVTCPLAHRKGHQDSCPFELTACPNEGCTSQVPRGTLAEHRQHCQQGSQQRCPLGCGATLDPAERARHNCYRELHNAWSVRQERRRPLLLSLLRRVRWLDQATSVVRRELAELSNFLEEDTALLEGAPQEEAEAAPEGNVGAEVVGEPRANIPCK

SEQ ID NO: 74836 - protein, 90 aa, Homo sapiens
  Payload ID: 14787
  Gene Symbol: RNF151
  Gene Name: ring finger protein 151
  ENSP ID: ENSP00000454886
MGGGYDLNLFASPPDSNFVCSVCHGVLKRPARLPCSHIFCKKCILRWLARGGAGLGEKAGESHLQRETSAALGRPDIAEFGSWLYCLVAV

SEQ ID NO: 74837 - protein, 245 aa, Homo sapiens
  Payload ID: 14787
  Gene Symbol: RNF151
  Gene Name: ring finger protein 151
  Uniprot ID: Q2KHN1
  ENSP ID: ENSP00000456566
MGGGYDLNLFASPPDSNFVCSVCHGVLKRPARLPCSHIFCKKCILRWLARQKTCPCCRKEVKRKKVVHMNKLRKTIGRLEVKCKNADAGCIVTCPLAHRKGHQDSCPFELTACPNEGCTSQVPRGTLAEHRQHCQQGSQQRCPLGCGATLDPAERARHNCYRELHNAWSVRQERRRPLLLSLLRRVRWLDQATSVVRRELAELSNFLEEDTALLEGAPQEEAEAAPEGNVGAEVVGEPRANIPCK

SEQ ID NO: 74838 - protein, 203 aa, Homo sapiens
  Payload ID: 14788
  Gene Symbol: RNF152
  Gene Name: ring finger protein 152
  Uniprot ID: Q8N8N0
  ENSP ID: ENSP00000316628
METLSQDSLLECQICFNYYSPRRRPKLLDCKHTCCSVCLQQMRTSQKDVRCPWCRGVTKLPPGFSVSQLPDDPEVLAVIAIPHTSEHTPVFIKLPSNGCYMLPLPISKERALLPGDMGCRLLPGSQQKSVTVVTIPAEQQPLQGGAPQEAVEEEQDRRGVVKSSTWSGVCTVILVACVLVFLLGIVLHNMSCISKRFTVISCG

SEQ ID NO: 74839 - protein, 114 aa, Homo sapiens
  Payload ID: 14788
  Gene Symbol: RNF152
  Gene Name: ring finger protein 152
  ENSP ID: ENSP00000466492
METLSQDSLLECQICFNYYSPRRRPKLLDCKHTCCSVCLQQMRTSQKDVRCPWCRGVTKLPPGFSVSQLPDDPEVLAVIAIPHTSEHTPVFIKLPSNGCYMLPLPISKERALLP

SEQ ID NO: 74840 - protein, 679 aa, Homo sapiens
  Payload ID: 14789
  Gene Symbol: RNF157
  Gene Name: ring finger protein 157
  Uniprot ID: Q96PX1
  ENSP ID: ENSP00000269391
MGALTSRQHAGVEEVDIPSNSVYRYPPKSGSYFASHFIMGGEKFDSTHPEGYLFGENSDLNFLGNRPVVFPYAAPPPQEPVKTLRSLVNIRKDTLRLVKCAEEVKSPGEEASKAKVHYNVEFTFDTDARVAITIYYQATEEFQNGIASYIPKDNSLQSETVQYKRGVCQQFCLPSHTVDPSEWAEEELGFDLDREVYPLVVHAVVDEGDEYFGHCHVLLGTFEKHTDGTFCVKPLKQKQVVDGVSYLLQEIYGIENKYNTQDSKVAEDEVSDNSAECVVCLSDVRDTLILPCRHLCLCNTCADTLRYQANNCPICRLPFRALLQIRAMRKKLGPLSPTSFNPIISSQTSDSEEHPSSENIPPGYEVVSLLEALNGPLTPSPAVPPLHVLGDGHLSGMLPSYGSDGHLPPVRTISPLDRLSDSSSQGLKLKKSLSKSTSQNSSVLHEEEDEHSCSESETQLSQRPSVQHLGEECGVTPESENLTLSSSGAIDQSSCTGTPLSSTISSPEGPASSSLAQSVMSMASSQISTDTVSSMSGSYIAPGTEEEGEALSSPQPASRAPSEEGEGLPAESPDSNFAGLPAGEQDAEGNDVIEEEDGSPTQEGQRTCAFLGMECDNNNDFDIASVKALDNKLCSEVCLPGAWQADDNAVSRNAQRRRLSSSSLEDSETRPCVWGPLAV

SEQ ID NO: 74841 - protein, 657 aa, Homo sapiens
  Payload ID: 14789
  Gene Symbol: RNF157
  Gene Name: ring finger protein 157
  Uniprot ID: Q96PX1
  ENSP ID: ENSP00000321837
MGALTSRQHAGVEEVDIPSNSVYRYPPKSGSYFASHFIMGGEKFDSTHPEGYLFGENSDLNFLGNRPVVFPYAAPPPQEPVKTLRSLVNIRKDTLRLVKCAEEVKSPGEEASKAKVHYNVEFTFDTDARVAITIYYQATEEFQNGIASYIPKDNSLQSETVQYKRGVCQQFCLPSHTVDPSEWAEEELGFDLDREVYPLVVHAVVDEGDEYFGHCHVLLGTFEKHTDGTFCVKPLKQKQVVDGVSYLLQEIYGIENKYNTQDSKVAEDEVSDNSAECVVCLSDVRDTLILPCRHLCLCNTCADTLRYQANNCPICRLPFRALLQIRAMRKKLGPLSPTSFNPIISSQTSDSEEHPSSENIPPGYEVVSLLEALNGPLTPSPAVPPLHVLGDGHLSGMLPSYGSDGHLPPVRTISPLDRLSDSSSQGLKLKKSLSKSTSQNSSVLHEEEDEHSCSESETQLSQRPSVQHLGEECGVTPESENLTLSSSGAIDQSSCTGTPLSSTISSPEGPASSSLAQSVMSMASSQISTDTVSSMSGSYIAPGTEEEGEALSSPQPASRAPSEEGEGNDVIEEEDGSPTQEGQRTCAFLGMECDNNNDFDIASVKALDNKLCSEVCLPGAWQADDNAVSRNAQRRRLSSSSLEDSETRPCVWGPLAV

SEQ ID NO: 74842 - protein, 72 aa, Homo sapiens
  Payload ID: 14789
  Gene Symbol: RNF157
  Gene Name: ring finger protein 157
  ENSP ID: ENSP00000465543
MGALTSRQHAGVEEVDIPSNSVYRYPPKSGSYFASHFIMGGEKFDSTHPEGYLFGENSDLNFLGNRPVVVWL

SEQ ID NO: 74843 - protein, 81 aa, Homo sapiens
  Payload ID: 14789
  Gene Symbol: RNF157
  Gene Name: ring finger protein 157
  ENSP ID: ENSP00000467096
  MOD_RES (1)..(1): Any amino acid
XKRGVCQQFCLPSHTVDPSEWAEEELGFDLDREVYPLVVHAVVDEGDEYFGHCHVLLGTFEKHTDGTFCVKPLKQKQVVSI

SEQ ID NO: 74844 - protein, 161 aa, Homo sapiens
  Payload ID: 14789
  Gene Symbol: RNF157
  Gene Name: ring finger protein 157
  ENSP ID: ENSP00000468099
  MOD_RES (1)..(1): Any amino acid
XSCTGTPLSSTISSPEGPASSSLAQSVMSMASSQISTDTVSSMSGSYIAPGTEEEGEALSSPQPASRAPSEEGEGLPAESPDSNFAGLPAGEQDAEGNDVIEEEDGSPTQEGQRTCAFLGMECDNNNDFDIASVKALDNKLCSEVCLPAAAPESCPINIEE

SEQ ID NO: 74845 - protein, 346 aa, Homo sapiens
  Payload ID: 14790
  Gene Symbol: RNF165
  Gene Name: ring finger protein 165
  Uniprot ID: Q6ZSG1
  ENSP ID: ENSP00000269439
MVLVHVGYLVLPVFGSVRNRGAPFQRSQHPHATSCRHFHLGPPQPQQLAPDFPLAHPVQSQPGLSAHMAPAHQHSGALHQSLTPLPTLQFQDVTGPSFLPQALHQQYLLQQQLLEAQHRRLVSHPRRSQERVSVHPHRLHPSFDFGQLQTPQPRYLAEGTDWDLSVDAGLSPAQFQVRPIPQHYQHYLATPRMHHFPRNSSSTQMVVHEIRNYPYPQLHFLALQGLNPSRHTSAVRESYEELLQLEDRLGNVTRGAVQNTIERFTFPHKYKKRRPQDGKGKKDEGEESDTDEKCTICLSMLEDGEDVRRLPCMHLFHQLCVDQWLAMSKKCPICRVDIETQLGADS

SEQ ID NO: 74846 - protein, 154 aa, Homo sapiens
  Payload ID: 14790
  Gene Symbol: RNF165
  Gene Name: ring finger protein 165
  Uniprot ID: Q6ZSG1
  ENSP ID: ENSP00000444285
MHHFPRNSSSTQMVVHEIRNYPYPQLHFLALQGLNPSRHTSAVRESYEELLQLEDRLGNVTRGAVQNTIERFTFPHKYKKRRPQDGKGKKDEGEESDTDEKCTICLSMLEDGEDVRRLPCMHLFHQLCVDQWLAMSKKCPICRVDIETQLGADS

SEQ ID NO: 74847 - protein, 22 aa, Homo sapiens
  Payload ID: 14790
  Gene Symbol: RNF165
  Gene Name: ring finger protein 165
  ENSP ID: ENSP00000466208
MVLVHVGYLVLPVFGSVRNRAQ

SEQ ID NO: 74848 - protein, 22 aa, Homo sapiens
  Payload ID: 14790
  Gene Symbol: RNF165
  Gene Name: ring finger protein 165
  ENSP ID: ENSP00000466809
MVLVHVGYLVLPVFGSVRNRAQ

SEQ ID NO: 74849 - protein, 68 aa, Homo sapiens
  Payload ID: 14790
  Gene Symbol: RNF165
  Gene Name: ring finger protein 165
  ENSP ID: ENSP00000467609
MVLVHVGYLVLPVFGSVRNRGIAFSFRGLLRSVDRRRHRGGGGRRGRPGAQGTPARTQGERWLPPTPF

SEQ ID NO: 74850 - protein, 156 aa, Homo sapiens
  Payload ID: 14790
  Gene Symbol: RNF165
  Gene Name: ring finger protein 165
  ENSP ID: ENSP00000467730
MAPAHQHSGALHQSLTPLPTLQFQDVTGPSFLPQALHQQYLLQQQLLEAQHRRLVSHPRRSQERVSVHPHRLHPSFDFGQLQTPQPRYLAEGTDWDLSVDAGLSPAQFQVRPIPQHYQHYLATPRMHHFPRNSSSTQMVVHEIRNYPYPQLHFLAL

SEQ ID NO: 74851 - protein, 28 aa, Homo sapiens
  Payload ID: 14790
  Gene Symbol: RNF165
  Gene Name: ring finger protein 165
  ENSP ID: ENSP00000468365
MVLVHVGYLVLPVFGSVRNRGISVWMLA

SEQ ID NO: 74852 - protein, 237 aa, Homo sapiens
  Payload ID: 14791
  Gene Symbol: RNF166
  Gene Name: ring finger protein 166
  Uniprot ID: Q96A37
  ENSP ID: ENSP00000326095
MAMFRSLVASAQQRQPPAGPAGGDSGLEAQYTCPICLEVYHRPVAIGSCGHTFCGECLQPCLQVPSPLCPLCRLPFDPKKVDKATHVEKQLSSYKAPCRGCNKKVTLAKMRVHISSCLKVQEQMANCPKFVPVVPTSQPIPSNIPNRSTFACPYCGARNLDQQELVKHCVESHRSDPNRVVCPICSAMPWGDPSYKSANFLQHLLHRHKFSYDTFVDYSIDEEAAFQAALALSLSEN

SEQ ID NO: 74853 - protein, 128 aa, Homo sapiens
  Payload ID: 14791
  Gene Symbol: RNF166
  Gene Name: ring finger protein 166
  Uniprot ID: Q96A37
  ENSP ID: ENSP00000440454
MRVHISSCLKVQEQMANCPKFVPVVPTSQPIPSNIPNRSTFACPYCGARNLDQQELVKHCVESHRSDPNRVVCPICSAMPWGDPSYKSANFLQHLLHRHKFSYDTFVDYSIDEEAAFQAALALSLSEN

SEQ ID NO: 74854 - protein, 128 aa, Homo sapiens; identical to SEQ ID NO: 74853
  Payload ID: 14791
  Gene Symbol: RNF166
  Gene Name: ring finger protein 166
  Uniprot ID: Q96A37
  ENSP ID: ENSP00000446301

SEQ ID NO: 74855 - protein, 148 aa, Homo sapiens
  Payload ID: 14791
  Gene Symbol: RNF166
  Gene Name: ring finger protein 166
  ENSP ID: ENSP00000455539
GGDSGLEAQYTCPICLEVYHRPVAIGSCGHTFCGECLQPCLQVPSPLCPLCRLPFDPKKVDKATHVEKQLSSYKAPCRGCNKKVTLAKMRVHISSCLKVQEQMANCPKFVPVVPTSQPIPSGGRAWGPGQGPAWRAGQHVNILFCSWH

SEQ ID NO: 74856 - protein, 46 aa, Homo sapiens
  Payload ID: 14791
  Gene Symbol: RNF166
  Gene Name: ring finger protein 166
  ENSP ID: ENSP00000455617
  MOD_RES (1)..(1): Any amino acid
XISSCLKVQEQMANCPKFVPVVPTSQPIPSNIPNRVLALARCHLQS

SEQ ID NO: 74857 - protein, 156 aa, Homo sapiens
  Payload ID: 14791
  Gene Symbol: RNF166
  Gene Name: ring finger protein 166
  Uniprot ID: Q96A37
  ENSP ID: ENSP00000457336
MAMFRSLVASAQQRQPPAGPAGGDSGLEAQYTCPICLEVQEQMANCPKFVPVVPTSQPIPSNIPNRSTFACPYCGARNLDQQELVKHCVESHRSDPNRVVCPICSAMPWGDPSYKSANFLQHLLHRHKFSYDTFVDYSIDEEAAFQAALALSLSEN

SEQ ID NO: 74858 - protein, 165 aa, Homo sapiens
  Payload ID: 14791
  Gene Symbol: RNF166
  Gene Name: ring finger protein 166
  ENSP ID: ENSP00000457374
MRVHISSCLKVQEQMANCPKFVPVVPTSQPIPSNIPNRSTFACPYCGARNLDQQELVKHCVESHRSDPNRVVCPICSAMPWGDPSYKSANFLQHLLHRHKFSYDTFVVGIPPAPSSPTPSSSTLLLLGPLASLRVRRVQRKPETEASFQVATFPQVLWGLPAGGE

SEQ ID NO: 74859 - protein, 350 aa, Homo sapiens [sequence omitted]

SEQ ID NO: 74860 - protein, 315 aa, Homo sapiens
  Payload ID: 14792
  Gene Symbol: RNF167
  Gene Name: ring finger protein 167
  ENSP ID: ENSP00000458189
MDFADLPALFGATLSQEGLQGFLVEAHPDNACSPIAPPPPAPVNGSVFIALLRRFDCNFDLKVLNAQKAGYGAAVVHNVNSNELLNMVWNSEEIQQQIWIPSVFIGERSSEYLRALFVYEKGARVLLVPDNTFPLGYYLIPFTGIVGLLVLAMGAVMIARCIQHRKRLQRNRLTKEQLKQIPTHDYQKGDQYDVCAICLDEYEDGDKLRVLPCAHAYHSRCVDPWLTQTRKTCPICKQPVHRGPGDEDQEEETQGQEEGDEGEPRDHPASERTPLLGSSPTLPTSFGSLAPAPLVFPGPSTDPPLSPPSSPVILV

SEQ ID NO: 74861 - protein, 97 aa, Homo sapiens
  Payload ID: 14792
  Gene Symbol: RNF167
  Gene Name: ring finger protein 167
  ENSP ID: ENSP00000458375
MHPAAFPLPVVVAAVLWGAAPTRGLIRATSDHNASMDFADLPALFGATLSQEGLQGFLVEAHPDNACSPIAPPPPAPVNGSVFIALLRRFDCNFDLK

SEQ ID NO: 74862 - protein, 350 aa, Homo sapiens [sequence omitted]

SEQ ID NO: 74863 - protein, 71 aa, Homo sapiens
  Payload ID: 14792
  Gene Symbol: RNF167
  Gene Name: ring finger protein 167
  ENSP ID: ENSP00000458905
MDFADLPALFGATLSQEGLQGFLVEAHPDNACSPIAPPPPAPVNGSVFIALLRRFDCNFDLKVLNAQKAGY

SEQ ID NO: 74864 - protein, 350 aa, Homo sapiens [sequence omitted]

SEQ ID NO: 74865 - protein, 122 aa, Homo sapiens
  Payload ID: 14792
  Gene Symbol: RNF167
  Gene Name: ring finger protein 167
  ENSP ID: ENSP00000459581
MHPAAFPLPVVVAAVLWGAAPTRGLIRATSDHNASMDFADLPALFGATLSQEGLQGFLVEAHPDNACSPIAPPPPAPVNGSVFIALLRRFDCNFDLKVLNAQKAGYGAAVVHNVNSNELLNM

SEQ ID NO: 74866 - protein, 208 aa, Homo sapiens
  Payload ID: 14792
  Gene Symbol: RNF167
  Gene Name: ring finger protein 167
  ENSP ID: ENSP00000460024
HNVNSNELLNMVWNSEEIQQQIWIPSVFIGERSSEYLRALFVYEKGARVLLVPDNTFPLGYYLIPFTGIVGLLVLAMGAVMIARCIQHRKRLQRNRLTKEQLKQIPTHDYQKGDQYDVCAICLDEYEDGDKLRVLPCAHGEALTACPCPSATSSHQVLHLVPLCSLPQPLRGPLAHSDPEDLPHLQAACSSGSWGRRPRGRNSRARGG

SEQ ID NO: 74867 - protein, 350 aa, Homo sapiens [sequence omitted]

SEQ ID NO: 74868 - protein, 133 aa, Homo sapiens
  Payload ID: 14792
  Gene Symbol: RNF167
  Gene Name: ring finger protein 167
  ENSP ID: ENSP00000460991
MHPAAFPLPVVVAAVLWGAAPTRGLIRAGFLVEAHPDNACSPIAPPPPAPVNGSVFIALLRRFDCNFDLKVLNAQKAGYGAAVVHNVNSNELLNMVWNSEEIQQQIWIPSVFIGERSSEYLRALFVYEKGRPV

SEQ ID NO: 74869 - protein, 74 aa, Homo sapiens
  Payload ID: 14792
  Gene Symbol: RNF167
  Gene Name: ring finger protein 167
  ENSP ID: ENSP00000466753
  MOD_RES (1)..(1): Any amino acid
XEIQQQIWIPSVFIGERSSEYLRALFVYEKGLPQPLRGPLAHSDPEDLPHLQAACSSGSWGRRPRGRNSRARGG

SEQ ID NO: 74870 - protein, 571 aa, Homo sapiens
  Payload ID: 14793
  Gene Symbol: RNF168
  Gene Name: ring finger protein 168, E3 ubiquitin protein ligase
  Uniprot ID: Q8IYW5
  ENSP ID: ENSP00000320898
MALPKDAIPSLSECQCGICMEILVEPVTLPCNHTLCKPCFQSTVEKASLCCPFCRRRVSSWTRYHTRRNSLVNVELWTIIQKHYPRECKLRASGQESEEVADDYQPVRLLSKPGELRREYEEEISKVAAERRASEEEENKASEEYIQRLLAEEEEEEKRQAEKRRRAMEEQLKSDEELARKLSIDINNFCEGSISASPLNSRKSDPVTPKSEKKSKNKQRNTGDIQKYLTPKSQFGSASHSEAVQEVRKDSVSKDIDSSDRKSPTGQDTEIEDMPTLSPQISLGVGEQGADSSIESPMPWLCACGAEWYHEGNVKTRPSNHGKELCVLSHERPKTRVPYSKETAVMPCGRTESGCAPTSGVTQTNGNNTGETENEESCLLISKEISKRKNQESSFEAVKDPCFSAKRRKVSPESSPDQEETEINFTQKLIDLEHLLFERHKQEEQDRLLALQLQKEVDKEQMVPNRQKGSPDEYHLRATSSPPDKVLNGQRKNPKDGNFKRQTHTKHPTPERGSRDKNRQVSLKMQLKQSVNRRKMPNSTRDHCKVSKSAHSLQPSISQKSVFQMFQRCTK

SEQ ID NO: 74871 - protein, 116 aa, Homo sapiens
  Payload ID: 14793
  Gene Symbol: RNF168
  Gene Name: ring finger protein 168, E3 ubiquitin protein ligase
  ENSP ID: ENSP00000396712
MALPKDAIPSLSECQCGICMEILVEPVTLPCNHTLCKPCFQSTVEKASLCCPFCRRRVSSWTRYHTRRNSLVNVELWTIIQKHYPRECKLRASGQESEEVGGGRATGQRGRRKQSQ

SEQ ID NO: 74872 - protein, 708 aa, Homo sapiens
  Payload ID: 14794
  Gene Symbol: RNF169
  Gene Name: ring finger protein 169
  Uniprot ID: Q8NCN4
  ENSP ID: ENSP00000299563
MAAAGPSTRASSAAAAAALSRRGRRGRCDETAAAKTGAPGPASGPSLLVLSPPLLQPPLPPRPEESGCAGCLEPPGEAAALPCGHSLCRGCAQRAADAAGPGCPRCRARGPGWARRRARDDGQADSEVLGECARRSQPERCRPRRDGGAAAAGPRPEQEPRAAPAEPDFIFRAPIKLSKPGELREEYESLRKLREEKLQEEKPSEDQIHKLLPEDTETGKRKMDEQKKRDEPLVLKTNLERCPARLSDSENEEPSRGQMTQTHRSAFVSKNNSYSLAFLAGKLNSKVERSQSCSDTAQERAKSRVRAVPGNKAKVTTMTPASNPIIGVLLSTQNNRCVSAPDLTIEKRLPFSSLSSLASLHKPERSVSPESNDSISEELNHFKPIVCSPCTPPKRLPDGRVLSPLIIKSTPRNLNRSLQKQTSYEASPRILKKWEQIFQERQIKKTLSKATLTSLAPEMGEELLGSEGIHSSKEKPLVAVNTRLSGGQVLSEYTGPTSADLDHFPSVSQTKAEQDSDNKSSTEIPLETCCSSELKGGGSGTSLEREQFEGLGSTPDAKLDKTCISRAMKITTVNSVLPQNSVLGGVLKTKQQLKTLNHFDLTNGVLVESLSEEPLPSLRRGRKRHCKTKHLEQNGSLKKLRQTSGEVGLAPTDPVLREMEQKLQQEEEDRQLALQLQRMFDNERRTVSRRKGSVDQYLLRSSNMAGAK

SEQ ID NO: 74873 - protein, 79 aa, Homo sapiens
  Payload ID: 14794
  Gene Symbol: RNF169
  Gene Name: ring finger protein 169
  ENSP ID: ENSP00000436339
  MOD_RES (1)..(1): Any amino acid
XLEQNGSLKKLRQTSGEVGLAPTDPVLREMEQKLQQEEEDRQLALQLQRMFDNERRTVSRRKGSVDQYLLRSSNMAGAK

SEQ ID NO: 74874 - protein, 1623 aa, Homo sapiens
  Payload ID: 14795
  Gene Symbol: RNF17
  Gene Name: ring finger protein 17
  Uniprot ID: Q9BXT8
  ENSP ID: ENSP00000255324
MAAEASKTGPSRSSYQRMGRKSQPWGAAEIQCTRCGRRVSRSSGHHCELQCGHAFCELCLLMTEECTTIICPDCEVATAVNTRQRYYPMAGYIKEDSIMEKLQPKTIKNCSQDFKKTADQLTTGLERSASTDKTLLNSSAVMLDTNTAEEIDEALNTAHHSFEQLSIAGKALEHMQKQTIEERERVIEVVEKQFDQLLAFFDSRKKNLCEEFARTTDDYLSNLIKAKSYIEEKKNNLNAAMNIARALQLSPSLRTYCDLNQIIRTLQLTSDSELAQVSSPQLRNPPRLSVNCSEIICMFNNMGKIEFRDSTKCYPQENEIRQNVQKKYNNKKELSCYDTYPPLEKKKVDMSVLTSEAPPPPLQPETNDVHLEAKNFQPQKDVATASPKTIAVLPQMGSSPDVIIEEIIEDNVESSAELVFVSHVIDPCHFYIRKYSQIKDAKVLEKKVNEFCNRSSHLDPSDILELGARIFVSSIKNGMWCRGTITELIPIEGRNTRKPCSPTRLFVHEVALIQIFMVDFGNSEVLIVTGVVDTHVRPEHSAKQHIALNDLCLVLRKSEPYTEGLLKDIQPLAQPCSLKDIVPQNSNEGWEEEAKVEFLKMVNNKAVSMKVFREEDGVLIVDLQKPPPNKISSDMPVSLRDALVFMELAKFKSQSLRSHFEKNTTLHYHPPILPKEMTDVSVTVCHINSPGDFYLQLIEGLDILFLLKTIEEFYKSEDGENLEILCPVQDQACVAKFEDGIWYRAKVIGLPGHQEVEVKYVDFGNTAKITIKDVRKIKDEFLNAPEKAIKCKLAYIEPYKRTMQWSKEAKEKFEEKAQDKFMTCSVIKILEDNVLLVELFDSLGAPEMTTTSINDQLVKEGLASYEIGYILKDNSQKHIEVWDPSPEEIISNEVHNLNPVSAKSLPNENFQSLYNKELPVHICNVISPEKIYVQWLLTENLLNSLEEKMIAAYENSKWEPVKWENDMHCAVKIQDKNQWRRGQIIRMVTDTLVEVLLYDVGVELVVNVDCLRKLEENLKTMGRLSLECSLVDIRPAGGSDKWTATACDCLSLYLTGAVATIILQVDSEENNTTWPLPVKIFCRDEKGERVDVSKYLIKKGLALRERRINNLDNSHSLSEKSLEVPLEQEDSVVTNCIKTNFDPDKKTADIISEQKVSEFQEKILEPRTTRGYKPPAIPNMNVFEATVSCVGDDGTIFVVPKLSEFELIKMTNEIQSNLKCLGLLEPYFWKKGEACAVRGSDTLWYRGKVMEVVGGAVRVQYLDHGFTEKIPQCHLYPILLYPDIPQFCIPCQLHNTTPVGNVWQPDAIEVLQQLLSKRQVDIHIMELPKNPWEKLSIHLYFDGMSLSYFMAYYKYCTSEHTEEMLKEKPRSDHDKKYEEEQWEIRFEELLSAETDTPLLPPYLSSSLPSPGELYAVQVKHVVSPNEVYICLDSIETSNQSNQHSDTDDSGVSGESESESLDEALQRVNKKVEALPPLTDFRTEMPCLAEYDDGLWYRAKIVAIKEFNPLSILVQFVDYGSTAKLTLNRLCQIPSHLMRYPARAIKVLLAGFKPPLRDLGETRIPYCPKWSMEALWAMIDCLQGKQLYAVSMAPAPEQIVTLYDDEQHPVHMPLVEMGLADKDE

SEQ ID NO: 74875 - protein, 653 aa, Homo sapiens
  Payload ID: 14795
  Gene Symbol: RNF17
  Gene Name: ring finger protein 17
  Uniprot ID: Q9BXT8
  ENSP ID: ENSP00000255325
MAAEASKTGPSRSSYQRMGRKSQPWGAAEIQCTRCGRRVSRSSGHHCELQCGHAFCELCLLMTEECTTIICPDCEVATAVNTRQRYYPMAGYIKEDSIMEKLQPKTIKNCSQDFKKTADQLTTGLERSASTDKTLLNSSAVMLDTNTAEEIDEALNTAHHSFEQLSIAGKALEHMQKQTIEERERVIEVVEKQFDQLLAFFDSRKKNLCEEFARTTDDYLSNLIKAKSYIEEKKNNLNAAMNIARALQLSPSLRTYCDLNQIIRTLQLTSDSELAQVSSPQLRNPPRLSVNCSEIICMFNNMGKIEFRDSTKCYPQENEIRQNVQKKYNNKKELSCYDTYPPLEKKKVDMSVLTSEAPPPPLQPETNDVHLEAKNFQPQKDVATASPKTIAVLPQMGSSPDVIIEEIIEDNVESSAELVFVSHVIDPCHFYIRKYSQIKDAKVLEKKVNEFCNRSSHLDPSDILELGARIFVSSIKNGMWCRGTITELIPIEGRNTRKPCSPTRLFVHEVALIQIFMVDFGNSEVLIVTGVVDTHVRPEHSAKQHIALNDLCLVLRKSEPYTEGLLKDIQPLAQPCSLKDIVPQNSNEGWEEEAKVEFLKMVNNKAVSMKVFREEDGVLIVDLQKPPPNKISSDMPVSLRDALVFMELAKDLI

SEQ ID NO: 74876 - protein, 633 aa, Homo sapiens
  Payload ID: 14795
  Gene Symbol: RNF17
  Gene Name: ring finger protein 17
  ENSP ID: ENSP00000344776
MIAAYENSKWEPVKWENDMHCAVKIQDKNQWRRGQIIRMVTDTLVEVLLYDVGVELVVNVDCLRKLEENLKTMGRLSLECSLVDIRPAGGSDKWTATACDCLSLYLTGAVATIILQVDSEENNTTWPLPVKIFCRDEKGERVDVSKYLIKKGLALRERRINNLDNSHSLSEKSLEVPLEQEDSVVTNCIKTNFDPDKKTADIISEQKVSEFQEKILEPRTTRGYKPPAIPNMNVFEATVSCVGDDGTIFVVPKLSEFELIKMTNEIQSNLKCLGLLEPYFWKKGEACAVRGSDTLWYRGKVMEVVGGAVRVQYLDHGFTEKIPQCHLYPILLYPDIPQFCIPCQLHNTTPVGNVWQPDAIEVLQQLLSKRQVDIHIMKPRSDHDKKYEEEQWEIRFEELLSAETDTPLLPPYLSSSLPSPGELYAVQVKHVVSPNEVYICLDSIETSNQSNQHSDTDDSGVSGESESESLDEALQRVNKKVEALPPLTDFRTEMPCLAEYDDGLWYRAKIVAIKEFNPLSILVQFVDYGSTAKLTLNRLCQIPSHLMRYPARAIKVLLAGFKPPLRDLGETRIPYCPKWSMEALWAMIDCLQGKQLYAVSMAPAPEQIVTLYDDEQHPVHMPLVEMGLADKDE

SEQ ID NO: 74877 - protein, 855 aa, Homo sapiens
  Payload ID: 14795
  Gene Symbol: RNF17
  Gene Name: ring finger protein 17
  ENSP ID: ENSP00000388892
MTDVSVTVCHINSPGDFYLQLIEGLDILFLLKTIEEFYKSEDGENLEILCPVQDQACVAKFEDGIWYRAKVIGLPGHQEVEVKYVDFGNTAKITIKDVRKIKDEFLNAPEKAIKCKLAYIEPYKRTMQWSKEAKEKFEEKAQDKFMTCSVIKILEDNVLLVELFDSLGAPEMTTTSINDQLVKEGLASYEIGYILKDNSQKHIEVWDPSPEEIISNEVHNLNPVSAKSLPNENFQSLYNKELPVHICNVISPEKIYVQWLLTENLLNSLEEKMIAAYENSKWEPVKWENDMHCAVKIQDKNQWRRGQIIRMVTDTLVEVLLYDVGVELVVNVDCLRKLEENLKTMGRLSLECSLVDIRPAGGSDKWTATACDCLSLYLTGAVATIILQVDSEENNTTWPLPVKIFCRDEKGERVDVSKYLIKKGLALRERRINNLDNSHSLSEKSLEVPLEQEDSVVTNCIKTNFDPDKKTADIISEQKVSEFQEKILEPRTTRGYKPPAIPNMNVFEATVSCVGDDGTIFVVPKLSEFELIKMTNEIQSNLKCLGLLEPYFWKKGEACAVRGSDTLWYRGKVMEVVGGAVRVQYLDHGFTEKIPQCHLYPILLYPDIPQFCIPCQLHNTTPVGNVWQPDAIEVLQQLLSKRQVDIHIMELPKNPWEKLSIHLYFDGMSLSYFMAYYKYCTSEHTEEMLKEKPRSDHDKKYEEEQWEIRFEELLSAETDTPLLPPYLSSSLPSPGELYAVQVKHVVSPNEVYICLDSIETSNQSNQHSDTDDSGVSGESESESLDEALQRVNKKVEALPPLTDFRTEMPCLAEYDDGLWYRAKIVAIKEFNPLSILVQFVDYGSTAKLTLNRLKI

SEQ ID NO: 74878 - protein, 116 aa, Homo sapiens
  Payload ID: 14796
  Gene Symbol: RNF170
  Gene Name: ring finger protein 170
  Uniprot ID: Q96K19
  ENSP ID: ENSP00000240159
MAKYQGEVQSLKLDDDSVIEGVSDQVLVAVVVSFALIATLVYALFRNVHQNIHPENQELVRVLREQLQTEQDAPAATRQQFYTDMYCPICLHQASFPVETNCGHLFCGNLTPNSIW

SEQ ID NO: 74879 - protein, 116 aa, Homo sapiens; identical to SEQ ID NO: 74878
  Payload ID: 14796
  Gene Symbol: RNF170
  Gene Name: ring finger protein 170
  Uniprot ID: Q96K19
  ENSP ID: ENSP00000325969

SEQ ID NO: 74880 - protein, 200 aa, Homo sapiens
  Payload ID: 14796
  Gene Symbol: RNF170
  Gene Name: ring finger protein 170
  Uniprot ID: Q96K19
  ENSP ID: ENSP00000326138
MAKYQGEVQSLKLDDDSVIEGVSDQVLVAVVVSFALIATLVYALFRNVHQNIHPENQELVRVLREQLQTEQDAPAATRQQFYTDMYCPICLHQASFPVETNCGHLFCGACIIAYWRYGSWLGAISCPICRQTGSSEKSSRASEQTHQEAVACLDTQNSPACTVGCRSGPQHIPHDRMLPSASPRLCFTLLDCVSILWFSG

SEQ ID NO: 74881 - protein, 258 aa, Homo sapiens
  Payload ID: 14796
  Gene Symbol: RNF170
  Gene Name: ring finger protein 170
  Uniprot ID: Q96K19
  ENSP ID: ENSP00000434797
MAKYQGEVQSLKLDDDSVIEGVSDQVLVAVVVSFALIATLVYALFRNVHQNIHPENQELVRVLREQLQTEQDAPAATRQQFYTDMYCPICLHQASFPVETNCGHLFCGACIIAYWRYGSWLGAISCPICRQTVTLLLTVFGEDDQSQDVLRLHQDINDYNRRFSGQPRSIMERIMDLPTLLRHAFREMFSVGGLFWMFRIRIILCLMGAFFYLISPLDFVPEALFGILGFLDDFFVIFLLLIYISIMYREVITQRLTR

SEQ ID NO: 74882 - protein, 174 aa, Homo sapiens
  Payload ID: 14796
  Gene Symbol: RNF170
  Gene Name: ring finger protein 170
  Uniprot ID: Q96K19
  ENSP ID: ENSP00000435782
MYCPICLHQASFPVETNCGHLFCGACIIAYWRYGSWLGAISCPICRQTVTLLLTVFGEDDQSQDVLRLHQDINDYNRRFSGQPRSIMERIMDLPTLLRHAFREMFSVGGLFWMFRIRIILCLMGAFFYLISPLDFVPEALFGILGFLDDFFVIFLLLIYISIMYREVITQRLTR

SEQ ID NO: 74883 - protein, 115 aa, Homo sapiens
  Payload ID: 14796
  Gene Symbol: RNF170
  Gene Name: ring finger protein 170
  ENSP ID: ENSP00000436416
MAKYQGEVQSLKLDDDSVIEGVSDQVLVAVVVSFALIATLVYALFRNVHQNIHPENQELVRVLREQLQTEQDAPAATRQQFYTDMYCPICLHQASFPVETNCGHLFCGACIIAYW

SEQ ID NO: 74884 - protein, 45 aa, Homo sapiens
  Payload ID: 14796
  Gene Symbol: RNF170
  Gene Name: ring finger protein 170
  ENSP ID: ENSP00000437146
MAKYQGEVQSLKLDDDSVIEGVSDQVLVAVVVSFALIATLVYALF

SEQ ID NO: 74885 - protein, 258 aa, Homo sapiens; identical to SEQ ID NO: 74881
  Payload ID: 14796
  Gene Symbol: RNF170
  Gene Name: ring finger protein 170
  Uniprot ID: Q96K19
  ENSP ID: ENSP00000445725

SEQ ID NO: 74886 - protein, 328 aa, Homo sapiens
  Payload ID: 14797
  Gene Symbol: RNF175
  Gene Name: ring finger protein 175
  Uniprot ID: Q8N4F7
  ENSP ID: ENSP00000340979
MAAGTAARKAAPVLEAPPQQEQLSHTKLSAEDTWNLQQERMYKMHRGHDSMHVEMILIFLCVLVIAQIVLVQWRQRHGRSYNLVTLLQMWVVPLYFTIKLYWWRFLSMWGMFSVITSYILFRATRKPLSGRTPRLVYKWFLLIYKLSYAFGVVGYLAIMFTMCGFNLFFKIKARDSMDFGIVSLFYGLYYGVMGRDFAEICSDYMASTIGFYSVSRLPTRSLSDNICAVCGQKIIVELDEEGLIENTYQLSCNHVFHEFCIRGWCIVGKKQTCPYCKEKVDLKRMISNPWERTHFLYGQILDWLRYLVAWQPVVIGIVQGIIYSLGLE

SEQ ID NO: 74887 - protein, 36 aa, Homo sapiens
  Payload ID: 14797
  Gene Symbol: RNF175
  Gene Name: ring finger protein 175
  ENSP ID: ENSP00000421761
MAAGTAARKAAPVLEAPPQQEQLSHTKLSAEDTWNW

SEQ ID NO: 74888 - protein, 121 aa, Homo sapiens
  Payload ID: 14797
  Gene Symbol: RNF175
  Gene Name: ring finger protein 175
  ENSP ID: ENSP00000424430
MAAGTAARKAAPVLEAPPQQEQLSHTKLSAEDTWNLQQERMYKMHRGHDSMHVEMILIFLCVLVIAQIVLVQWRQRHGRSYNIGLQMVSFDLQTQLCIWCCGLLGDHVYNVWIQSVFQNQS

SEQ ID NO: 74889 - protein, 68 aa, Homo sapiens
  Payload ID: 14797
  Gene Symbol: RNF175
  Gene Name: ring finger protein 175
  ENSP ID: ENSP00000424563
MAAGTAARKAAPVLEAPPQQEQLSHTKLSAEDTWKLRAFSDDLILLVPACSRRGCTRCTGATIPCTWK

SEQ ID NO: 74890 - protein, 150 aa, Homo sapiens
  Payload ID: 14797
  Gene Symbol: RNF175
  Gene Name: ring finger protein 175
  ENSP ID: ENSP00000427472
MAAGTAARKAAPVLEAPPQQEQLVTLLQMWVVPLYFTIKLYWWRFLSMWGMFSVITSYILFRATRKPLSGRTPRLVYKWFLLIYKLSYAFGVVGYLAIMFTMCGFNLFFKIKARDSMDFGIVSLFYGLYYGVMGRDFAEICSDYMASTIG

SEQ ID NO: 74891 - protein, 416 aa, Homo sapiens
  Payload ID: 14798
  Gene Symbol: RNF180
  Gene Name: ring finger protein 180
  Uniprot ID: Q86T96
  ENSP ID: ENSP00000296615
MKRSKELITKNHSQEETSILRCWKCRKCIASSGCFMEYLENQVIKDKDDSVDAQNICHVWHMNVEALPEWISCLIQKAQWTVGKLNCPFCGARLGGFNFVSTPKCSCGQLAAVHLSKSRTDYQPTQAGRLMRPSVKYLSHPRVQSGCDKEALLTGGGSENRNHRLLNMARNNNDPGRLTEALCLEVRPTYFEMKNEKLLSKASEPKYQLFVPQLVTGRCATRAFHRKSHSLDLNISEKLTLLPTLYEIHSKTTAYSRLNETQPIDLSGLPLQSSKNSYSFQNPSSFDPSMLLQRFSVAPHETQTQRGGEFQCGLEAASVYSDHTNTNNLTFLMDLPSAGRSMPEASDQEEHLSPLDFLHSANFSLGSINQRLNKRERSKLKNLRRKQRRRERWLQKQGKYSGVGLLDHMVSIYLLI

SEQ ID NO: 74892 - protein, 592 aa, Homo sapiens
  Payload ID: 14798
  Gene Symbol: RNF180
  Gene Name: ring finger protein 180
  Uniprot ID: Q86T96
  ENSP ID: ENSP00000373752
MKRSKELITKNHSQEETSILRCWKCRKCIASSGCFMEYLENQVIKDKDDSVDAQNICHVWHMNVEALPEWISCLIQKAQWTVGKLNCPFCGARLGGFNFVSTPKCSCGQLAAVHLSKSRTDYQPTQAGRLMRPSVKYLSHPRVQSGCDKEALLTGGGSENRNHRLLNMARNNNDPGRLTEALCLEVRPTYFEMKNEKLLSKASEPKYQLFVPQLVTGRCATRAFHRKSHSLDLNISEKLTLLPTLYEIHSKTTAYSRLNETQPIDLSGLPLQSSKNSYSFQNPSSFDPSMLLQRFSVAPHETQTQRGGEFQCGLEAASVYSDHTNTNNLTFLMDLPSAGRSMPEASDQEEHLSPLDFLHSANFSLGSINQRLNKRERSKLKNLRRKQRRRERWLQKQGKYSGVGLLDHMTLNNEMSTDEDNEYAEEKDSYICAVCLDVYFNPYMCYPCHHIFCEPCLRTLAKDNPSSTPCPLCRTIISRVFFQTELNNATKTFFTKEYLKIKQSFQKSNSAKWPLPSCRKAFHLFGGFRRHAAPVTRRQFPHGAHRMDYLHFEDDSRGWWFDMDMVIIYIYSVNWVIGFIVFCFLCYFFFPF

SEQ ID NO: 74893 - protein, 107 aa, Homo sapiens
  Payload ID: 14798
  Gene Symbol: RNF180
  Gene Name: ring finger protein 180
  ENSP ID: ENSP00000426884
MKRSKELITKNHSQEETSILRCWKCRKCIASSGCFMEYLENQVIKDKDDSVDAQNICHVWHMNVEALPEWISCLIQKAQWTVGKLNCPFCGARLGGFNFVSTPKCSC

SEQ ID NO: 74894 - protein, 153 aa, Homo sapiens
  Payload ID: 14799
  Gene Symbol: RNF181
  Gene Name: ring finger protein 181
  Uniprot ID: Q9P0P0
  ENSP ID: ENSP00000306906
MASYFDEHDCEPSDPEQETRTNMLLELARSLFNRMDFEDLGLVVDWDHHLPPPAAKTVVENLPRTVIRGSQAELKCPVCLLEFEEEETAIEMPCHHLFHSSCILPWLSKTNSCPLCRYELPTDDDTYEEHRRDKARKQQQQHRLENLHGAMYT

SEQ ID NO: 74895 - protein, 78 aa, Homo sapiens
  Payload ID: 14799
  Gene Symbol: RNF181
  Gene Name: ring finger protein 181
  ENSP ID: ENSP00000391326
MASYFDEHDCEPSDPEQETRTNMLLELARSLFNRMDFEDLGLVVDWDHHLPPPAAKTVVENLPRTVIRGSQAGGGDCH

SEQ ID NO: 74896 - protein, 103 aa, Homo sapiens
  Payload ID: 14799
  Gene Symbol: RNF181
  Gene Name: ring finger protein 181
  ENSP ID: ENSP00000397109
MASYFDEHDCEPSDPEQETRTNMLLELARSLFNRMDFEDLGLVVDWDHHLPPPAAKTVVENLPRTVIRGSQAVFQVRWGQVSFRSGSLGGRACSSSPDQHSFL

SEQ ID NO: 74897 - protein, 139 aa, Homo sapiens
  Payload ID: 14799
  Gene Symbol: RNF181
  Gene Name: ring finger protein 181
  ENSP ID: ENSP00000412025
MASYFDEHDCEPSDPEQETRTNMLLELARSLFNRMDFEDLGLVVDWDHHLPPPAAKTVVENLPRTVIRGSQAELKCPVCLLEFEEEETAIEMPCHHLFHSSCILPWLSKTNSCPLCRYELPTDDDTYEEHRRDKVGADA

SEQ ID NO: 74898 - protein, 170 aa, Homo sapiens
  Payload ID: 14799
  Gene Symbol: RNF181
  Gene Name: ring finger protein 181
  ENSP ID: ENSP00000415246
  MOD_RES (1)..(1): Any amino acid
XTRTNMLLELARSLFNRMDFEDLGLVVDWDHHLPPPAAKTVVENLPRTVIRGSQAALTVPWAQYSSFFLFMDCWGMEEEWQLGAGEGGYQLMKIRPRLEHYSTFLRQIPVPCAAMSCPLMTTLMRSTDEIRLENSSSNTDWRTSMEPCTREEVGAECWPSASSLLTLNPH

SEQ ID NO: 74899 - protein, 51 aa, Homo sapiens
  Payload ID: 14800
  Gene Symbol: RNF182
  Gene Name: ring finger protein 182
  ENSP ID: ENSP00000417500
MASQPPEDTAESQASDELECKICYNRYNLKQRKPKVLECCHRVCAKCLYKI

SEQ ID NO: 74900 - protein, 13 aa, Homo sapiens
  Payload ID: 14800
  Gene Symbol: RNF182
  Gene Name: ring finger protein 182
  ENSP ID: ENSP00000417514
MASQPPEDTAESQ

SEQ ID NO: 74901 - protein, 82 aa, Homo sapiens
  Payload ID: 14800
  Gene Symbol: RNF182
  Gene Name: ring finger protein 182
  ENSP ID: ENSP00000418717
MASQPPEDTAESQASDELECKICYNRYNLKQRKPKVLECCHRVCAKCLYKIIDFGDSPQGVIVCPFCRFETCLPDDEVSSLP

SEQ ID NO: 74902 - protein, 162 aa, Homo sapiens
  Payload ID: 14800
  Gene Symbol: RNF182
  Gene Name: ring finger protein 182
  ENSP ID: ENSP00000419329
MASQPPEDTAESQASDELECKICYNRYNLKQRKPKVLECCHRVCAKCLYKIIDFGDSPQGVIVCPFCRFETCLPDDEVSSLPDDNNILVNLTCGGKGKKCLPENPTELLLTPKRLASLVSPSHTSSNCLVITIMEVQRESSPSLSSTPVVEFYRPASFDSVT

SEQ ID NO: 74903 - protein, 247 aa, Homo sapiens
  Payload ID: 14800
  Gene Symbol: RNF182
  Gene Name: ring finger protein 182
  Uniprot ID: Q8N6D2
  ENSP ID: ENSP00000420465
MASQPPEDTAESQASDELECKICYNRYNLKQRKPKVLECCHRVCAKCLYKIIDFGDSPQGVIVCPFCRFETCLPDDEVSSLPDDNNILVNLTCGGKGKKCLPENPTELLLTPKRLASLVSPSHTSSNCLVITIMEVQRESSPSLSSTPVVEFYRPASFDSVTTVSHNWTVWNCTSLLFQTSIRVLVWLLGLLYFSSLPLGIYLLVSKKVTLGVVFVSLVPSSLVILMVYGFCQCVCHEFLDCMAPPS

SEQ ID NO: 74904 - protein, 247 aa, Homo sapiens; identical to SEQ ID NO: 74903
  Payload ID: 14800
  Gene Symbol: RNF182
  Gene Name: ring finger protein 182
  Uniprot ID: Q8N6D2
  ENSP ID: ENSP00000441271

SEQ ID NO: 74905 - protein, 247 aa, Homo sapiens; identical to SEQ ID NO: 74903
  Payload ID: 14800
  Gene Symbol: RNF182
  Gene Name: ring finger protein 182
  Uniprot ID: Q8N6D2
  ENSP ID: ENSP00000442021

SEQ ID NO: 74906 - protein, 247 aa, Homo sapiens; identical to SEQ ID NO: 74903
  Payload ID: 14800
  Gene Symbol: RNF182
  Gene Name: ring finger protein 182
  Uniprot ID: Q8N6D2
  ENSP ID: ENSP00000443228

SEQ ID NO: 74907 - protein, 192 aa, Homo sapiens
  Payload ID: 14801
  Gene Symbol: RNF183
  Gene Name: ring finger protein 183
  Uniprot ID: Q96D59
  ENSP ID: ENSP00000417176
MAEQQGRELEAECPVCWNPFNNTFHTPKMLDCCHSFCVECLAHLSLVTPARRRLLCPLCRQPTVLASGQPVTDLPTDTAMLALLRLEPHHVILEGHQLCLKDQPKSRYFLRQPQVYTLDLGPQPGGQTGPPPDTASATVSTPILIPSHHSLRECFRNPQFRIFAYLMAVILSVTLLLIFSIFWTKQFLWGVG

SEQ ID NO: 74908 - protein, 192 aa, Homo sapiens; identical to SEQ ID NO: 74907
  Payload ID: 14801
  Gene Symbol: RNF183
  Gene Name: ring finger protein 183
  Uniprot ID: Q96D59
  ENSP ID: ENSP00000417943

SEQ ID NO: 74909 - protein, 192 aa, Homo sapiens; identical to SEQ ID NO: 74907
  Payload ID: 14801
  Gene Symbol: RNF183
  Gene Name: ring finger protein 183
  Uniprot ID: Q96D59
  ENSP ID: ENSP00000419454

SEQ ID NO: 74910 - protein, 192 aa, Homo sapiens; identical to SEQ ID NO: 74907
  Payload ID: 14801
  Gene Symbol: RNF183
  Gene Name: ring finger protein 183
  Uniprot ID: Q96D59
  ENSP ID: ENSP00000420740

SEQ ID NO: 74911 - protein, 136 aa, Homo sapiens
  Payload ID: 14802
  Gene Symbol: RNF185
  Gene Name: ring finger protein 185
  Uniprot ID: Q96GF1
  ENSP ID: ENSP00000266252
MASKGPSASASPENSSAGGPSGSSNGAGESGGQDSTFECNICLDTAKDAVISLCGHLFCWPCLHQGFQGFGFGDGGFQMSFGIGAFPFGIFATAFNINDGRPPPAVPGTPQYVDEQFLSRLFLFVALVIMFWLLIA

SEQ ID NO: 74912 - protein, 192 aa, Homo sapiens
  Payload ID: 14802
  Gene Symbol: RNF185
  Gene Name: ring finger protein 185
  Uniprot ID: Q96GF1
  ENSP ID: ENSP00000320508
MASKGPSASASPENSSAGGPSGSSNGAGESGGQDSTFECNICLDTAKDAVISLCGHLFCWPCLHQWLETRPNRQVCPVCKAGISRDKVIPLYGRGSTGQQDPREKTPPRPQGQRPEPENRGGFQGFGFGDGGFQMSFGIGAFPFGIFATAFNINDGRPPPAVPGTPQYVDEQFLSRLFLFVALVIMFWLLIA

SEQ ID NO: 74913 - protein, 157 aa, Homo sapiens
  Payload ID: 14802
  Gene Symbol: RNF185
  Gene Name: ring finger protein 185
  ENSP ID: ENSP00000410916
MASKGPSASASPENSSAGGPSGSSNGAGESGGQDSTFECNICLDTAKDAVISLCGHLFCWPCLHQWLETRPNRQVCPVCKAGISRDKVIPLYGRGSTGQQDPREKTPPRPQGQRPEPENRGVRNILGEASTNELMALEVSFLALQFFSLIIKVKENL

SEQ ID NO: 74914 - protein, 192 aa, Homo sapiens; identical to SEQ ID NO: 74912
  Payload ID: 14802
  Gene Symbol: RNF185
  Gene Name: ring finger protein 185
  Uniprot ID: Q96GF1
  ENSP ID: ENSP00000427755

SEQ ID NO: 74915 - protein, 227 aa, Homo sapiens
  Payload ID: 14803
  Gene Symbol: RNF186
  Gene Name: ring finger protein 186
  Uniprot ID: Q9NXI6
  ENSP ID: ENSP00000364263
MACTKTLQQSQPISAGATTTTTAVAPAGGHSGSTECDLECLVCREPYSCPRLPKLLACQHAFCAICLKLLLCVQDNTWSITCPLCRKVTAVPGGLICSLRDHEAVVGQLAQPCTEVSLCPQGLVDPADLAAGHPSLVGEDGQDEVSANHVAARRLAAHLLLLALLIILIGPFIYPGVLRWVLTFIIALALLMSTLFCCLPSTRGSCWPSSRTLFCREQKHSHISSIA

SEQ ID NO: 74916 - protein, 235 aa, Homo sapiens
  Payload ID: 14804
  Gene Symbol: RNF187
  Gene Name: ring finger protein 187
  Uniprot ID: Q5TA31
  ENSP ID: ENSP00000306396
LALPAGPAEAACALCQRAPREPVRADCGHRFCRACVVRFWAEEDGPFPCPECADDCWQRAVEPGRPPLSRRLLALEEAAAAPARDGPASEAALQLLCRADAGPLCAACRMAAGPEPPEWEPRWRKALRGKENKGSVEIMRKDLNDARDLHGQAESAAAVWKGHVMDRRKKALTDYKKLRAFFVEEEEHFLQEAEKEEGLPEDELADPTERFRSLLQAVSELEKKHRNLGLSMLLQ

SEQ ID NO: 74917 - protein, 838 aa, Homo sapiens
  Payload ID: 14805
  Gene Symbol: RNF19A
  Gene Name: ring finger protein 19A, RBR E3 ubiquitin protein ligase
  Uniprot ID: Q9NV58
  ENSP ID: ENSP00000342667
MQEQEIGFISKYNEGLCVNTDPVSILTSILDMSLHRQMGSDRDLQSSASSVSLPSVKKAPKKRRISIGSLFRRKKDNKRKSRELNGGVDGIASIESIHSEMCTDKNSIFSTNTSSDNGLTSISKQIGDFIECPLCLLRHSKDRFPDIMTCHHRSCVDCLRQYLRIEISESRVNISCPECTERFNPHDIRLILSDDVLMEKYEEFMLRRWLVADPDCRWCPAPDCGYAVIAFGCASCPKLTCGREGCGTEFCYHCKQIWHPNQTCDAARQERAQSLRLRTIRSSSISYSQESGAAADDIKPCPRCAAYIIKMNDGSCNHMTCAVCGCEFCWLCMKEISDLHYLSPSGCTFWGKKPWSRKKKILWQLGTLVGAPVGIALIAGIAIPAMIIGIPVYVGRKIHNRYEGKDVSKHKRNLAIAGGVTLSVIVSPVVAAVTVGIGVPIMLAYVYGVVPISLCRSGGCGVSAGNGKGVRIEFDDENDINVGGTNTAVDTTSVAEARHNPSIGEGSVGGLTGSLSASGSHMDRIGAIRDNLSETASTMALAGASITGSLSGSAMVNCFNRLEVQADVQKERYSLSGESGTVSLGTVSDNASTKAMAGSILNSYIPLDKEGNSMEVQVDIESKPSKFRHNSGSSSVDDGSATRSHAGGSSSGLPEGKSSATKWSKEATAGKKSKSGKLRKKGNMKINETREDMDAQLLEQQSTNSSEFEAPSLSDSMPSVADSHSSHFSEFSCSDLESMKTSCSHGSSDYHTRFATVNILPEVENDRLENSPHQCSISVVTQTASCSEVSQLNHIAEEHGNNGIKPNVDLYFGDALKETNNNHSHQTMELKVAIQTEI

SEQ ID NO: 74918 - protein, 89 aa, Homo sapiens
  Payload ID: 14805
  Gene Symbol: RNF19A
  Gene Name: ring finger protein 19A, RBR E3 ubiquitin protein ligase
  ENSP ID: ENSP00000397305
MQEQEIGFISKYNEGLCVNTDPVSILTSILDMSLHRQMGSDRDLQSSASSVSLPSVKKAPKKRRISIGSLFRRKKDNKRKSRELNGGVD

SEQ ID NO: 74919 - protein, 838 aa, Homo sapiens; identical to SEQ ID NO: 74917
  Payload ID: 14805
  Gene Symbol: RNF19A
  Gene Name: ring finger protein 19A, RBR E3 ubiquitin protein ligase
  Uniprot ID: Q9NV58
  ENSP ID: ENSP00000428968

SEQ ID NO: 74920 - protein, 58 aa, Homo sapiens
  Payload ID: 14805
  Gene Symbol: RNF19A
  Gene Name: ring finger protein 19A, RBR E3 ubiquitin protein ligase
  ENSP ID: ENSP00000429161
MSLHRQMGSDRDLQSSASSVSLPSVKKAPKKRRISIGSLFRRKKDNKRKSRELNGGVD

SEQ ID NO: 74921 - protein, 156 aa, Homo sapiens
  Payload ID: 14805
  Gene Symbol: RNF19A
  Gene Name: ring finger protein 19A, RBR E3 ubiquitin protein ligase
  ENSP ID: ENSP00000429549
MQEQEIGFISKYNEGLCVNTDPVSILTSILDMSLHRQMGSDRDLQSSASSVSLPSVKKAPKKRRISIGSLFRRKKDNKRKSRELNGGVDGIASIESIHSEMCTDKNSIFSTNTSSDNGLTSISKQIGDFIECPLCLLRHSKDRFPDIMTCHHRSCV

SEQ ID NO: 74922 - protein, 113 aa, Homo sapiens
  Payload ID: 14805
  Gene Symbol: RNF19A
  Gene Name: ring finger protein 19A, RBR E3 ubiquitin protein ligase
  ENSP ID: ENSP00000429841
MQEQEIGFISKYNEGLCVNTDPVSILTSILDMSLHRQMGSDRDLQSSASSVSLPSVKKAPKKRRISIGSLFRRKKDNKRKSRELNGGVDGIASIESIHSEMCTDKNSIFSTNT

SEQ ID NO: 74923 - protein, 14 aa, Homo sapiens
  Payload ID: 14805
  Gene Symbol: RNF19A
  Gene Name: ring finger protein 19A, RBR E3 ubiquitin protein ligase
  ENSP ID: ENSP00000430553
MQEQEIGFISKYNE

SEQ ID NO: 74924 - protein, 165 aa, Homo sapiens
  Payload ID: 14805
  Gene Symbol: RNF19A
  Gene Name: ring finger protein 19A, RBR E3 ubiquitin protein ligase
  ENSP ID: ENSP00000431077
MQEQEIGFISKYNEGLCVNTDPVSILTSILDMSLHRQMGSDRDLQSSASSVSLPSVKKAPKKRRISIGSLFRRKKDNKRKSRELNGGVDGIASIESIHSEMCTDKNSIFSTNTSSDNGLTSISKQIGDFIECPLCLLRHSKDRFPDIMTCHHRSCVDCLRQYLRI

SEQ ID NO: 74925 - protein, 838 aa, Homo sapiens; identical to SEQ ID NO: 74917
  Payload ID: 14805
  Gene Symbol: RNF19A
  Gene Name: ring finger protein 19A, RBR E3 ubiquitin protein ligase
  Uniprot ID: Q9NV58
  ENSP ID: ENSP00000480369

SEQ ID NO: 74926 - protein, 731 aa, Homo sapiens
  Payload ID: 14806
  Gene Symbol: RNF19B
  Gene Name: ring finger protein 19B
  Uniprot ID: Q6ZMZ0
  ENSP ID: ENSP00000235150
MGSEKDSESPRSTSLHAAAPDPKCRSGGRRRRLTLHSVFSASARGRRARAKPQAEPPPPAAQPPPAPAPAAAQGPPPEALPAEPAAEAEAEAAAAAAEPGFDDEEAAEGGGPGAEEVECPLCLVRLPPERAPRLLSCPHRSCRDCLRHYLRLEISESRVPISCPECSERLNPHDIRLLLADPPLMHKYEEFMLRRYLASDPDCRWCPAPDCGYAVIAYGCASCPKLTCEREGCQTEFCYHCKQIWHPNQTCDMARQQRAQTLRVRTKHTSGLSYGQESGPDDIKPCPRCSAYIIKMNDGSCNHMTCAVCGCEFCWLCMKEISDLHYLSPSGCTFWGKKPWSRKKKILWQLGTLIGAPVGISLIAGIAIPAMVIGIPVYVGRKIHSRYEGRKTSKHKRNLAITGGVTLSVIASPVIAAVSVGIGVPIMLAYVYGVVPISLCRGGGCGVSTANGKGVKIEFDEDDGPITVADAWRALKNPSIGESSIEGLTSVLSTSGSPTDGLSVMQGPYSETASFAALSGGTLSGGILSSGKGKYSRLEVQADVQKEIFPKDTASLGAISDNASTRAMAGSIISSYNPQDRECNNMEIQVDIEAKPSHYQLVSGSSTEDSLHVHAQMAENEEEGSGGGGSEEDPPCRHQSCEQKDCLASKPWDISLAQPESIRSDLESSDAQSDDVPDITSDECGSPRSHTAACPSTPRAQGAPSPSAHMNLSALAEGQTVLKPEGGEARV

SEQ ID NO: 74927 - protein, 587 aa, Homo sapiens
  Payload ID: 14806
  Gene Symbol: RNF19B
  Gene Name: ring finger protein 19B
  Uniprot ID: Q6ZMZ0
  ENSP ID: ENSP00000349482
MGSEKDSESPRSTSLHAAAPDPKCRSGGRRRRLTLHSVFSASARGRRARAKPQAEPPPPAAQPPPAPAPAAAQGPPPEALPAEPAAEAEAEAAAAAAEPGFDDEEAAEGGGPGAEEVECPLCLVRLPPERAPRLLSCPHRSCRDCLRHYLRLEISESRVPISCPECSERLNPHDIRLLLADPPLMHKYEEFMLRRYLASDPDCRWCPAPDCGYAVIAYGCASCPKLTCEREGCQTEFCYHCKQIWHPNQTCDMARQQRAQTLRVRTKHTSGLSYGQESGPDDIKPCPRCSAYIIKMNDGSCNHMTCAVCGCEFCWLCMKEISDLHYLSPSGCTFWGKKPWSRKKKILWQLGTLIGAPVGISLIAGIAIPAMVIGIPVYVGRKIHSRYEGRKTSKHKRNLAITGGVTLSVIASPVIAAVSVGIGVPIMLAYVYGVVPISLCRGGGCGVSTANGKGVKIEFDEDDGPITVADAWRALKNPSIGESSIEGLTSVLSTSGSPTDGLSVMQGPYSETASFAALSGGTLSGGILSSGKGKYSRLEVQADVQKEIFPKDTASLGAISDNASTRAMAGSIISSYNPQDRFSMIHA

SEQ ID NO: 74928 - protein, 732 aa, Homo sapiens
  Payload ID: 14806
  Gene Symbol: RNF19B
  Gene Name: ring finger protein 19B
  Uniprot ID: Q6ZMZ0
  ENSP ID: ENSP00000362555
MGSEKDSESPRSTSLHAAAPDPKCRSGGRRRRLTLHSVFSASARGRRARAKPQAEPPPPAAQPPPAPAPAAAQGPPPEALPAEPAAEAEAEAAAAAAEPGFDDEEAAEGGGPGAEEVECPLCLVRLPPERAPRLLSCPHRSCRDCLRHYLRLEISESRVPISCPECSERLNPHDIRLLLADPPLMHKYEEFMLRRYLASDPDCRWCPAPDCGYAVIAYGCASCPKLTCEREGCQTEFCYHCKQIWHPNQTCDMARQQRAQTLRVRTKHTSGLSYGQESGPADDIKPCPRCSAYIIKMNDGSCNHMTCAVCGCEFCWLCMKEISDLHYLSPSGCTFWGKKPWSRKKKILWQLGTLIGAPVGISLIAGIAIPAMVIGIPVYVGRKIHSRYEGRKTSKHKRNLAITGGVTLSVIASPVIAAVSVGIGVPIMLAYVYGVVPISLCRGGGCGVSTANGKGVKIEFDEDDGPITVADAWRALKNPSIGESSIEGLTSVLSTSGSPTDGLSVMQGPYSETASFAALSGGTLSGGILSSGKGKYSRLEVQADVQKEIFPKDTASLGAISDNASTRAMAGSIISSYNPQDRECNNMEIQVDIEAKPSHYQLVSGSSTEDSLHVHAQMAENEEEGSGGGGSEEDPPCRHQSCEQKDCLASKPWDISLAQPESIRSDLESSDAQSDDVPDITSDECGSPRSHTAACPSTPRAQGAPSPSAHMNLSALAEGQTVLKPEGGEARV

SEQ ID NO: 74929 - protein, 264 aa, Homo sapiens
  Payload ID: 14807
  Gene Symbol: RNF2
  Gene Name: ring finger protein 2
  Uniprot ID: Q99496
  ENSP ID: ENSP00000356479
MSQAVQTNGTQPLSKTWELSLYELQRTPQEAITDGLEIVVSPRSLHSELMCPICLDMLKNTMTTKECLHRFCADCIITALRSGLQRGKKQQIENGSGAEDNGDSSHCSNASTHSNQEAGPSNKRTKTSDDSGLELDNNNAAMAIDPVMDGASEIELVFRPHPTLMEKDDSAQTRYIKTSGNATVDHLSKYLAVRLALEELRSKGESNQMNLDTASEKQYTIYIATASGQFTVLNGSFSLELVSEKYWKVNKPMELYYAPTKEHK

SEQ ID NO: 74930 - protein, 336 aa, Homo sapiens
  Payload ID: 14807
  Gene Symbol: RNF2
  Gene Name: ring finger protein 2
  Uniprot ID: Q99496
  ENSP ID: ENSP00000356480
MSQAVQTNGTQPLSKTWELSLYELQRTPQEAITDGLEIVVSPRSLHSELMCPICLDMLKNTMTTKECLHRFCADCIITALRSGNKECPTCRKKLVSKRSLRPDPNFDALISKIYPSRDEYEAHQERVLARINKHNNQQALSHSIEEGLKIQAMNRLQRGKKQQIENGSGAEDNGDSSHCSNASTHSNQEAGPSNKRTKTSDDSGLELDNNNAAMAIDPVMDGASEIELVFRPHPTLMEKDDSAQTRYIKTSGNATVDHLSKYLAVRLALEELRSKGESNQMNLDTASEKQYTIYIATASGQFTVLNGSFSLELVSEKYWKVNKPMELYYAPTKEHK

SEQ ID NO: 74931 - protein, 245 aa, Homo sapiens
  Payload ID: 14807
  Gene Symbol: RNF2
  Gene Name: ring finger protein 2
  ENSP ID: ENSP00000400722
MSQAVQTNGTQPLSKTWELSLYELQRTPQEAITDGLEIVVSPRSLHSELMCPICLDMLKNTMTTKECLHRFCADCIITALRSGNKECPTCRKKLVSKRSLRPDPNFDALISKIYPSRDEYEAHQERVLARINKHNNQQALSHSIEEGLKIQAMNRLQRGKKQQIENGSGAEDNGDSSHCSNASTHSNQEAGPSNKRTKTSDDSGLELDNNNAAMAIDPVMDGASEIELVFRPHPTLMEKDDSAQT

SEQ ID NO: 74932 - protein, 181 aa, Homo sapiens
  Payload ID: 14808
  Gene Symbol: RNF20
  Gene Name: ring finger protein 20, E3 ubiquitin protein ligase
  ENSP ID: ENSP00000363952
MSGIGNKRAAGEPGTSMPPEKKAAVEDSGTTVETIKLGGVSSTEELDIRTLQTKNRKLAEMLDQRQAIEDELREHIEKLERRQATDDASLLIVNRYWSQFDENIRIILKRYDLEQGLGDLLTERKALVVPEPEPDSDSNQERKDDRERGEGQEPAFSFLATLASSSSEEMESQLQERVESS

SEQ ID NO: 74933 - protein, 975 aa, Homo sapiens
  Payload ID: 14808
  Gene Symbol: RNF20
  Gene Name: ring finger protein 20, E3 ubiquitin protein ligase
  Uniprot ID: Q5VTR2
  ENSP ID: ENSP00000373772
MSGIGNKRAAGEPGTSMPPEKKAAVEDSGTTVETIKLGGVSSTEELDIRTLQTKNRKLAEMLDQRQAIEDELREHIEKLERRQATDDASLLIVNRYWSQFDENIRIILKRYDLEQGLGDLLTERKALVVPEPEPDSDSNQERKDDRERGEGQEPAFSFLATLASSSSEEMESQLQERVESSRRAVSQIVTVYDKLQEKVELLSRKLNSGDNLIVEEAVQELNSFLAQENMRLQELTDLLQEKHRTMSQEFSKLQSKVETAESRVSVLESMIDDLQWDIDKIRKREQRLNRHLAEVLERVNSKGYKVYGAGSSLYGGTITINARKFEEMNAELEENKELAQNRLCELEKLRQDFEEVTTQNEKLKVELRSAVEQVVKETPEYRCMQSQFSVLYNESLQLKAHLDEARTLLHGTRGTHQHQVELIERDEVSLHKKLRTEVIQLEDTLAQVRKEYEMLRIEFEQTLAANEQAGPINREMRHLISSLQNHNHQLKGEVLRYKRKLREAQSDLNKTRLRSGSALLQSQSSTEDPKDEPAELKPDSEDLSSQSSASKASQEDANEIKSKRDEEERERERREKEREREREREKEKEREREKQKLKESEKERDSAKDKEKGKHDDGRKKEAEIIKQLKIELKKAQESQKEMKLLLDMYRSAPKEQRDKVQLMAAEKKSKAELEDLRQRLKDLEDKEKKENKKMADEDALRKIRAVEEQIEYLQKKLAMAKQEEEALLSEMDVTGQAFEDMQEQNIRLMQQLREKDDANFKLMSERIKSNQIHKLLKEEKEELADQVLTLKTQVDAQLQVVRKLEEKEHLLQSNIGTGEKELGLRTQALEMNKRKAMEAAQLADDLKAQLELAQKKLHDFQDEIVENSVTKEKDMFNFKRAQEDISRLRRKLETTKKPDNVPKCDEILMEEIKDYKARLTCPCCNMRKKDAVLTKCFHVFCFECVKTRYDTRQRKCPKCNAAFGANDFHRIYIG

SEQ ID NO: 74934 - protein, 145 aa, Homo sapiens
  Payload ID: 14808
  Gene Symbol: RNF20
  Gene Name: ring finger protein 20, E3 ubiquitin protein ligase
  ENSP ID: ENSP00000418924
MSGIGNKRAAGEPGTSMPPEKKAAVEDSGTTVETIKLGGVSSTEELDIRTLQTKNRKLAEMLDQRQAIEDELREHIEKLERRQATDDASLLIVNRYWSQFDENIRIILKRYDLEQGLGDLLTERKALVVPEPEPDSDSNQERKDD

SEQ ID NO: 74935 - protein, 99 aa, Homo sapiens
  Payload ID: 14808
  Gene Symbol: RNF20
  Gene Name: ring finger protein 20, E3 ubiquitin protein ligase
  ENSP ID: ENSP00000419201
MSGIGNKRAAGEPGTSMPPEKKAAVEDSGTTVETIKLGGVSSTEELDIRTLQTKNRKLAEMLDQRQAIEDELREHIEKLERRQATDDASLLIVNRYWSQ

SEQ ID NO: 74936 - protein, 634 aa, Homo sapiens
  Payload ID: 14809
  Gene Symbol: RNF207
  Gene Name: ring finger protein 207
  Uniprot ID: Q6ZRF8
  ENSP ID: ENSP00000367173
MSGAIFGPLEGPSSLDAPSIHPLVCPLCHVQYERPCLLDCFHDFCAGCLRGRATDGRLTCPLCQHQTVLKGPSGLPPVDRLLQFLVDSSGDGVEAVRCANCDLECSEQDVETTYFCNTCGQPLCARCRDETHRARMFARHDIVALGQRSRDVPQKCTLHAEPYLLFSTDKKLLLCIRCFRDMQKESRAHCVDLESAYVQGCERLEQAVLAVKALQTATREAIALLQAMVEEVRHSAAEEEDAIHALFGSMQDRLAERKALLLQAVQSQYEEKDKAFKEQLSHLATLLPTLQVHLVICSSFLSLANKAEFLDLGYELMERLQGIVTRPHHLRPIQSSKIASDHRAEFARCLEPLLLLGPRRVAAAASGANTLAGGLGPKALTGPHCPSPVGKMSGSPVQKPTLHRSISTKVLLAEGENTPFAEHCRHYEDSYRHLQAEMQSLKDQVQELHRDLTKHHSLIKAEIMGDVLHKSLQLDVQIASEHASLEGMRVVFQEIWEEAYQRVANEQEIYEAQLHDLLQLRQENAYLTTITKQITPYVRSIAKVKERLEPRFQAPVDEQSESLQNTHDDSRNNAASARNNPGSVPEKREKTSEPKGNSWAPNGLSEEPLLKNMDHHRSKQKNGGDVPTWREHPT

SEQ ID NO: 74937 - protein, 261 aa, Homo sapiens
  Payload ID: 14810
  Gene Symbol: RNF208
  Gene Name: ring finger protein 208
  Uniprot ID: Q9H0X6
  ENSP ID: ENSP00000375397
MPSDPGPEAGSGWPGLLMSCLKGPHVILKMEAMKIVHPEKFPELPAAPCFPPAPRPTPTLAPKRAWPSDTEIIVNQACGGDMPALEGAPHTPPLPRRPRKGSSELGFPRVAPEDEVIVNQYVIRPGPSASAASSAAAGEPLECPTCGHSYNVTQRRPRVLSCLHSVCEQCLQILYESCPKYKFISCPTCRRETVLFTDYGLAALAVNTSILSRLPPEALTAPSGGQWGAEPEGSCYQTFRQYCGAACTCHVRNPLSACSIM

SEQ ID NO: 74938 - protein, 261 aa, Homo sapiens; identical to SEQ ID NO: 74937
  Payload ID: 14810
  Gene Symbol: RNF208
  Gene Name: ring finger protein 208
  Uniprot ID: Q9H0X6
  ENSP ID: ENSP00000376572

SEQ ID NO: 74939 - protein, 273 aa, Homo sapiens
  Payload ID: 14811
  Gene Symbol: RNF212
  Gene Name: ring finger protein 212
  Uniprot ID: Q495C1
  ENSP ID: ENSP00000327481
MANWVFCNRCFQPPHRTSCFSLTNCGHVYCDACLGKGKKNECLICKAPCRTVLLSKHTDADIQAFFMSIDSLCKKYSRETSQYLRLSRGCCRLKLCPATSSKEVPRGSTHGSQAAARDPQEHWVSTTRAPRPGCRRSQSQPEAQGNTIQDAPHPLTLLHPSRTLIHTKSPWGQKLLEFIKHVCYHRHQSHRPCAPGWFCQVLQRPGAVSGEKTQQTRPAPPATCLLCLSCLSGFRHGPWRSQALPSDLVAPLFVSYTVEVSITNAGWSFPAAV

SEQ ID NO: 74940 - protein, 232 aa, Homo sapiens
  Payload ID: 14811
  Gene Symbol: RNF212
  Gene Name: ring finger protein 212
  Uniprot ID: Q495C1
  ENSP ID: ENSP00000372428
MANWVFCNRCFQPPHRTSCFSLTNCGHVYCDACLGKGKKNECLICKAPCRTVLLSKHTDADIQAFFMSIDSLCKKYSRETSQILEFQEKHRKRLLAFYREKISRLEESLRKSVLQIEQLQSMRSSQQTAFSTIKSSVSTKPHGCLLPPHSSAPDRLESMEVDLSPSPIRKSEIAAGPARISMISPPQDGRMAPCARRVCHFQRFTMFLHRRLSSLAAPPSVQFWKARGTHQL

SEQ ID NO: 74941 - protein, 297 aa, Homo sapiens
  Payload ID: 14811
  Gene Symbol: RNF212
  Gene Name: ring finger protein 212
  Uniprot ID: Q495C1
  ENSP ID: ENSP00000389709
MANWVFCNRCFQPPHRTSCFSLTNCGHVYCDACLGKGKKNECLICKAPCRTVLLSKHTDADIQAFFMSIDSLCKKYSRETSQILEFQEKHRKRLLAFYREKISRLEESLRKSVLQIEQLQSMRSSQQTAFSTIKSSVSTKPHGCLLPPHSSAPDRLESMEVDLSPSPIRKSEIAAGPARISMISPPQDGRMGPHLTASFCFIPWLTLSKPPVPGECVISRGSPCFCIDVCPHWLLLLAFSSGRHGELTNSKTLPIYAEVQRAVLFPFQQAEGTLDTFRTPAVSVVFPLCQFERKKSF

SEQ ID NO: 74942 - protein, 52 aa, Homo sapiens
  Payload ID: 14811
  Gene Symbol: RNF212
  Gene Name: ring finger protein 212
  ENSP ID: ENSP00000423030
MANWVFCNRCFQPPHRTSCFSLTNCGHVYCDACLGKDRRRYPGILHEHRQSV

SEQ ID NO: 74943 - protein, 115 aa, Homo sapiens
  Payload ID: 14811
  Gene Symbol: RNF212
  Gene Name: ring finger protein 212
  ENSP ID: ENSP00000423560
MANWVFCNRCFQPPHRTSCFSLTNCGHVYCDACLGKGKKNECLICKAPCRTVLLSKHRPFPVSDSESPTARLYSCVRRAPWIPHRGTRVRLRRRTLWTRLLCTRVDFLHSLRPLP

SEQ ID NO: 74944 - protein, 52 aa, Homo sapiens; identical to SEQ ID NO: 74942
  Payload ID: 14811
  Gene Symbol: RNF212
  Gene Name: ring finger protein 212
  ENSP ID: ENSP00000425843

SEQ ID NO: 74945 - protein, 123 aa, Homo sapiens
  Payload ID: 14811
  Gene Symbol: RNF212
  Gene Name: ring finger protein 212
  Uniprot ID: Q495C1
  ENSP ID: ENSP00000426115
MANWVFCNRCFQPPHRTSCFSLTNCGHVYCDACLGKGKKNECLICKAPCRTVLLSKHTDADIQAFFMSIDSLCKKYSRETSQILEFQEKHRKRLLAFYREKISRLEESLRKSVLQIEQLQSLR

SEQ ID NO: 74946 - protein, 83 aa, Homo sapiens
  Payload ID: 14812
  Gene Symbol: RNF212B
  Gene Name: ring finger protein 212B
  ENSP ID: ENSP00000382789
MQEAQQALVSQDNRSSSAESIPYREAGFGSLGQKPLHRLQLIAYLIGDFFFQTIPKWAFRPHKSPHPQQFCSEGEHNYTRESS

SEQ ID NO: 74947 - protein, 300 aa, Homo sapiens
  Payload ID: 14812
  Gene Symbol: RNF212B
  Gene Name: ring finger protein 212B
  Uniprot ID: A8MTL3
  ENSP ID: ENSP00000382794
MDWFHCNQCFRKDGAHFFVTSCGHIFCKKCVTLEKCAVCGTACKHLALSDNLKPQEKMFFKSPVETALQYFSHISQVWSFQKKQTDLLIAFYKHRITKLETAMQEAQQALVSQDKELSVLRKENGELKKFLAILKESPSRYQGSRSITPRPVGITSPSQSVTPRPSFQHSSQVVSRSSSAESIPYREAGFGSLGQGGRGLQGRRTPRDSYNETPSPASTHSLSYRTSSASSGQGIFSFRPSPNGHSGHTRVLTPNNFAQRESTTTLESLPSFQLPVLQTLYQQRRHMGLPSGREAWTTSR

SEQ ID NO: 74948 - protein, 300 aa, Homo sapiens; identical to SEQ ID NO: 74947
  Payload ID: 14812
  Gene Symbol: RNF212B
  Gene Name: ring finger protein 212B
  Uniprot ID: A8MTL3
  ENSP ID: ENSP00000397830

SEQ ID NO: 74949 - protein, 83 aa, Homo sapiens
  Payload ID: 14812
  Gene Symbol: RNF212B
  Gene Name: ring finger protein 212B
  ENSP ID: ENSP00000450766
MDWFHCNQCFRKDGAHFFVTSCGHIFCKKCVTLEKCAVCGTACKHLALSDNLKPQEKMFFKSPVETALQYFSHISQTLYQQRR

SEQ ID NO: 74950 - protein, 75 aa, Homo sapiens
  Payload ID: 14812
  Gene Symbol: RNF212B
  Gene Name: ring finger protein 212B
  ENSP ID: ENSP00000451124
VWSFQKKQTDLLIAFYKHRITKLETAMQEAQQALVSQDNRSSSAESIPYREAGFGSLGQGGRGLQGRRTPRDSYN

SEQ ID NO: 74951 - protein, 1063 aa, Homo sapiens
  Payload ID: 14813
  Gene Symbol: RNF213
  Gene Name: ring finger protein 213
  Uniprot ID: Q63HN8
  ENSP ID: ENSP00000324392
MECPSCQHVSKEETPKFCSQCGERLPPAAPIADSENNNSTMASASEGEMECGQELKEEGGPCLFPGSDSWQENPEEPCSKASWTVQESKKKKRKKKKKGNKSASSELASLPLSPASPCHLTLLSNPWPQDTALPHSQAQQSGPTGQPSQPPGTATTPLEGDGLSAPTEVGDSPLQAQALGEAGVATGSEAQSSPQFQDHTEGEDQDASIPSGGRGLSQEGTGPPTSAGEGHSRTEDAAQELLLPESKGGSSEPGTELQTTEQQAGASASMAVDAVAEPANAVKGAGKEMKEKTQRMKQPPATTPPFKTHCQEAETKTKDEMAAAEEKVGKNEQGEPEDLKKPEGKNRSAAAVKNEKEQKNQEADVQEVKASTLSPGGGVTVFFHAIISLHFPFNPDLHKVFIRGGEEFGESKWDSNICELHYTRDLGHDRVLVEGIVCISKKHLDKYIPYKYVIYNGESFEYEFIYKHQQKKGEYVNRCLFIKSSLLGSGDWHQYYDIVYMKPHGRLQKVMNHITDGPRKDLVKGKQIAAALMLDSTFSILQTWDTINLNSFFTQFEQFCFVLQQPMIYEGQAQLWTDLQYREKEVKRYLWQHLKKHVVPLPDGKSTDFLPVDCPVRSKLKTGLIVLFVVEKIELLLEGSLDWLCHLLTSDASSPDEFHRDLSHILGIPQSWRLYLVNLCQRCMDTRTYTWLGALPVLHCCMELAPRHKDAWRQPEDTWAALEGLSFSPFREQMLDTSSLLQFMREKQHLLSIDEPLFRSWFSLLPLSHLVMYMENFIEHLGRFPAHILDCLSGIYYRLPGLEQVLNTQDVQDVQNVQNILEMLLRLLDTYRDKIPEEALSPSYLTVCLKLHEAICSSTKLLKFYELPALSAEIVCRMIRLLSLVDSAGQRDETGNNSVQTVFQGTLAATKRWLREVFTKNMLTSSGASFTYVKEIEVWRRLVEIQFPAEHGWKESLLGDMEWRLTKEEPLSQITAYCNSCWDTKGLEDSVAKTFEKCIIEAVSSACQVNNLSSWETDSGSQLCSAMTQLRAMKHPLGLSSSANSEIGKWAPSSLAKGNGAEI

SEQ ID NO: 74952 - protein, 5256 aa, Homo sapiens
  Payload ID: 14813
  Gene Symbol: RNF213
  Gene Name: ring finger protein 213
  ENSP ID: ENSP00000425956
MECPSCQHVSKEETPKFCSQCGERLPPAAPIADSENNNSTMASASEGEMECGQELKEEGGPCLFPGSDSWQENPEEPCSKASWTVQEGATSEVLVDAAVDLISDEWEAANAIPSKRRKQDAAPLEAASVPSADCEQSKKKKRKKKKKGNKSASSELASLPLSPASPCHLTLLSNPWPQDTALPHSQAQQSGPTGQPSQPPGTATTPLEGDGLSAPTEVGDSPLQAQALGEAGVATGSEAQSSPQFQDHTEGEDQDASIPSGGRGLSQEGTGPPTSAGEGHSRTEDAAQELLLPESKGGSSEPGTELQTTEQQAGASASMAVDAVAEPANAVKGAGKEMKEKTQRMKQPPATTPPFKTHCQEAETKTKDEMAAAEEKVGKNEQGEPEDLKKPEGKNRSAAAVKNEKEQKNQEADVQEVKASTLSPGGGVTVFFHAIISLHFPFNPDLHKVFIRGGEEFGESKWDSNICELHYTRDLGHDRVLVEGIVCISKKHLDKYIPYKYVIYNGESFEYEFIYKHQQKKGEYVNRCLFIKSSLLGSGDWHQYYDIVYMKPHGRLQKVMNHITDGPRKDLVKGKQIAAALMLDSTFSILQTWDTINLNSFFTQFEQFCFVLQQPMIYEGQAQLWTDLQYREKEVKRYLWQHLKKHVVPLPDGKSTDFLPVDCPVRSKLKTGLIVLFVVEKIELLLEGSLDWLCHLLTSDASSPDEFHRDLSHILGIPQSWRLYLVNLCQRCMDTRTYTWLGALPVLHCCMELAPRHKDAWRQPEDTWAALEGLSFSPFREQMLDTSSLLQFMREKQHLLSIDEPLFRSWFSLLPLSHLVMYMENFIEHLGRFPAHILDCLSGIYYRLPGLEQVLNTQDVQDVQNVQNILEMLLRLLDTYRDKIPEEALSPSYLTVCLKLHEAICSSTKLLKFYELPALSAEIVCRMIRLLSLVDSAGQRDETGNNSVQTVFQGTLAATKRWLREVFTKNMLTSSGASFTYVKEIEVWRRLVEIQFPAEHGWKESLLGDMEWRLTKEEPLSQITAYCNSCWDTKGLEDSVAKTFEKCIIEAVSSACQSQTSILQGFSYSDLRKFGIVLSAVITKSWPRTADNFDDILKHLLTLADVKHVFRLCGTDEKILANVTEDAKRLIAVADSVLTKVVGDLLSGTILVGQLELIIKHKNQFLDIWQLREKSLSPQDEQCAVEEALDWRREELLLLKKEKRCVDSLLKMCGNVKHLIQVDFGVLAVRHSQDLSSKRLNDTVTVRLSTSSNSQRATHYHLSSQVQEMAGKIDLLRDSHIFQLFWREAAEPLSEPKEDQEAAELLSEPEEESERHILELEEVYDYLYQPSYRKFIKLHQDLKSGEVTLAEIDVIFKDFVNKYTDLDSELKIMCTVDHQDQRDWIKDRVEQIKEYHHLHQAVHAAKVILQVKESLGLNGDFSVLNTLLNFTDNFDDFRRETLDQINQELIQAKKLLQDISEARCKGLQALSLRKEFICWVREALGGINELKVFVDLASISAGENDIDVDRVACFHDAVQGYASLLFKLDPSVDFSAFMKHLKKLWKALDKDQYLPRKLCDSARNLEWLKTVNESHGSVERSSLTLATAINQRGIYVIQAPKGGQKISPDTVLHLILPESPGSHEESREYSLEEVKELLNKLMLMSGKKDRNNTEVERFSEVFCSVQRLSQAFIDLHSAGNMLFRTWIAMAYCSPKQGVSLQMDFGLDLVTELKEGGDVTELLAALCRQMEHFLDSWKRFVTQKRMEHFYLNFYTAEQLVYLSTELRKQPPSDAALTMLSFIKSNCTLRDVLRASVGCGSEAARYRMRRVMEELPLMLLSEFSLVDKLRIIMEQSMRCLPAFLPDCLDLETLGHCLAHLAGMGGSPVERCLPRGLQVGQPNLVVCGHSEVLPAALAVYMQTPSQPLPTYDEVLLCTPATTFEEVALLLRRCLTLGSLGHKVYSLLFADQLSYEVARQAEELFHNLCTQQHREDYQLVMVCDGDWEHCYLPSAFSQHKVFVTPQAPLEAIQAYLAGHYRVPKQTLSAAAVFNDRLCVGIVASERAGVGKSLYVKRLHDKMKMQLNVKNVPLKTIRLIDPQVDESRVLGALLPFLDAQYQKVPVLFHLDVTSSVQTGIWVFLFKLLILQYLMDINGKMWLRNPCHLYIVEILERRTSVPSRSSSALRTRVPQFSFLDIFPKVTCRPPKEVIDMELSALRSDTEPGMDLWEFCSETFQRPYQYLRRFNQNQDLDTFQYQEGSVEGTPEECLQHFLFHCGVINPSWSELRNFARFLNYQLRDCEASLFCNPSFIGDTLRGFKKFVVTFMIFMARDFATPSLHTSDQSPGKHMVTMDGVREEDLAPFSLRKRWESEPHPYVFFNDDHTTMTFIGFHLQPNINGSVDAISHLTGKVIKRDVMTRDLYQGLLLQRVPFNVDFDKLPRHKKLERLCLTLGIPQATDPDKTYELTTDNMLKILAIEMRFRCGIPVIIMGETGCGKTRLIKFLSDLRRGGTNADTIKLVKVHGGTTADMIYSRVREAENVAFANKDQHQLDTILFFDEANTTEAISCIKEVLCDHMVDGQPLAEDSGLHIIAACNPYRKHSEEMICRLESAGLGYRVSMEETADRLGSIPLRQLVYRVHALPPSLIPLVWDFGQLSDVAEKLYIQQIVQRLVESISLDENGTRVITEVLCASQGFMRKTEDECSFVSLRDVERCVKVFRWFHEHSAMLLAQLNAFLSKSSVSKNHTERDPVLWSLMLAIGVCYHASLEKKDSYRKAIARFFPKPYDDSRLLLDEITRAQDLFLDGVPLRKTIAKNLALKENVFMMVVCIELKIPLFLVGKPGSSKSLAKTIVADAMQGPAAYSDLFRSLKQVHLVSFQCSPHSTPQGIISTFRQCARFQQGKDLQQYVSVVVLDEVGLAEDSPKMPLKTLHPLLEDGCIEDDPAPHKKVGFVGISNWALDPAKMNRGIFVSRGSPNETELIESAKGICSSDILVQDRVQGYFASFAKAYETVCKRQDKEFFGLRDYYSLIKMVFAAAKASNRKPSPQDIAQAVLRNFSGKDDIQALDIFLANLPEAKCSEEVSPMQLIKQNIFGPSQKVPGGEQEDAESRYLLVLTKNYVALQILQQTFFEGDQQPEIIFGSGFPKDQEYTQLCRNINRVKICMETGKMVLLLNLQNLYESLYDALNQYYVHLGGQKYVDLGLGTHRVKCRVHPNFRLIVIEEKDVVYKHFPIPLINRLEKHYLDINTVLEKWQKSIVEELCAWVEKFINVKAHHFQKRHKYSPSDVFIGYHSDACASVVLQVIERQGPRALTEELHQKVSEEAKSILLNCATPDAVVRLSAYSLGGFAAEWLSQEYFHRQRHNSFADFLQAHLHTADLERHAIFTEITTFSRLLTSHDCEILESEVTGRAPKPTLLWLQQFDTEYSFLKEVRNCLTNTAKCKILIFQTDFEDGIRSAQLIASAKYSVINEINKIRENEDRIFVYFITKLSRVGRGTAYVGFHGGLWQSVHIDDLRRSTLMVSDVTRLQHVTISQLFAPGDLPELGLEHRAEDGHEEAMETEASTSGEVAEVAEEAMETESSEKVGKETSELGGSDVSILDTTRLLRSCVQSAVGMLRDQNESCTRNMRRVVLLLGLLNEDDACHASFLRVSKMRLSVFLKKQEESQFHPLEWLAREACNQDALQEAGTFRHTLWKRVQGAVTPLLASMISFIDRDGNLELLTRPDTPPWARDLWMFIFSDTMLLNIPLVMNNERHKGEMAYIVVQNHMNLSENASNNVPFSWKIKDYLEELWVQAQYITDAEGLPKKFVDIFQQTPLGRFLAQLHGEPQQELLQCYLKDFILLTMRVSTEEELKFLQMALWSCTRKLKAASEAPEEEVSLPWVHLAYQRFRSRLQNFSRILTIYPQVLHSLMEARWNHELAGCEMTLDAFAAMACTEMLTRNTLKPSPQAWLQLVKNLSMPLELICSDEHMQGSGSLAQAVIREVRAQWSRIFSTALFVEHVLLGTESRVPELQGLVTEHVFLLDKCLRENSDVKTHGPFEAVMRTLCECKETASKTLSRFGIQPCSICLGDAKDPVCLPCDHVHCLRCLRAWFASEQMICPYCLTALPDEFSPAVSQAHREAIEKHARFRQMCNSFFVDLVSTICFKDNAPPEKEVIESLLSLLFVQKGRLRDAAQRHCEHTKSLSPFNDVVDKTPVIRSVILKLLLKYSFHDVKDYIQEYLTLLKKKAFITEDKTELYMLFINCLEDSILEKTSAYSRNDELNHLEEEGRFLKAYSPASRGREPANEASVEYLQEVARIRLCLDRAADFLSEPEGGPEMAKEKQCYLQQVKQFCIRVENDWHRVYLVRKLSSQRGMEFVQGLSKPGRPHQWVFPKDVVKQQGLRQDHPGQMDRYLVYGDEYKALRDAVAKAVLECKPLGIKTALKACKTPQSQQSAYFLLTLFREVAILYRSHNASLHPTPEQCEAVSKFIGECKILSPPDISRFATSLVDNSVPLLRAGPSDSNLDGTVTEMAIHAAAVLLCGQNELLEPLKNLAFSPATMAHAFLPTMPEDLLAQARRWKGLERVHWYTCPNGHPCSVGECGRPMEQSICIDCHAPIGGIDHKPRDGFHLVKDKADRTQTGHVLGNPQRRDVVTCDRGLPPVVFLLIRLLTHLALLLGASQSSQALINIIKPPVRDPKGFLQQHILKDLEQLAKMLGHSADETIGVVHLVLRRLLQEQHQLSSRRLLNFDTELSTKEMRNNWEKEIAAVISPELEHLDKTLPTMNNLISQDKRISSNPVAKIIYGDPVTFLPHLPRKSVVHCSKIWSCRKRITVEYLQHIVEQKNGKERVPILWHFLQKEAELRLVKFLPEILALQRDLVKQFQNVQQVEYSSIRGFLSKHSSDGLRQLLHNRITVFLSTWNKLRRSLETNGEINLPKDYCSTDLDLDTEFEILLPRRRGLGLCATALVSYLIRLHNEIVYAVEKLSKENNSYSVDAAEVTELHVISYEVERDLTPLILSNCQYQVEEGRETVQEFDLEKIQRQIVSRFLQGKPRLSLKGIPTLVYRHDWNYEHLFMDIKNKMAQDSLPSSVISAISGQLQSYSDACEVLSVVEVTLGFLSTAGGDPNMQLNVYTQDILQMGDQTIHVLKALNRCQLKHTIALWQFLSAHKSEQLLRLHKEPFGEISSRYKADLSPENAKLLSTFLNQTGLDAFLLELHEMIILKLKNPQTQTEERFRPQWSLRDTLVSYMQTKESEILPEMASQFPEEILLASCVSVWKTAAVLKWNREMR

SEQ ID NO: 74953 - protein, 106 aa, Homo sapiens
  Payload ID: 14813
  Gene Symbol: RNF213
  Gene Name: ring finger protein 213
  ENSP ID: ENSP00000460462
  MOD_RES (1)..(1): Any amino acid
XLSSQRGMEFVQGLSKPGRPHQWVFPKDVVKQQGLRQDHPGQMDRYLVYGDEYKALRDAVAKAVLECKPLGIKTALKVGWARGFSLIPGGIPWSLHVPWFMSNDAG

SEQ ID NO: 74954 - protein, 5207 aa, Homo sapiens
  Payload ID: 14813
  Gene Symbol: RNF213
  Gene Name: ring finger protein 213
  ENSP ID: ENSP00000464087
MECPSCQHVSKEETPKFCSQCGERLPPAAPIADSENNNSTMASASEGEMECGQELKEEGGPCLFPGSDSWQENPEEPCSKASWTVQESKKKKRKKKKKGNKSASSELASLPLSPASPCHLTLLSNPWPQDTALPHSQAQQSGPTGQPSQPPGTATTPLEGDGLSAPTEVGDSPLQAQALGEAGVATGSEAQSSPQFQDHTEGEDQDASIPSGGRGLSQEGTGPPTSAGEGHSRTEDAAQELLLPESKGGSSEPGTELQTTEQQAGASASMAVDAVAEPANAVKGAGKEMKEKTQRMKQPPATTPPFKTHCQEAETKTKDEMAAAEEKVGKNEQGEPEDLKKPEGKNRSAAAVKNEKEQKNQEADVQEVKASTLSPGGGVTVFFHAIISLHFPFNPDLHKVFIRGGEEFGESKWDSNICELHYTRDLGHDRVLVEGIVCISKKHLDKYIPYKYVIYNGESFEYEFIYKHQQKKGEYVNRCLFIKSSLLGSGDWHQYYDIVYMKPHGRLQKVMNHITDGPRKDLVKGKQIAAALMLDSTFSILQTWDTINLNSFFTQFEQFCFVLQQPMIYEGQAQLWTDLQYREKEVKRYLWQHLKKHVVPLPDGKSTDFLPVDCPVRSKLKTGLIVLFVVEKIELLLEGSLDWLCHLLTSDASSPDEFHRDLSHILGIPQSWRLYLVNLCQRCMDTRTYTWLGALPVLHCCMELAPRHKDAWRQPEDTWAALEGLSFSPFREQMLDTSSLLQFMREKQHLLSIDEPLFRSWFSLLPLSHLVMYMENFIEHLGRFPAHILDCLSGIYYRLPGLEQVLNTQDVQDVQNVQNILEMLLRLLDTYRDKIPEEALSPSYLTVCLKLHEAICSSTKLLKFYELPALSAEIVCRMIRLLSLVDSAGQRDETGNNSVQTVFQGTLAATKRWLREVFTKNMLTSSGASFTYVKEIEVWRRLVEIQFPAEHGWKESLLGDMEWRLTKEEPLSQITAYCNSCWDTKGLEDSVAKTFEKCIIEAVSSACQSQTSILQGFSYSDLRKFGIVLSAVITKSWPRTADNFDDILKHLLTLADVKHVFRLCGTDEKILANVTEDAKRLIAVADSVLTKVVGDLLSGTILVGQLELIIKHKNQFLDIWQLREKSLSPQDEQCAVEEALDWRREELLLLKKEKRCVDSLLKMCGNVKHLIQVDFGVLAVRHSQDLSSKRLNDTVTVRLSTSSNSQRATHYHLSSQVQEMAGKIDLLRDSHIFQLFWREAAEPLSEPKEDQEAAELLSEPEEESERHILELEEVYDYLYQPSYRKFIKLHQDLKSGEVTLAEIDVIFKDFVNKYTDLDSELKIMCTVDHQDQRDWIKDRVEQIKEYHHLHQAVHAAKVILQVKESLGLNGDFSVLNTLLNFTDNFDDFRRETLDQINQELIQAKKLLQDISEARCKGLQALSLRKEFICWVREALGGINELKVFVDLASISAGENDIDVDRVACFHDAVQGYASLLFKLDPSVDFSAFMKHLKKLWKALDKDQYLPRKLCDSARNLEWLKTVNESHGSVERSSLTLATAINQRGIYVIQAPKGGQKISPDTVLHLILPESPGSHEESREYSLEEVKELLNKLMLMSGKKDRNNTEVERFSEVFCSVQRLSQAFIDLHSAGNMLFRTWIAMAYCSPKQGVSLQMDFGLDLVTELKEGGDVTELLAALCRQMEHFLDSWKRFVTQKRMEHFYLNFYTAEQLVYLSTELRKQPPSDAALTMLSFIKSNCTLRDVLRASVGCGSEAARYRMRRVMEELPLMLLSEFSLVDKLRIIMEQSMRCLPAFLPDCLDLETLGHCLAHLAGMGGSPVERCLPRGLQVGQPNLVVCGHSEVLPAALAVYMQTPSQPLPTYDEVLLCTPATTFEEVALLLRRCLTLGSLGHKVYSLLFADQLSYEVARQAEELFHNLCTQQHREDYQLVMVCDGDWEHCYLPSAFSQHKVFVTPQAPLEAIQAYLAGHYRVPKQTLSAAAVFNDRLCVGIVASERAGVGKSLYVKRLHDKMKMQLNVKNVPLKTIRLIDPQVDESRVLGALLPFLDAQYQKVPVLFHLDVTSSVQTGIWVFLFKLLILQYLMDINGKMWLRNPCHLYIVEILERRTSVPSRSSSALRTRVPQFSFLDIFPKVTCRPPKEVIDMELSALRSDTEPGMDLWEFCSETFQRPYQYLRRFNQNQDLDTFQYQEGSVEGTPEECLQHFLFHCGVINPSWSELRNFARFLNYQLRDCEASLFCNPSFIGDTLRGFKKFVVTFMIFMARDFATPSLHTSDQSPGKHMVTMDGVREEDLAPFSLRKRWESEPHPYVFFNDDHTTMTFIGFHLQPNINGSVDAISHLTGKVIKRDVMTRDLYQGLLLQRVPFNVDFDKLPRHKKLERLCLTLGIPQATDPDKTYELTTDNMLKILAIEMRFRCGIPVIIMGETGCGKTRLIKFLSDLRRGGTNADTIKLVKVHGGTTADMIYSRVREAENVAFANKDQHQLDTILFFDEANTTEAISCIKEVLCDHMVDGQPLAEDSGLHIIAACNPYRKHSEEMICRLESAGLGYRVSMEETADRLGSIPLRQLVYRVHALPPSLIPLVWDFGQLSDVAEKLYIQQIVQRLVESISLDENGTRVITEVLCASQGFMRKTEDECSFVSLRDVERCVKVFRWFHEHSAMLLAQLNAFLSKSSVSKNHTERDPVLWSLMLAIGVCYHASLEKKDSYRKAIARFFPKPYDDSRLLLDEITRAQDLFLDGVPLRKTIAKNLALKENVFMMVVCIELKIPLFLVGKPGSSKSLAKTIVADAMQGPAAYSDLFRSLKQVHLVSFQCSPHSTPQGIISTFRQCARFQQGKDLQQYVSVVVLDEVGLAEDSPKMPLKTLHPLLEDGCIEDDPAPHKKVGFVGISNWALDPAKMNRGIFVSRGSPNETELIESAKGICSSDILVQDRVQGYFASFAKAYETVCKRQDKEFFGLRDYYSLIKMVFAAAKASNRKPSPQDIAQAVLRNFSGKDDIQALDIFLANLPEAKCSEEVSPMQLIKQNIFGPSQKVPGGEQEDAESRYLLVLTKNYVALQILQQTFFEGDQQPEIIFGSGFPKDQEYTQLCRNINRVKICMETGKMVLLLNLQNLYESLYDALNQYYVHLGGQKYVDLGLGTHRVKCRVHPNFRLIVIEEKDVVYKHFPIPLINRLEKHYLDINTVLEKWQKSIVEELCAWVEKFINVKAHHFQKRHKYSPSDVFIGYHSDACASVVLQVIERQGPRALTEELHQKVSEEAKSILLNCATPDAVVRLSAYSLGGFAAEWLSQEYFHRQRHNSFADFLQAHLHTADLERHAIFTEITTFSRLLTSHDCEILESEVTGRAPKPTLLWLQQFDTEYSFLKEVRNCLTNTAKCKILIFQTDFEDGIRSAQLIASAKYSVINEINKIRENEDRIFVYFITKLSRVGRGTAYVGFHGGLWQSVHIDDLRRSTLMVSDVTRLQHVTISQLFAPGDLPELGLEHRAEDGHEEAMETEASTSGEVAEVAEEAMETESSEKVGKETSELGGSDVSILDTTRLLRSCVQSAVGMLRDQNESCTRNMRRVVLLLGLLNEDDACHASFLRVSKMRLSVFLKKQEESQFHPLEWLAREACNQDALQEAGTFRHTLWKRVQGAVTPLLASMISFIDRDGNLELLTRPDTPPWARDLWMFIFSDTMLLNIPLVMNNERHKGEMAYIVVQNHMNLSENASNNVPFSWKIKDYLEELWVQAQYITDAEGLPKKFVDIFQQTPLGRFLAQLHGEPQQELLQCYLKDFILLTMRVSTEEELKFLQMALWSCTRKLKAASEAPEEEVSLPWVHLAYQRFRSRLQNFSRILTIYPQVLHSLMEARWNHELAGCEMTLDAFAAMACTEMLTRNTLKPSPQAWLQLVKNLSMPLELICSDEHMQGSGSLAQAVIREVRAQWSRIFSTALFVEHVLLGTESRVPELQGLVTEHVFLLDKCLRENSDVKTHGPFEAVMRTLCECKETASKTLSRFGIQPCSICLGDAKDPVCLPCDHVHCLRCLRAWFASEQMICPYCLTALPDEFSPAVSQAHREAIEKHARFRQMCNSFFVDLVSTICFKDNAPPEKEVIESLLSLLFVQKGRLRDAAQRHCEHTKSLSPFNDVVDKTPVIRSVILKLLLKYSFHDVKDYIQEYLTLLKKKAFITEDKTELYMLFINCLEDSILEKTSAYSRNDELNHLEEEGRFLKAYSPASRGREPANEASVEYLQEVARIRLCLDRAADFLSEPEGGPEMAKEKQCYLQQVKQFCIRVENDWHRVYLVRKLSSQRGMEFVQGLSKPGRPHQWVFPKDVVKQQGLRQDHPGQMDRYLVYGDEYKALRDAVAKAVLECKPLGIKTALKACKTPQSQQSAYFLLTLFREVAILYRSHNASLHPTPEQCEAVSKFIGECKILSPPDISRFATSLVDNSVPLLRAGPSDSNLDGTVTEMAIHAAAVLLCGQNELLEPLKNLAFSPATMAHAFLPTMPEDLLAQARRWKGLERVHWYTCPNGHPCSVGECGRPMEQSICIDCHAPIGGIDHKPRDGFHLVKDKADRTQTGHVLGNPQRRDVVTCDRGLPPVVFLLIRLLTHLALLLGASQSSQALINIIKPPVRDPKGFLQQHILKDLEQLAKMLGHSADETIGVVHLVLRRLLQEQHQLSSRRLLNFDTELSTKEMRNNWEKEIAAVISPELEHLDKTLPTMNNLISQDKRISSNPVAKIIYGDPVTFLPHLPRKSVVHCSKIWSCRKRITVEYLQHIVEQKNGKERVPILWHFLQKEAELRLVKFLPEILALQRDLVKQFQNVQQVEYSSIRGFLSKHSSDGLRQLLHNRITVFLSTWNKLRRSLETNGEINLPKDYCSTDLDLDTEFEILLPRRRGLGLCATALVSYLIRLHNEIVYAVEKLSKENNSYSVDAAEVTELHVISYEVERDLTPLILSNCQYQVEEGRETVQEFDLEKIQRQIVSRFLQGKPRLSLKGIPTLVYRHDWNYEHLFMDIKNKMAQDSLPSSVISAISGQLQSYSDACEVLSVVEVTLGFLSTAGGDPNMQLNVYTQDILQMGDQTIHVLKALNRCQLKHTIALWQFLSAHKSEQLLRLHKEPFGEISSRYKADLSPENAKLLSTFLNQTGLDAFLLELHEMIILKLKNPQTQTEERFRPQWSLRDTLVSYMQTKESEILPEMASQFPEEILLASCVSVWKTAAVLKWNREMR

SEQ ID NO: 74955 - protein, 703 aa, Homo sapiens
  Payload ID: 14814
  Gene Symbol: RNF214
  Gene Name: ring finger protein 214
  Uniprot ID: Q8ND24
  ENSP ID: ENSP00000300650
MAASEVAGVVANAPSPPESSSLCASKSDEGLPDGLSTKDSAQKQKNSPLLSVSSQTITKENNRNVHLEHSEQNPGSSAGDTSAAHQVVLGENLIATALCLSGSGSQSDLKDVASTAGEEGDTSLRESLHPVTRSLKAGCHTKQLASRNCSEEKSPQTSILKEGNRDTSLDFRPVVSPANGVEGVRVDQDDDQDSSSLKLSQNIAVQTDFKTADSEVNTDQDIEKNLDKMMTERTLLKERYQEVLDKQRQVENQLQVQLKQLQQRREEEMKNHQEILKAIQDVTIKREETKKKIEKEKKEFLQKEQDLKAEIEKLCEKGRREVWEMELDRLKNQDGEINRNIMEETERAWKAEILSLESRKELLVLKLEEAEKEAELHLTYLKSTPPTLETVRSKQEWETRLNGVRIMKKNVRDQFNSHIQLVRNGAKLSSLPQIPTPTLPPPPSETDFMLQVFQPSPSLAPRMPFSIGQVTMPMVMPSADPRSLSFPILNPALSQPSQPSSPLPGSHGRNSPGLGSLVSPHGPHMPPAASIPPPPGLGGVKASAETPRPQPVDKLEKILEKLLTRFPQCNKAQMTNILQQIKTARTTMAGLTMEELIQLVAARLAEHERVAASTQPLGRIRALFPAPLAQISTPMFLPSAQVSYPGRSSHAPATCKLCLMCQKLVQPSELHPMACTHVLHKECIKFWAQTNTNDTCPFCPTLK

SEQ ID NO: 74956 - protein, 703 aa, Homo sapiens; identical to SEQ ID NO: 74955
  Payload ID: 14814
  Gene Symbol: RNF214
  Gene Name: ring finger protein 214
  Uniprot ID: Q8ND24
  ENSP ID: ENSP00000431643

SEQ ID NO: 74957 - protein, 513 aa, Homo sapiens
  Payload ID: 14814
  Gene Symbol: RNF214
  Gene Name: ring finger protein 214
  ENSP ID: ENSP00000432903
MAASEVAGVVANAPSPPESSSLCASKSDEGLPDGLSTKDSAQKQKNSPLLSTDFKTADSEVNTDQDIEKNLDKMMTERTLLKERYQEVLDKQRQVENQLQVQLKQLQQRREEEMKNHQEILKAIQDVTIKREETKKKIEKEKKEFLQKEQDLKAEIEKLCEKGRREVWEMELDRLKNQDGEINRNIMEETERAWKAEILSLESRKELLVLKLEEAEKEAELHLTYLKSTPPTLETVRSKQEWETRLNGVRIMKKNVRDQFNSHIQLVRNGAKLSSLPQIPTPTLPPPPSETDFMLQVFQPSPSLAPRMPFSIGQVTMPMVMPSADPRSLSFPILNPALSQPSQPSSPLPGSHGRNSPGLGSLVSPHGPHMPPAASIPPPPGLGGVKASAETPRPQPVDKLEKILEKLLTRFPQCNKAQMTNILQQIKTARTTMAGLTMEELIQLVAARLAEHERVAASTQAPATCKLCLMCQKLVQPSELHPMACTHVLHKECIKFWAQTNTNDTCPFCPTLK

SEQ ID NO: 74958 - protein, 146 aa, Homo sapiens
  Payload ID: 14814
  Gene Symbol: RNF214
  Gene Name: ring finger protein 214
  ENSP ID: ENSP00000434186
MAASEVAGVVANAPSPPESSSLCASKSDEGLPDGLSTKDSAQKQKNSPLLSVSSQTITKENNRNVHLEHSEQNPGSSAGDTSAAHQVVLGENLIATALCLSGSGSQSDLKDVASTAGEEGDTSLRESLHPVTRSLKAGCHTKQLAS

SEQ ID NO: 74959 - protein, 548 aa, Homo sapiens
  Payload ID: 14814
  Gene Symbol: RNF214
  Gene Name: ring finger protein 214
  Uniprot ID: Q8ND24
  ENSP ID: ENSP00000435361
MAASEVAGVVANAPSPPESSSLCASKSDEGLPDGLSTKDSAQKQKNSPLLSTDFKTADSEVNTDQDIEKNLDKMMTERTLLKERYQEVLDKQRQVENQLQVQLKQLQQRREEEMKNHQEILKAIQDVTIKREETKKKIEKEKKEFLQKEQDLKAEIEKLCEKGRREVWEMELDRLKNQDGEINRNIMEETERAWKAEILSLESRKELLVLKLEEAEKEAELHLTYLKSTPPTLETVRSKQEWETRLNGVRIMKKNVRDQFNSHIQLVRNGAKLSSLPQIPTPTLPPPPSETDFMLQVFQPSPSLAPRMPFSIGQVTMPMVMPSADPRSLSFPILNPALSQPSQPSSPLPGSHGRNSPGLGSLVSPHGPHMPPAASIPPPPGLGGVKASAETPRPQPVDKLEKILEKLLTRFPQCNKAQMTNILQQIKTARTTMAGLTMEELIQLVAARLAEHERVAASTQPLGRIRALFPAPLAQISTPMFLPSAQVSYPGRSSHAPATCKLCLMCQKLVQPSELHPMACTHVLHKECIKFWAQTNTNDTCPFCPTLK

SEQ ID NO: 74960 - protein, 343 aa, Homo sapiens
  Payload ID: 14815
  Gene Symbol: RNF215
  Gene Name: ring finger protein 215
  ENSP ID: ENSP00000215798
  MOD_RES (1)..(1): Any amino acid
XVRLPRQDALVLEGVRIGSEADPAPLLGGRLLLMDIVDAEQEAPVEGWIAVAYVGKEQAAQFHQENKGSGPQAYPKALVQQMRRALFLGASALLLLILNHNVVRELDISQLLLRPVIVLHYSSNVTKLLDALLQRTQATAEITSGESLSANIEWKLTLWTTCGLSKDGYGGWQDLVCLGGSRAQEQKPLQQLWNAILLVAMLLCTGLVVQAQRQASRQSQRELGGQVDLFKRRVVRRLASLKTRRCRLSRAAQGLPDPGAETCAVCLDYFCNKQWLRVLPCKHEFHRDCVDPWLMLQQTCPLCKFNVLGEHQGWGPSAYSACSSPDASLPVLLPLPCREPLLR

SEQ ID NO: 74961 - protein, 377 aa, Homo sapiens
  Payload ID: 14815
  Gene Symbol: RNF215
  Gene Name: ring finger protein 215
  Uniprot ID: Q9Y6U7
  ENSP ID: ENSP00000371800
MGPAARPALRSPPPPPPPPPSPLLLLLPLLPLWLGLAGPGAAADGSEPAAGAGRGGARAVRVDVRLPRQDALVLEGVRIGSEADPAPLLGGRLLLMDIVDAEQEAPVEGWIAVAYVGKEQAAQFHQENKGSGPQAYPKALVQQMRRALFLGASALLLLILNHNVVRELDISQLLLRPVIVLHYSSNVTKLLDALLQRTQATAEITSGESLSANIEWKLTLWTTCGLSKDGYGGWQDLVCLGGSRAQEQKPLQQLWNAILLVAMLLCTGLVVQAQRQASRQSQRELGGQVDLFKRRVVRRLASLKTRRCRLSRAAQGLPDPGAETCAVCLDYFCNKQWLRVLPCKHEFHRDCVDPWLMLQQTCPLCKFNVLGNRYSDD

SEQ ID NO: 74962 - protein, 34 aa, Homo sapiens
  Payload ID: 14815
  Gene Symbol: RNF215
  Gene Name: ring finger protein 215
  ENSP ID: ENSP00000396278
DCVDPWLMLQQTCPLCKFNVLDGGSPMARKVDGL

SEQ ID NO: 74963 - protein, 99 aa, Homo sapiens
  Payload ID: 14815
  Gene Symbol: RNF215
  Gene Name: ring finger protein 215
  ENSP ID: ENSP00000404738
MDIVDAEQEAPVEGWIAVAYVGKEQAAQFHQENKGSGPQAYPKALVQQMRRALFLGASALLLLILNHNVVRELDISQLLLRPVIVLHYSSNVTKLLDAL

SEQ ID NO: 74964 - protein, 30 aa, Homo sapiens
  Payload ID: 14815
  Gene Symbol: RNF215
  Gene Name: ring finger protein 215
  ENSP ID: ENSP00000485721
HRDCVDPWLMLQQTCPLCKFNVLGNRYSDD

SEQ ID NO: 74965 - protein, 135 aa, Homo sapiens
  Payload ID: 14815
  Gene Symbol: RNF215
  Gene Name: ring finger protein 215
  ENSP ID: ENSP00000486180
MLPSGSRSPGELLPLLVQFPAMGNSYGAMTCLTRWLRRGQKGLDDVSRAANCTSSCQLCKRICPSALGVWRGWENPGHLISNPVPRWVPSTPMPWGPGQWAAGGCVLGTSPMVWFGDPFQEPRRGTHRSRARISM

SEQ ID NO: 74966 - protein, 30 aa, Homo sapiens; identical to SEQ ID NO: 74964
  Payload ID: 14815
  Gene Symbol: RNF215
  Gene Name: ring finger protein 215
  ENSP ID: ENSP00000486757

SEQ ID NO: 74967 - protein, 58 aa, Homo sapiens
  Payload ID: 14815
  Gene Symbol: RNF215
  Gene Name: ring finger protein 215
  ENSP ID: ENSP00000487588
HRDCVDPWLMLQQTCPLCKFNVLGEHQGWGPSAYSACSSPDASLPVLLPLPCREPLLR

SEQ ID NO: 74968 - protein, 326 aa, Homo sapiens
  Payload ID: 14816
  Gene Symbol: RNF216
  Gene Name: ring finger protein 216
  ENSP ID: ENSP00000374550
MEEGNNNEEVIHLNNFHCHRGQEWINLRDGPITISDSSDEERIPMLVTPAPQQHEEEDLDDDVILTEDDSEDDYGEFLDLGPPGISEFTKPSGQTEREPKPGPSHNQAANDIVNPRSEQKVIILEEGSLLYTESDPLETQNQSSEDSETELLSNLGESAALADDQAIEEDCWLDHPYFQSLNQQPREITNQVVPQERQPEAELGRLLFQHEFPGPAFPRPEPQQGGISGPSSPQPAHPLGEFEDQQLASDDEEPGPAFPMQESQEPNLENIWGQEAAEVDQELVELLVKETRCSIFVEAMKNGSVKWGQRTRSLKTFLDLIFYVDR

SEQ ID NO: 74969 - protein, 923 aa, Homo sapiens
  Payload ID: 14816
  Gene Symbol: RNF216
  Gene Name: ring finger protein 216
  Uniprot ID: Q9NWF9
  ENSP ID: ENSP00000374552
MEEGNNNEEVIHLNNFHCHRGQEWINLRDGPITISDSSDEERIPMLVTPAPQQHEEEDLDDDVILTETNKPQRSRPNLIKPAAQWQDLKRLGEERPKKSRAAFESDKSSYFSVCNNPLFDSGAQDDSEDDYGEFLDLGPPGISEFTKPSGQTEREPKPGPSHNQAANDIVNPRSEQKVIILEEGSLLYTESDPLETQNQSSEDSETELLSNLGESAALADDQAIEEDCWLDHPYFQSLNQQPREITNQVVPQERQPEAELGRLLFQHEFPGPAFPRPEPQQGGISGPSSPQPAHPLGEFEDQQLASDDEEPGPAFPMQESQEPNLENIWGQEAAEVDQELVELLVKETEARFPDVANGFIEEIIHFKNYYDLNVLCNFLLENPDYPKREDRIIINPSSSLLASQDETKLPKIDFFDYSKLTPLDQRCFIQAADLLMADFKVLSSQDIKWALHELKGHYAITRKALSDAIKKWQELSPETSGKRKKRKQMNQYSYIDFKFEQGDIKIEKRMFFLENKRRHCRSYDRRALLPAVQQEQEFYEQKIKEMAEHEDFLLALQMNEEQYQKDGQLIECRCCYGEFPFEELTQCADAHLFCKECLIRYAQEAVFGSGKLELSCMEGSCTCSFPTSELEKVLPQTILYKYYERKAEEEVAAAYADELVRCPSCSFPALLDSDVKRFSCPNPHCRKETCRKCQGLWKEHNGLTCEELAEKDDIKYRTSIEEKMTAARIRKCHKCGTGLIKSEGCNRMSCRCGAQMCYLCRVSINGYDHFCQHPRSPGAPCQECSRCSLWTDPTEDDEKLIEEIQKEAEEEQKRKNGENTFKRIGPPLEKPVEKVQRVEALPRPVPQNLPQPQMPPYAFAHPPFPLPPVRPVFNNFPLNMGPIPAPYVPPLPNVRVNYDFGPIHMPLEHNLPMHFGPQPRHRF

SEQ ID NO: 74970 - protein, 19 aa, Homo sapiens
  Payload ID: 14816
  Gene Symbol: RNF216
  Gene Name: ring finger protein 216
  ENSP ID: ENSP00000396829
MEEGNNNEEVIHLNNFHCH

SEQ ID NO: 74971 - protein, 866 aa, Homo sapiens
  Payload ID: 14816
  Gene Symbol: RNF216
  Gene Name: ring finger protein 216
  Uniprot ID: Q9NWF9
  ENSP ID: ENSP00000404602
MEEGNNNEEVIHLNNFHCHRGQEWINLRDGPITISDSSDEERIPMLVTPAPQQHEEEDLDDDVILTEDDSEDDYGEFLDLGPPGISEFTKPSGQTEREPKPGPSHNQAANDIVNPRSEQKVIILEEGSLLYTESDPLETQNQSSEDSETELLSNLGESAALADDQAIEEDCWLDHPYFQSLNQQPREITNQVVPQERQPEAELGRLLFQHEFPGPAFPRPEPQQGGISGPSSPQPAHPLGEFEDQQLASDDEEPGPAFPMQESQEPNLENIWGQEAAEVDQELVELLVKETEARFPDVANGFIEEIIHFKNYYDLNVLCNFLLENPDYPKREDRIIINPSSSLLASQDETKLPKIDFFDYSKLTPLDQRCFIQAADLLMADFKVLSSQDIKWALHELKGHYAITRKALSDAIKKWQELSPETSGKRKKRKQMNQYSYIDFKFEQGDIKIEKRMFFLENKRRHCRSYDRRALLPAVQQEQEFYEQKIKEMAEHEDFLLALQMNEEQYQKDGQLIECRCCYGEFPFEELTQCADAHLFCKECLIRYAQEAVFGSGKLELSCMEGSCTCSFPTSELEKVLPQTILYKYYERKAEEEVAAAYADELVRCPSCSFPALLDSDVKRFSCPNPHCRKETCRKCQGLWKEHNGLTCEELAEKDDIKYRTSIEEKMTAARIRKCHKCGTGLIKSEGCNRMSCRCGAQMCYLCRVSINGYDHFCQHPRSPGAPCQECSRCSLWTDPTEDDEKLIEEIQKEAEEEQKRKNGENTFKRIGPPLEKPVEKVQRVEALPRPVPQNLPQPQMPPYAFAHPPFPLPPVRPVFNNFPLNMGPIPAPYVPPLPNVRVNYDFGPIHMPLEHNLPMHFGPQPRHRF

SEQ ID NO: 74972 - protein, 49 aa, Homo sapiens
  Payload ID: 14816
  Gene Symbol: RNF216
  Gene Name: ring finger protein 216
  ENSP ID: ENSP00000409837
MEEGNNNEEVIHLNNFHCHRGQDGILLIAQARVQWRNLDSPRAPPPGFK

SEQ ID NO: 74973 - protein, 275 aa, Homo sapiens
  Payload ID: 14817
  Gene Symbol: RNF217
  Gene Name: ring finger protein 217
  Uniprot ID: Q8TC41
  ENSP ID: ENSP00000352734
MKVQLGQVEIKCPITECFEFLEETTVVYNLTHEDSIKYKYFLELGRIDSSTKPCPQCKHFTTFKKKGHIPTPSRSESKYKIQCPTCQFVWCFKCHSPWHEGVNCKEYKKGDKLLRHWASEIEHGQRNAQKCPKCKIHIQRTEGCDHMTCSQCNTNFCYRCGERYRQLRFFGDHTSNLSIFGCKYRYLPERPHLRRLVRGSVCAGKLFIAPLIMVLGLALGAIAVVIVEEIKTYWNLISGRTRNQTQHLAPQPVLLSDMLYCLKQVFICISYLLPL

SEQ ID NO: 74974 - protein, 104 aa, Homo sapiens
  Payload ID: 14817
  Gene Symbol: RNF217
  Gene Name: ring finger protein 217
  ENSP ID: ENSP00000357399
MTCSQCNTNFCYRCGERYRQLRFFGDHTSNLSIFGCKYRYLPERPHLRRLVRGSVCAGKLFIAPLIMVLGLALGAIAVVIGLFVFPIYCLCKKQRKRSRTGMHW

SEQ ID NO: 74975 - protein, 65 aa, Homo sapiens
  Payload ID: 14817
  Gene Symbol: RNF217
  Gene Name: ring finger protein 217
  ENSP ID: ENSP00000404282
  MOD_RES (1)..(1): Any amino acid
XDSIKYKYFLELGRIDSSTKPCPQCKHFTTFKKKGHIPTPSRSESKYKQNGRMKWFQRLFGVISI

SEQ ID NO: 74976 - protein, 2 aa, Homo sapiens
  Payload ID: 14817
  Gene Symbol: RNF217
  Gene Name: ring finger protein 217
  ENSP ID: ENSP00000427711
MK

SEQ ID NO: 74977 - protein, 542 aa, Homo sapiens
  Payload ID: 14817
  Gene Symbol: RNF217
  Gene Name: ring finger protein 217
  Uniprot ID: Q8TC41
  ENSP ID: ENSP00000428698
MGEEQSTVSGGGGPQESQTLASGTAGHPEPPRPQGDSARAPPLRAASAEPSGGGCGSDWGCADTSAPEPARSLGPPGWSKSRAPAQPAGLALTGPLNPQTLPLQLELEEEEEEAGDRKEGGDEQQEAPPGEELEPRTRVGAADGLVLDVLGQRRPSLAKRQVFCSVYCVESDLPEAPASEQLSPPASPPGAPPVLNPPSTRSSFPSPRLSLPTDSLSPDGGSIELEFYLAPEPFSMPSLLGAPPYSGLGGVGDPYVPLMVLMCRVCLEDKPIKPLPCCKKAVCEECLKVYLSAQVQLGQVEIKCPITECFEFLEETTVVYNLTHEDSIKYKYFLELGRIDSSTKPCPQCKHFTTFKKKGHIPTPSRSESKYKIQCPTCQFVWCFKCHSPWHEGVNCKEYKKGDKLLRHWASEIEHGQRNAQKCPKCKIHIQRTEGCDHMTCSQCNTNFCYRCGERYRQLRFFGDHTSNLSIFGCKYRYLPERPHLRRLVRGSVCAGKLFIAPLIMVLGLALGAIAVVIGLFVFPIYCLCKKQRKRSRTGMHW

SEQ ID NO: 74978 - protein, 78 aa, Homo sapiens
  Payload ID: 14817
  Gene Symbol: RNF217
  Gene Name: ring finger protein 217
  ENSP ID: ENSP00000429012
  MOD_RES (1)..(1): Any amino acid
XVPLMVLMCRVCLEDKPIKPLPCCKKAVCEECLKVYLSAQAGVQWHDLGSRKPPHPRFKRFSCLSLPSSWDYRYNLAK

SEQ ID NO: 74979 - protein, 306 aa, Homo sapiens
  Payload ID: 14817
  Gene Symbol: RNF217
  Gene Name: ring finger protein 217
  ENSP ID: ENSP00000452812
MCRVCLEDKPIKPLPCCKKAVCEECLKVYLSAQVQLGQVEIKCPITECFEFLEETTVVYNLTHEDSIKYKYFLELGRIDSSTKPCPQCKHFTTFKKKGHIPTPSRSESKYKIQCPTCQFVWCFKCHSPWHEGVNCKEYKKGDKLLRHWASEIEHGQRNAQKCPKCKIHIQRTEGCDHMTCSQCNTNFCYRCGERYRQLRFFGDHTSNLSIFGCKYRYLPERPHLRRLVRGSVCAGKLFIAPLIMVLGLALGAIAVVIVEEIKTYWNLISGRTRNQTQHLAPQPVLLSDMLYCLKQVFICISYLLPL

SEQ ID NO: 74980 - protein, 726 aa, Homo sapiens
  Payload ID: 14818
  Gene Symbol: RNF219
  Gene Name: ring finger protein 219
  Uniprot ID: Q5W0B1
  ENSP ID: ENSP00000282003
MAQTVQNVTLSLTLPITCHICLGKVRQPVICINNHVFCSICIDLWLKNNSQCPACRVPITPENPCKEIIGGTSESEPMLSHTVRKHLRKTRLELLHKEYEDEIDCLQKEVEELKSKNLSLESQIKTILDPLTLVQGNQNEDKHLVTDNPSKINPETVAEWKKKLRTANEIYEKVKDDVDKLKEANKKLKLENGGLVRENLRLKAEVDNRSPQKFGRFAVAALQSKVEQYERETNRLKKALERSDKYIEELESQVAQLKNSSEEKEAMNSICQTALSADGKGSKGSEEDVVSKNQGDSARKQPGSSTSSSSHLAKPSSSRLCDTSSARQESTSKADLNCSKNKDLYQEQVEVMLDVTDTSMDTYLEREWGNKPSDCVPYKDEELYDLPAPCTPLSLSCLQLSTPENRESSVVQAGGSKKHSNHLRKLVFDDFCDSSNVSNKDSSEDDISRSENEKKSECFSSPKTGFWDCCSTSYAQNLDFESSEGNTIANSVGEISSKLSEKSGLCLSKRLNSIRSFEMNRTRTSSEASMDAAYLDKISELDSMMSESDNSKSPCNNGFKSLDLDGLSKSSQGSEFLEEPDKLEEKTELNLSKGSLTNDQLENGSEWKPTSFFLLSPSDQEMNEDFSLHSSSCPVTNEIKPPSCLFQTEFSQGILLSSSHRLFEDQRFGSSLFKMSSEMHSLHNHLQSPWSTSFVPEKRNKNVNQSTKRKIQSSLSSASPSKATKS

SEQ ID NO: 74981 - protein, 260 aa, Homo sapiens
  Payload ID: 14819
  Gene Symbol: RNF220
  Gene Name: ring finger protein 220
  ENSP ID: ENSP00000335580
MPRARSGRRSRGAGGREETFLRVRANRQTRLNARIGKMKRRKQDEGQVCPLCNRPLAGSEQEMSRHVEHCLSKREGSCMAEDDAVDIEHENNNRFEEYEWCGQKRIRATTLLEGGFRGSGFIMCSGKENPDSDADLDVDGDDTLEYGKPQYTEADVIPCTGEEPGEAKEREALRGAVLNGGPPSTRITPEFSKWASDEMPSTSNGESSKQEAMQKTCKNSDIEKITEDSAVTTFEALKARVRELERQLSRGDRYKCLICM

SEQ ID NO: 74982 - protein, 566 aa, Homo sapiens
  Payload ID: 14819
  Gene Symbol: RNF220
  Gene Name: ring finger protein 220
  Uniprot ID: Q5VTB9
  ENSP ID: ENSP00000347548
MDLHRAAFKMENSSYLPNPLASPALMVLASTAEASRDASIPCQQPRPFGVPVSVDKDVHIPFTNGSYTFASMYHRQGGVPGTFANRDFPPSLLHLHPQFAPPNLDCTPISMLNHSGVGAFRPFASTEDRESYQSAFTPAKRLKNCHDTESPHLRFSDADGKEYDFGTQLPSSSPGSLKVDDTGKKIFAVSGLISDREASSSPEDRNDRCKKKAAALFDSQAPICPICQVLLRPSELQEHMEQELEQLAQLPSSKNSLLKDAMAPGTPKSLLLSASIKREGESPTASPHSSATDDLHHSDRYQTFLRVRANRQTRLNARIGKMKRRKQDEGQREGSCMAEDDAVDIEHENNNRFEEYEWCGQKRIRATTLLEGGFRGSGFIMCSGKENPDSDADLDVDGDDTLEYGKPQYTEADVIPCTGEEPGEAKEREALRGAVLNGGPPSTRITPEFSKWASDEMPSTSNGESSKQEAMQKTCKNSDIEKITEDSAVTTFEALKARVRELERQLSRGDRYKCLICMDSYSMPLTSIQCWHVHCEECWLRTLGAKKLCPQCNTITAPGDLRRIYL

SEQ ID NO: 74983 - protein, 566 aa, Homo sapiens; identical to SEQ ID NO: 74982
  Payload ID: 14819
  Gene Symbol: RNF220
  Gene Name: ring finger protein 220
  Uniprot ID: Q5VTB9
  ENSP ID: ENSP00000354872

SEQ ID NO: 74984 - protein, 566 aa, Homo sapiens; identical to SEQ ID NO: 74982
  Payload ID: 14819
  Gene Symbol: RNF220
  Gene Name: ring finger protein 220
  Uniprot ID: Q5VTB9
  ENSP ID: ENSP00000361321

SEQ ID NO: 74985 - protein, 259 aa, Homo sapiens
  Payload ID: 14819
  Gene Symbol: RNF220
  Gene Name: ring finger protein 220
  ENSP ID: ENSP00000388533
MPRARSGRRSRGAGGREETFLRVRANRQTRLNARIGKMKRRKQDEGQREGSCMAEDDAVDIEHENNNRFEEYEWCGQKRIRATTLLEGGFRGSGFIMCSGKENPDSDADLDVDGDDTLEYGKPQYTEADVIPCTGEEPGEAKEREALRGAVLNGGPPSTRITPEFSKWASDEMPSTSNGESSKQEAMQKTCKNSDIEKITEDSAVTTFEALKARVRELERQLSRGDRYKCLICMDSYSMPLTSIQCWHVHCEECWLRTL

SEQ ID NO: 74986 - protein, 121 aa, Homo sapiens
  Payload ID: 14819
  Gene Symbol: RNF220
  Gene Name: ring finger protein 220
  ENSP ID: ENSP00000411541
  MOD_RES (1)..(1): Any amino acid
XEGESPTASPHSSATDDLHHSDRYQTFLRVRANRQTRLNARIGKMKRRKQDEGQVCPLCNRPLAGSEQEMSRHVEHCLSKREGSCMAEDDAVDIEHENNNRFEEYEWCGQKRIRATTLLEG

SEQ ID NO: 74987 - protein, 45 aa, Homo sapiens
  Payload ID: 14819
  Gene Symbol: RNF220
  Gene Name: ring finger protein 220
  ENSP ID: ENSP00000475383
MPRARSGRRSRGAGGREEVDLSASTSQPADPTECSDWENETEEAR

SEQ ID NO: 74988 - protein, 220 aa, Homo sapiens
  Payload ID: 14820
  Gene Symbol: RNF222
  Gene Name: ring finger protein 222
  Uniprot ID: A6NCQ9
  ENSP ID: ENSP00000343799
MSEGESKDSSGSECPVCYEKFRDLEGASRTLSCGHVFCHDCLVKYLLSTRVDGQVQRTLVCPICRYVTFLSKKSSRWPSMLDKSSQTLAVPVGLPSVPPLDSLGHTNPLAASSPAWRPPPGQARPPGSPGQSAQLPLDLLPSLPRESQIFVISRHGMPLGEQDSVLPRRSLAELSEASLAPRSARAFCCRSRALLLITLIAVVAVVAAILPWVLLVRKQA

SEQ ID NO: 74989 - protein, 220 aa, Homo sapiens; identical to SEQ ID NO: 74988
  Payload ID: 14820
  Gene Symbol: RNF222
  Gene Name: ring finger protein 222
  Uniprot ID: A6NCQ9
  ENSP ID: ENSP00000382330

SEQ ID NO: 74990 - protein, 249 aa, Homo sapiens
  Payload ID: 14821
  Gene Symbol: RNF223
  Gene Name: ring finger protein 223
  Uniprot ID: E7ERA6
  ENSP ID: ENSP00000410533
MSSGQQVWHTAVPPPRRSSSIASMPRSPSSAGSPRSPGTPGSERVASPLECSICFSGYDNIFKTPKELSCTHVFCLECLARLAAAQPVGRPGGEAVPCPFCRQPTAVPPAGAPALCTSRQLQARMPAHLRREEPVWLEGTKLCCQPLPTTPGREPGFVCVDVGLSKPAEPPAPARDPAPRRGRLARCWARCRDWRRMALVSALLLMLFCVALWPVQCALKTGNLRCLPLPPRPPATSTAASPLGPLTDN

SEQ ID NO: 74991 - protein, 156 aa, Homo sapiens
  Payload ID: 14822
  Gene Symbol: RNF224
  Gene Name: ring finger protein 224
  Uniprot ID: P0DH78
  ENSP ID: ENSP00000406665
MQDAAAGGPPGLGGGGPPEERTDCIICCSAYDLSGHLPRRLYCGHTFCQACVRRLDTPAPEQRWIPCPQCRQSTPTPRGGVAMLDLDLAAFLAVKAEREPARLEPLPLTSLKGSAITRQPAGLCPALGPQPHFPQPRYCCWGCGSLCCPPLGSPEV

SEQ ID NO: 74992 - protein, 329 aa, Homo sapiens
  Payload ID: 14823
  Gene Symbol: RNF225
  Gene Name: ring finger protein 225
  Uniprot ID: M0QZC1
  ENSP ID: ENSP00000470441
MPCPRPFWLRHSRAPQGSGPSSPGSLSAPRSPSRGEDQEEEEEEEGDGSPGSGPILPPASPVECLICVSSFDGVFKLPKRLDCGHVFCLECLARLSLATAGGGNAVACPVCRAPTRLAPRRGLPALPTQSGLLPRDARAPPSRQGSVRFDRRRGLLYLRPPPPPPGPRKARAPPPPPPLRLGRPLSRRLSLASPAWVFNAAVALAVLVAAGLVVSGVYIFFLIPHATSSGPPRPQLVALAPAPGFSWFPPRPPPGSPWAPAWTPRPTGPDLDTALPGTAEDALEPEAGPEDPAEAERTLDRRSDGTWGTEAGPGWAPWPRGARRLWGSQ

SEQ ID NO: 74993 - protein, 148 aa, Homo sapiens
  Payload ID: 14824
  Gene Symbol: RNF24
  Gene Name: ring finger protein 24
  Uniprot ID: Q9Y225
  ENSP ID: ENSP00000336753
MSSDFPHYNFRMPNIGFQNLPLNIYIVVFGTAIFVFILSLLFCCYLIRLRHQAHKEFYAYKQVILKEKVKELNLHELCAVCLEDFKPRDELGICPCKHAFHRKCLIKWLEVRKVCPLCNMPVLQLAQLHSKQDRGPPQGPLPGAENIV

SEQ ID NO: 74994 - protein, 148 aa, Homo sapiens; identical to SEQ ID NO: 74993
  Payload ID: 14824
  Gene Symbol: RNF24
  Gene Name: ring finger protein 24
  Uniprot ID: Q9Y225
  ENSP ID: ENSP00000351166

SEQ ID NO: 74995 - protein, 169 aa, Homo sapiens
  Payload ID: 14824
  Gene Symbol: RNF24
  Gene Name: ring finger protein 24
  Uniprot ID: Q9Y225
  ENSP ID: ENSP00000388550
MLNKSGESRYPALFPVLGGSSMSSDFPHYNFRMPNIGFQNLPLNIYIVVFGTAIFVFILSLLFCCYLIRLRHQAHKEFYAYKQVILKEKVKELNLHELCAVCLEDFKPRDELGICPCKHAFHRKCLIKWLEVRKVCPLCNMPVLQLAQLHSKQDRGPPQGPLPGAENIV

SEQ ID NO: 74996 - protein, 169 aa, Homo sapiens; identical to SEQ ID NO: 74995
  Payload ID: 14824
  Gene Symbol: RNF24
  Gene Name: ring finger protein 24
  Uniprot ID: Q9Y225
  ENSP ID: ENSP00000444711

SEQ ID NO: 74997 - protein, 459 aa, Homo sapiens
  Payload ID: 14825
  Gene Symbol: RNF25
  Gene Name: ring finger protein 25
  Uniprot ID: Q96BH1
  ENSP ID: ENSP00000295704
MAASASAAAGEEDWVLPSEVEVLESIYLDELQVIKGNGRTSPWEIYITLHPATAEDQDSQYVCFTLVLQVPAEYPHEVPQISIRNPRGLSDEQIHTILQVLGHVAKAGLGTAMLYELIEKGKEILTDNNIPHGQCVICLYGFQEKEAFTKTPCYHYFHCHCLARYIQHMEQELKAQGQEQEQERQHATTKQKAVGVQCPVCREPLVYDLASLKAAPEPQQPMELYQPSAESLRQQEERKRLYQRQQERGGIIDLEAERNRYFISLQQPPAPAEPESAVDVSKGSQPPSTLAAELSTSPAVQSTLPPPLPVATQHICEKIPGTRSNQQRLGETQKAMLDPPKPSRGPWRQPERRHPKGGECHAPKGTRDTQELPPPEGPLKEPMDLKPEPHSQGVEGPPQEKGPGSWQGPPPRRTRDCVRWERSKGRTPGSSYPRLPRGQGAYRPGTRRESLGLESKDGS

SEQ ID NO: 74998 - protein, 158 aa, Homo sapiens
  Payload ID: 14825
  Gene Symbol: RNF25
  Gene Name: ring finger protein 25
  ENSP ID: ENSP00000403582
AASASAAAGEEDWVLPSEVEVLESIYLDELQVIKGNGRTSPWEIYITLHPATAEDQDSHIPMRCHRSLSEIPEDFQMNRSTRSYRCWATWPRLGWALPCCMNSLRKGRKFSQITTSLMASVSSASMVSRRRRPLPKHPVTTTSTATALLGTSSTWSKS

SEQ ID NO: 74999 - protein, 433 aa, Homo sapiens
  Payload ID: 14826
  Gene Symbol: RNF26
  Gene Name: ring finger protein 26
  Uniprot ID: Q9BY78
  ENSP ID: ENSP00000312439
MEAVYLVVNGLGLVLDVLTLVLDLNFLLVSSLLASLAWLLAFVYNLPHTVLTSLLHLGRGVLLSLLALIEAVVRFTCGGLQALCTLLYSCCSGLESLKLLGHLASHGALRSREILHRGVLNVVSSGHALLRQACDICAIAMSLVAYVINSLVNICLIGTQNLFSLVLALWDAVTGPLWRMTDVVAAFLAHISSSAVAMAILLWTPCQLALELLASAARLLASFVLVNLTGLVLLACVLAVTVTVLHPDFTLRLATQALSQLHARPSYHRLREDVMRLSRLALGSEAWRRVWSRSLQLASWPNRGGAPGAPQGDPMRVFSVRTRRQDTLPEAGRRSEAEEEEARTIRVTPVRGRERLNEEEPPGGQDPWKLLKEQEERKKCVICQDQSKTVLLLPCRHLCLCQACTEILMRHPVYHRNCPLCRRGILQTLNVYL

SEQ ID NO: 75000 - protein, 1072 aa, Homo sapiens
  Payload ID: 14827
  Gene Symbol: RNF31
  Gene Name: ring finger protein 31
  Uniprot ID: Q96EP0
  ENSP ID: ENSP00000315112
MPGEEEERAFLVAREELASALRRDSGQAFSLEQLRPLLASSLPLAARYLQLDAARLVRCNAHGEPRNYLNTLSTALNILEKYGRNLLSPQRPRYWRGVKFNNPVFRSTVDAVQGGRDVLRLYGYTEEQPDGLSFPEGQEEPDEHQVATVTLEVLLLRTELSLLLQNTHPRQQALEQLLEDKVEDDMLQLSEFDPLLREIAPGPLTTPSVPGSTPGPCFLCGSAPGTLHCPSCKQALCPACDHLFHGHPSRAHHLRQTLPGVLQGTHLSPSLPASAQPRPQSTSLLALGDSSLSSPNPASAHLPWHCAACAMLNEPWAVLCVACDRPRGCKGLGLGTEGPQGTGGLEPDLARGRWACQSCTFENEAAAVLCSICERPRLAQPPSLVVDSRDAGICLQPLQQGDALLASAQSQVWYCIHCTFCNSSPGWVCVMCNRTSSPIPAQHAPRPYASSLEKGPPKPGPPRRLSAPLPSSCGDPEKQRQDKMREEGLQLVSMIREGEAAGACPEEIFSALQYSGTEVPLQWLRSELPYVLEMVAELAGQQDPGLGAFSCQEARRAWLDRHGNLDEAVEECVRTRRRKVQELQSLGFGPEEGSLQALFQHGGDVSRALTELQRQRLEPFRQRLWDSGPEPTPSWDGPDKQSLVRRLLAVYALPSWGRAELALSLLQETPRNYELGDVVEAVRHSQDRAFLRRLLAQECAVCGWALPHNRMQALTSCECTICPDCFRQHFTIALKEKHITDMVCPACGRPDLTDDTQLLSYFSTLDIQLRESLEPDAYALFHKKLTEGVLMRDPKFLWCAQCSFGFIYEREQLEATCPQCHQTFCVRCKRQWEEQHRGRSCEDFQNWKRMNDPEYQAQGLAMYLQENGIDCPKCKFSYALARGGCMHFHCTQCRHQFCSGCYNAFYAKNKCPEPNCRVKKSLHGHHPRDCLFYLRDWTALRLQKLLQDNNVMFNTEPPAGARAVPGGGCRVIEQKEVPNGLRDEACGKETPAGYAGLCQAHYKEYLVSLINAHSLDPATLYEVEELETATERYLHVRPQPLAGEDPPAYQARLLQKLTEEVPLGQSIPRRRK

SEQ ID NO: 75001 - protein, 165 aa, Homo sapiens
  Payload ID: 14827
  Gene Symbol: RNF31
  Gene Name: ring finger protein 31
  ENSP ID: ENSP00000452820
  MOD_RES (1)..(1): Any amino acid
XCPKCKFSYALARGGCMHFHCTQCRHQFCSGCYNAFYAKNDNNVMFNTEPPAGARAVPGGGCRVIEQKEVPNGLRDEACGKETPAGYAGLCQAHYKEYLVSLINAHSLDPATLYEVEELETATERYLHVRPQPLAGEDPPAYQARLLQKLTEEVPLGQSIPRRRK

SEQ ID NO: 75002 - protein, 917 aa, Homo sapiens
  Payload ID: 14827
  Gene Symbol: RNF31
  Gene Name: ring finger protein 31
  ENSP ID: ENSP00000452972
  MOD_RES (1)..(1): Any amino acid
XNNPVFRSTVDAVQGGRDVLRLYGYTEEQPDGLSFPEGQEEPDEHQVATVTLEVLLLRTELSLLLQNTHPRQQALEQLLEDKVEDDMLQLSEFDPLLREIAPGPLTTPSVPGSTPGPCFLCGSAPGTLHCPSCKQALCPACDHLFHGHPSRAHHLRQTLPGVLQGTHLSPSLPASAQPRPQSTSLLALGDSSLSSPNPASAHLPWHCAACAMLNEPWAVLCVACDRPRGCKGLGLGTEGPQGTGGLEPDLARGRWACQSCTFENEAAAVLCSICERPRLAQPPSLVVDSRDAGICLQPLQQGDALLASAQSQVWYCIHCTFCNSSPGWVCVMCNRTSSPIPAQHAPRPYASSLEKGPPKPGPPRRLSAPLPSSCGDPEKQRQDKMREEGLQLVSMIREARRAWLDRHGNLDEAVEECVRTRRRKVQELQSLGFGPEEGSLQALFQHGGDVSRALTELQRQRLEPFRQRLWDSGPEPTPSWDGPDKQSLVRRLLAVYALPSWGRAELALSLLQETPRNYELGDVVEAVRHSQDRAFLRRLLAQECAVCGWALPHNRMQALTSCECTICPDCFRQHFTIALKEKHITDMVCPACGRPDLTDDTQLLSYFSTLDIQLRESLEPDAYALFHKKLTEGVLMRDPKFLWCAQCSFGFIYEREQLEATCPQCHQTFCVRCKRQWEEQHRGRSCEDFQNWKRMNDPEYQAQGLAMYLQENGIDCPKCKFSYALARGGCMHFHCTQCRHQFCSGCYNAFYAKNKCPEPNCRVKKSLHGHHPRDCLFYLRDWTALRLQKLLQDNNVMFNTEPPAGARAVPGGGCRVIEQKEVPNGLRDEACGKETPAGYAGLCQAHYKEYLVSLINAHSLDPATLYEVEELETATERYLHVRPQPLAGEDPPAYQARLLQKLTEEVPLGQSIPRRRK

SEQ ID NO: 75003 - protein, 170 aa, Homo sapiens
  Payload ID: 14827
  Gene Symbol: RNF31
  Gene Name: ring finger protein 31
  ENSP ID: ENSP00000453423
MPGEEEERAFLVAREELASALRRDSGQAFSLEQLRPLLASSLPLAARYLQLDAARLVRCNAHGEPRNYLNTLSTALNILEKYGRNLLSPQRPRYWRGVKFNNPVFRSTVDAVQGGRDVLRLYGYTEEQPDGLSFPEGQEEPDEHQVATVTLEVLLLRTELSLLLQNTHPR

SEQ ID NO: 75004 - protein, 52 aa, Homo sapiens
  Payload ID: 14827
  Gene Symbol: RNF31
  Gene Name: ring finger protein 31
  ENSP ID: ENSP00000453471
MLQLSEFDPLLREIAPGPLTTPSVPGSTPGPCFLCGSAPGTLHCPSCKQALC

SEQ ID NO: 75005 - protein, 136 aa, Homo sapiens
  Payload ID: 14827
  Gene Symbol: RNF31
  Gene Name: ring finger protein 31
  ENSP ID: ENSP00000453501
MQALTSCECTICPDCFRQHFTIALKEKHITDMVCPACGRPDLTDDTQLLSYFSTLDIQLRESLEPDAYALFHKKLTEGVLMRDPKFLWCAQCSFGFIYEREQLEATCPQCHQTFCVRCKRQWEEQHRGRSCEDFQN

SEQ ID NO: 75006 - protein, 921 aa, Homo sapiens
  Payload ID: 14827
  Gene Symbol: RNF31
  Gene Name: ring finger protein 31
  Uniprot ID: Q96EP0
  ENSP ID: ENSP00000453574
MDLCTRAGEPSLTQNTHPRQQALEQLLEDKVEDDMLQLSEFDPLLREIAPGPLTTPSVPGSTPGPCFLCGSAPGTLHCPSCKQALCPACDHLFHGHPSRAHHLRQTLPGVLQGTHLSPSLPASAQPRPQSTSLLALGDSSLSSPNPASAHLPWHCAACAMLNEPWAVLCVACDRPRGCKGLGLGTEGPQGTGGLEPDLARGRWACQSCTFENEAAAVLCSICERPRLAQPPSLVVDSRDAGICLQPLQQGDALLASAQSQVWYCIHCTFCNSSPGWVCVMCNRTSSPIPAQHAPRPYASSLEKGPPKPGPPRRLSAPLPSSCGDPEKQRQDKMREEGLQLVSMIREGEAAGACPEEIFSALQYSGTEVPLQWLRSELPYVLEMVAELAGQQDPGLGAFSCQEARRAWLDRHGNLDEAVEECVRTRRRKVQELQSLGFGPEEGSLQALFQHGGDVSRALTELQRQRLEPFRQRLWDSGPEPTPSWDGPDKQSLVRRLLAVYALPSWGRAELALSLLQETPRNYELGDVVEAVRHSQDRAFLRRLLAQECAVCGWALPHNRMQALTSCECTICPDCFRQHFTIALKEKHITDMVCPACGRPDLTDDTQLLSYFSTLDIQLRESLEPDAYALFHKKLTEGVLMRDPKFLWCAQCSFGFIYEREQLEATCPQCHQTFCVRCKRQWEEQHRGRSCEDFQNWKRMNDPEYQAQGLAMYLQENGIDCPKCKFSYALARGGCMHFHCTQCRHQFCSGCYNAFYAKNKCPEPNCRVKKSLHGHHPRDCLFYLRDWTALRLQKLLQDNNVMFNTEPPAGARAVPGGGCRVIEQKEVPNGLRDEACGKETPAGYAGLCQAHYKEYLVSLINAHSLDPATLYEVEELETATERYLHVRPQPLAGEDPPAYQARLLQKLTEEVPLGQSIPRRRK

SEQ ID NO: 75007 - protein, 120 aa, Homo sapiens
  Payload ID: 14827
  Gene Symbol: RNF31
  Gene Name: ring finger protein 31
  ENSP ID: ENSP00000453595
MPGEEEERAFLVAREELASALRRDSGQAFSLEQLRPLLASSLPLAARYLQLDAARLVRCNAHGEPRNYLNTLPPLPGMGQTSRAWSGGFWQSTHSPAGAGQSWHCHCCRRHPGTMSWGMW

SEQ ID NO: 75008 - protein, 152 aa, Homo sapiens
  Payload ID: 14827
  Gene Symbol: RNF31
  Gene Name: ring finger protein 31
  ENSP ID: ENSP00000453601
PRNYLNTLSTALNILEKYGRNLLSPQRPRYWRGVKFNNPVFRSTVDAVQGGRDVLRLYGYTEEQPDGLSFPEGQEEPDEHQVATVTLEVLLLRTELSLLLQNTHPRQQALEQLLEDKVEDDMLQLSEFDPLLREIAPGPLTTPSVPGPVSSL

SEQ ID NO: 75009 - protein, 32 aa, Homo sapiens
  Payload ID: 14827
  Gene Symbol: RNF31
  Gene Name: ring finger protein 31
  ENSP ID: ENSP00000453645
MLQLSEFDPLLREIAPGPLTTPSVPGSTPGPC

SEQ ID NO: 75010 - protein, 143 aa, Homo sapiens
  Payload ID: 14827
  Gene Symbol: RNF31
  Gene Name: ring finger protein 31
  ENSP ID: ENSP00000453672
  MOD_RES (1)..(1): Any amino acid
XEEQHRGRSCEDFQNWKRMNDPEYQAQGLAMYLQENGIDCPKCKFSYALARGGCMHFHCTQCRHQFCSGCYNAFYAKNKCPEPNCRVKKSLHGHHPRDCLFYLRDWTALRLQKLLQDNNVMFNTEPPAGARAVPGGHTTKSIL

SEQ ID NO: 75011 - protein, 60 aa, Homo sapiens
  Payload ID: 14827
  Gene Symbol: RNF31
  Gene Name: ring finger protein 31
  ENSP ID: ENSP00000453948
MLQLSEFDPLLREIAPGPLTTPSVPGSTPGPCFLCGSAPGTLHCPSCKQALCPACDHLFH

SEQ ID NO: 75012 - protein, 56 aa, Homo sapiens
  Payload ID: 14827
  Gene Symbol: RNF31
  Gene Name: ring finger protein 31
  ENSP ID: ENSP00000454032
MPGEEEERAFLVAREELASALRRDSGQAFSLEQLRPLLASSLPLAARYLQLDAARL

SEQ ID NO: 75013 - protein, 149 aa, Homo sapiens
  Payload ID: 14827
  Gene Symbol: RNF31
  Gene Name: ring finger protein 31
  ENSP ID: ENSP00000454048
MLQLSEFDPLLREIAPGPLTTPSVPGSTPGPCFLCGSAPGTLHCPSCKQALCPACDHLFHGHPSRAHHLRQTLPGVLQGTHLSPSLPASAQPRPQSTSLLALGDSSLSSPNPASAHLPWHCAACAMLNEPWAVLCVACDRPRGCKGLGL

SEQ ID NO: 75014 - protein, 140 aa, Homo sapiens
  Payload ID: 14827
  Gene Symbol: RNF31
  Gene Name: ring finger protein 31
  ENSP ID: ENSP00000454140
  MOD_RES (1)..(1): Any amino acid
XFCVRCKRQWEEQHRGRSCEDFQNWKRMNDPEYQAQGLAMYLQENGIDCPKCKFSYALARGGCMHFHCTQCRHQFCSGCYNAFYAKNKCPEPNCRVKKSLHGHHPRDCLFYLRDWTALRLQKLLQSLQLGPGQSLEAAAE

SEQ ID NO: 75015 - protein, 310 aa, Homo sapiens
  Payload ID: 14828
  Gene Symbol: RNF32
  Gene Name: ring finger protein 32
  ENSP ID: ENSP00000308894
MLKNKGHSSKKDNLAVNAVALQDHILHDLQLRNLSVADHSKTQVQKKENKSLKRDTKAIIDTGLKKTTQCPKLEDSEKEYVLDPKPPPLTLAQKLGLIGPPPPPLSSDEWEKVKQRSLLQGDSVQPCPICKEEFELRPQVLLSCSHVFHKACLQAFEKFTNKKTCPLCRKNQYQTRVIHDGARLFRIKCVTRIQAYWRGCVVRKWYRNLRKTVPPTDAKLRKKFFEKKFTEISHRILCSYNTNIEELFAEIDQCLAINRSVLQQLEEKCGHEITEEEWEKIQVQNETSACFEDPCLGAHGSHFSLSNFLL

SEQ ID NO: 75016 - protein, 362 aa, Homo sapiens
  Payload ID: 14828
  Gene Symbol: RNF32
  Gene Name: ring finger protein 32
  Uniprot ID: Q9H0A6
  ENSP ID: ENSP00000315950
MLKNKGHSSKKDNLAVNAVALQDHILHDLQLRNLSVADHSKTQVQKKENKSLKRDTKAIIDTGLKKTTQCPKLEDSEKEYVLDPKPPPLTLAQKLGLIGPPPPPLSSDEWEKVKQRSLLQGDSVQPCPICKEEFELRPQVLLSCSHVFHKACLQAFEKFTNKKTCPLCRKNQYQTRVIHDGARLFRIKCVTRIQAYWRGCVVRKWYRNLRKTVPPTDAKLRKKFFEKKFTEISHRILCSYNTNIEELFAEIDQCLAINRSVLQQLEEKCGHEITEEEWEKIQVQALRRETHECSICLAPLSAAGGQRVGAGRRSREMALLSCSHVFHHACLLALEEFSVGDRPPFHACPLCRSCYQKKILEC

SEQ ID NO: 75017 - protein, 235 aa, Homo sapiens
  Payload ID: 14828
  Gene Symbol: RNF32
  Gene Name: ring finger protein 32
  Uniprot ID: Q9H0A6
  ENSP ID: ENSP00000376497
MLKNKGHSSKKDNLAVNAVALQDHILHDLQLRNLSVADHSKTQVQKKENKSLKRDTKAIIDTGLKKTTQCPKLEDSEKEYVLDPKPPPLTLAQKLGLIGPPPPPLSSDEWEKVKQRSLLQGDSVQPCPICKEEFELRPQVLLSCSHVFHKACLQAFEKFTNKKTCPLCRKNQYQTRVIHDGARLFRIKCVTRIQAYWRGCVVRKWYRNLRKTVPPTDAKLRKKFFEKKTQDWKPA

SEQ ID NO: 75018 - protein, 362 aa, Homo sapiens; identical to SEQ ID NO: 75016
  Payload ID: 14828
  Gene Symbol: RNF32
  Gene Name: ring finger protein 32
  Uniprot ID: Q9H0A6
  ENSP ID: ENSP00000376499

SEQ ID NO: 75019 - protein, 95 aa, Homo sapiens
  Payload ID: 14828
  Gene Symbol: RNF32
  Gene Name: ring finger protein 32
  Uniprot ID: Q9H0A6
  ENSP ID: ENSP00000376503
MLKNKGHSSKKDNLAVNAVALQDHILHDLQLRNLSVADHSKTQVQKKENKSLKRDTKAIIDTGLKKTTQCPKLEDSEKEYVLDPKPPPLTLGYHS

SEQ ID NO: 75020 - protein, 362 aa, Homo sapiens; identical to SEQ ID NO: 75016
  Payload ID: 14828
  Gene Symbol: RNF32
  Gene Name: ring finger protein 32
  Uniprot ID: Q9H0A6
  ENSP ID: ENSP00000385285

SEQ ID NO: 75021 - protein, 221 aa, Homo sapiens
  Payload ID: 14828
  Gene Symbol: RNF32
  Gene Name: ring finger protein 32
  ENSP ID: ENSP00000385815
MLKNKGHSSKKDNLAVNAVALQDHILHDLQLRNLSVADHSKTQVQKKENKSLKRDTKAIIDTGLKKTTQCPKLEDSEKEYVLDPKPPPLTLAQKLGLIGPPPPPLSSDEWEKVKQRSLLQGDSVQPCPICKEEFELRPQVLLSCSHVFHKACLQAFEKFTNKKTCPLCRKNQYQTRVIHDGARLFRIKCVTRIQAYWRGCVVRKWYRNLRKTVPPTDAKLR

SEQ ID NO: 75022 - protein, 18 aa, Homo sapiens
  Payload ID: 14828
  Gene Symbol: RNF32
  Gene Name: ring finger protein 32
  ENSP ID: ENSP00000388088
MLKNKGHSSKKDNLAVNA

SEQ ID NO: 75023 - protein, 362 aa, Homo sapiens; identical to SEQ ID NO: 75016
  Payload ID: 14828
  Gene Symbol: RNF32
  Gene Name: ring finger protein 32
  Uniprot ID: Q9H0A6
  ENSP ID: ENSP00000405588

SEQ ID NO: 75024 - protein, 372 aa, Homo sapiens
  Payload ID: 14829
  Gene Symbol: RNF34
  Gene Name: ring finger protein 34, E3 ubiquitin protein ligase
  Uniprot ID: Q969K3
  ENSP ID: ENSP00000355137
MKAGATSMWASCCGLLNEVMGTGAVRGQQSAFAGATGPFRFTPNPEFSTYPPAATEGPNIVCKACGLSFSVFRKKHVCCDCKKDFCSVCSVLQENLRRCSTCHLLQETAFQRPQLMRLKVKDLRQYLILRNIPIDTCREKEDLVDLVLCHHGLGSEDDMDTSSLNSSRSQTSSFFTRSFFSNYTAPSATMSSFQGELMDGDQTSRSGVPAQVQSEITSANTEDDDDDDDEDDDDEEENAEDRNPGLSKERVRASLSDLSSLDDVEGMSVRQLKEILARNFVNYSGCCEKWELVEKVNRLYKENEENQKSYGERLQLQDEEDDSLCRICMDAVIDCVLLECGHMVTCTKCGKRMSECPICRQYVVRAVHVFKS

SEQ ID NO: 75025 - protein, 507 aa, Homo sapiens
  Payload ID: 14829
  Gene Symbol: RNF34
  Gene Name: ring finger protein 34, E3 ubiquitin protein ligase
  ENSP ID: ENSP00000376257
MKAGATSMWASCCGLLNEVMGTGAVRGQQSAFAGATGPFRFTPNPEFSTYPPAATEGPNIVCKACGLSFSVFRKKHVCCDCKKDFCSVCSVLQENLRRCSTCHLLQETAFQRPQLMRLKVKDLRQYLILRNIPIDTCREKEDLVDLVLCHHGLGSEDDMDTSSLNSSRSQTSSFFTRSFFSNYTAPSATMSSFQGELMDGDQTSRSGVPAQVQSEITSANTEDDDDDDDEDDDDEEENAEDRNPGLSKERVRASLSDLSSLDDVEGMSVRQLKEILARNFVNYSGCCEKWELVEKVNRLYKENEENQKSYGERLQLQDEEDDSLCRICMDAVIDCVLLECGHMVTCTKCGKRMRMSSCKGRLRNGPESSAVTIQKDQRKVSAHSSPKRVVEQLLPWKDLQNGIALWSVVPRSKWKIKALIFVKSLPSQSPPRIYILILGLTQFLQEFFFYLPKLDTHRHLGYELLTAFLGDLLAVPQVNMTDVSTAFEEGQALISDLIAVCREEIVM

SEQ ID NO: 75026 - protein, 373 aa, Homo sapiens
  Payload ID: 14829
  Gene Symbol: RNF34
  Gene Name: ring finger protein 34, E3 ubiquitin protein ligase
  Uniprot ID: Q969K3
  ENSP ID: ENSP00000376258
MRKAGATSMWASCCGLLNEVMGTGAVRGQQSAFAGATGPFRFTPNPEFSTYPPAATEGPNIVCKACGLSFSVFRKKHVCCDCKKDFCSVCSVLQENLRRCSTCHLLQETAFQRPQLMRLKVKDLRQYLILRNIPIDTCREKEDLVDLVLCHHGLGSEDDMDTSSLNSSRSQTSSFFTRSFFSNYTAPSATMSSFQGELMDGDQTSRSGVPAQVQSEITSANTEDDDDDDDEDDDDEEENAEDRNPGLSKERVRASLSDLSSLDDVEGMSVRQLKEILARNFVNYSGCCEKWELVEKVNRLYKENEENQKSYGERLQLQDEEDDSLCRICMDAVIDCVLLECGHMVTCTKCGKRMSECPICRQYVVRAVHVFKS

SEQ ID NO: 75027 - protein, 37 aa, Homo sapiens
  Payload ID: 14829
  Gene Symbol: RNF34
  Gene Name: ring finger protein 34, E3 ubiquitin protein ligase
  ENSP ID: ENSP00000451724
MWASCCGLLNEVMGTGAVRGQQSAFAGATGPFRFTPN

SEQ ID NO: 75028 - protein, 163 aa, Homo sapiens
  Payload ID: 14829
  Gene Symbol: RNF34
  Gene Name: ring finger protein 34, E3 ubiquitin protein ligase
  ENSP ID: ENSP00000452096
MWASCCGLLNEVMGTGAVRGQQSAFAGATGPFRFTPNPEFSTYPPAATEGPNIVCKACGLSFSVFRKKHVCCDCKKDFCSVCSVLQENLRRCSTCHLLQETAFQRPQLMRLKVKDLRQYLILRNIPIDTCREKEDLVDLVLCHHGLGSEDDMDTSSLNSSRSQ

SEQ ID NO: 75029 - protein, 45 aa, Homo sapiens
  Payload ID: 14829
  Gene Symbol: RNF34
  Gene Name: ring finger protein 34, E3 ubiquitin protein ligase
  ENSP ID: ENSP00000452200
MKMASGCSCRMRKTTACVASAWMPSSTVSYWSVGTWLPAPSAASA

SEQ ID NO: 75030 - protein, 74 aa, Homo sapiens
  Payload ID: 14829
  Gene Symbol: RNF34
  Gene Name: ring finger protein 34, E3 ubiquitin protein ligase
  ENSP ID: ENSP00000452321
MWASCCGLLNEVMGTGAVRGQQSAFAGATGPFRFTPNPEFSTYPPAATEGPNIVCKACGLSFSVFRKKHVCCDC

SEQ ID NO: 75031 - protein, 180 aa, Homo sapiens
  Payload ID: 14829
  Gene Symbol: RNF34
  Gene Name: ring finger protein 34, E3 ubiquitin protein ligase
  ENSP ID: ENSP00000477987
MKGELMDGDQTSRSGVPAQVQSEITSANTEDDDDDDDEDDDDEEENAEDRNPGLSKERVRASLSDLSSLDDVEGMSVRQLKEILARNFVNYSGCCEKWELVEKVNRLYKENEENQKSYGERLQLQDEEDDSLCRICMDAVIDCVLLECGHMVTCTKCGKRMSECPICRQYVVRAVHVFKS

SEQ ID NO: 75032 - protein, 515 aa, Homo sapiens
  Payload ID: 14830
  Gene Symbol: RNF38
  Gene Name: ring finger protein 38
  Uniprot ID: Q9H0F5
  ENSP ID: ENSP00000259605
MACKISPGANSASLPGHPNKVICERVRLQSLFPLLPSDQNTTVQEDAHFKAFFQSEDSPSPKRQRLSHSVFDYTSASPAPSPPMRPWEMTSNRQPPSVRPSQHHFSGERCNTPARNRRSPPVRRQRGRRDRLSRHNSISQDENYHHLPYAQQQAIEEPRAFHPPNVSPRLLHPAAHPPQQNAVMVDIHDQLHQGTVPVSYTVTTVAPHGIPLCTGQHIPACSTQQVPGCSVVFSGQHLPVCSVPPPMLQACSVQHLPVPYAAFPPLISSDPFLIHPPHLSPHHPPHLPPPGQFVPFQTQQSRSPLQRIENEVELLGEHLPVGGFTYPPSAHPPTLPPSAPLQFLTHDPLHQEVSFGVPYPPFMPRRLTGRSRYRSQQPIPPPPYHPSLLPYVLSMLPVPPAVGPTFSFELDVEDGEVENYEALLNLAERLGEAKPRGLTKADIEQLPSYRFNPNNHQSEQTLCVVCMCDFESRQLLRVLPCNHEFHAKCVDKWLKANRTCPICRADASEVHRDSE

SEQ ID NO: 75033 - protein, 465 aa, Homo sapiens
  Payload ID: 14830
  Gene Symbol: RNF38
  Gene Name: ring finger protein 38
  Uniprot ID: Q9H0F5
  ENSP ID: ENSP00000335239
MACKSEDSPSPKRQRLSHSVFDYTSASPAPSPPMRPWEMTSNRQPPSVRPSQHHFSGERCNTPARNRRSPPVRRQRGRRDRLSRHNSISQDENYHHLPYAQQQAIEEPRAFHPPNVSPRLLHPAAHPPQQNAVMVDIHDQLHQGTVPVSYTVTTVAPHGIPLCTGQHIPACSTQQVPGCSVVFSGQHLPVCSVPPPMLQACSVQHLPVPYAAFPPLISSDPFLIHPPHLSPHHPPHLPPPGQFVPFQTQQSRSPLQRIENEVELLGEHLPVGGFTYPPSAHPPTLPPSAPLQFLTHDPLHQEVSFGVPYPPFMPRRLTGRSRYRSQQPIPPPPYHPSLLPYVLSMLPVPPAVGPTFSFELDVEDGEVENYEALLNLAERLGEAKPRGLTKADIEQLPSYRFNPNNHQSEQTLCVVCMCDFESRQLLRVLPCNHEFHAKCVDKWLKANRTCPICRADASEVHRDSE

SEQ ID NO: 75034 - protein, 432 aa, Homo sapiens
  Payload ID: 14830
  Gene Symbol: RNF38
  Gene Name: ring finger protein 38
  Uniprot ID: Q9H0F5
  ENSP ID: ENSP00000343947
MRPWEMTSNRQPPSVRPSQHHFSGERCNTPARNRRSPPVRRQRGRRDRLSRHNSISQDENYHHLPYAQQQAIEEPRAFHPPNVSPRLLHPAAHPPQQNAVMVDIHDQLHQGTVPVSYTVTTVAPHGIPLCTGQHIPACSTQQVPGCSVVFSGQHLPVCSVPPPMLQACSVQHLPVPYAAFPPLISSDPFLIHPPHLSPHHPPHLPPPGQFVPFQTQQSRSPLQRIENEVELLGEHLPVGGFTYPPSAHPPTLPPSAPLQFLTHDPLHQEVSFGVPYPPFMPRRLTGRSRYRSQQPIPPPPYHPSLLPYVLSMLPVPPAVGPTFSFELDVEDGEVENYEALLNLAERLGEAKPRGLTKADIEQLPSYRFNPNNHQSEQTLCVVCMCDFESRQLLRVLPCNHEFHAKCVDKWLKANRTCPICRADASEVHRDSE

SEQ ID NO: 75035 - protein, 432 aa, Homo sapiens; identical to SEQ ID NO: 75034
  Payload ID: 14830
  Gene Symbol: RNF38
  Gene Name: ring finger protein 38
  Uniprot ID: Q9H0F5
  ENSP ID: ENSP00000349566

SEQ ID NO: 75036 - protein, 439 aa, Homo sapiens
  Payload ID: 14830
  Gene Symbol: RNF38
  Gene Name: ring finger protein 38
  Uniprot ID: Q9H0F5
  ENSP ID: ENSP00000367109
MQHTCTQQKKVTYKHIARFSPRNRLCQADAVFNNNLAGFQLQSPPVRRQRGRRDRLSRHNSISQDENYHHLPYAQQQAIEEPRAFHPPNVSPRLLHPAAHPPQQNAVMVDIHDQLHQGTVPVSYTVTTVAPHGIPLCTGQHIPACSTQQVPGCSVVFSGQHLPVCSVPPPMLQACSVQHLPVPYAAFPPLISSDPFLIHPPHLSPHHPPHLPPPGQFVPFQTQQSRSPLQRIENEVELLGEHLPVGGFTYPPSAHPPTLPPSAPLQFLTHDPLHQEVSFGVPYPPFMPRRLTGRSRYRSQQPIPPPPYHPSLLPYVLSMLPVPPAVGPTFSFELDVEDGEVENYEALLNLAERLGEAKPRGLTKADIEQLPSYRFNPNNHQSEQTLCVVCMCDFESRQLLRVLPCNHEFHAKCVDKWLKANRTCPICRADASEVHRDSE

SEQ ID NO: 75037 - protein, 432 aa, Homo sapiens; identical to SEQ ID NO: 75034
  Payload ID: 14830
  Gene Symbol: RNF38
  Gene Name: ring finger protein 38
  Uniprot ID: Q9H0F5
  ENSP ID: ENSP00000367117

SEQ ID NO: 75038 - protein, 439 aa, Homo sapiens; identical to SEQ ID NO: 75036
  Payload ID: 14830
  Gene Symbol: RNF38
  Gene Name: ring finger protein 38
  Uniprot ID: Q9H0F5
  ENSP ID: ENSP00000483536

SEQ ID NO: 75039 - protein, 420 aa, Homo sapiens
  Payload ID: 14831
  Gene Symbol: RNF39
  Gene Name: ring finger protein 39
  Uniprot ID: Q9H2S5
  ENSP ID: ENSP00000244360
MWWRDLTRLRLWLKREAIPGEGRKAAKVNAGVGEKGIYTASSRGGPPSARSKAVTVVAEGAASRSWLSMDAPELGPGLVERLEQLATCPLCGGSFEDPVLLACEHSFCRACLARRWGTPPATGTEASPTACPCCGLPCPRRSLRSNVRLAVEVRISRELREKLAEPGARAGRRRGGRIPTMGCLDLPGEDMRKTWRRFEVPTSKSSNSEDDLPEDYPVVKKMLHRLTADLTLDPGTAHRRLLISADRRSVQLAPPGTPAPPDGPKRFDQLPAVLGAQGFGAGRHCWEVETADAASCRDSSGEDADDEESHYAVGAAGESVQRKGCVRLCPAGAVWAVEGRGGRLWALTAPEPTLLGGVEPPPRRIRVDLDWERGRVAFYDGRSLDLLYAFQAPGPLGERIFPLFCTCDPRAPLRIVPAES

SEQ ID NO: 75040 - protein, 354 aa, Homo sapiens
  Payload ID: 14831
  Gene Symbol: RNF39
  Gene Name: ring finger protein 39
  Uniprot ID: Q9H2S5
  ENSP ID: ENSP00000365941
MWWRDLTRLRLWLKREAIPGEGRKAAKVNAGVGEKGIYTASSRGGPPSARSKAVTVVAEGAASRSWLSMDAPELGPGLVERLEQLATCPLCGGSFEDPVLLACEHSFCRACLARRWGTPPATGTEASPTACPCCGLPCPRRSLRSNVRLAVEVRISRELREKLAEPGARAGRRRGGRIPTMGCLDLPGEDMRKTWRRFEVPTPKSSNSEDDLPEDYPVVKKMLHRLTADLTLDPGTAHRRLLISTDRRSVQLAPPGTPAPPDGPKRFDQLPAVLGAQGFGAGRHCWEVETADAASCRDSSGEDEDDEESHYAVGAAGESVQRKGCAPGPLGERIFPLFCTCDPRAPLRIVPAES

SEQ ID NO: 75041 - protein, 354 aa, Homo sapiens
  Payload ID: 14831
  Gene Symbol: RNF39
  Gene Name: ring finger protein 39
  Uniprot ID: Q9H2S5
  ENSP ID: ENSP00000365942
MWWRDLTRLRLWLKREAIPGEGRKAAKVNAGVGEKGIYTASSRGGPPSARSKAVTVVAEGAASRSWLSMDAPELGPGLVERLEQLATCPLCGGSFEDPVLLACEHSFCRACLARRWGTPPATGTEASPTACPCCGLPCPRRSLRSNVRLAVEVRISRELREKLAEPGARAGRRRGGRIPTMGCLDLPGEDMRKTWRRFEVPTSKSSNSEDDLPEDYPVVKKMLHRLTADLTLDPGTAHRRLLISADRRSVQLAPPGTPAPPDGPKRFDQLPAVLGAQGFGAGRHCWEVETADAASCRDSSGEDADDEESHYAVGAAGESVQRKGCAPGPLGERIFPLFCTCDPRAPLRIVPAES

SEQ ID NO: 75042 - protein, 420 aa, Homo sapiens
  Payload ID: 14831
  Gene Symbol: RNF39
  Gene Name: ring finger protein 39
  ENSP ID: ENSP00000373106
MWWRDLTRLRLWLKREAIPGEGRKAAKVNAGVGEKGIYTASSRGGPPSARSKAVTVVAEGAASRSWLSMDAPELGPGLVERLEQLATCPLCGGSFEDPVLLACEHSFCRACLARRWGTPPATGTEASPTACPCCGLPCPRRSLRSNVRLAVEVRISRELREKLAEPGARAGRRRGGRIPTMGCLDLPGEDMRKTWRRFEVPTPKSSNSEDDLPEDYPVVKKMLHRLTADLTLDPGTAHRRLLISTDRRSVQLAPPGTPAPPDGPKRFDQLPAVLGAQGFGAGRHCWEVETADAASCRDSSGEDEDDEESHYAVGAAGESVQRKGCVRLCPAGAVWAVEGRGGRLWALTAPEPTLLGGVEPPPRRIRVDLDWERGRVAFYDGRSLDLLYAFQAPGPLGERIFPLFCTCDPRAPLRIVPAES

SEQ ID NO: 75043 - protein, 420 aa, Homo sapiens
  Payload ID: 14831
  Gene Symbol: RNF39
  Gene Name: ring finger protein 39
  ENSP ID: ENSP00000387930
MWWRDLTRLRLWLKREAIPGEGRKAAKVNAGVGEKGIYTASSRGGPPSARSKAVTVVAEGAASRSWLSMDAPELGPGLVERLEQLATCPLCGGSFEDPVLLACEHSFCRACLARRWGTPPATGTEASPTACPCCGLPCPRRSLRSNVRLAVEVRISRELREKLAEPGARAGRRRGGRIPTMGCLDLPGEDMRKTWRRFEVPTSKSSNSEDDLPEDYPVVKKMLHRLTADLTLDPGTAHRRLLISADRRSVQLAPPGTPAPPDGPKRFDQLPAVLGAQGFGAGRHCWEVETADAASCRDSSGEDADDEESHYAVGAAGESVQRKGCVRLCPAGAVWAVGGRGGRLWALTAPEPTLLGGVEPPPRRIRVDLDWERGRVAFYDGRSLDLLYAFQAPGPLGERIFPLFCTCDPRAPLRIVPAES

SEQ ID NO: 75044 - protein, 354 aa, Homo sapiens; identical to SEQ ID NO: 75041
  Payload ID: 14831
  Gene Symbol: RNF39
  Gene Name: ring finger protein 39
  Uniprot ID: Q9H2S5
  ENSP ID: ENSP00000391822

SEQ ID NO: 75045 - protein, 354 aa, Homo sapiens; identical to SEQ ID NO: 75041
  Payload ID: 14831
  Gene Symbol: RNF39
  Gene Name: ring finger protein 39
  Uniprot ID: Q9H2S5
  ENSP ID: ENSP00000392508

SEQ ID NO: 75046 - protein, 420 aa, Homo sapiens; identical to SEQ ID NO: 75039
  Payload ID: 14831
  Gene Symbol: RNF39
  Gene Name: ring finger protein 39
  Uniprot ID: Q9H2S5
  ENSP ID: ENSP00000393560

SEQ ID NO: 75047 - protein, 420 aa, Homo sapiens; identical to SEQ ID NO: 75039
  Payload ID: 14831
  Gene Symbol: RNF39
  Gene Name: ring finger protein 39
  Uniprot ID: Q9H2S5
  ENSP ID: ENSP00000395696

SEQ ID NO: 75048 - protein, 420 aa, Homo sapiens; identical to SEQ ID NO: 75039
  Payload ID: 14831
  Gene Symbol: RNF39
  Gene Name: ring finger protein 39
  Uniprot ID: Q9H2S5
  ENSP ID: ENSP00000398512

SEQ ID NO: 75049 - protein, 354 aa, Homo sapiens; identical to SEQ ID NO: 75041
  Payload ID: 14831
  Gene Symbol: RNF39
  Gene Name: ring finger protein 39
  Uniprot ID: Q9H2S5
  ENSP ID: ENSP00000401131

SEQ ID NO: 75050 - protein, 354 aa, Homo sapiens; identical to SEQ ID NO: 75041
  Payload ID: 14831
  Gene Symbol: RNF39
  Gene Name: ring finger protein 39
  Uniprot ID: Q9H2S5
  ENSP ID: ENSP00000405340

SEQ ID NO: 75051 - protein, 354 aa, Homo sapiens
  Payload ID: 14831
  Gene Symbol: RNF39
  Gene Name: ring finger protein 39
  Uniprot ID: Q9H2S5
  ENSP ID: ENSP00000407248
MWWRDLTRLRLWLKREAIPGEGRKAAKVNAGVGEKGIYTASSRGGPPSARSKAVTVVAEGAASRSWLSMDAPELGPGLVERLEQLATCPLCGGSFEDPVLLACEHSFCRACLARRWGTPPATGTEASPTACPCCGLPCPRRSLRSNVRLAVEVRISRELREKLAEPGARAGRRRGGRIPTMGCLDLPGEDMRKTWRRFEVPTSKSSNSEDDLPEDYPVVKKMLHRLTADLTLDPGTAHRRLLISADRRSVQLAPPGTPAPPDGPKRFNQLPAVLGAQGFGAGRHCWEVETADAASCRDSSGEDADDEESHYAVGAAGESVQRKGCAPGPLGERIFPLFCTCDPRAPLRIVPAES

SEQ ID NO: 75052 - protein, 420 aa, Homo sapiens; identical to SEQ ID NO: 75039
  Payload ID: 14831
  Gene Symbol: RNF39
  Gene Name: ring finger protein 39
  Uniprot ID: Q9H2S5
  ENSP ID: ENSP00000407291

SEQ ID NO: 75053 - protein, 420 aa, Homo sapiens
  Payload ID: 14831
  Gene Symbol: RNF39
  Gene Name: ring finger protein 39
  Uniprot ID: Q9H2S5
  ENSP ID: ENSP00000408539
MWWRDLTRLRLWLKREAIPGEGRKAAKVNAGVGEKGIYTASSRGGPPSARSKAVTVVAEGAASRSWLSMDAPELGPGLVERLEQLATCPLCGGSFEDPVLLACEHSFCRACLARRWGTPPATGTEASPTACPCCGLPCPRRSLRSNVRLAVEVRISRELREKLAEPGARAGRRRGGRIPTMGCLDLPGEDMRKTWRRFEVPTSKSSNSEDDLPEDYPVVKKMLHRLTADLTLDPGTAHRRLLISADRRSVQLAPPGTPAPPDGPKRFNQLPAVLGAQGFGAGRHCWEVETADAASCRDSSGEDADDEESHYAVGAAGESVQRKGCVRLCPAGAVWAVEGRGGRLWALTAPEPTLLGGVEPPPRRIRVDLDWERGRVAFYDGRSLDLLYAFQAPGPLGERIFPLFCTCDPRAPLRIVPAES

SEQ ID NO: 75054 - protein, 354 aa, Homo sapiens; identical to SEQ ID NO: 75041
  Payload ID: 14831
  Gene Symbol: RNF39
  Gene Name: ring finger protein 39
  Uniprot ID: Q9H2S5
  ENSP ID: ENSP00000415281

SEQ ID NO: 75055 - protein, 190 aa, Homo sapiens
  Payload ID: 14832
  Gene Symbol: RNF4
  Gene Name: ring finger protein 4
  Uniprot ID: P78317
  ENSP ID: ENSP00000315212
MSTRKRRGGAINSRQAQKRTREATSTPEISLEAEPIELVETAGDEIVDLTCESLEPVVVDLTHNDSVVIVDERRRPRRNARRLPQDHADSCVVSSDDEELSRDRDVYVTTHTPRNARDEGATGLRPSGTVSCPICMDGYSEIVQNGRLIVSTECGHVFCSQCLRDSLKNANTCPTCRKKINHKRYHPIYI

SEQ ID NO: 75056 - protein, 89 aa, Homo sapiens
  Payload ID: 14832
  Gene Symbol: RNF4
  Gene Name: ring finger protein 4
  ENSP ID: ENSP00000422500
MSTRKRRGGAINSRQAQKRTREATSTPEISLEAEPIELVETAGDEIVDLTCESLEPVVVDLTHNDSVVIVDGEWFRFLFHWVWRGNWHR

SEQ ID NO: 75057 - protein, 54 aa, Homo sapiens
  Payload ID: 14832
  Gene Symbol: RNF4
  Gene Name: ring finger protein 4
  ENSP ID: ENSP00000422619
MSTRKRRGGAINSRQAQKRTREATSTPEISLEAEPIELVETAGDEIVDLTCESL

SEQ ID NO: 75058 - protein, 101 aa, Homo sapiens
  Payload ID: 14832
  Gene Symbol: RNF4
  Gene Name: ring finger protein 4
  ENSP ID: ENSP00000422728
MSTRKRRGGAINSRQAQKRTREATSTPEISLEAEPIELVETAGDEIVDLTCESLEPVVVDLTHNDSVVIVDGPQVLSVVPSAWTDTQRSCRMDVSSFPQNA

SEQ ID NO: 75059 - protein, 47 aa, Homo sapiens
  Payload ID: 14832
  Gene Symbol: RNF4
  Gene Name: ring finger protein 4
  ENSP ID: ENSP00000422938
MSTRKRRGGAINSRQAQKRTREATSTPEISLEAEPIELVETGWGAVA

SEQ ID NO: 75060 - protein, 188 aa, Homo sapiens
  Payload ID: 14832
  Gene Symbol: RNF4
  Gene Name: ring finger protein 4
  ENSP ID: ENSP00000423100
MSTRKRRGGAINSRQAQKRTREATSTPEISLEAEPIELVETAGDEIVDLTCESLEPVVVDLTHNDSVVIVDERRRPRRNARRLPQDHADSCVVSSDDEELSRDRDVYVTTHTPRNARDEGATGLRPSGTVSCPICMDGYSEIVQNGRLIVSTECGHVFCSQCLRDSLKNANTCPTCRKKINHKRYHPI

SEQ ID NO: 75061 - protein, 5 aa, Homo sapiens
  Payload ID: 14832
  Gene Symbol: RNF4
  Gene Name: ring finger protein 4
  ENSP ID: ENSP00000423186
MSTRK

SEQ ID NO: 75062 - protein, 190 aa, Homo sapiens; identical to SEQ ID NO: 75055
  Payload ID: 14832
  Gene Symbol: RNF4
  Gene Name: ring finger protein 4
  Uniprot ID: P78317
  ENSP ID: ENSP00000424076

SEQ ID NO: 75063 - protein, 68 aa, Homo sapiens
  Payload ID: 14832
  Gene Symbol: RNF4
  Gene Name: ring finger protein 4
  ENSP ID: ENSP00000425667
MSTRKRRGGAINSRQAQKRTREATSTPEISLEAEPIELVETAGDEIVDLTCESLEPVVVDLTHNDSVV

SEQ ID NO: 75064 - protein, 43 aa, Homo sapiens
  Payload ID: 14832
  Gene Symbol: RNF4
  Gene Name: ring finger protein 4
  ENSP ID: ENSP00000425724
MSTRKRRGGAINSRQAQKRTREATSTPEISLEAEPIELVETDC

SEQ ID NO: 75065 - protein, 190 aa, Homo sapiens; identical to SEQ ID NO: 75055
  Payload ID: 14832
  Gene Symbol: RNF4
  Gene Name: ring finger protein 4
  Uniprot ID: P78317
  ENSP ID: ENSP00000426503

SEQ ID NO: 75066 - protein, 113 aa, Homo sapiens
  Payload ID: 14832
  Gene Symbol: RNF4
  Gene Name: ring finger protein 4
  Uniprot ID: P78317
  ENSP ID: ENSP00000426615
MSTRKRRGGAINSRQAQKRTREATSTPEISLEAEPIELVETAGDEIVDLTCESLEPVVVDLTHNDSVVIVDGPQVLSVVPSAWTDTQRSCRMDVSSFPQNAAMSSVASASVIP

SEQ ID NO: 75067 - protein, 106 aa, Homo sapiens
  Payload ID: 14832
  Gene Symbol: RNF4
  Gene Name: ring finger protein 4
  ENSP ID: ENSP00000427212
  MOD_RES (1)..(1): Any amino acid
XDHADSCVVSSDDEELSRDRDVYVTTHTPRNARDEGATGLRPSGTVSCPICMDGYSEIVQNGRLIVSTECGHVFCSQCLRDSLKNANTCPTCRKKINHKRLLLVLA

SEQ ID NO: 75068 - protein, 113 aa, Homo sapiens; identical to SEQ ID NO: 75066
  Payload ID: 14832
  Gene Symbol: RNF4
  Gene Name: ring finger protein 4
  Uniprot ID: P78317
  ENSP ID: ENSP00000446369

SEQ ID NO: 75069 - protein, 1001 aa, Homo sapiens
  Payload ID: 14833
  Gene Symbol: RNF40
  Gene Name: ring finger protein 40, E3 ubiquitin protein ligase
  Uniprot ID: O75150
  ENSP ID: ENSP00000325677
MSGPGNKRAAGDGGSGPPEKKLSREEKTTTTLIEPIRLGGISSTEEMDLKVLQFKNKKLAERLEQRQACEDELRERIEKLEKRQATDDATLLIVNRYWAQLDETVEALLRCHESQGELSSAPEAPGTQEGPTCDGTPLPEPGTSELRDPLLMQLRPPLSEPALAFVVALGASSSEEVELELQGRMEFSKAAVSRVVEASDRLQRRVEELCQRVYSRGDSEPLSEAAQAHTRELGRENRRLQDLATQLQEKHHRISLEYSELQDKVTSAETKVLEMETTVEDLQWDIEKLRKREQKLNKHLAEALEQLNSGYYVSGSSSGFQGGQITLSMQKFEMLNAELEENQELANSRMAELEKLQAELQGAVRTNERLKVALRSLPEEVVRETGEYRMLQAQFSLLYNESLQVKTQLDEARGLLLATKNSHLRHIEHMESDELGLQKKLRTEVIQLEDTLAQVRKEYEMLRIEFEQNLAANEQAGPINREMRHLISSLQNHNHQLKGDAQRYKRKLREVQAEIGKLRAQASGSAHSTPNLGHPEDSGVSAPAPGKEEGGPGPVSTPDNRKEMAPVPGTTTTTTSVKKEELVPSEEDFQGITPGAQGPSSRGREPEARPKRELREREGPSLGPPPVASALSRADREKAKVEETKRKESELLKGLRAELKKAQESQKEMKLLLDMYKSAPKEQRDKVQLMAAERKAKAEVDELRSRIRELEERDRRESKKIADEDALRRIRQAEEQIEHLQRKLGATKQEEEALLSEMDVTGQAFEDMQEQNGRLLQQLREKDDANFKLMSERIKANQIHKLLREEKDELGEQVLGLKSQVDAQLLTVQKLEEKERALQGSLGGVEKELTLRSQALELNKRKAVEAAQLAEDLKVQLEHVQTRLREIQPCLAESRAAREKESFNLKRAQEDISRLRRKLEKQRKVEVYADADEILQEEIKEYKARLTCPCCNTRKKDAVLTKCFHVFCFECVRGRYEARQRKCPKCNAAFGAHDFHRIYIS

SEQ ID NO: 75070 - protein, 901 aa, Homo sapiens
  Payload ID: 14833
  Gene Symbol: RNF40
  Gene Name: ring finger protein 40, E3 ubiquitin protein ligase
  Uniprot ID: O75150
  ENSP ID: ENSP00000350563
MSGPGNKRAAGDGGSGPPEKKLSREEKTTTTLIEPIRLGGISSTEEMDLKVLQFKNKKLAERLEQRQACEDELRERIEKLEKRQATDDATLLIVNRYWAQLDETVEALLRCHESQGELSSAPEAPGTQEGPTCDGTPLPEPGTSELRDPLLMQLRPPLSEPALAFVVALGASSSEEVELELQGRMEFSKAAVSRVVEASDRLQRRVEELCQRVYSRGDSEPLSEAAQAHTRELGRENRRLQDLATQLQEKHHRISLEYSELQDKVTSAETKVLEMETTVEDLQWDIEKLRKREQKLNKHLAEALEQLNSGYYVSGSSSGFQGGQITLSMQKSDELGLQKKLRTEVIQLEDTLAQVRKEYEMLRIEFEQNLAANEQAGPINREMRHLISSLQNHNHQLKGDAQRYKRKLREVQAEIGKLRAQASGSAHSTPNLGHPEDSGVSAPAPGKEEGGPGPVSTPDNRKEMAPVPGTTTTTTSVKKEELVPSEEDFQGITPGAQGPSSRGREPEARPKRELREREGPSLGPPPVASALSRADREKAKVEETKRKESELLKGLRAELKKAQESQKEMKLLLDMYKSAPKEQRDKVQLMAAERKAKAEVDELRSRIRELEERDRRESKKIADEDALRRIRQAEEQIEHLQRKLGATKQEEEALLSEMDVTGQAFEDMQEQNGRLLQQLREKDDANFKLMSERIKANQIHKLLREEKDELGEQVLGLKSQVDAQLLTVQKLEEKERALQGSLGGVEKELTLRSQALELNKRKAVEAAQLAEDLKVQLEHVQTRLREIQPCLAESRAAREKESFNLKRAQEDISRLRRKLEKQRKVEVYADADEILQEEIKEYKARLTCPCCNTRKKDAVLTKCFHVFCFECVRGRYEARQRKCPKCNAAFGAHDFHRIYIS

SEQ ID NO: 75071 - protein, 961 aa, Homo sapiens
  Payload ID: 14833
  Gene Symbol: RNF40
  Gene Name: ring finger protein 40, E3 ubiquitin protein ligase
  ENSP ID: ENSP00000455180
MSGPGNKRAAGDGGSGPPEKKLSREEKTTTTLIEPIRLGGISSTEEMDLKVLQFKNKKLAERLEQRQACEDELRERIEKLEKRQATDDATLLIVNRYWAQLDETVEALLRCHESQGELSSAPEAPGTQEGPTCDGTPLPEPGTSELRDPLLMQLRPPLSEPALAFVVALGASSSEEVELELQGRMEFSKAAVSRVVEASDRLQRRVEELCQRVYSRGDSEPLSEAAQAHTRELGRENRRLQDLATQLQEKHHRISLEYSELQDKVTSAETKVLEMETTVEDLQWDIEKLRKREQKLNKHLAEALEQLNSGYYVSGSSSGFQGGQITLSMQKVALRSLPEEVVRETGEYRMLQAQFSLLYNESLQVKTQLDEARGLLLATKNSHLRHIEHMESDELGLQKKLRTEVIQLEDTLAQVRKEYEMLRIEFEQNLAANEQAGPINREMRHLISSLQNHNHQLKGDAQRYKRKLREVQAEIGKLRAQASGSAHSTPNLGHPEDSGVSAPAPGKEEGGPGPVSTPDNRKEMAPVPGTTTTTTSVKKEELVPSEEDFQGITPGAQGPSSRGREPEARPKRELREREGPSLGPPPVASALSRADREKAKVEETKRKESELLKGLRAELKKAQESQKEMKLLLDMYKSAPKEQRDKVQLMAAERKAKAEVDELRSRIRELEERDRRESKKIADEDALRRIRQAEEQIEHLQRKLGATKQEEEALLSEMDVTGQAFEDMQEQNGRLLQQLREKDDANFKLMSERIKANQIHKLLREEKDELGEQVLGLKSQVDAQLLTVQKLEEKERALQGSLGGVEKELTLRSQALELNKRKAVEAAQLAEDLKVQLEHVQTRLREIQPCLAESRAAREKESFNLKRAQEDISRLRRKLEKQRKVEVYADADEILQEEIKEYKARLTCPCCNTRKKDAVLTKCFHVFCFECVRGRYEARQRKCPKCNAAFGAHDFHRIYIS

SEQ ID NO: 75072 - protein, 111 aa, Homo sapiens
  Payload ID: 14833
  Gene Symbol: RNF40
  Gene Name: ring finger protein 40, E3 ubiquitin protein ligase
  ENSP ID: ENSP00000455678
MSGPGNKRAAGDGGSGPPEKKLSREEKTTTTLIEPIRLGGISSTEEMDLKVLQFKNKKLAERLEQRQACEDELRERIEKLEKRQATDDATLLIVNRYWAQLDETVEALLRC

SEQ ID NO: 75073 - protein, 174 aa, Homo sapiens
  Payload ID: 14833
  Gene Symbol: RNF40
  Gene Name: ring finger protein 40, E3 ubiquitin protein ligase
  ENSP ID: ENSP00000456538
MEFSKAAVSRVVEASDRLQRRVEELCQRVYSRGDSEPLSEAAQAHTRELGRENRRLQDLATQLQEKHHRISLEYSELQDKVTSAETKVLEMETTVEDLQWDIEKLRKREQKLNKHLAEALEQLNSGYYVSGSSSGFQGGQITLSMQKFEMLNAELEENQELANSRMAELEKLQA

SEQ ID NO: 75074 - protein, 129 aa, Homo sapiens
  Payload ID: 14833
  Gene Symbol: RNF40
  Gene Name: ring finger protein 40, E3 ubiquitin protein ligase
  ENSP ID: ENSP00000457697
MSGPGNKRAAGDGGSGPPEKKLSREEKTTTTLIEPIRLGGISSTEEMDLKVLQFKNKKLAERLEQRQACEDELRERIEKLEKRQATDDATLLIVNRYWAQLDETVEALLRCHESQGELSSAPEAPGTQE

SEQ ID NO: 75075 - protein, 144 aa, Homo sapiens
  Payload ID: 14833
  Gene Symbol: RNF40
  Gene Name: ring finger protein 40, E3 ubiquitin protein ligase
  ENSP ID: ENSP00000460142
MSGPGNKRAAGDGGSGPPEKKLSREEKTTTTLIEPIRLGGISSTEEMDLKVLQFKNKKLAERLEQRQACEDELRERIEKLEKRQATDDATLLIVNRYWAQLDETVEALLRCHESQGELSSAPEAPGTQEGPTCDGTPLPEPGTS

SEQ ID NO: 75076 - protein, 14 aa, Homo sapiens
  Payload ID: 14833
  Gene Symbol: RNF40
  Gene Name: ring finger protein 40, E3 ubiquitin protein ligase
  ENSP ID: ENSP00000473507
AAFGAHDFHRIYIS

SEQ ID NO: 75077 - protein, 177 aa, Homo sapiens
  Payload ID: 14833
  Gene Symbol: RNF40
  Gene Name: ring finger protein 40, E3 ubiquitin protein ligase
  ENSP ID: ENSP00000477937
KLLREEKDELGEQVLGLKSQVDAQLLTVQKLEEKERALQGSLGGVEKELTLRSQALELNKRKAVEAAQLAEDLKVQLEHVQTRLREIQPCLAESRAAREKESFNLKRAQEDISRLRRKLEKQRKVEVYADADEILQEEIKEYKGYGRMRCSLQCGGLGLDSSCCQLGVWALSELFPS

SEQ ID NO: 75078 - protein, 317 aa, Homo sapiens
  Payload ID: 14834
  Gene Symbol: RNF41
  Gene Name: ring finger protein 41, E3 ubiquitin protein ligase
  Uniprot ID: Q9H4P4
  ENSP ID: ENSP00000342755
MGYDVTRFQGDVDEDLICPICSGVLEEPVQAPHCEHAFCNACITQWFSQQQTCPVDRSVVTVAHLRPVPRIMRNMLSKLQIACDNAVFGCSAVVRLDNLMSHLSDCEHNPKRPVTCEQGCGLEMPKDELPNHNCIKHLRSVVQQQQTRIAELEKTSAEHKHQLAEQKRDIQLLKAYMRAIRSVNPNLQNLEETIEYNEILEWVNSLQPARVTRWGGMISTPDAVLQAVIKRSLVESGCPASIVNELIENAHERSWPQGLATLETRQMNRRYYENYVAKRIPGKQAVVVMACENQHMGDDMVQEPGLVMIFAHGVEEI

SEQ ID NO: 75079 - protein, 246 aa, Homo sapiens
  Payload ID: 14834
  Gene Symbol: RNF41
  Gene Name: ring finger protein 41, E3 ubiquitin protein ligase
  Uniprot ID: Q9H4P4
  ENSP ID: ENSP00000377581
MRNMLSKLQIACDNAVFGCSAVVRLDNLMSHLSDCEHNPKRPVTCEQGCGLEMPKDELPNHNCIKHLRSVVQQQQTRIAELEKTSAEHKHQLAEQKRDIQLLKAYMRAIRSVNPNLQNLEETIEYNEILEWVNSLQPARVTRWGGMISTPDAVLQAVIKRSLVESGCPASIVNELIENAHERSWPQGLATLETRQMNRRYYENYVAKRIPGKQAVVVMACENQHMGDDMVQEPGLVMIFAHGVEEI

SEQ ID NO: 75080 - protein, 190 aa, Homo sapiens
  Payload ID: 14834
  Gene Symbol: RNF41
  Gene Name: ring finger protein 41, E3 ubiquitin protein ligase
  ENSP ID: ENSP00000446595
MGYDVTRFQGDVDEDLICPICSGVLEEPVQAPHCEHAFCNACITQWFSQQQTCPVDRSVVTVAHLRPVPRIMRNMLSKLQIACDNAVFGCSAVVRLDNLMSHLSDCEHNPKRPVTCEQGCGLEMPKDELPNHNCIKHLRSVVQQQQTRIAELEKTSAEHKHQLAEQKRDIQLLKAYMRAIRSVNPNLQNL

SEQ ID NO: 75081 - protein, 317 aa, Homo sapiens; identical to SEQ ID NO: 75078
  Payload ID: 14834
  Gene Symbol: RNF41
  Gene Name: ring finger protein 41, E3 ubiquitin protein ligase
  Uniprot ID: Q9H4P4
  ENSP ID: ENSP00000447303

SEQ ID NO: 75082 - protein, 201 aa, Homo sapiens
  Payload ID: 14834
  Gene Symbol: RNF41
  Gene Name: ring finger protein 41, E3 ubiquitin protein ligase
  ENSP ID: ENSP00000448187
MGYDVTRFQGDVDEDLICPICSGVLEEPVQAPHCEHAFCNACITQWFSQQQTCPVDRSVVTVAHLRPVPRIMRNMLSKLQIACDNAVFGCSAVVRLDNLMSHLSDCEHNPKRPVTCEQGCGLEMPKDELPNHNCIKHLRSVVQQQQTRIAELEKTSAEHKHQLAEQKRDIQLLKAYMRAIRSVNPNLQNLEETIEYNEILE

SEQ ID NO: 75083 - protein, 61 aa, Homo sapiens
  Payload ID: 14834
  Gene Symbol: RNF41
  Gene Name: ring finger protein 41, E3 ubiquitin protein ligase
  ENSP ID: ENSP00000448330
MGYDVTRFQGDVDEDLICPICSGVLEEPVQVISLPALPDQSQLYHPGASMRRSSRLPGTSL

SEQ ID NO: 75084 - protein, 130 aa, Homo sapiens
  Payload ID: 14834
  Gene Symbol: RNF41
  Gene Name: ring finger protein 41, E3 ubiquitin protein ligase
  ENSP ID: ENSP00000449575
MRNMLSKLQIACDNAVFGCSAVVRLDNLMSHLSDCEHNPKRPVTCEQGCGLEMPKDELPNHNCIKHLRSVVQQQQTRIAELEKTSAEHKHQLAEQKRDIQLLKAYMRAIRSVNPNLQNLEETIEYNEILE

SEQ ID NO: 75085 - protein, 146 aa, Homo sapiens
  Payload ID: 14834
  Gene Symbol: RNF41
  Gene Name: ring finger protein 41, E3 ubiquitin protein ligase
  ENSP ID: ENSP00000450164
MRNMLSKLQIACDNAVFGCSAVVRLDNLMSHLSDCEHNPKRPVTCEQGCGLEMPKDELPNHNCIKHLRSVVQQQQTRIAELEKTSAEHKHQLAEQKRDIQLLKAYMRAIRSVNPNLQNLEETIEYNEILEWVNSLQPARVTRWGGM

SEQ ID NO: 75086 - protein, 317 aa, Homo sapiens; identical to SEQ ID NO: 75078
  Payload ID: 14834
  Gene Symbol: RNF41
  Gene Name: ring finger protein 41, E3 ubiquitin protein ligase
  Uniprot ID: Q9H4P4
  ENSP ID: ENSP00000484671

SEQ ID NO: 75087 - protein, 783 aa, Homo sapiens
  Payload ID: 14835
  Gene Symbol: RNF43
  Gene Name: ring finger protein 43
  Uniprot ID: Q68DV7
  ENSP ID: ENSP00000385328
MSGGHQLQLAALWPWLLMATLQAGFGRTGLVLAAAVESERSAEQKAIIRVIPLKMDPTGKLNLTLEGVFAGVAEITPAEGKLMQSHPLYLCNASDDDNLEPGFISIVKLESPRRAPRPCLSLASKARMAGERGASAVLFDITEDRAAAEQLQQPLGLTWPVVLIWGNDAEKLMEFVYKNQKAHVRIELKEPPAWPDYDVWILMTVVGTIFVIILASVLRIRCRPRHSRPDPLQQRTAWAISQLATRRYQASCRQARGEWPDSGSSCSSAPVCAICLEEFSEGQELRVISCLHEFHRNCVDPWLHQHRTCPLCMFNITEGDSFSQSLGPSRSYQEPGRRLHLIRQHPGHAHYHLPAAYLLGPSRSAVARPPRPGPFLPSQEPGMGPRHHRFPRAAHPRAPGEQQRLAGAQHPYAQGWGLSHLQSTSQHPAACPVPLRRARPPDSSGSGESYCTERSGYLADGPASDSSSGPCHGSSSDSVVNCTDISLQGVHGSSSTFCSSLSSDFDPLVYCSPKGDPQRVDMQPSVTSRPRSLDSVVPTGETQVSSHVHYHRHRHHHYKKRFQWHGRKPGPETGVPQSRPPIPRTQPQPEPPSPDQQVTRSNSAAPSGRLSNPQCPRALPEPAPGPVDASSICPSTSSLFNLQKSSLSARHPQRKRRGGPSEPTPGSRPQDATVHPACQIFPHYTPSVAYPWSPEAHPLICGPPGLDKRLLPETPGPCYSNSQPVWLCLTPRQPLEPHPPGEGPSEWSSDTAEGRPCPYPHCQVLSAQPGSEEELEELCEQAV

SEQ ID NO: 75088 - protein, 742 aa, Homo sapiens
  Payload ID: 14835
  Gene Symbol: RNF43
  Gene Name: ring finger protein 43
  ENSP ID: ENSP00000462447
MAGERGASAVLFDITEDRAAAEQLQQPLGLTWPVVLIWGNDAEKLMEFVYKNQKAHVRIELKEPPAWPDYDVWILMTVVGTIFVIILASVLRIRCRPRHSRPDPLQQRTAWAISQLATRRYQASCRQARGEWPDSGSSCSSAPVCAICLEEFSEGQELRVISCLHEFHRNCVDPWLHQHRTCPLCMFNITEGDSFSQSLGPSRSYQEPGRRLHLIRQHPGHAHYHLPAAYLLGPSRSAVARPPRPGPFLPSQEPGMGPRHHRFPRAAHPRAPGEQQRLAGAQHPYAQGWGLSHLQSTSQHPAACPVPLRRARPPDSSGSGESYCTERSGYLADGPASDSSSGPCHGSSSDSVVNCTDISLQGVHGSSSTFCSSLSSDFDPLVYCSPKGDPQRVDMQPSVTSRPRSLDSVVPTGETQVSSHVHYHRHRHHHYKKRFQWHGRKPGPETGVPQSRPPIPRTQPQPEPPSPDQQVTRSNSAAPSGRLSNPQCPRALPEPAPGPVDASSICPSTSSLFNLQKSSLSARHPQRKRRGGPSEPTPGSRPQDATVHPACQIFPHYTPSVAYPWSPEAHPLICGPPGLDKRLLPETPGPCYSNSQPVWLCLTPRQPLEPHPPGEGPSEWSSDTAEGRPCPYPHCQVLSAQPGEFSEGSGCGRERRLQLNISGQVKSANKGLMEAEKDTAEMTTKILNHRDSVSCWLECRNTPPLPGATPLVGRSQGGPREVLVWLRHQKGTWKAGCDGSCL

SEQ ID NO: 75089 - protein, 742 aa, Homo sapiens
  Payload ID: 14835
  Gene Symbol: RNF43
  Gene Name: ring finger protein 43
  Uniprot ID: Q68DV7
  ENSP ID: ENSP00000462502
MSGGHQLQLAALWPWLLMATLQAGFGRTGLVLAAAVESERSAEQKAIIRVIPLKMDPTGKLNLTLEGVFAGVAEITPAEGKLMQARMAGERGASAVLFDITEDRAAAEQLQQPLGLTWPVVLIWGNDAEKLMEFVYKNQKAHVRIELKEPPAWPDYDVWILMTVVGTIFVIILASVLRIRCRPRHSRPDPLQQRTAWAISQLATRRYQASCRQARGEWPDSGSSCSSAPVCAICLEEFSEGQELRVISCLHEFHRNCVDPWLHQHRTCPLCMFNITEGDSFSQSLGPSRSYQEPGRRLHLIRQHPGHAHYHLPAAYLLGPSRSAVARPPRPGPFLPSQEPGMGPRHHRFPRAAHPRAPGEQQRLAGAQHPYAQGWGLSHLQSTSQHPAACPVPLRRARPPDSSGSGESYCTERSGYLADGPASDSSSGPCHGSSSDSVVNCTDISLQGVHGSSSTFCSSLSSDFDPLVYCSPKGDPQRVDMQPSVTSRPRSLDSVVPTGETQVSSHVHYHRHRHHHYKKRFQWHGRKPGPETGVPQSRPPIPRTQPQPEPPSPDQQVTRSNSAAPSGRLSNPQCPRALPEPAPGPVDASSICPSTSSLFNLQKSSLSARHPQRKRRGGPSEPTPGSRPQDATVHPACQIFPHYTPSVAYPWSPEAHPLICGPPGLDKRLLPETPGPCYSNSQPVWLCLTPRQPLEPHPPGEGPSEWSSDTAEGRPCPYPHCQVLSAQPGSEEELEELCEQAV

SEQ ID NO: 75090 - protein, 783 aa, Homo sapiens; identical to SEQ ID NO: 75087
  Payload ID: 14835
  Gene Symbol: RNF43
  Gene Name: ring finger protein 43
  Uniprot ID: Q68DV7
  ENSP ID: ENSP00000462764

SEQ ID NO: 75091 - protein, 783 aa, Homo sapiens; identical to SEQ ID NO: 75087
  Payload ID: 14835
  Gene Symbol: RNF43
  Gene Name: ring finger protein 43
  Uniprot ID: Q68DV7
  ENSP ID: ENSP00000463069

SEQ ID NO: 75092 - protein, 656 aa, Homo sapiens
  Payload ID: 14835
  Gene Symbol: RNF43
  Gene Name: ring finger protein 43
  Uniprot ID: Q68DV7
  ENSP ID: ENSP00000463716
MAGERGASAVLFDITEDRAAAEQLQQPLGLTWPVVLIWGNDAEKLMEFVYKNQKAHVRIELKEPPAWPDYDVWILMTVVGTIFVIILASVLRIRCRPRHSRPDPLQQRTAWAISQLATRRYQASCRQARGEWPDSGSSCSSAPVCAICLEEFSEGQELRVISCLHEFHRNCVDPWLHQHRTCPLCMFNITEGDSFSQSLGPSRSYQEPGRRLHLIRQHPGHAHYHLPAAYLLGPSRSAVARPPRPGPFLPSQEPGMGPRHHRFPRAAHPRAPGEQQRLAGAQHPYAQGWGLSHLQSTSQHPAACPVPLRRARPPDSSGSGESYCTERSGYLADGPASDSSSGPCHGSSSDSVVNCTDISLQGVHGSSSTFCSSLSSDFDPLVYCSPKGDPQRVDMQPSVTSRPRSLDSVVPTGETQVSSHVHYHRHRHHHYKKRFQWHGRKPGPETGVPQSRPPIPRTQPQPEPPSPDQQVTRSNSAAPSGRLSNPQCPRALPEPAPGPVDASSICPSTSSLFNLQKSSLSARHPQRKRRGGPSEPTPGSRPQDATVHPACQIFPHYTPSVAYPWSPEAHPLICGPPGLDKRLLPETPGPCYSNSQPVWLCLTPRQPLEPHPPGEGPSEWSSDTAEGRPCPYPHCQVLSAQPGSEEELEELCEQAV

SEQ ID NO: 75093 - protein, 432 aa, Homo sapiens
  Payload ID: 14836
  Gene Symbol: RNF44
  Gene Name: ring finger protein 44
  Uniprot ID: Q7L0R7
  ENSP ID: ENSP00000274811
MRPWALAVTRWPPSAPVGQRRFSAGPGSTPGQLWGSPGLEGPLASPPARDERLPSQQPPSRPPHLPVEERRASAPAGGSPRMLHPATQQSPFMVDLHEQVHQGPVPLSYTVTTVTTQGFPLPTGQHIPGCSAQQLPACSVMFSGQHYPLCCLPPPLIQACTMQQLPVPYQAYPHLISSDHYILHPPPPAPPPQPTHMAPLGQFVSLQTQHPRMPLQRLDNDVDLRGDQPSLGSFTYSTSAPGPALSPSVPLHYLPHDPLHQELSFGVPYSHMMPRRLSTQRYRLQQPLPPPPPPPPPPPYYPSFLPYFLSMLPMSPTAMGPTISLDLDVDDVEMENYEALLNLAERLGDAKPRGLTKADIEQLPSYRFNPDSHQSEQTLCVVCFSDFEARQLLRVLPCNHEFHTKCVDKWLKANRTCPICRADASEVPREAE

SEQ ID NO: 75094 - protein, 45 aa, Homo sapiens
  Payload ID: 14836
  Gene Symbol: RNF44
  Gene Name: ring finger protein 44
  ENSP ID: ENSP00000424699
MRPWALAVTRWPPSAPVGQRRFSAGPGSTPGQLWGSRRPDLHTSP

SEQ ID NO: 75095 - protein, 226 aa, Homo sapiens
  Payload ID: 14836
  Gene Symbol: RNF44
  Gene Name: ring finger protein 44
  ENSP ID: ENSP00000425253
  MOD_RES (1)..(1): Any amino acid
XPSVPLHYLPHDPLHQELSFGVPYSHMMPRRLSTQRYRLQQPLPPPPPPPPPPPYYPSFLPYFLSMLPMSPTAMGPTISLDLDVDDVEMENYEALLNLAERLGDAKPRGLTKADIEQLPSYRFNPDSHQSEQTLCVVCFSDFEARQLLRVLPCNHEFHTKCVDKWLKVTLPRSAPGYSSCSDGGMGWPGLFPSLSLSSSRKFWLQRTKSPQVAAQMWWVGAGESNA

SEQ ID NO: 75096 - protein, 46 aa, Homo sapiens
  Payload ID: 14836
  Gene Symbol: RNF44
  Gene Name: ring finger protein 44
  ENSP ID: ENSP00000427604
MRPWALAVTRWPPSAPVGQRRFSAGPGSTPGQLWGSSRRPDLHTSP

SEQ ID NO: 75097 - protein, 180 aa, Homo sapiens
  Payload ID: 14837
  Gene Symbol: RNF5
  Gene Name: ring finger protein 5, E3 ubiquitin protein ligase
  Uniprot ID: Q99942
  ENSP ID: ENSP00000364235
MAAAEEEDGGPEGPNRERGGAGATFECNICLETAREAVVSVCGHLYCWPCLHQWLETRPERQECPVCKAGISREKVVPLYGRGSQKPQDPRLKTPPRPQGQRPAPESRGGFQPFGDTGGFHFSFGVGAFPFGFFTTVFNAHEPFRRGTGVDLGQGHPASSWQDSLFLFLAIFFFFWLLSI

SEQ ID NO: 75098 - protein, 180 aa, Homo sapiens; identical to SEQ ID NO: 75097
  Payload ID: 14837
  Gene Symbol: RNF5
  Gene Name: ring finger protein 5, E3 ubiquitin protein ligase
  Uniprot ID: Q99942
  ENSP ID: ENSP00000387879

SEQ ID NO: 75099 - protein, 180 aa, Homo sapiens; identical to SEQ ID NO: 75097
  Payload ID: 14837
  Gene Symbol: RNF5
  Gene Name: ring finger protein 5, E3 ubiquitin protein ligase
  Uniprot ID: Q99942
  ENSP ID: ENSP00000388795

SEQ ID NO: 75100 - protein, 180 aa, Homo sapiens; identical to SEQ ID NO: 75097
  Payload ID: 14837
  Gene Symbol: RNF5
  Gene Name: ring finger protein 5, E3 ubiquitin protein ligase
  Uniprot ID: Q99942
  ENSP ID: ENSP00000401172

SEQ ID NO: 75101 - protein, 180 aa, Homo sapiens; identical to SEQ ID NO: 75097
  Payload ID: 14837
  Gene Symbol: RNF5
  Gene Name: ring finger protein 5, E3 ubiquitin protein ligase
  Uniprot ID: Q99942
  ENSP ID: ENSP00000413131

SEQ ID NO: 75102 - protein, 180 aa, Homo sapiens; identical to SEQ ID NO: 75097
  Payload ID: 14837
  Gene Symbol: RNF5
  Gene Name: ring finger protein 5, E3 ubiquitin protein ligase
  Uniprot ID: Q99942
  ENSP ID: ENSP00000415127

SEQ ID NO: 75103 - protein, 180 aa, Homo sapiens; identical to SEQ ID NO: 75097
  Payload ID: 14837
  Gene Symbol: RNF5
  Gene Name: ring finger protein 5, E3 ubiquitin protein ligase
  Uniprot ID: Q99942
  ENSP ID: ENSP00000415784

SEQ ID NO: 75104 - protein, 91 aa, Homo sapiens
  Payload ID: 14837
  Gene Symbol: RNF5
  Gene Name: ring finger protein 5, E3 ubiquitin protein ligase
  ENSP ID: ENSP00000434880
MAAAEEEDGGPEGPNRERGGAGATFECNICLETAREAVVSVCGHLYCWPCLHQWLETRPERQECPVCKAGISREKVVPLYGRGSQKPQDPR

SEQ ID NO: 75105 - protein, 113 aa, Homo sapiens
  Payload ID: 14838
  Gene Symbol: RNF7
  Gene Name: ring finger protein 7
  Uniprot ID: Q9UBF6
  ENSP ID: ENSP00000273480
MADVEDGEETCALASHSGSSGSKSGGDKMFSLKKWNAVAMWSWDVECDTCAICRVQVMDACLRCQAENKQEDCVVVWGECNHSFHNCCMSLWVKQNNRCPLCQQDWVVQRIGK

SEQ ID NO: 75106 - protein, 90 aa, Homo sapiens
  Payload ID: 14838
  Gene Symbol: RNF7
  Gene Name: ring finger protein 7
  Uniprot ID: Q9UBF6
  ENSP ID: ENSP00000376725
MADVEDGEETCALASHSGSSGSKSGGDKMFSLKKWNAVAMWSWDVECDTCAICRVQMPVLDVKLKTNKRTVLWSGENVIIPSTTAACPCG

SEQ ID NO: 75107 - protein, 97 aa, Homo sapiens
  Payload ID: 14838
  Gene Symbol: RNF7
  Gene Name: ring finger protein 7
  Uniprot ID: Q9UBF6
  ENSP ID: ENSP00000419084
MADVEDGEETCALASHSGSSGSKSGGDKMFSLKKWNAVAMWSWDVECDTCAICRVQVMVVWGECNHSFHNCCMSLWVKQNNRCPLCQQDWVVQRIGK

SEQ ID NO: 75108 - protein, 108 aa, Homo sapiens
  Payload ID: 14838
  Gene Symbol: RNF7
  Gene Name: ring finger protein 7
  Uniprot ID: Q9UBF6
  ENSP ID: ENSP00000419339
MADVEDGEETCALASHSGSSGSKSGGDKMFSLKKWNAVAMWSWDVECDTCAICRVQVMDEGIGVRNWSEALNLINASEMGFDCRSGSTALAVPSVSLASHQPCLDDHR

SEQ ID NO: 75109 - protein, 68 aa, Homo sapiens
  Payload ID: 14838
  Gene Symbol: RNF7
  Gene Name: ring finger protein 7
  ENSP ID: ENSP00000419979
MADVEDGEETCALASHSGSSGSKSGGDKMFSLKKWNAVAMWSWDVECDTCAICRVQMRELEFVIGPRP

SEQ ID NO: 75110 - protein, 98 aa, Homo sapiens
  Payload ID: 14839
  Gene Symbol: RNF8
  Gene Name: ring finger protein 8, E3 ubiquitin protein ligase
  Uniprot ID: O76064
  ENSP ID: ENSP00000229866
MGEPGFFVTGDRAGGRSWCLRRVGMSAGWLLLEDGCEVTVGRGFGVTYQLVSKICPLMISRNHCVLKQNPEGQWTIMDNKSFPSEKAEDFTAAGERFL

SEQ ID NO: 75111 - protein, 485 aa, Homo sapiens
  Payload ID: 14839
  Gene Symbol: RNF8
  Gene Name: ring finger protein 8, E3 ubiquitin protein ligase
  Uniprot ID: O76064
  ENSP ID: ENSP00000362578
MGEPGFFVTGDRAGGRSWCLRRVGMSAGWLLLEDGCEVTVGRGFGVTYQLVSKICPLMISRNHCVLKQNPEGQWTIMDNKSLNGVWLNRARLEPLRVYSIHQGDYIQLGVPLENKENAEYEYEVTEEDWETIYPCLSPKNDQMIEKNKELRTKRKFSLDELAGPGAEGPSNLKSKINKVSCESGQPVKSQGKGEVASTPSDNLDPKLTALEPSKTTGAPIYPGFPKVTEVHHEQKASNSSASQRSLQMFKVTMSRILRLKIQMQEKHEAVMNVKKQTQKGNSKKVVQMEQELQDLQSQLCAEQAQQQARVEQLEKTFQEEEQHLQGLEIAQGEKDLKQQLAQALQEHWALMEELNRSKKDFEAIIQAKNKELEQTKEEKEKMQAQKEEVLSHMNDVLENELQCIICSEYFIEAVTLNCAHSFCSYCINEWMKRKIECPICRKDIKSKTYSLVLDNCINKMVNNLSSEVKERRIVLIRERKAKRLF

SEQ ID NO: 75112 - protein, 208 aa, Homo sapiens
  Payload ID: 14839
  Gene Symbol: RNF8
  Gene Name: ring finger protein 8, E3 ubiquitin protein ligase
  ENSP ID: ENSP00000417599
  MOD_RES (1)..(1): Any amino acid
XPSKTTGAPIYPGFPKVTEVHHEQKASNSSASQRSLQMFKVTMSRILRLKIQMQEKHEAVMNVKKQTQKGNSKKVVQMEQELQDLQSQLCAEQAQQQARVEQLEKTFQEEEQHLQGLEIAQGEKDLKQQLAQALQEEEKEKMQAQKEEVLSHMNDVLENELQCIICSEYFIEQRDCSEDRALRAFERLPGSASLRWSGGFSLAVTPLL

SEQ ID NO: 75113 - protein, 205 aa, Homo sapiens
  Payload ID: 14839
  Gene Symbol: RNF8
  Gene Name: ring finger protein 8, E3 ubiquitin protein ligase
  ENSP ID: ENSP00000417736
MISRNHCVLKQNPEGQWTIMDNKSLNGVWLNRARLEPLRVYSIHQGDYIQLGVPLENKENAEYEYEVTEEDWETIYPCLSPKNDQMIEKNKELRTKRKFSLDELAGPGAEGPSNLKSKINKVSCESGQPVKSQGKGEVASTPSDNLDPKLTALEPSKTTGAPIYPGFPKVTEVHHEQKASNSSASQRSLQMFKVTMSRILRLKIQ

SEQ ID NO: 75114 - protein, 448 aa, Homo sapiens
  Payload ID: 14839
  Gene Symbol: RNF8
  Gene Name: ring finger protein 8, E3 ubiquitin protein ligase
  Uniprot ID: O76064
  ENSP ID: ENSP00000418879
MGEPGFFVTGDRAGGRSWCLRRVGMSAGWLLLEDGCEVTVGRGFGVTYQLVSKICPLMISRNHCVLKQNPEGQWTIMDNKSLNGVWLNRARLEPLRVYSIHQGDYIQLGVPLENKENAEYEYEVTEEDWETIYPCLSPKNDQMIEKNKELRTKRKFSLDELAGPGAEGPSNLKSKINKVSCESGQPVKSQGKGEVASTPSDNLDPKLTALEPSKTTGAPIYPGFPKVTEVHHEQKASNSSASQRSLQMFKVTMSRILRLKIQMQEKHEAVMNVKKQTQKGNSKKVVQMEQELQDLQSQLCAEQAQQQARVEQLEKTFQEEEQHLQGLEIAQGEKDLKQQLAQALQEHWALMEELNRSKKDFEAIIQAKNKELEQTKEEKEKMQAQKEEVLSHMNDVLENELQCIICSEYFIEQRDCSEDRALRAFERLPGSASLRWSGGFSLAVTPLL

SEQ ID NO: 75115 - protein, 89 aa, Homo sapiens
  Payload ID: 14839
  Gene Symbol: RNF8
  Gene Name: ring finger protein 8, E3 ubiquitin protein ligase
  ENSP ID: ENSP00000419859
MGEPGFFVTGDRAGGRSWCLRRVGMSAGWLLLEDGCEVTVGRGFGVTYQLVSKICPLMISRNHCVLKQNPEGQWTIMDNKGTTSLSKER

SEQ ID NO: 75116 - protein, 49 aa, Homo sapiens
  Payload ID: 14839
  Gene Symbol: RNF8
  Gene Name: ring finger protein 8, E3 ubiquitin protein ligase
  ENSP ID: ENSP00000420268
MGEPGFFVTGDRAGGRSWCLRRVGMSAGWLLLEDGCEGCYELDWSNRKV

SEQ ID NO: 75117 - protein, 624 aa, Homo sapiens
  Payload ID: 14840
  Gene Symbol: RLIM
  Gene Name: ring finger protein, LIM domain interacting
  Uniprot ID: Q9NVW2
  ENSP ID: ENSP00000253571
MENSDSNDKGSGDQSAAQRRSQMDRLDREEAFYQFVNNLSEEDYRLMRDNNLLGTPGESTEEELLRRLQQIKEGPPPQNSDENRGGDSSDDVSNGDSIIDWLNSVRQTGNTTRSGQRGNQSWRAVSRTNPNSGDFRFSLEINVNRNNGSQNSENENEPSARRSSGENVENNSQRQVENPRSESTSARPSRSERNSTEALTEVPPTRGQRRARSRSPDHRRTRARAERSRSPLHPMSEIPRRSHHSISSQTFEHPLVNETEGSSRTRHHVTLRQQISGPELLSRGLFAASGTRNASQGAGSSDTAASGESTGSGQRPPTIVLDLQVRRVRPGEYRQRDSIASRTRSRSQTPNNTVTYESERGGFRRTFSRSERAGVRTYVSTIRIPIRRILNTGLSETTSVAIQTMLRQIMTGFGELSYFMYSDSDSEPTGSVSNRNMERAESRSGRGGSGGGSSSGSSSSSSSSSSSSSSSSSSSSPSSSSGGESSETSSDLFEGSNEGSSSSGSSGARREGRHRAPVTFDESGSLPFLSLAQFFLLNEDDDDQPRGLTKEQIDNLAMRSFGENDALKTCSVCITEYTEGNKLRKLPCSHEYHVHCIDRWLSENSTCPICRRAVLASGNRESVV

SEQ ID NO: 75118 - protein, 624 aa, Homo sapiens; identical to SEQ ID NO: 75117
  Payload ID: 14840
  Gene Symbol: RLIM
  Gene Name: ring finger protein, LIM domain interacting
  Uniprot ID: Q9NVW2
  ENSP ID: ENSP00000328059

SEQ ID NO: 75119 - protein, 435 aa, Homo sapiens
  Payload ID: 14841
  Gene Symbol: RNFT1
  Gene Name: ring finger protein, transmembrane 1
  Uniprot ID: Q5M7Z0
  ENSP ID: ENSP00000304670
MPLFLLSLPTPPSASGHERRQRPEAKTSGSEKKYLRAMQANRSQLHSPPGTGSSEDASTPQCVHTRLTGEGSCPHSGDVHIQINSIPKECAENASSRNIRSGVHSCAHGCVHSRLRGHSHSEARLTDDTAAESGDHGSSSFSEFRYLFKWLQKSLPYILILSVKLVMQHITGISLGIGLLTTFMYANKSIVNQVFLRERSSKIQCAWLLVFLAGSSVLLYYTFHSQSLYYSLIFLNPTLDHLSFWEVFWIVGITDFILKFFFMGLKCLILLVPSFIMPFKSKGYWYMLLEELCQYYRTFVPIPVWFRYLISYGEFGNVTRWSLGILLALLYLILKLLEFFGHLRTFRQVLRIFFTQPSYGVAASKRQCSDVDDICSICQAEFQKPILLICQHIFCEECMTLWFNREKTCPLCRTVISDHINKWKDGATSSHLQIY

SEQ ID NO: 75120 - protein, 198 aa, Homo sapiens
  Payload ID: 14841
  Gene Symbol: RNFT1
  Gene Name: ring finger protein, transmembrane 1
  ENSP ID: ENSP00000389049
MPLFLLSLPTPPSASGHERRQRPEAKTSGSEKKYLRAMQANRSQLHSPPGTGSSEDASTPQCVHTRLTGEGSCPHSGDVHIQINSIPKECAENASSRNIRSGVHSCAHGCVHSRLRGHSHSEARLTDDTAAESGDHGSSSFSEFRYLFKAAKKSSIYFDSERQTCMQHITGISLGIGLLTTFMYANKSIVNQVFLRVS

SEQ ID NO: 75121 - protein, 245 aa, Homo sapiens
  Payload ID: 14841
  Gene Symbol: RNFT1
  Gene Name: ring finger protein, transmembrane 1
  Uniprot ID: Q5M7Z0
  ENSP ID: ENSP00000436144
MPLFLLSLPTPPSASGHERRQRPEAKTSGSEKKYLRAMQANRSQLHSPPGTGSSEDASTPQCVHTRLTGEGSCPHSGDVHIQINSIPKECAENASSRNIRSGVHSCAHGCVHSRLRGHSHSEARLTDDTAAESGDHGSSSFSEFRYLFKWLQKSLPYILILSVKLVMQHITGISLGIGLLTTFMYANKSIVNQVFLRLNFFKSYFGPFELLGSILDCWNYRLHSEILFHGLKMPYFIGAFFHHAF

SEQ ID NO: 75122 - protein, 172 aa, Homo sapiens
  Payload ID: 14841
  Gene Symbol: RNFT1
  Gene Name: ring finger protein, transmembrane 1
  ENSP ID: ENSP00000436533
MPLFLLSLPTPPSASGHERRQRPEAKTSGSEKKYLRAMQANRSQLHSPPGTGSSEDASTPQCVHTRLTGEGSCPHSGDVHIQINSIPKECAENASSRNIRSGVHSCAHGCVHSRLRGHSHSEARLTDDTAAESGDHGSSSFSEFRYLFKWLQKSLPYILILSVKLVMQHITA

SEQ ID NO: 75123 - protein, 71 aa, Homo sapiens
  Payload ID: 14841
  Gene Symbol: RNFT1
  Gene Name: ring finger protein, transmembrane 1
  ENSP ID: ENSP00000436909
  MOD_RES (1)..(1): Any amino acid
XAANNFYVCKQKHCKSGFSKRKVLKDSVCLVTGILSRIFCSFILHLSFSVTLLQARKVSTMTNREDFFLIL

SEQ ID NO: 75124 - protein, 223 aa, Homo sapiens
  Payload ID: 14841
  Gene Symbol: RNFT1
  Gene Name: ring finger protein, transmembrane 1
  ENSP ID: ENSP00000464987
MPLFLLSLPTPPSASGHERRQRPEAKTSGSEKKYLRAMQANRSQLHSPPGTGSSEDASTPQCVHTRLTGEGSCPHSGDVHIQINSIPKECAENASSRNIRSGVHSCAHGCVHSRLRGHSHSEARLTDDTAAESGDHGISLGIGLLTTFMYANKSIVNQVFLRERSSKIQCAWLLVFLAGSSVLLYYTFHSQSLYYSLIFLNPTLDHLSFWEVFWIVGITDFIL

SEQ ID NO: 75125 - protein, 444 aa, Homo sapiens
  Payload ID: 14842
  Gene Symbol: RNFT2
  Gene Name: ring finger protein, transmembrane 2
  Uniprot ID: Q96EX2
  ENSP ID: ENSP00000257575
MWLFTVNQVLRKMQRRHSSNTDNIPPERNRSQALSSEASVDEGGVFESLKAEAASPPALFSGLSGSLPTSSFPSSLVLGSSAGGGDVFIQMPASREEGGGRGEGGAYHHRQPHHHFHHGGHRGGSLLQHVGGDHRGHSEEGGDEQPGTPAPALSELKAVICWLQKGLPFILILLAKLCFQHKLGIAVCIGMASTFAYANSTLREQVSLKEKRSVLVILWILAFLAGNTLYVLYTFSSQQLYNSLIFLKPNLEMLDFFDLLWIVGIADFVLKYITIALKCLIVALPKIILAVKSKGKFYLVIEELSQLFRSLVPIQLWYKYIMGDDSSNSYFLGGVLIVLYSLCKSFDICGRVGGVRKALKLLCTSQNYGVRATGQQCTEAGDICAICQAEFREPLILLCQHVFCEECLCLWLDRERTCPLCRSVAVDTLRCWKDGATSAHFQVY

SEQ ID NO: 75126 - protein, 321 aa, Homo sapiens [sequence omitted]

SEQ ID NO: 75127 - protein, 444 aa, Homo sapiens; identical to SEQ ID NO: 75125
  Payload ID: 14842
  Gene Symbol: RNFT2
  Gene Name: ring finger protein, transmembrane 2
  Uniprot ID: Q96EX2
  ENSP ID: ENSP00000376332

SEQ ID NO: 75128 - protein, 420 aa, Homo sapiens
  Payload ID: 14842
  Gene Symbol: RNFT2
  Gene Name: ring finger protein, transmembrane 2
  Uniprot ID: Q96EX2
  ENSP ID: ENSP00000385669
MWLFTVNQVLRKMQRRHSSNTDNIPPERNRSQALSSEASVDEGGVFESLKAEAASPPALFSGLSGSLPTSSFPSSLVLGSSAGGGDVFIQMPASREEGGGRGEGGAYHHRQPHHHFHHGGHRGGSLLQHVGGDHRGHSEEGGDEQPGTPAPALSELKAVICWLQKGLPFILILLAKLCFQHKLGIAVCIGMASTFAYANSTLREQVSLKEKRSVLVILWILAFLAGNTLYVLYTFSSQQLYNSLIFLKPNLEMLDFFDLLWIVGIADFVLKYITIALKCLIVALPKIILAVKSKGKFYLVIEELSQLFRSLVPIQLWYKYIMGDDSSNSYFLGGVLIVLYSLCKSFDICGRVGGVRKALKLLCTSQNYGVRATGQQCTEAGDICAICQAEFREPLILLCQMLLKGHKKLELEKIDESAGV

SEQ ID NO: 75129 - protein, 41 aa, Homo sapiens
  Payload ID: 14842
  Gene Symbol: RNFT2
  Gene Name: ring finger protein, transmembrane 2
  ENSP ID: ENSP00000447294
MWLFTVNQVLRKMQRRHSSNTDNIPPESCDQGWPLWGTGGH

SEQ ID NO: 75130 - protein, 231 aa, Homo sapiens [sequence omitted]

SEQ ID NO: 75131 - protein, 317 aa, Homo sapiens
  Payload ID: 14843
  Gene Symbol: RYBP
  Gene Name: RING1 and YY1 binding protein
  Uniprot ID: Q8N488
  ENSP ID: ENSP00000419494
  MOD_RES (1)..(1): Any amino acid
XLPAPAAALPGAPPPPPGVRGYPARARGLQGASGGARFPSSLSLPVPGKGGWVVSRAKFPALDSCEITTAHPRLCFAVSPPFSCSLPLPSLFPHSPLLGRPKRQAKPAADEGFWDCSVCTFRNSAEAFKCSICDVRKGTSTRKPRINSQLVAQQVAQQYATPPPPKKEKKEKVEKQDKEKPEKDKEISPSVTKKNTNKKTKPKSDILKDPPSEANSIQSANATTKTSETNHTSRPRLKNVDRSTAQQLAVTVGNVTVIITDFKEKTRSSSTSSSTVTSSAGSEQQNQSSSGSESTDKGSSRSSTPKGDMSAVNDESF

SEQ ID NO: 75132 - protein, 226 aa, Homo sapiens
  Payload ID: 14843
  Gene Symbol: RYBP
  Gene Name: RING1 and YY1 binding protein
  ENSP ID: ENSP00000486012
MGDKKSPTRPKRQAKPAADEGFWDCSVCTFRNSAEAFKCSICDVRKGTSTRKPRINSQLVAQQVAQQYATPPPPKKEKKEKVEKQDKEKPEKDKEISPSVTKKNTNKKTKPKSDILKDPPSEANSIQSANATTKTSETNHTSRPRLKNVDRSTAQQLAVTVGNVTVIITDFKEKTRSSSTSSSTVTSSAGSEQQNQSSSGSESTDKGSSRSSTPKGDMSAVNDESF

SEQ ID NO: 75133 - protein, 108 aa, Homo sapiens [sequence omitted]

SEQ ID NO: 75134 - protein, 568 aa, Homo sapiens
  Payload ID: 14845
  Gene Symbol: RIOK1
  Gene Name: RIO kinase 1
  Uniprot ID: Q9BRS2
  ENSP ID: ENSP00000369162
MDYRRLLMSRVVPGQFDDADSSDSENRDLKTVKEKDDILFEDLQDNVNENGEGEIEDEEEEGYDDDDDDWDWDEGVGKLAKGYVWNGGSNPQANRQTSDSSSAKMSTPADKVLRKFENKINLDKLNVTDSVINKVTEKSRQKEADMYRIKDKADRATVEQVLDPRTRMILFKMLTRGIITEINGCISTGKEANVYHASTANGESRAIKIYKTSILVFKDRDKYVSGEFRFRHGYCKGNPRKMVKTWAEKEMRNLIRLNTAEIPCPEPIMLRSHVLVMSFIGKDDMPAPLLKNVQLSESKARELYLQVIQYMRRMYQDARLVHADLSEFNMLYHGGGVYIIDVSQSVEHDHPHALEFLRKDCANVNDFFMRHSVAVMTVRELFEFVTDPSITHENMDAYLSKAMEIASQRTKEERSSQDHVDEEVFKRAYIPRTLNEVKNYERDMDIIMKLKEEDMAMNAQQDNILYQTVTGLKKDLSGVQKVPALLENQVEERTCSDSEDIGSSECSDTDSEEQGDHARPKKHTTDPDIDKKERKKMVKEAQREKRKNKIPKHVKKRKEKTAKTKKGK

SEQ ID NO: 75135 - protein, 95 aa, Homo sapiens
  Payload ID: 14845
  Gene Symbol: RIOK1
  Gene Name: RIO kinase 1
  ENSP ID: ENSP00000418263
MDYRRLLMSRVVPGQFDDADSSDSENRDLKTVKEKDDILFEDLQDNVNENGEGEIEDEEEEGYDDDDDDWDWDEGVGKLAKGYVWNGGSNPQLVP

SEQ ID NO: 75136 - protein, 552 aa, Homo sapiens
  Payload ID: 14846
  Gene Symbol: RIOK2
  Gene Name: RIO kinase 2
  Uniprot ID: Q9BVS4
  ENSP ID: ENSP00000283109
MGKVNVAKLRYMSRDDFRVLTAVEMGMKNHEIVPGSLIASIASLKHGGCNKVLRELVKHKLIAWERTKTVQGYRLTNAGYDYLALKTLSSRQVVESVGNQMGVGKESDIYIVANEEGQQFALKLHRLGRTSFRNLKNKRDYHKHRHNVSWLYLSRLSAMKEFAYMKALYERKFPVPKPIDYNRHAVVMELINGYPLCQIHHVEDPASVYDEAMELIVKLANHGLIHGDFNEFNLILDESDHITMIDFPQMVSTSHPNAEWYFDRDVKCIKDFFMKRFSYESELFPTFKDIRREDTLDVEVSASGYTKEMQADDELLHPLGPDDKNIETKEGSEFSFSDGEVAEKAEVYGSENESERNCLEESEGCYCRSSGDPEQIKEDSLSEESADARSFEMTEFNQALEEIKGQVVENNSVTEFSEEKNRTENYNRQDGQRVQGGVPAGSDEYEDECPHLIALSSLNREFRPFRDEENVGAMNQYRTRTLSITSSGSAVSCSTIPPELVKQKVKRQLTKQQKSAVRRRLQKGEANIFTKQRRENMQNIKSSLEAASFWGE

SEQ ID NO: 75137 - protein, 474 aa, Homo sapiens
  Payload ID: 14846
  Gene Symbol: RIOK2
  Gene Name: RIO kinase 2
  Uniprot ID: Q9BVS4
  ENSP ID: ENSP00000420932
MGKVNVAKLRYMSRDDFRVLTAVEMGMKNHEIVPGSLIASIASLKHGGCNKVLRELVKHKLIAWERTKTVQGYRLTNAGYDYLALKTLSSRQVVESVGNQMGVGKESDIYIVANEEGQQFALKLHRLGRTSFRNLKNKRDYHKHRHNVSWLYLSRLSAMKEFAYMKALYERKFPVPKPIDYNRHAVVMELINGYPLCQIHHVEDPASVYDEAMELIVKLANHGLIHGDFNEFNLILDESDHITMIDFPQMVSTSHPNAEWYFDRDVKCIKDFFMKRFSYESELFPTFKDIRREDTLDVEVSASGYTKEMQADDELLHPLGPDDKNIETKEGSEFSFSDGEVAEKAEVYGSENESERNCLEESEGCYCRSSGDPEQIKEDSLSEESADARSFEMTEFNQALEEIKGQVVENNSVTEFSEEKNRTENYNRQDGQRVQGGVPAGSDEYEDECPHLIALSSLNREFRPFRYRLLSIAF

SEQ ID NO: 75138 - protein, 159 aa, Homo sapiens
  Payload ID: 14846
  Gene Symbol: RIOK2
  Gene Name: RIO kinase 2
  ENSP ID: ENSP00000421830
  MOD_RES (1)..(1): Any amino acid
XDGQRVQGGVPAGSDEYEDECPHLIALSSLNREFRPFSCVSVSQGYCHLNNKLGKLNQKLKRKRGVTEAQDFEDEENVGAMNQYRTRTLSITSSGSAVSCSTIPPELVKQKVKRQLTKQQKSAVRRRLQKGEANIFTKQRRENMQNIKSSLEAASFWGE

SEQ ID NO: 75139 - protein, 140 aa, Homo sapiens
  Payload ID: 14846
  Gene Symbol: RIOK2
  Gene Name: RIO kinase 2
  ENSP ID: ENSP00000422772
  MOD_RES (1)..(1): Any amino acid
XEESADARSFEMTEFNQALEEIKGQVVENNSVTEFSEEKNRTENYNRQDGQRVQGGVPAGSDEYEDECPHLIALSSLNREFRPFRDEENVGAMNQYRTRTLSITSSGSAVSCSTIPPVSSHSTCTECLLHHYCDLIALSH

SEQ ID NO: 75140 - protein, 37 aa, Homo sapiens
  Payload ID: 14846
  Gene Symbol: RIOK2
  Gene Name: RIO kinase 2
  ENSP ID: ENSP00000424325
MGKVNVAKLRYMSRDDFRVLTAVRNPPFLFSLPLNTV

SEQ ID NO: 75141 - protein, 519 aa, Homo sapiens
  Payload ID: 14847
  Gene Symbol: RIOK3
  Gene Name: RIO kinase 3
  Uniprot ID: O14730
  ENSP ID: ENSP00000341874
MDLVGVASPEPGTAAAWGPSKCPWAIPQNTISCSLADVMSEQLAKELQLEEEAAVFPEVAVAEGPFITGENIDTSSDLMLAQMLQMEYDREYDAQLRREEKKFNGDSKVSISFENYRKVHPYEDSDSSEDEVDWQDTRDDPYRPAKPVPTPKKGFIGKGKDITTKHDEVVCGRKNTARMENFAPEFQVGDGIGMDLKLSNHVFNALKQHAYSEERRSARLHEKKEHSTAEKAVDPKTRLLMYKMVNSGMLETITGCISTGKESVVFHAYGGSMEDEKEDSKVIPTECAIKVFKTTLNEFKNRDKYIKDDFRFKDRFSKLNPRKIIRMWAEKEMHNLARMQRAGIPCPTVVLLKKHILVMSFIGHDQVPAPKLKEVKLNSEEMKEAYYQTLHLMRQLYHECTLVHADLSEYNMLWHAGKVWLIDVSQSVEPTHPHGLEFLFRDCRNVSQFFQKGGVKEALSERELFNAVSGLNITADNEADFLAEIEALEKMNEDHVQKNGRKAASFLKDDGDPPLLYDE

SEQ ID NO: 75142 - protein, 516 aa, Homo sapiens
  Payload ID: 14847
  Gene Symbol: RIOK3
  Gene Name: RIO kinase 3
  Uniprot ID: O14730
  ENSP ID: ENSP00000462548
MDLVGVASPEPGTAAAWGPSKCPWAIPQNTISCSLADVMSEQLAKELQLEEEAAVFPEVAVAEGPFITGENIDTSSDLMLAQMLQMEYDREYDAQLRREEKKFNGDSKVSISFENYRKVHPYEDSDSSEDEVDWQDTRDDPYRPAKPVPTPKKGFIGKGKDITTKHDEVVCGRKNTARMENFAPEFQVGDGIGMDLKLSNHVFNALKQHAYSEERRSARLHEKKEHSTAEKAVDPKTRLLMYKMVNSGMLETITGCISTGKESVVFHAYGGSMEDEKEDSKVIPTECAIKVFKTTLNEFKNRDKYIKDDFRFKDRFSKLNPRKIIRMWAEKEMHNLARMQRAGIPCPTVVLLKKHILVMSFIGHDQVPAPKLKEVKLNSEEMKEAYYQTLHLMRQLYHECTLVHADLSEYNMLWHAGKVWLIDVSQSVEPTHPHGLEFLFRDCRNVSQKGGVKEALSERELFNAVSGLNITADNEADFLAEIEALEKMNEDHVQKNGRKAASFLKDDGDPPLLYDE

SEQ ID NO: 75143 - protein, 89 aa, Homo sapiens
  Payload ID: 14847
  Gene Symbol: RIOK3
  Gene Name: RIO kinase 3
  ENSP ID: ENSP00000463644
IDVSQSVEPTHPHGLEFLFRDCRNVSQFFQKGGVKEALSERELFNAVSGLNITADNEADFLAEVTATPCKDDGDARISANSCLSMGLSC

SEQ ID NO: 75144 - protein, 503 aa, Homo sapiens
  Payload ID: 14847
  Gene Symbol: RIOK3
  Gene Name: RIO kinase 3
  ENSP ID: ENSP00000463660
MDLVGVASPEPGTAAAWGPSKCPWAIPQNTISCSLADVMSEQLAKELQLEEEAAVFPEVADLMLAQMLQMEYDREYDAQLRREEKKFNGDSKVSISFENYRKVHPYEDSDSSEDEVDWQDTRDDPYRPAKPVPTPKKGFIGKGKDITTKHDEVVCGRKNTARMENFAPEFQVGDGIGMDLKLSNHVFNALKQHAYSEERRSARLHEKKEHSTAEKAVDPKTRLLMYKMVNSGMLETITGCISTGKESVVFHAYGGSMEDEKEDSKVIPTECAIKVFKTTLNEFKNRDKYIKDDFRFKDRFSKLNPRKIIRMWAEKEMHNLARMQRAGIPCPTVVLLKKHILVMSFIGHDQVPAPKLKEVKLNSEEMKEAYYQTLHLMRQLYHECTLVHADLSEYNMLWHAGKVWLIDVSQSVEPTHPHGLEFLFRDCRNVSQFFQKGGVKEALSERELFNAVSGLNITADNEADFLAEIEALEKMNEDHVQKNGRKAASFLKDDGDPPLLYDE

SEQ ID NO: 75145 - protein, 135 aa, Homo sapiens
  Payload ID: 14847
  Gene Symbol: RIOK3
  Gene Name: RIO kinase 3
  ENSP ID: ENSP00000463791
  MOD_RES (1)..(1): Any amino acid
XAPEFQVGDGIGMDLKLSNHVFNALKQHAYSEERRSARLHEKKEHSTAEKAVDPKTRLLMYKMVNSGMLETITGCISTGKESVVFHAYGGSMEDEKEDSKVIPTECAIKNAESWNSLSNSCTTEETHFSYVFYWP

SEQ ID NO: 75146 - protein, 151 aa, Homo sapiens
  Payload ID: 14848
  Gene Symbol: RIPPLY1
  Gene Name: ripply transcriptional repressor 1
  Uniprot ID: Q0D2K3
  ENSP ID: ENSP00000276173
MDSAACAAAATPVPALALALAPDLAQAPLALPGLLSPSCLLSSGQEVNGSERGTCLWRPWLSSTNDSPRQMRKLVDLAAGGATAAEVTKAESKFHHPVRLFWPKSRSFDYLYSAGEILLQNFPVQATINLYEDSDSEEEEEDEEQEDEEEK

SEQ ID NO: 75147 - protein, 104 aa, Homo sapiens
  Payload ID: 14848
  Gene Symbol: RIPPLY1
  Gene Name: ripply transcriptional repressor 1
  Uniprot ID: Q0D2K3
  ENSP ID: ENSP00000400539
MDSAACAAAATPVPALALALAPDLAQAPLALPGLLSPSCLLSSGQEVNGSERLFWPKSRSFDYLYSAGEILLQNFPVQATINLYEDSDSEEEEEDEEQEDEEEK

SEQ ID NO: 75148 - protein, 70 aa, Homo sapiens
  Payload ID: 14849
  Gene Symbol: RIPPLY2
  Gene Name: ripply transcriptional repressor 2
  Uniprot ID: Q5TAB7
  ENSP ID: ENSP00000358701
MPDGPGMTAASGKLYQFRHPVRLFWPKSKCYDYLYQEAEALLKNFPIQATISFYEDSDSEDEIEDLTCEN

SEQ ID NO: 75149 - protein, 128 aa, Homo sapiens
  Payload ID: 14849
  Gene Symbol: RIPPLY2
  Gene Name: ripply transcriptional repressor 2
  Uniprot ID: Q5TAB7
  ENSP ID: ENSP00000358703
MENAGGAEGTESGAAACAATDGPTRRAGADSGYAGFWRPWVDAGGKKEEETPNHAAEAMPDGPGMTAASGKLYQFRHPVRLFWPKSKCYDYLYQEAEALLKNFPIQATISFYEDSDSEDEIEDLTCEN

SEQ ID NO: 75150 - protein, 190 aa, Homo sapiens
  Payload ID: 14850
  Gene Symbol: RIPPLY3
  Gene Name: ripply transcriptional repressor 3
  Uniprot ID: P57055
  ENSP ID: ENSP00000331734
MEPEAAAGARKARGRGCHCPGDAPWRPPPPRGPESPAPWRPWIQTPGDAELTRTGRPLEPRADQHTFGSKGAFGFQHPVRVYLPMSKRQEYLRSSGEQVLASFPVQATIDFYDDESTESASEAEEPEEGPPPLHLLPQEVGGRQENGPGGKGRDQGINQGQRSSGGGDHWGEGPLPQGVSSRGGKCSSSK

SEQ ID NO: 75151 - protein, 476 aa, Homo sapiens
  Payload ID: 14851
  Gene Symbol: RNMT
  Gene Name: RNA (guanine-7-) methyltransferase
  Uniprot ID: O43148
  ENSP ID: ENSP00000262173
MANSAKAEEYEKMSLEQAKASVNSETESSFNINENTTASGTGLSEKTSVCRQVDIARKRKEFEDDLVKESSSCGKDTPSKKRKLDPEIVPEEKDCGDAEGNSKKRKRETEDVPKDKSSTGDGTQNKRKIALEDVPEKQKNLEEGHSSTVAAHYNELQEVGLEKRSQSRIFYLRNFNNWMKSVLIGEFLEKVRQKKKRDITVLDLGCGKGGDLLKWKKGRINKLVCTDIADVSVKQCQQRYEDMKNRRDSEYIFSAEFITADSSKELLIDKFRDPQMCFDICSCQFVCHYSFESYEQADMMLRNACERLSPGGYFIGTTPNSFELIRRLEASETESFGNEIYTVKFQKKGDYPLFGCKYDFNLEGVVDVPEFLVYFPLLNEMAKKYNMKLVYKKTFLEFYEEKIKNNENKMLLKRMQALEPYPANESSKLVSEKVDDYEHAAKYMKNSQVRLPLGTLSKSEWEATSIYLVFAFEKQQ

SEQ ID NO: 75152 - protein, 476 aa, Homo sapiens; identical to SEQ ID NO: 75151
  Payload ID: 14851
  Gene Symbol: RNMT
  Gene Name: RNA (guanine-7-) methyltransferase
  Uniprot ID: O43148
  ENSP ID: ENSP00000372804

SEQ ID NO: 75153 - protein, 476 aa, Homo sapiens; identical to SEQ ID NO: 75151
  Payload ID: 14851
  Gene Symbol: RNMT
  Gene Name: RNA (guanine-7-) methyltransferase
  Uniprot ID: O43148
  ENSP ID: ENSP00000446426

SEQ ID NO: 75154 - protein, 504 aa, Homo sapiens
  Payload ID: 14851
  Gene Symbol: RNMT
  Gene Name: RNA (guanine-7-) methyltransferase
  Uniprot ID: O43148
  ENSP ID: ENSP00000466111
MANSAKAEEYEKMSLEQAKASVNSETESSFNINENTTASGTGLSEKTSVCRQVDIARKRKEFEDDLVKESSSCGKDTPSKKRKLDPEIVPEEKDCGDAEGNSKKRKRETEDVPKDKSSTGDGTQNKRKIALEDVPEKQKNLEEGHSSTVAAHYNELQEVGLEKRSQSRIFYLRNFNNWMKSVLIGEFLEKVRQKKKRDITVLDLGCGKGGDLLKWKKGRINKLVCTDIADVSVKQCQQRYEDMKNRRDSEYIFSAEFITADSSKELLIDKFRDPQMCFDICSCQFVCHYSFESYEQADMMLRNACERLSPGGYFIGTTPNSFELIRRLEASETESFGNEIYTVKFQKKGDYPLFGCKYDFNLEGVVDVPEFLVYFPLLNEMAKKYNMKLVYKKTFLEFYEEKIKNNENKMLLKRMQALEPYPANESSKLVSEKVDDYEHAAKYMKNSQVRLPLGTLSKSEWEATRLTVTIMREAWLSTVGPGRAPVAASSVKWGTPRPAMQFIL

SEQ ID NO: 75155 - protein, 476 aa, Homo sapiens; identical to SEQ ID NO: 75151
  Payload ID: 14851
  Gene Symbol: RNMT
  Gene Name: RNA (guanine-7-) methyltransferase
  Uniprot ID: O43148
  ENSP ID: ENSP00000466252

SEQ ID NO: 75156 - protein, 298 aa, Homo sapiens
  Payload ID: 14851
  Gene Symbol: RNMT
  Gene Name: RNA (guanine-7-) methyltransferase
  ENSP ID: ENSP00000467171
MKSVLIGEFLEKVRQKKKRDITVLDLGCGKGGDLLKWKKGRINKLVCTDIADVSVKQCQQRYEDMKNRRDSEYIFSAEFITADSSKELLIDKFRDPQMCFDICSCQFVCHYSFESYEQADMMLRNACERLSPGGYFIGTTPNSFELIRRLEASETESFGNEIYTVKFQKKGDYPLFGCKYDFNLEGVVDVPEFLVYFPLLNEMAKKYNMKLVYKKTFLEFYEEKIKNNENKMLLKRMQALEPYPANESSKLVSEKVDDYEHAAKYMKNSQVRLPLGTLSKSEWEATSIYLVFAFEKQQ

SEQ ID NO: 75157 - protein, 101 aa, Homo sapiens
  Payload ID: 14851
  Gene Symbol: RNMT
  Gene Name: RNA (guanine-7-) methyltransferase
  ENSP ID: ENSP00000467475
MANSAKAEEYEKMSLEQAKASVNSETESSFNINENTTASGTGLSEKTSVCRQVDIARKRKEFEDDLVKESSSCGKDTPSKKRKLDPEIVPEEKDCGDAEGN

SEQ ID NO: 75158 - protein, 114 aa, Homo sapiens
  Payload ID: 14851
  Gene Symbol: RNMT
  Gene Name: RNA (guanine-7-) methyltransferase
  ENSP ID: ENSP00000468261
  MOD_RES (1)..(1): Any amino acid
XYEEKIKNNENKMLLKRMQALEDFHFFPQPYPANESSKLVSEKVDDYEHAAKYMKNSQVRLPLGTLSKSEWEATRLTVTIMREAWLSTVGPGRAPVAASSVKWGTPRPAMQFIL

SEQ ID NO: 75159 - protein, 505 aa, Homo sapiens
  Payload ID: 14852
  Gene Symbol: RTCB
  Gene Name: RNA 2',3'-cyclic phosphate and 5'-OH ligase
  Uniprot ID: Q9Y3I0
  ENSP ID: ENSP00000216038
MSRSYNDELQFLEKINKNCWRIKKGFVPNMQVEGVFYVNDALEKLMFEELRNACRGGGVGGFLPAMKQIGNVAALPGIVHRSIGLPDVHSGYGFAIGNMAAFDMNDPEAVVSPGGVGFDINCGVRLLRTNLDESDVQPVKEQLAQAMFDHIPVGVGSKGVIPMNAKDLEEALEMGVDWSLREGYAWAEDKEHCEEYGRMLQADPNKVSARAKKRGLPQLGTLGAGNHYAEIQVVDEIFNEYAAKKMGIDHKGQVCVMIHSGSRGLGHQVATDALVAMEKAMKRDKIIVNDRQLACARIASPEGQDYLKGMAAAGNYAWVNRSSMTFLTRQAFAKVFNTTPDDLDLHVIYDVSHNIAKVEQHVVDGKERTLLVHRKGSTRAFPPHHPLIAVDYQLTGQPVLIGGTMGTCSYVLTGTEQGMTETFGTTCHGAGRALSRAKSRRNLDFQDVLDKLADMGIAIRVASPKLVMEEAPESYKNVTDVVNTCHDAGISKKAIKLRPIAVIKG

SEQ ID NO: 75160 - protein, 379 aa, Homo sapiens
  Payload ID: 14853
  Gene Symbol: RTCA
  Gene Name: RNA 3'-terminal phosphate cyclase
  Uniprot ID: O00442
  ENSP ID: ENSP00000260563
MAGPRVEVDGSIMEGGGQILRVSTALSCLLGLPLRVQKIRAGRSTPGLSSGGWKSKIKVLTRPQHLSGLEMIRDLCDGQLEGAEIGSTEITFTPEKIKGGIHTADTKTAGSVCLLMQVSMPCVLFAASPSELHLKGGTNAEMAPQIDYTVMVFKPIVEKFGFIFNCDIKTRGYYPKGGGEVIVRMSPVKQLNPINLTERGCVTKIYGRAFVAGVLPFKVAKDMAAAAVRCIRKEIRDLYVNIQPVQEPKDQAFGNGNGIIIIAETSTGCLFAGSSLGKRGVNADKVGIEAAEMLLANLRHGGTVDEYLQDQLIVFMALANGVSRIKTGPVTLHTQTAIHFAEQIAKAKFIVKKSEDEEDAAKDTYIIECQGIGMTNPNL

SEQ ID NO: 75161 - protein, 49 aa, Homo sapiens
  Payload ID: 14853
  Gene Symbol: RTCA
  Gene Name: RNA 3'-terminal phosphate cyclase
  ENSP ID: ENSP00000359144
MAGPRVEVDGSIMEGGGQILRVSTALSCLLGLPLRVQKIRAGRSTPGLR

SEQ ID NO: 75162 - protein, 366 aa, Homo sapiens
  Payload ID: 14853
  Gene Symbol: RTCA
  Gene Name: RNA 3'-terminal phosphate cyclase
  Uniprot ID: O00442
  ENSP ID: ENSP00000359146
MAGPRVEVDGSIMEGGGQILRVSTALSCLLGLPLRVQKIRAGRSTPGLRPQHLSGLEMIRDLCDGQLEGAEIGSTEITFTPEKIKGGIHTADTKTAGSVCLLMQVSMPCVLFAASPSELHLKGGTNAEMAPQIDYTVMVFKPIVEKFGFIFNCDIKTRGYYPKGGGEVIVRMSPVKQLNPINLTERGCVTKIYGRAFVAGVLPFKVAKDMAAAAVRCIRKEIRDLYVNIQPVQEPKDQAFGNGNGIIIIAETSTGCLFAGSSLGKRGVNADKVGIEAAEMLLANLRHGGTVDEYLQDQLIVFMALANGVSRIKTGPVTLHTQTAIHFAEQIAKAKFIVKKSEDEEDAAKDTYIIECQGIGMTNPNL

SEQ ID NO: 75163 - protein, 155 aa, Homo sapiens
  Payload ID: 14854
  Gene Symbol: RBM3
  Gene Name: RNA binding motif (RNP1, RRM) protein 3
  ENSP ID: ENSP00000346473
MAPRTWCPAGIFGLFCPLTLACSSLTIALTDCQPIILVSPTLSLWMVVRSVWIMQASLLGEPEEVALGPMGVVAATLEVVGTRAMGVAGIMTVDLEGMDMDMDVPETIMAETRVVMTATQEEITETIMTTEMRHAHNIGETWISALSEPVCHTLS

SEQ ID NO: 75164 - protein, 157 aa, Homo sapiens
  Payload ID: 14854
  Gene Symbol: RBM3
  Gene Name: RNA binding motif (RNP1, RRM) protein 3
  Uniprot ID: P98179
  ENSP ID: ENSP00000365946
MSSEEGKLFVGGLNFNTDEQALEDHFSSFGPISEVVVVKDRETQRSRGFGFITFTNPEHASVAMRAMNGESLDGRQIRVDHAGKSARGTRGGGFGAHGRGRSYSRGGGDQGYGSGRYYDSRPGGYGYGYGRSRDYNGRNQGGYDRYSGGNYRDNYDN

SEQ ID NO: 75165 - protein, 157 aa, Homo sapiens; identical to SEQ ID NO: 75164
  Payload ID: 14854
  Gene Symbol: RBM3
  Gene Name: RNA binding motif (RNP1, RRM) protein 3
  Uniprot ID: P98179
  ENSP ID: ENSP00000365950

SEQ ID NO: 75166 - protein, 995 aa, Homo sapiens
  Payload ID: 14855
  Gene Symbol: RBM10
  Gene Name: RNA binding motif protein 10
  ENSP ID: ENSP00000328848
MSGSPSLTARAEKVSVDAGRGGGESLQEASPRLADHGSSSGGGWEVKRSQRLRRGPSSPRRPYQDMEYERRGGRGDRTGRYGATDRSQDDGGENRSRDHDYRDMDYRSYPREYGSQEGKHDYDDSSEEQSAEDSYEASPGSETQRRRRRRHRHSPTGPPGFPRDGDYRDQDYRTEQGEEEEEEEDEEEEEKASNIVMLRMLPQAATEDDIRGQLQSHGVQAREVRLMRNKSSGQSRGFAFVEFSHLQDATRWMEANQHSLNILGQKVSMHYSDPKPKINEDWLCNKCGVQNFKRREKCFKCGVPKSEAEQKLPLGTRLDQQTLPLGGRELSQGLLPLPQPYQAQGVLASQALSQGSEPSSENANDTIILRNLNPHSTMDSILGALAPYAVLSSSNVRVIKDKQTQLNRGFAFIQLSTIVEAAQLLQILQALHPPLTIDGKTINVEFAKGSKRDMASNEGSRISAASVASTAIAAAQWAISQASQGGEGTWATSEEPPVDYSYYQQDEGYGNSQGTESSLYAHGYLKGTKGPGITGTKGDPTGAGPEASLEPGADSVSMQAFSRAQPGAAPGIYQQSAEASSSQGTAANSQSYTIMSPAVLKSELQSPTHPSSALPPATSPTAQESYSQYPVPDVSTYQYDETSGYYYDPQTGLYYDPNSQYYYNAQSQQYLYWDGERRTYVPALEQSADGHKETGAPSKEGKEKKEKHKTKTAQQIAKDMERWARSLNKQKENFKNSFQPISSLRDDERRESATADAGYAILEKKGALAERQHTSMDLPKLASDDRPSPPRGLVAAYSGESDSEEEQERGGPEREEKLTDWQKLACLLCRRQFPSKEALIRHQQLSGLHKQNLEIHRRAHLSENELEALEKNDMEQMKYRDRAAERREKYGIPEPPEPKRRKYGGISTASVDFEQPTRDGLGSDNIGSRMLQAMGWKEGSGLGRKKQGIVTPIEAQTRVRGSGLGARGSSYGVTSTESYKETLHKTMVTRFNEAQ

SEQ ID NO: 75167 - protein, 853 aa, Homo sapiens
  Payload ID: 14855
  Gene Symbol: RBM10
  Gene Name: RNA binding motif protein 10
  Uniprot ID: P98175
  ENSP ID: ENSP00000329659
MEYERRGGRGDRTGRYGATDRSQDDGGENRSRDHDYRDMDYRSYPREYGSQEGKHDYDDSSEEQSAEIRGQLQSHGVQAREVRLMRNKSSGQSRGFAFVEFSHLQDATRWMEANQHSLNILGQKVSMHYSDPKPKINEDWLCNKCGVQNFKRREKCFKCGVPKSEAEQKLPLGTRLDQQTLPLGGRELSQGLLPLPQPYQAQGVLASQALSQGSEPSSENANDTIILRNLNPHSTMDSILGALAPYAVLSSSNVRVIKDKQTQLNRGFAFIQLSTIVEAAQLLQILQALHPPLTIDGKTINVEFAKGSKRDMASNEGSRISAASVASTAIAAAQWAISQASQGGEGTWATSEEPPVDYSYYQQDEGYGNSQGTESSLYAHGYLKGTKGPGITGTKGDPTGAGPEASLEPGADSVSMQAFSRAQPGAAPGIYQQSAEASSSQGTAANSQSYTIMSPAVLKSELQSPTHPSSALPPATSPTAQESYSQYPVPDVSTYQYDETSGYYYDPQTGLYYDPNSQYYYNAQSQQYLYWDGERRTYVPALEQSADGHKETGAPSKEGKEKKEKHKTKTAQQIAKDMERWARSLNKQKENFKNSFQPISSLRDDERRESATADAGYAILEKKGALAERQHTSMDLPKLASDDRPSPPRGLVAAYSGESDSEEEQERGGPEREEKLTDWQKLACLLCRRQFPSKEALIRHQQLSGLHKQNLEIHRRAHLSENELEALEKNDMEQMKYRDRAAERREKYGIPEPPEPKRRKYGGISTASVDFEQPTRDGLGSDNIGSRMLQAMGWKEGSGLGRKKQGIVTPIEAQTRVRGSGLGARGSSYGVTSTESYKETLHKTMVTRFNEAQ

SEQ ID NO: 75168 - protein, 930 aa, Homo sapiens
  Payload ID: 14855
  Gene Symbol: RBM10
  Gene Name: RNA binding motif protein 10
  Uniprot ID: P98175
  ENSP ID: ENSP00000366829
MEYERRGGRGDRTGRYGATDRSQDDGGENRSRDHDYRDMDYRSYPREYGSQEGKHDYDDSSEEQSAEDSYEASPGSETQRRRRRRHRHSPTGPPGFPRDGDYRDQDYRTEQGEEEEEEEDEEEEEKASNIVMLRMLPQAATEDDIRGQLQSHGVQAREVRLMRNKSSGQSRGFAFVEFSHLQDATRWMEANQHSLNILGQKVSMHYSDPKPKINEDWLCNKCGVQNFKRREKCFKCGVPKSEAEQKLPLGTRLDQQTLPLGGRELSQGLLPLPQPYQAQGVLASQALSQGSEPSSENANDTIILRNLNPHSTMDSILGALAPYAVLSSSNVRVIKDKQTQLNRGFAFIQLSTIVEAAQLLQILQALHPPLTIDGKTINVEFAKGSKRDMASNEGSRISAASVASTAIAAAQWAISQASQGGEGTWATSEEPPVDYSYYQQDEGYGNSQGTESSLYAHGYLKGTKGPGITGTKGDPTGAGPEASLEPGADSVSMQAFSRAQPGAAPGIYQQSAEASSSQGTAANSQSYTIMSPAVLKSELQSPTHPSSALPPATSPTAQESYSQYPVPDVSTYQYDETSGYYYDPQTGLYYDPNSQYYYNAQSQQYLYWDGERRTYVPALEQSADGHKETGAPSKEGKEKKEKHKTKTAQQIAKDMERWARSLNKQKENFKNSFQPISSLRDDERRESATADAGYAILEKKGALAERQHTSMDLPKLASDDRPSPPRGLVAAYSGESDSEEEQERGGPEREEKLTDWQKLACLLCRRQFPSKEALIRHQQLSGLHKQNLEIHRRAHLSENELEALEKNDMEQMKYRDRAAERREKYGIPEPPEPKRRKYGGISTASVDFEQPTRDGLGSDNIGSRMLQAMGWKEGSGLGRKKQGIVTPIEAQTRVRGSGLGARGSSYGVTSTESYKETLHKTMVTRFNEAQ

SEQ ID NO: 75169 - protein, 852 aa, Homo sapiens
  Payload ID: 14855
  Gene Symbol: RBM10
  Gene Name: RNA binding motif protein 10
  Uniprot ID: P98175
  ENSP ID: ENSP00000486115
MEYERRGGRGDRTGRYGATDRSQDDGGENRSRDHDYRDMDYRSYPREYGSQEGKHDYDDSSEEQSAEIRGQLQSHGVQAREVRLMRNKSSGQSRGFAFVEFSHLQDATRWMEANQHSLNILGQKVSMHYSDPKPKINEDWLCNKCGVQNFKRREKCFKCGVPKSEAEQKLPLGTRLDQQTLPLGGRELSQGLLPLPQPYQAQGVLASQALSQGSEPSSENANDTIILRNLNPHSTMDSILGALAPYAVLSSSNVRVIKDKQTQLNRGFAFIQLSTIEAAQLLQILQALHPPLTIDGKTINVEFAKGSKRDMASNEGSRISAASVASTAIAAAQWAISQASQGGEGTWATSEEPPVDYSYYQQDEGYGNSQGTESSLYAHGYLKGTKGPGITGTKGDPTGAGPEASLEPGADSVSMQAFSRAQPGAAPGIYQQSAEASSSQGTAANSQSYTIMSPAVLKSELQSPTHPSSALPPATSPTAQESYSQYPVPDVSTYQYDETSGYYYDPQTGLYYDPNSQYYYNAQSQQYLYWDGERRTYVPALEQSADGHKETGAPSKEGKEKKEKHKTKTAQQIAKDMERWARSLNKQKENFKNSFQPISSLRDDERRESATADAGYAILEKKGALAERQHTSMDLPKLASDDRPSPPRGLVAAYSGESDSEEEQERGGPEREEKLTDWQKLACLLCRRQFPSKEALIRHQQLSGLHKQNLEIHRRAHLSENELEALEKNDMEQMKYRDRAAERREKYGIPEPPEPKRRKYGGISTASVDFEQPTRDGLGSDNIGSRMLQAMGWKEGSGLGRKKQGIVTPIEAQTRVRGSGLGARGSSYGVTSTESYKETLHKTMVTRFNEAQ

SEQ ID NO: 75170 - protein, 281 aa, Homo sapiens
  Payload ID: 14856
  Gene Symbol: RBM11
  Gene Name: RNA binding motif protein 11
  Uniprot ID: P57052
  ENSP ID: ENSP00000383421
MFPAQEEADRTVFVGNLEARVREEILYELFLQAGPLTKVTICKDREGKPKSFGFVCFKHPESVSYAIALLNGIRLYGRPINVQYRFGSSRSSEPANQSFESCVKINSHNYRNEEMLVGRSSFPMQYFPINNTSLPQEYFLFQKMQWHVYNPVLQLPYYEMTAPLPNSASVSSSLNHVPDLEAGPSSYKWTHQQPSDSDLYQMTAPLPNSASVSSSLNHVPDLEAGPSSYKWTHQQPSDSDLYQMNKRKRQKQTSDSDSSTDNNRGNECSQKFRKSKKKKRY

SEQ ID NO: 75171 - protein, 932 aa, Homo sapiens
  Payload ID: 14857
  Gene Symbol: RBM12
  Gene Name: RNA binding motif protein 12
  Uniprot ID: Q9NTZ6
  ENSP ID: ENSP00000352668
MAVVIRLQGLPIVAGTMDIRHFFSGLTIPDGGVHIVGGELGEAFIVFATDEDARLGMMRTGGTIKGSKVTLLLSSKTEMQNMIELSRRRFETANLDIPPANASRSGPPPSSGMSSRVNLPTTVSNFNNPSPSVVTATTSVHESNKNIQTFSTASVGTAPPNMGASFGSPTFSSTVPSTASPMNTVPPPPIPPIPAMPSLPPMPSIPPIPVPPPVPTLPPVPPVPPIPPVPSVPPMTPLPPMSGMPPLNPPPVAPLPAGMNGSGAPMNLNNNLNPMFLGPLNPVNPIQMNSQSSVKPLPINPDDLYVSVHGMPFSAMENDVRDFFHGLRVDAVHLLKDHVGRNNGNGLVKFLSPQDTFEALKRNRMLMIQRYVEVSPATERQWVAAGGHITFKQNMGPSGQTHPPPQTLPRSKSPSGQKRSRSRSPHEAGFCVYLKGLPFEAENKHVIDFFKKLDIVEDSIYIAYGPNGKATGEGFVEFRNEADYKAALCRHKQYMGNRFIQVHPITKKGMLEKIDMIRKRLQNFSYDQREMILNPEGDVNSAKVCAHITNIPFSITKMDVLQFLEGIPVDENAVHVLVDNNGQGLGQALVQFKNEDDARKSERLHRKKLNGREAFVHVVTLEDMREIEKNPPAQGKKGLKMPVPGNPAVPGMPNAGLPGVGLPSAGLPGAGLPSTGLPGSAITSAGLPGAGMPSAGIPSAGGEEHAFLTVGSKEANNGPPFNFPGNFGGSNAFGPPIPPPGLGGGAFGDARPGMPSVGNSGLPGLGLDVPGFGGGPNNLSGPSGFGGGPQNFGNGPGSLGGPPGFGSGPPGLGSAPGHLGGPPAFGPGPGPGPGPGPIHIGGPPGFASSSGKPGPTVIKVQNMPFTVSIDEILDFFYGYQVIPGSVCLKYNEKGMPTGEAMVAFESRDEATAAVIDLNDRPIGSRKVKLVLG

SEQ ID NO: 75172 - protein, 932 aa, Homo sapiens; identical to SEQ ID NO: 75171
  Payload ID: 14857
  Gene Symbol: RBM12
  Gene Name: RNA binding motif protein 12
  Uniprot ID: Q9NTZ6
  ENSP ID: ENSP00000363217

SEQ ID NO: 75173 - protein, 932 aa, Homo sapiens; identical to SEQ ID NO: 75171
  Payload ID: 14857
  Gene Symbol: RBM12
  Gene Name: RNA binding motif protein 12
  Uniprot ID: Q9NTZ6
  ENSP ID: ENSP00000363228

SEQ ID NO: 75174 - protein, 143 aa, Homo sapiens
  Payload ID: 14857
  Gene Symbol: RBM12
  Gene Name: RNA binding motif protein 12
  ENSP ID: ENSP00000392642
MAVVIRLQGLPIVAGTMDIRHFFSGLTIPDGGVHIVGGELGEAFIVFATDEDARLGMMRTGGTIKGSKVTLLLSSKTEMQNMIELSRRRFETANLDIPPANASRSGPPPSSGMSSRVNLPTTVSNFNNPSPSVVTATTSVHES

SEQ ID NO: 75175 - protein, 291 aa, Homo sapiens
  Payload ID: 14857
  Gene Symbol: RBM12
  Gene Name: RNA binding motif protein 12
  ENSP ID: ENSP00000411036
MAVVIRLQGLPIVAGTMDIRHFFSGLTIPDGGVHIVGGELGEAFIVFATDEDARLGMMRTGGTIKGSKVTLLLSSKTEMQNMIELSRRRFETANLDIPPANASRSGPPPSSGMSSRVNLPTTVSNFNNPSPSVVTATTSVHESNKNIQTFSTASVGTAPPNMGASFGSPTFSSTVPSTASPMNTVPPPPIPPIPAMPSLPPMPSIPPIPVPPPVPTLPPVPPVPPIPPVPSVPPMTPLPPMSGMPPLNPPPVAPLPAGMNGSGAPMNLNNNLNPMFLGPLNPVNPIQMNSQ

SEQ ID NO: 75176 - protein, 134 aa, Homo sapiens
  Payload ID: 14857
  Gene Symbol: RBM12
  Gene Name: RNA binding motif protein 12
  ENSP ID: ENSP00000411692
MAVVIRLQGLPIVAGTMDIRHFFSGLTIPDGGVHIVGGELGEAFIVFATDEDARLGMMRTGGTIKGSKVTLLLSSKTEMQNMIELSRRRFETANLDIPPANASRSGPPPSSGMSSRVNLPTTVSNFNNPSPSVV

SEQ ID NO: 75177 - protein, 1001 aa, Homo sapiens
  Payload ID: 14858
  Gene Symbol: RBM12B
  Gene Name: RNA binding motif protein 12B
  Uniprot ID: Q8IXT5
  ENSP ID: ENSP00000382239
MAVVIRLLGLPFIAGPVDIRHFFTGLTIPDGGVHIIGGEIGEAFIIFATDEDARRAISRSGGFIKDSSVELFLSSKAEMQKTIEMKRTDRVGRGRPGSGTSGVDSLSNFIESVKEEASNSGYGSSINQDAGFHTNGTGHGNLRPRKTRPLKAENPYLFLRGLPYLVNEDDVRVFFSGLCVDGVIFLKHHDGRNNGDAIVKFASCVDASGGLKCHRSFMGSRFIEVMQGSEQQWIEFGGNAVKEGDVLRRSEEHSPPRGINDRHFRKRSHSKSPRRTRSRSPLGFYVHLKNLSLSIDERDLRNFFRGTDLTDEQIRFLYKDENRTRYAFVMFKTLKDYNTALSLHKTVLQYRPVHIDPISRKQMLKFIARYEKKRSGSLERDRPGHVSQKYSQEGNSGQKLCIYIRNFPFDVTKVEVQKFFADFLLAEDDIYLLYDDKGVGLGEALVKFKSEEQAMKAERLNRRRFLGTEVLLRLISEAQIQEFGVNFSVMSSEKMQARSQSRERGDHSHLFDSKDPPIYSVGAFENFRHQLEDLRQLDNFKHPQRDFRQPDRHPPEDFRHSSEDFRFPPEDFRHSPEDFRRPREEDFRRPSEEDFRRPWEEDFRRPPEDDFRHPREEDWRRPLEEDWRRPLEEDFRRSPTEDFRQLPEEDFRQPPEEDLRWLPEEDFRRPPEEDWRRPPEEDFRRPLQGEWRRPPEDDFRRPPEEDFRHSPEEDFRQSPQEHFRRPPQEHFRRPPPEHFRRPPPEHFRRPPPEHFRRPPPEHFRRPPPEHFRRPPPEHFRRPPQEHFRRPPQEHFRRSREEDFRHPPDEDFRGPPDEDFRHPPDEDFRSPQEEDFRCPSDEDFRQLPEEDLREAPEEDPRLPDNFRPPGEDFRSPPDDFRSHRPFVNFGRPEGGKFDFGKHNMGSFPEGRFMPDPKINCGSGRVTPIKIMNLPFKANVNEILDFFHGYRIIPDSVSIQYNEQGLPTGEAIVAMINYNEAMAAIKDLNDRPVGPRKVKLTLL

SEQ ID NO: 75178 - protein, 881 aa, Homo sapiens
  Payload ID: 14858
  Gene Symbol: RBM12B
  Gene Name: RNA binding motif protein 12B
  ENSP ID: ENSP00000427729
MAVVIRLLGLPFIAGPVDIRHFFTGLTIPDGGVHIIGGEIGEAFIIFATDEDARRAISRSGGFIKDSSVELFLSSKAEMQKTIEMKRTDRVGRGRPGSGTSGVDSLSNFIESVKEEASNSGYGSSINQDAGFHTNGTGHGNLRPRKTRPLKAENPYLFLRGLPYLVNEDDVRVFFSGLCVDGVIFLKHHDGRNNGDAIVKFASCVDASGGLKCHRSFMGSRFIEVMQGSEQQWIEFGGNAVKEGDVLRRSEEHSPPRGINDRHFRKRSHSKSPRRTRSRSPLGFYVHLKNLSLSIDERDLRNFFRGTDLTDEQIRFLYKDENRTRYAFVMFKTLKDYNTALSLHKTVLQYRPVHIDPISRKQMLKFIARYEKKRSGSLERDRPGHVSQKYSQEGNSGQKLCIYIRNFPFDVTKVEVQKFFADFLLAEDDIYLLYDDKGVGLGEALVKFKSEEQAMKAERLNRRRFLGTEVLLRLISEAQIQEFGVNFSVMSSEKMQARSQSRERGDHSHLFDSKDPPIYSVGAFENFRHQLEDLRQLDNFKHPQRDFRQPDRHPPEDFRHSSEDFRFPPEDFRHSPEDFRRPREEDFRRPSEEDFRRPWEEDFRRPPEDDFRHPREEDWRRPPPEHFRRPPPEHFRRPPPEHFRRPPPEHFRRPPPEHFRRPPQEHFRRPPQEHFRRSREEDFRHPPDEDFRGPPDEDFRHPPDEDFRSPQEEDFRCPSDEDFRQLPEEDLREAPEEDPRLPDNFRPPGEDFRSPPDDFRSHRPFVNFGRPEGGKFDFGKHNMGSFPEGRFMPDPKINCGSGRVTPIKIMNLPFKANVNEILDFFHGYRIIPDSVSIQYNEQGLPTGEAIVAMINYNEAMAAIKDLNDRPVGPRKVKLTLL

SEQ ID NO: 75179 - protein, 143 aa, Homo sapiens
  Payload ID: 14858
  Gene Symbol: RBM12B
  Gene Name: RNA binding motif protein 12B
  ENSP ID: ENSP00000428269
MAVVIRLLGLPFIAGPVDIRHFFTGLTIPDGGVHIIGGEIGEAFIIFATDEDARRAISRSGGFIKDSSVELFLSSKAEMQKTIEMKRTDRVGRGRPGSGTSGVDSLSNFIESVKEEASNSGYGSSINQDAGFHTNGTGHGNLR

SEQ ID NO: 75180 - protein, 122 aa, Homo sapiens
  Payload ID: 14858
  Gene Symbol: RBM12B
  Gene Name: RNA binding motif protein 12B
  ENSP ID: ENSP00000429807
MAVVIRLLGLPFIAGPVDIRHFFTGLTIPDGGVHIIGGEIGEAFIIFATDEDARRAISRSGGFIKDSSVELFLSSKAEMQKTIEMKRTDRVGRGRPGSGTSGVDSLSNFIESVKEEASNSGY

SEQ ID NO: 75181 - protein, 82 aa, Homo sapiens
  Payload ID: 14858
  Gene Symbol: RBM12B
  Gene Name: RNA binding motif protein 12B
  ENSP ID: ENSP00000430466
MAVVIRLLGLPFIAGPVDIRHFFTGLTIPDGGVHIIGGEIGEAFIIFATDEDARRAISRSGGFIKDSSVELFLSSKAEMQKT

SEQ ID NO: 75182 - protein, 149 aa, Homo sapiens
  Payload ID: 14858
  Gene Symbol: RBM12B
  Gene Name: RNA binding motif protein 12B
  ENSP ID: ENSP00000430474
MAVVIRLLGLPFIAGPVDIRHFFTGLTIPDGGVHIIGGEIGEAFIIFATDEDARRAISRSGGFIKDSSVELFLSSKAEMQKTIEMKRTDRVGRGRPGSGTSGVDSLSNFIESVKEEASNSGYGSSINQDAGFHTNGTGHGNLRPRKTRP

SEQ ID NO: 75183 - protein, 881 aa, Homo sapiens; identical to SEQ ID NO: 75178
  Payload ID: 14858
  Gene Symbol: RBM12B
  Gene Name: RNA binding motif protein 12B
  ENSP ID: ENSP00000487257

SEQ ID NO: 75184 - protein, 669 aa, Homo sapiens
  Payload ID: 14859
  Gene Symbol: RBM14
  Gene Name: RNA binding motif protein 14
  Uniprot ID: Q96PK6
  ENSP ID: ENSP00000311747
MKIFVGNVDGADTTPEELAALFAPYGTVMSCAVMKQFAFVHMRENAGALRAIEALHGHELRPGRALVVEMSRPRPLNTWKIFVGNVSAACTSQELRSLFERRGRVIECDVVKDYAFVHMEKEADAKAAIAQLNGKEVKGKRINVELSTKGQKKGPGLAVQSGDKTKKPGAGDTAFPGTGGFSATFDYQQAFGNSTGGFDGQARQPTPPFFGRDRSPLRRSPPRASYVAPLTAQPATYRAQPSVSLGAAYRAQPSASLGVGYRTQPMTAQAASYRAQPSVSLGAPYRGQLASPSSQSAAASSLGPYGGAQPSASALSSYGGQAAAASSLNSYGAQGSSLASYGNQPSSYGAQAASSYGVRAAASSYNTQGAASSLGSYGAQAASYGAQSAASSLAYGAQAASYNAQPSASYNAQSAPYAAQQAASYSSQPAAYVAQPATAAAYASQPAAYAAQATTPMAGSYGAQPVVQTQLNSYGAQASMGLSGSYGAQSAAAATGSYGAAAAYGAQPSATLAAPYRTQSSASLAASYAAQQHPQAAASYRGQPGNAYDGAGQPSAAYLSMSQGAVANANSTPPPYERTRLSPPRASYDDPYKKAVAMSKRYGSDRRLAELSDYRRLSESQLSFRRSPTKSSLDYRRLPDAHSDYARYSGSYNDYLRAAQMHSGYQRRM

SEQ ID NO: 75185 - protein, 156 aa, Homo sapiens
  Payload ID: 14859
  Gene Symbol: RBM14
  Gene Name: RNA binding motif protein 14
  Uniprot ID: Q96PK6
  ENSP ID: ENSP00000377548
MKIFVGNVDGADTTPEELAALFAPYGTVMSCAVMKQFAFVHMRENAGALRAIEALHGHELRPGRALVVEMSRPRPLNTWKIFVGNVSAACTSQELRSLFERRGRVIECDVVKDYAFVHMEKEADAKAAIAQLNGKEVKGKRINVELSTKGMVPTGV

SEQ ID NO: 75186 - protein, 159 aa, Homo sapiens
  Payload ID: 14859
  Gene Symbol: RBM14
  Gene Name: RNA binding motif protein 14
  ENSP ID: ENSP00000386518
MKIFVGNVDGADTTPEELAALFAPYGTVMSCAVMKQFAFVHMRENAGALRAIEALHGHELRPGRALVVEMSRPRPLNTWKIFVGNVSAACTSQELRSLFERRGRVIECDVVKGDVKIFILCCSSSLLLLLSPGSWTTRLFTWRRKQMPKPQSRSSTAKK

SEQ ID NO: 75187 - protein, 119 aa, Homo sapiens
  Payload ID: 14859
  Gene Symbol: RBM14
  Gene Name: RNA binding motif protein 14
  Uniprot ID: Q96PK6
  ENSP ID: ENSP00000386995
MKIFVGNVDGADTTPEELAALFAPYGTVMSCAVMKQFAFVHMRENAGALRAIEALHGHELRPGRALVVEMSRPRPLNTWKIFVGNVSAACTSQELRSLFERRGRVIECDVVKGMVPTGV

SEQ ID NO: 75188 - protein, 129 aa, Homo sapiens
  Payload ID: 14859
  Gene Symbol: RBM14
  Gene Name: RNA binding motif protein 14
  ENSP ID: ENSP00000414650
MKIFVGNVDGADTTPEELAALFAPYGTVMSCAVMKQFAFVHMRENAGALRAIEALHGHELRPGRALVVEMSRPRPLNTWKIFVGNVSAACTSQELRSLFERRGRVIECDVVKGYTSPRLSGIGLSCWVL

SEQ ID NO: 75189 - protein, 977 aa, Homo sapiens
  Payload ID: 14860
  Gene Symbol: RBM15
  Gene Name: RNA binding motif protein 15
  Uniprot ID: Q96T37
  ENSP ID: ENSP00000358799
MRTAGRDPVPRRSPRWRRAVPLCETSAGRRVTQLRGDDLRRPATMKGKERSPVKAKRSRGGEDSTSRGERSKKLGGSGGSNGSSSGKTDSGGGSRRSLHLDKSSSRGGSREYDTGGGSSSSRLHSYSSPSTKNSSGGGESRSSSRGGGGESRSSGAASSAPGGGDGAEYKTLKISELGSQLSDEAVEDGLFHEFKRFGDVSVKISHLSGSGSGDERVAFVNFRRPEDARAAKHARGRLVLYDRPLKIEAVYVSRRRSRSPLDKDTYPPSASVVGASVGGHRHPPGGGGGQRSLSPGGAALGYRDYRLQQLALGRLPPPPPPPLPRDLERERDYPFYERVRPAYSLEPRVGAGAGAAPFREVDEISPEDDQRANRTLFLGNLDITVTESDLRRAFDRFGVITEVDIKRPSRGQTSTYGFLKFENLDMSHRAKLAMSGKIIIRNPIKIGYGKATPTTRLWVGGLGPWVPLAALAREFDRFGTIRTIDYRKGDSWAYIQYESLDAAHAAWTHMRGFPLGGPDRRLRVDFADTEHRYQQQYLQPLPLTHYELVTDAFGHRAPDPLRGARDRTPPLLYRDRDRDLYPDSDWVPPPPPVRERSTRTAATSVPAYEPLDSLDRRRDGWSLDRDRGDRDLPSSRDQPRKRRLPEESGGRHLDRSPESDRPRKRHCAPSPDRSPELSSSRDRYNSDNDRSSRLLLERPSPIRDRRGSLEKSQGDKRDRKNSASAERDRKHRTTAPTEGKSPLKKEDRSDGSAPSTSTASSKLKSPSQKQDGGTAPVASASPKLCLAWQGMLLLKNSNFPSNMHLLQGDLQVASSLLVEGSTGGKVAQLKITQRLRLDQPKLDEVTRRIKVAGPNGYAILLAVPGSSDSRSSSSSAASDTATSTQRPLRNLVSYLKQKQAAGVISLPVGGNKDKENTGVLHAFPPCEFSQQFLDSPAKALAKSEEDYLVMIIVRGFGFQIGVRYENKKRENLALTLL

SEQ ID NO: 75190 - protein, 969 aa, Homo sapiens
  Payload ID: 14860
  Gene Symbol: RBM15
  Gene Name: RNA binding motif protein 15
  Uniprot ID: Q96T37
  ENSP ID: ENSP00000473552
MRTAGRDPVPRRSPRWRRAVPLCETSAGRRVTQLRGDDLRRPATMKGKERSPVKAKRSRGGEDSTSRGERSKKLGGSGGSNGSSSGKTDSGGGSRRSLHLDKSSSRGGSREYDTGGGSSSSRLHSYSSPSTKNSSGGGESRSSSRGGGGESRSSGAASSAPGGGDGAEYKTLKISELGSQLSDEAVEDGLFHEFKRFGDVSVKISHLSGSGSGDERVAFVNFRRPEDARAAKHARGRLVLYDRPLKIEAVYVSRRRSRSPLDKDTYPPSASVVGASVGGHRHPPGGGGGQRSLSPGGAALGYRDYRLQQLALGRLPPPPPPPLPRDLERERDYPFYERVRPAYSLEPRVGAGAGAAPFREVDEISPEDDQRANRTLFLGNLDITVTESDLRRAFDRFGVITEVDIKRPSRGQTSTYGFLKFENLDMSHRAKLAMSGKIIIRNPIKIGYGKATPTTRLWVGGLGPWVPLAALAREFDRFGTIRTIDYRKGDSWAYIQYESLDAAHAAWTHMRGFPLGGPDRRLRVDFADTEHRYQQQYLQPLPLTHYELVTDAFGHRAPDPLRGARDRTPPLLYRDRDRDLYPDSDWVPPPPPVRERSTRTAATSVPAYEPLDSLDRRRDGWSLDRDRGDRDLPSSRDQPRKRRLPEESGGRHLDRSPESDRPRKRHCAPSPDRSPELSSSRDRYNSDNDRSSRLLLERPSPIRDRRGSLEKSQGDKRDRKNSASAERDRKHRTTAPTEGKSPLKKEDRSDGSAPSTSTASSKLKSPSQKQDGGTAPVASASPKLCLAWQGMLLLKNSNFPSNMHLLQGDLQVASSLLVEGSTGGKVAQLKITQRLRLDQPKLDEVTRRIKVAGPNGYAILLAVPGSSDSRSSSSSAASDTATSTQRPLRNLVSYLKQKQAAGVISLPVGGNKDKENTGVLHAFPPCEFSQQFLDSPAKALAKSEEDYLVMIIVRAKLVEQRMKIWNSKL

SEQ ID NO: 75191 - protein, 957 aa, Homo sapiens
  Payload ID: 14860
  Gene Symbol: RBM15
  Gene Name: RNA binding motif protein 15
  Uniprot ID: Q96T37
  ENSP ID: ENSP00000473638
MRTAGRDPVPRRSPRWRRAVPLCETSAGRRVTQLRGDDLRRPATMKGKERSPVKAKRSRGGEDSTSRGERSKKLGGSGGSNGSSSGKTDSGGGSRRSLHLDKSSSRGGSREYDTGGGSSSSRLHSYSSPSTKNSSGGGESRSSSRGGGGESRSSGAASSAPGGGDGAEYKTLKISELGSQLSDEAVEDGLFHEFKRFGDVSVKISHLSGSGSGDERVAFVNFRRPEDARAAKHARGRLVLYDRPLKIEAVYVSRRRSRSPLDKDTYPPSASVVGASVGGHRHPPGGGGGQRSLSPGGAALGYRDYRLQQLALGRLPPPPPPPLPRDLERERDYPFYERVRPAYSLEPRVGAGAGAAPFREVDEISPEDDQRANRTLFLGNLDITVTESDLRRAFDRFGVITEVDIKRPSRGQTSTYGFLKFENLDMSHRAKLAMSGKIIIRNPIKIGYGKATPTTRLWVGGLGPWVPLAALAREFDRFGTIRTIDYRKGDSWAYIQYESLDAAHAAWTHMRGFPLGGPDRRLRVDFADTEHRYQQQYLQPLPLTHYELVTDAFGHRAPDPLRGARDRTPPLLYRDRDRDLYPDSDWVPPPPPVRERSTRTAATSVPAYEPLDSLDRRRDGWSLDRDRGDRDLPSSRDQPRKRRLPEESGGRHLDRSPESDRPRKRHCAPSPDRSPELSSSRDRYNSDNDRSSRLLLERPSPIRDRRGSLEKSQGDKRDRKNSASAERDRKHRTTAPTEGKSPLKKEDRSDGSAPSTSTASSKLKSPSQKQDGGTAPVASASPKLCLAWQGMLLLKNSNFPSNMHLLQGDLQVASSLLVEGSTGGKVAQLKITQRLRLDQPKLDEVTRRIKVAGPNGYAILLAVPGSSDSRSSSSSAASDTATSTQRPLRNLVSYLKQKQAAGVISLPVGGNKDKENTGVLHAFPPCEFSQQFLDSPAKALAKSEEDYLVMIIVRGAS

SEQ ID NO: 75192 - protein, 933 aa, Homo sapiens
  Payload ID: 14860
  Gene Symbol: RBM15
  Gene Name: RNA binding motif protein 15
  ENSP ID: ENSP00000480399
MKGKERSPVKAKRSRGGEDSTSRGERSKKLGGSGGSNGSSSGKTDSGGGSRRSLHLDKSSSRGGSREYDTGGGSSSSRLHSYSSPSTKNSSGGGESRSSSRGGGGESRSSGAASSAPGGGDGAEYKTLKISELGSQLSDEAVEDGLFHEFKRFGDVSVKISHLSGSGSGDERVAFVNFRRPEDARAAKHARGRLVLYDRPLKIEAVYVSRRRSRSPLDKDTYPPSASVVGASVGGHRHPPGGGGGQRSLSPGGAALGYRDYRLQQLALGRLPPPPPPPLPRDLERERDYPFYERVRPAYSLEPRVGAGAGAAPFREVDEISPEDDQRANRTLFLGNLDITVTESDLRRAFDRFGVITEVDIKRPSRGQTSTYGFLKFENLDMSHRAKLAMSGKIIIRNPIKIGYGKATPTTRLWVGGLGPWVPLAALAREFDRFGTIRTIDYRKGDSWAYIQYESLDAAHAAWTHMRGFPLGGPDRRLRVDFADTEHRYQQQYLQPLPLTHYELVTDAFGHRAPDPLRGARDRTPPLLYRDRDRDLYPDSDWVPPPPPVRERSTRTAATSVPAYEPLDSLDRRRDGWSLDRDRGDRDLPSSRDQPRKRRLPEESGGRHLDRSPESDRPRKRHCAPSPDRSPELSSSRDRYNSDNDRSSRLLLERPSPIRDRRGSLEKSQGDKRDRKNSASAERDRKHRTTAPTEGKSPLKKEDRSDGSAPSTSTASSKLKSPSQKQDGGTAPVASASPKLCLAWQGMLLLKNSNFPSNMHLLQGDLQVASSLLVEGSTGGKVAQLKITQRLRLDQPKLDEVTRRIKVAGPNGYAILLAVPGSSDSRSSSSSAASDTATSTQRPLRNLVSYLKQKQAAGVISLPVGGNKDKENTGVLHAFPPCEFSQQFLDSPAKALAKSEEDYLVMIIVRGFGFQIGVRYENKKRENLALTLL

SEQ ID NO: 75193 - protein, 977 aa, Homo sapiens; identical to SEQ ID NO: 75189
  Payload ID: 14860
  Gene Symbol: RBM15
  Gene Name: RNA binding motif protein 15
  Uniprot ID: Q96T37
  ENSP ID: ENSP00000483133

SEQ ID NO: 75194 - protein, 890 aa, Homo sapiens
  Payload ID: 14861
  Gene Symbol: RBM15B
  Gene Name: RNA binding motif protein 15B
  Uniprot ID: Q8NDT2
  ENSP ID: ENSP00000454545
MKRQSERDSSPSGRGSSSSAKRPREREREAEAGGRRAAHKASGGAKHPVPARARDKPRGSGSGGGGHRDGRGTGDANHRASSGRSSGSGAGGGGRGGKASGDPGASGMSPRASPLPPPPPPPGAEPACPGSSAAAPEYKTLLISSLSPALPAEHLEDRLFHQFKRFGEISLRLSHTPELGRVAYVNFRHPQDAREARQHALARQLLLYDRPLKVEPVYLRGGGGSSRRSSSSSAAASTPPPGPPAPADPLGYLPLHGGYQYKQRSLSPVAAPPLREPRARHAAAAFALDAAAAAAVGLSRERALDYYGLYDDRGRPYGYPAVCEEDLMPEDDQRATRNLFIGNLDHSVSEVELRRAFEKYGIIEEVVIKRPARGQGGAYAFLKFQNLDMAHRAKVAMSGRVIGRNPIKIGYGKANPTTRLWVGGLGPNTSLAALAREFDRFGSIRTIDHVKGDSFAYIQYESLDAAQAACAKMRGFPLGGPDRRLRVDFAKAEETRYPQQYQPSPLPVHYELLTDGYTRHRNLDADLVRDRTPPHLLYSDRDRTFLEGDWTSPSKSSDRRNSLEGYSRSVRSRSGERWGADGDRGLPKPWEERRKRRSLSSDRGRTTHSPYEERSRTKGSGQQSERGSDRTPERSRKENHSSEGTKESSSNSLSNSRHGAEERGHHHHHHEAADSSHGKKARDSERNHRTTEAEPKPLEEPKHETKKLKNLSEYAQTLQLGWNGLLVLKNSCFPTSMHILEGDQGVISSLLKDHTSGSKLTQLKIAQRLRLDQPKLDEVTRRIKQGSPNGYAVLLATQATPSGLGTEGMPTVEPGLQRRLLRNLVSYLKQKQAAGVISLPVGGSKGRDGTGMLYAFPPCDFSQQYLQSALRTLGKLEEEHMVIVIVRDTA

SEQ ID NO: 75195 - protein, 401 aa, Homo sapiens
  Payload ID: 14862
  Gene Symbol: RBM17
  Gene Name: RNA binding motif protein 17
  Uniprot ID: Q96I25
  ENSP ID: ENSP00000369218
MSLYDDLGVETSDSKTEGWSKNFKLLQSQLQVKKAALTQAKSQRTKQSTVLAPVIDLKRGGSSDDRQIVDTPPHVAAGLKDPVPSGFSAGEVLIPLADEYDPMFPNDYEKVVKRQREERQRQRELERQKEIEEREKRRKDRHEASGFARRPDPDSDEDEDYERERRKRSMGGAAIAPPTSLVEKDKELPRDFPYEEDSRPRSQSSKAAIPPPVYEEQDRPRSPTGPSNSFLANMGGTVAHKIMQKYGFREGQGLGKHEQGLSTALSVEKTSKRGGKIIVGDATEKDASKKSDSNPLTEILKCPTKVVLLRNMVGAGEVDEDLEVETKEECEKYGKVGKCVIFEIPGAPDDEAVRIFLEFERVESAIKAVVDLNGRYFGGRVVKACFYNLDKFRVLDLAEQV

SEQ ID NO: 75196 - protein, 401 aa, Homo sapiens; identical to SEQ ID NO: 75195
  Payload ID: 14862
  Gene Symbol: RBM17
  Gene Name: RNA binding motif protein 17
  Uniprot ID: Q96I25
  ENSP ID: ENSP00000388638

SEQ ID NO: 75197 - protein, 240 aa, Homo sapiens
  Payload ID: 14862
  Gene Symbol: RBM17
  Gene Name: RNA binding motif protein 17
  ENSP ID: ENSP00000395448
MGRVGRAGRSQRTKQSTVLAPVIDLKRGGSSDDRQIVDTPPHVAAGLKDPVPSGFSAGEVLIPLADEYDPMFPNDYEKVVKRQREERQRQRELERQKEIEEREKRRKDRHEASGFARRPDPDSDEDEDYERERRKRSMGGAAIAPPTSLVEKDKELPRDFPYEEDSRPRSQSSKAAIPPPVYEEQDRPRSPTGPSNSFLANMGGTVAHKIMQKYGFREGQGLGKHEQGLSTALSVEKTSK

SEQ ID NO: 75198 - protein, 212 aa, Homo sapiens
  Payload ID: 14862
  Gene Symbol: RBM17
  Gene Name: RNA binding motif protein 17
  ENSP ID: ENSP00000402303
MSLYDDLGVETSDSKTEGWSKNFKLLQSQLQVKKAALTQAKSQRTKQSTVLAPVIDLKRGGSSDDRQIVDTPPHVAAGLKDPVPSGFSAGEVLIPLADEYDPMFPNDYEKVVKRQREERQRQRELERQKEIEEREKRRKDRHEASGFARRPDPDSDEDEDYERERRKRSMGGAAIAPPTSLVEKDKELPRDFPYEEDSRPRSQSSKAAIPPP

SEQ ID NO: 75199 - protein, 225 aa, Homo sapiens
  Payload ID: 14862
  Gene Symbol: RBM17
  Gene Name: RNA binding motif protein 17
  ENSP ID: ENSP00000406024
  MOD_RES (1)..(1): Any amino acid
XPLADEYDPMFPNDYEKVVKRQREERQRQRELERQKEIEEREKRRKDRHEASGFARRPDPDSDEDEDYERERRKRSMGGAAIAPPTSLVEKDKELPRDFPYEEDSRPRSQSSKAAIPPPVYEEQDRPRSPTGPSNSFLANMGGTVAHKIMQKYGFREGQGLGKHEQGLSTALSVEKTSKRGGKIIVGDATEKGVSPGKRVTRGKGLAPSISDMASLDPHVSAGGQ

SEQ ID NO: 75200 - protein, 221 aa, Homo sapiens
  Payload ID: 14862
  Gene Symbol: RBM17
  Gene Name: RNA binding motif protein 17
  ENSP ID: ENSP00000408214
MSLYDDLGVETSDSKTEGWSKNFKLLQSQLQVKKAALTQAKSQRTKQSTVLAPVIDLKRGGSSDDRQIVDTPPHVAAGLKDPVPSGFSAGEVLIPLADEYDPMFPNDYEKVVKRQREERQRQRELERQKEIEEREKRKDRHEASGFARRPDPDSDEDEDYERERRKRSMGGAAIAPPTSLVEKDKELPRDFPYEEDSRPRSQSSKAAIPPPVYEEQDRPRS

SEQ ID NO: 75201 - protein, 190 aa, Homo sapiens
  Payload ID: 14863
  Gene Symbol: RBM18
  Gene Name: RNA binding motif protein 18
  Uniprot ID: Q96H35
  ENSP ID: ENSP00000409315
MEAETKTLPLENASILSEGSLQEGHRLWIGNLDPKITEYHLLKLLQKFGKVKQFDFLFHKSGALEGQPRGYCFVNFETKQEAEQAIQCLNGKLALSKKLVVRWAHAQVKRYDHNKNDKILPISLEPSSSTEPTQSNLSVTAKIKAIEAKLKMMAENPDAEYPAAPVYSYFKPPDKKRTTPYSRTAWKSRR

SEQ ID NO: 75202 - protein, 960 aa, Homo sapiens
  Payload ID: 14864
  Gene Symbol: RBM19
  Gene Name: RNA binding motif protein 19
  Uniprot ID: Q9Y4C8
  ENSP ID: ENSP00000261741
MSRLIVKNLPNGMKEERFRQLFAAFGTLTDCSLKFTKDGKFRKFGFIGFKSEEEAQKAQKHFNKSFIDTSRITVEFCKSFGDPAKPRAWSKHAQKPSQPKQPPKDSTTPEIKKDEKKKKVAGQLEKLKEDTEFQEFLSVHQRRAQAATWANDGLDAEPSKGKSKPASDYLNFDSDSGQESEEEGAGEDLEEEASLEPKAAVQKELSDMDYLKSKMVKAGSSSSSEEEESEDEAVHCDEGSEAEEEDSSATPVLQERDSKGAGQEQGMPAGKKRPPEARAETEKPANQKEPTTCHTVKLRGAPFNVTEKNVMEFLAPLKPVAIRIVRNAHGNKTGYIFVDFSNEEEVKQALKCNREYMGGRYIEVFREKNVPTTKGAPKNTTKSWQGRILGENEEEEDLAESGRLFVRNLPYTSTEEDLEKLFSKYGPLSELHYPIDSLTKKPKGFAFITFMFPEHAVKAYSEVDGQVFQGRMLHVLPSTIKKEASEDASALGSSSYKKKKEAQDKANSASSHNWNTLFMGPNAVADAIAQKYNATKSQVFDHETKGSVAVRVALGETQLVQEVRRFLIDNGVSLDSFSQAAAERSKTVILVKNLPAGTLAAQLQETFGHFGSLGRVLLPEGGITAIVEFLEPLEARKAFRHLAYSKFHHVPLYLEWAPVGVFSSTAPQKKKLQDTPSEPMEKDPAEPETVPDGETPEDENPTEEGADNSSAKMEEEEEEEEEEEESLPGCTLFIKNLNFDTTEEKLKEVFSKVGTVKSCSISKKKNKAGVLLSMGFGFVEYRKPEQAQKALKQLQGHVVDGHKLEVRISERATKPAVTLARKKQVPRKQTTSKILVRNIPFQAHSREIRELFSTFGELKTVRLPKKMTGTGTHRGFGFVDFLTKQDAKRAFNALCHSTHLYGRRLVLEWADSEVTLQALRRKTAAHFHEPPKKKRSVVLDEILEQLEGSDSDSEEQTLQL

SEQ ID NO: 75203 - protein, 960 aa, Homo sapiens; identical to SEQ ID NO: 75202
  Payload ID: 14864
  Gene Symbol: RBM19
  Gene Name: RNA binding motif protein 19
  Uniprot ID: Q9Y4C8
  ENSP ID: ENSP00000376344

SEQ ID NO: 75204 - protein, 960 aa, Homo sapiens; identical to SEQ ID NO: 75202
  Payload ID: 14864
  Gene Symbol: RBM19
  Gene Name: RNA binding motif protein 19
  Uniprot ID: Q9Y4C8
  ENSP ID: ENSP00000442053

SEQ ID NO: 75205 - protein, 110 aa, Homo sapiens
  Payload ID: 14864
  Gene Symbol: RBM19
  Gene Name: RNA binding motif protein 19
  ENSP ID: ENSP00000449604
VSSTFGELKTVRLPKKMTGTGTHRGFGFVDFLTKQDAKRAFNALCHSTHLYGRRLVLEWADSEVTLQALRRKTAAHFHEPPKKKRSVVLDEILEQLEGSDSDSEEQTLQL

SEQ ID NO: 75206 - protein, 1227 aa, Homo sapiens
  Payload ID: 14865
  Gene Symbol: RBM20
  Gene Name: RNA binding motif protein 20
  Uniprot ID: Q5T481
  ENSP ID: ENSP00000358532
MVLAAAMSQDADPSGPEQPDRVACSVPGARASPAPSGPRGMQQPPPPPQPPPPPQAGLPQIIQNAAKLLDKNPFSVSNPNPLLPSPASLQLAQLQAQLTLHRLKLAQTAVTNNTAAATVLNQVLSKVAMSQPLFNQLRHPSVITGPHGHAGVPQHAAAIPSTRFPSNAIAFSPPSQTRGPGPSMNLPNQPPSAMVMHPFTGVMPQTPGQPAVILGIGKTGPAPATAGFYEYGKASSGQTYGPETDGQPGFLPSSASTSGSVTYEGHYSHTGQDGQAAFSKDFYGPNSQGSHVASGFPAEQAGGLKSEVGPLLQGTNSQWESPHGFSGQSKPDLTAGPMWPPPHNQPYELYDPEEPTSDRTPPSFGGRLNNSKQGFIGAGRRAKEDQALLSVRPLQAHELNDFHGVAPLHLPHICSICDKKVFDLKDWELHVKGKLHAQKCLVFSENAGIRCILGSAEGTLCASPNSTAVYNPAGNEDYASNLGTSYVPIPARSFTQSSPTFPLASVGTTFAQRKGAGRVVHICNLPEGSCTENDVINLGLPFGKVTNYILMKSTNQAFLEMAYTEAAQAMVQYYQEKSAVINGEKLLIRMSKRYKELQLKKPGKAVAAIIQDIHSQRERDMFREADRYGPERPRSRSPVSRSLSPRSHTPSFTSCSSSHSPPGPSRADWGNGRDSWEHSPYARREEERDPAPWRDNGDDKRDRMDPWAHDRKHHPRQLDKAELDERPEGGRPHREKYPRSGSPNLPHSVSSYKSREDGYYRKEPKAKSDKYLKQQQDAPGRSRRKDEARLRESRHPHPDDSGKEDGLGPKVTRAPEGAKAKQNEKNKTKRTDRDQEGADDRKENTMAENEAGKEEQEGMEESPQSVGRQEKEAEFSDPENTRTKKEQDWESESEAEGESWYPTNMEELVTVDEVGEEEDFIVEPDIPELEEIVPIDQKDKICPETCLCVTTTLDLDLAQDFPKEGVKAVGNGAAEISLKSPRELPSASTSCPSDMDVEMPGLNLDAERKPAESETGLSLEDSDCYEKEAKGVESSDVHPAPTVQQMSSPKPAEERARQPSPFVDDCKTRGTPEDGACEGSPLEEKASPPIETDLQNQACQEVLTPENSRYVEMKSLEVRSPEYTEVELKQPLSLPSWEPEDVFSELSIPLGVEFVVPRTGFYCKLCGLFYTSEETAKMSHCRSAVHYRNLQKYLSQLAEEGLKETEGADSPRPEDSGIVPRFERKKL

SEQ ID NO: 75207 - protein, 420 aa, Homo sapiens
  Payload ID: 14866
  Gene Symbol: RBM22
  Gene Name: RNA binding motif protein 22
  Uniprot ID: Q9NW64
  ENSP ID: ENSP00000199814
MATSLGSNTYNRQNWEDADFPILCQTCLGENPYIRMTKEKYGKECKICARPFTVFRWCPGVRMRFKKTEVCQTCSKLKNVCQTCLLDLEYGLPIQVRDAGLSFKDDMPKSDVNKEYYTQNMEREISNSDGTRPVGMLGKATSTSDMLLKLARTTPYYKRNRPHICSFWVKGECKRGEECPYRHEKPTDPDDPLADQNIKDRYYGINDPVADKLLKRASTMPRLDPPEDKTITTLYVGGLGDTITETDLRNHFYQFGEIRTITVVQRQQCAFIQFATRQAAEVAAEKSFNKLIVNGRRLNVKWGRSQAARGKEKEKDGTTDSGIKLEPVPGLPGALPPPPAAEEEASANYFNLPPSGPPAVVNIALPPPPGIAPPPPPGFGPHMFHPMGPPPPFMRAPGPIHYPSQDPQRMGAHAGKHSSP

SEQ ID NO: 75208 - protein, 371 aa, Homo sapiens
  Payload ID: 14866
  Gene Symbol: RBM22
  Gene Name: RNA binding motif protein 22
  Uniprot ID: Q9NW64
  ENSP ID: ENSP00000412118
MATSLGSNTYNRQNWEDADFPILCQTCLGENPYIRMTKEKYGLPIQVRDAGLSFKDDMPKSDVNKEYYTQNMEREISNSDGTRPVGMLGKATSTSDMLLKLARTTPYYKRNRPHICSFWVKGECKRGEECPYRHEKPTDPDDPLADQNIKDRYYGINDPVADKLLKRASTMPRLDPPEDKTITTLYVGGLGDTITETDLRNHFYQFGEIRTITVVQRQQCAFIQFATRQAAEVAAEKSFNKLIVNGRRLNVKWGRSQAARGKEKEKDGTTDSGIKLEPVPGLPGALPPPPAAEEEASANYFNLPPSGPPAVVNIALPPPPGIAPPPPPGFGPHMFHPMGPPPPFMRAPGPIHYPSQDPQRMGAHAGKHSSP

SEQ ID NO: 75209 - protein, 179 aa, Homo sapiens
  Payload ID: 14866
  Gene Symbol: RBM22
  Gene Name: RNA binding motif protein 22
  ENSP ID: ENSP00000428154
MATSLGSNTYNRQNWEDATCLGENPYIRMTKEKYGKECKICARPFTVFRWCPGVRMRFKKTEVCQTCSKLKNVCQTCLLDLEYGLPIQVRDAGLSFKDDMPKSDVNKEYYTQNMEREISNSDGTRPVGMLGKATSTSDMLLKLARTTPYYKRNRPHICSFWVKGECKRGEECPYRHEKP

SEQ ID NO: 75210 - protein, 243 aa, Homo sapiens
  Payload ID: 14866
  Gene Symbol: RBM22
  Gene Name: RNA binding motif protein 22
  ENSP ID: ENSP00000430946
MEGGGEAAHLASWQDRACGAAEGIPGRSQRGGLAWPEQEGGGRSSCGLEGRGLSQGPGTSTLSIPAPSSLLELVFFSPAACRKCRQRPLPRSGRDGLRVPAVPSSPPSLPAPSPPQVSLRCQGLRRVVLNQISHFHQDFPILCQTCLGENPYIRMTKEKYGKECKICARPFTVFRWCPGVRMRFKKTEVCQTCSKLKNVCQTCLLDLEYGLPIQVRDAGLSFKDDMPKSDVNKEYYTQNMERE

SEQ ID NO: 75211 - protein, 405 aa, Homo sapiens
  Payload ID: 14867
  Gene Symbol: RBM23
  Gene Name: RNA binding motif protein 23
  Uniprot ID: Q86U06
  ENSP ID: ENSP00000339220
MASDDFDIVIEAMLEAPYKKEEDEQQRKEVKKDYPSNTTSSTSNSGNETSGSSTIGETSNRSRDRDRYRRRNSRSRSPGRQCRHRSRSWDRRHGSESRSRDHRREDRVHYRSPPLATGEPVDNLSPEERDARTVFCMQLAARIRPRDLEDFFSAVGKVRDVRIISDRNSRRSKGIAYVEFCEIQSVPLAIGLTGQRLLGVPIIVQASQAEKNRLAAMANNLQKGNGGPMRLYVGSLHFNITEDMLRGIFEPFGKIDNIVLMKDSDTGRSKGYGFITFSDSECARRALEQLNGFELAGRPMRVGHVTERLDGGTDITFPDGDQELDLGSAGGRFQLMAKLAEGAGIQLPSTAAAAAAAAAQAAALQLNGAVPLGALNPAALTALSPALNLASQCFQLSSLFTPQTM

SEQ ID NO: 75212 - protein, 439 aa, Homo sapiens
  Payload ID: 14867
  Gene Symbol: RBM23
  Gene Name: RNA binding motif protein 23
  Uniprot ID: Q86U06
  ENSP ID: ENSP00000352956
MASDDFDIVIEAMLEAPYKKEEDEQQRKEVKKDYPSNTTSSTSNSGNETSGSSTIGETSKKKRSRSHNKSRDRKRSRSRDRDRYRRRNSRSRSPGRQCRHRSRSWDRRHGSESRSRDHRREDRVHYRSPPLATGYRYGHSKSPHFREKSPVREPVDNLSPEERDARTVFCMQLAARIRPRDLEDFFSAVGKVRDVRIISDRNSRRSKGIAYVEFCEIQSVPLAIGLTGQRLLGVPIIVQASQAEKNRLAAMANNLQKGNGGPMRLYVGSLHFNITEDMLRGIFEPFGKIDNIVLMKDSDTGRSKGYGFITFSDSECARRALEQLNGFELAGRPMRVGHVTERLDGGTDITFPDGDQELDLGSAGGRFQLMAKLAEGAGIQLPSTAAAAAAAAAQAAALQLNGAVPLGALNPAALTALSPALNLASQCFQLSSLFTPQTM

SEQ ID NO: 75213 - protein, 423 aa, Homo sapiens
  Payload ID: 14867
  Gene Symbol: RBM23
  Gene Name: RNA binding motif protein 23
  Uniprot ID: Q86U06
  ENSP ID: ENSP00000382806
MASDDFDIVIEAMLEAPYKKEEDEQQRKEVKKDYPSNTTSSTSNSGNETSGSSTIGETSNRSRDRDRYRRRNSRSRSPGRQCRHRSRSWDRRHGSESRSRDHRREDRVHYRSPPLATGYRYGHSKSPHFREKSPVREPVDNLSPEERDARTVFCMQLAARIRPRDLEDFFSAVGKVRDVRIISDRNSRRSKGIAYVEFCEIQSVPLAIGLTGQRLLGVPIIVQASQAEKNRLAAMANNLQKGNGGPMRLYVGSLHFNITEDMLRGIFEPFGKIDNIVLMKDSDTGRSKGYGFITFSDSECARRALEQLNGFELAGRPMRVGHVTERLDGGTDITFPDGDQELDLGSAGGRFQLMAKLAEGAGIQLPSTAAAAAAAAAQAAALQLNGAVPLGALNPAALTALSPALNLASQCFQLSSLFTPQTM

SEQ ID NO: 75214 - protein, 269 aa, Homo sapiens
  Payload ID: 14867
  Gene Symbol: RBM23
  Gene Name: RNA binding motif protein 23
  ENSP ID: ENSP00000438504
MQLAARIRPRDLEDFFSAVGKVRDVRIISDRNSRRSKGIAYVEFCEIQSVPLAIGLTGQRLLGVPIIVQASQAEKNRLAAMANNLQKGNGGPMRLYVGSLHFNITEDMLRGIFEPFGKIDNIVLMKDSDTGRSKGYGFITFSDSECARRALEQLNGFELAGRPMRVGHVTERLDGGTDITFPDGDQELDLGSAGGRFQLMAKLAEGAGIQLPSTAAAAAAAAAQAAALQLNGAVPLGALNPAALTALSPALNLASQCFQLSSLFTPQTM

SEQ ID NO: 75215 - protein, 21 aa, Homo sapiens
  Payload ID: 14867
  Gene Symbol: RBM23
  Gene Name: RNA binding motif protein 23
  ENSP ID: ENSP00000450423
MQLAARIRPRDLEDFFSAVGK

SEQ ID NO: 75216 - protein, 50 aa, Homo sapiens
  Payload ID: 14867
  Gene Symbol: RBM23
  Gene Name: RNA binding motif protein 23
  ENSP ID: ENSP00000450556
MQLAARIRPRDLEDFFSAVGKVRDVRIISDRNSRRSKGIAYVEFCEIQSV

SEQ ID NO: 75217 - protein, 101 aa, Homo sapiens
  Payload ID: 14867
  Gene Symbol: RBM23
  Gene Name: RNA binding motif protein 23
  ENSP ID: ENSP00000450558
MASDDFDIVIEAMLEAPYKKEEDEQQRKEVKKDYPSNTTSSTSNSGNETSGSSTIGETSNRSRDRDRYRRRNSRSRSPGRQCRHRSRSWDRRHGSESRSRD

SEQ ID NO: 75218 - protein, 59 aa, Homo sapiens
  Payload ID: 14867
  Gene Symbol: RBM23
  Gene Name: RNA binding motif protein 23
  ENSP ID: ENSP00000450672
MASDDFDIVIEAMLEAPYKKEEDEQQRKEVKKDYPSNTTSSTSNSGNETSGSSTIGETS

SEQ ID NO: 75219 - protein, 100 aa, Homo sapiens
  Payload ID: 14867
  Gene Symbol: RBM23
  Gene Name: RNA binding motif protein 23
  ENSP ID: ENSP00000451364
MASDDFDIVIEAMLEAPYKKEEDEQQRKEVKKDYPSNTTSSTSNSGNETSGSSTIGETSNRSRDRDRYRRRNSRSRSPGRQCRHRSRSWDRRHGSESRSR

SEQ ID NO: 75220 - protein, 66 aa, Homo sapiens
  Payload ID: 14867
  Gene Symbol: RBM23
  Gene Name: RNA binding motif protein 23
  ENSP ID: ENSP00000451403
MASDDFDIVIEAMLEAPYKKEEDEQQRKEVKKDYPSNTTSSTSNSGNETSGSSTIGETSNRSRDRD

SEQ ID NO: 75221 - protein, 75 aa, Homo sapiens
  Payload ID: 14867
  Gene Symbol: RBM23
  Gene Name: RNA binding motif protein 23
  ENSP ID: ENSP00000451448
MASDDFDIVIEAMLEAPYKKEEDEQQRKEVKKDYPSNTTSSTSNSGNETSGSSTIGETSKKKRSRSHNKSRDRKR

SEQ ID NO: 75222 - protein, 214 aa, Homo sapiens
  Payload ID: 14867
  Gene Symbol: RBM23
  Gene Name: RNA binding motif protein 23
  ENSP ID: ENSP00000451642
  MOD_RES (1)..(1): Any amino acid
XADWAAVAGSAYHCTGFTEKNRLAAMANNLQKGNGGPMRLYVGSLHFNITEDMLRGIFEPFGKIDNIVLMKDSDTGRSKGYGFITFSDSECARRALEQLNGFELAGRPMRVGHVTERLDGGTDITFPDGDQELDLGSAGGRFQLMAKLAEGAGIQLPSTAAAAAAAAAQAAALQLNGAVPLGALNPAALTALSPALNLASQCFQLSSLFTPQTM

SEQ ID NO: 75223 - protein, 82 aa, Homo sapiens
  Payload ID: 14867
  Gene Symbol: RBM23
  Gene Name: RNA binding motif protein 23
  ENSP ID: ENSP00000451838
LDLGSAGGRFQLMAKLAEGAGIQLPSTAAAAAAAAAQAAALQLNGAVPLGALNPAALTALSPALNLASQCFQLSSLFTPQTM

SEQ ID NO: 75224 - protein, 114 aa, Homo sapiens
  Payload ID: 14867
  Gene Symbol: RBM23
  Gene Name: RNA binding motif protein 23
  ENSP ID: ENSP00000452171
MQLAARIRPRDLEDFFSAVGKVRDVRIISDRNSRRSKGIAYVEFCEIQSVPLAIGLTGQRLLGVPIIVQASQAEKNRLAAMANNLQKGNGGPMRLYVGSLHFNITEDMLRGIFE

SEQ ID NO: 75225 - protein, 91 aa, Homo sapiens
  Payload ID: 14867
  Gene Symbol: RBM23
  Gene Name: RNA binding motif protein 23
  ENSP ID: ENSP00000452382
MASDDFDIVIEAMLEAPYKKEEDEQQRKEVKKDYPSNTTSSTSNSGNETSGSSTIGETSNRSRDRDRYRRRNSRSRSPGRQCRHRSRSWDR

SEQ ID NO: 75226 - protein, 57 aa, Homo sapiens
  Payload ID: 14867
  Gene Symbol: RBM23
  Gene Name: RNA binding motif protein 23
  ENSP ID: ENSP00000452538
MASDDFDIVIEAMLEAPYKKEEDEQQRKEVKKDYPSNTTSSTSNSGNETSGSSTIGE

SEQ ID NO: 75227 - protein, 92 aa, Homo sapiens
  Payload ID: 14867
  Gene Symbol: RBM23
  Gene Name: RNA binding motif protein 23
  ENSP ID: ENSP00000452557
MASDDFDIVIEAMLEAPYKKEEDEQQRKEVKKDYPSNTTSSTSNSGNETSGSSTIGETSKKKRSRSHNKSRDRKRSRSRDRDRYRRRNSRSR

SEQ ID NO: 75228 - protein, 144 aa, Homo sapiens
  Payload ID: 14867
  Gene Symbol: RBM23
  Gene Name: RNA binding motif protein 23
  ENSP ID: ENSP00000452583
MASDDFDIVIEAMLEAPYKKEEDEQQRKEVKKDYPSNTTSSTSNSGNETSGSSTIGETSKKKRSRSHNKSRDRKRSRSRDRDRYRRRNSRSRSPGRQCRHRSRSWDRRHGSESRSRDHRREDRVHYRSPPLATGEPVDNLSPEE

SEQ ID NO: 75229 - protein, 189 aa, Homo sapiens
  Payload ID: 14867
  Gene Symbol: RBM23
  Gene Name: RNA binding motif protein 23
  ENSP ID: ENSP00000452602
MANNLQKGNGGPMRLYVGSLHFNITEDMLRGIFEPFGKIDNIVLMKDSDTGRSKGYGFITFSDSECARRALEQLNGFELAGRPMRVGHVTERLDGGTDITFPDGDQELDLGSAGGRFQLMAKLAEGAGIQLPSTAAAAAAAAAQAAALQLNGAVPLGALNPAALTALSPALNLASQCFQLSSLFTPQTM

SEQ ID NO: 75230 - protein, 191 aa, Homo sapiens
  Payload ID: 14868
  Gene Symbol: RBM24
  Gene Name: RNA binding motif protein 24
  Uniprot ID: Q9BX46
  ENSP ID: ENSP00000319551
MYVCLCVSVAKVTMADRAAAERACKDPNPIIDGRKANVNLAYLGAKPRIMQPGFAFGVQQLHPALIQRPFGIPAHYVYPQAFVQPGVVIPHVQPTAAAASTTPYIDYTGAAYAQYSAAAAAAAAAAAYDQYPYAASPAAAGYVTAGGYGYAVQQPITAAAPGTAAAAAAAAAAAAAFGQYQPQQLQTDRMQ

SEQ ID NO: 75231 - protein, 236 aa, Homo sapiens
  Payload ID: 14868
  Gene Symbol: RBM24
  Gene Name: RNA binding motif protein 24
  Uniprot ID: Q9BX46
  ENSP ID: ENSP00000368341
MHTTQKDTTYTKIFVGGLPYHTTDASLRKYFEVFGEIEEAVVITDRQTGKSRGYGFVTMADRAAAERACKDPNPIIDGRKANVNLAYLGAKPRIMQPGFAFGVQQLHPALIQRPFGIPAHYVYPQAFVQPGVVIPHVQPTAAAASTTPYIDYTGAAYAQYSAAAAAAAAAAAYDQYPYAASPAAAGYVTAGGYGYAVQQPITAAAPGTAAAAAAAAAAAAAFGQYQPQQLQTDRMQ

SEQ ID NO: 75232 - protein, 178 aa, Homo sapiens
  Payload ID: 14868
  Gene Symbol: RBM24
  Gene Name: RNA binding motif protein 24
  Uniprot ID: Q9BX46
  ENSP ID: ENSP00000396898
MADRAAAERACKDPNPIIDGRKANVNLAYLGAKPRIMQPGFAFGVQQLHPALIQRPFGIPAHYVYPQAFVQPGVVIPHVQPTAAAASTTPYIDYTGAAYAQYSAAAAAAAAAAAYDQYPYAASPAAAGYVTAGGYGYAVQQPITAAAPGTAAAAAAAAAAAAAFGQYQPQQLQTDRMQ

SEQ ID NO: 75233 - protein, 201 aa, Homo sapiens
  Payload ID: 14868
  Gene Symbol: RBM24
  Gene Name: RNA binding motif protein 24
  ENSP ID: ENSP00000421971
  MOD_RES (1)..(1): Any amino acid
XSRTIAIVVGECFRGWERWADVTMADRAAAERACKDPNPIIDGRKANVNLAYLGAKPRIMQPGFAFGVQQLHPALIQRPFGIPAHYVYPQAFVQPGVVIPHVQPTAAAASTTPYIDYTGAAYAQYSAAAAAAAAAAAYDQYPYAASPAAAGYVTAGGYGYAVQQPITAAAPGTAAAAAAAAAAAAAFGQYQPQQLQTDRMQ

SEQ ID NO: 75234 - protein, 80 aa, Homo sapiens
  Payload ID: 14868
  Gene Symbol: RBM24
  Gene Name: RNA binding motif protein 24
  ENSP ID: ENSP00000426222
VITDRQTGKSRGYGFVTMADRAAAERACKDPNPIIDGRKANVNLAYLGAKPRIMQPGFAFGVQQLHPALIQRPFGDKQAG

SEQ ID NO: 75235 - protein, 843 aa, Homo sapiens
  Payload ID: 14869
  Gene Symbol: RBM25
  Gene Name: RNA binding motif protein 25
  Uniprot ID: P49756
  ENSP ID: ENSP00000261973
MSFPPHLNRPPMGIPALPPGIPPPQFPGFPPPVPPGTPMIPVPMSIMAPAPTVLVPTVSMVGKHLGARKDHPGLKAKENDENCGPTTTVFVGNISEKASDMLIRQLLAKCGLVLSWKRVQGASGKLQAFGFCEYKEPESTLRALRLLHDLQIGEKKLLVKVDAKTKAQLDEWKAKKKASNGNARPETVTNDDEEALDEETKRRDQMIKGAIEVLIREYSSELNAPSQESDSHPRKKKKEKKEDIFRRFPVAPLIPYPLITKEDINAIEMEEDKRDLISREISKFRDTHKKLEEEKGKKEKERQEIEKERRERERERERERERREREREREREREREKEKERERERERDRDRDRTKERDRDRDRERDRDRDRERSSDRNKDRSRSREKSRDREREREREREREREREREREREREREREREREREREKDKKRDREEDEEDAYERRKLERKLREKEAAYQERLKNWEIRERKKTREYEKEAEREEERRREMAKEAKRLKEFLEDYDDDRDDPKYYRGSALQKRLRDREKEMEADERDRKREKEELEEIRQRLLAEGHPDPDAELQRMEQEAERRRQPQIKQEPESEEEEEEKQEKEEKREEPMEEEEEPEQKPCLKPTLRPISSAPSVSSASGNATPNTPGDESPCGIIIPHENSPDQQQPEEHRPKIGLSLKLGASNSPGQPNSVKRKKLPVDSVFNKFEDEDSDDVPRKRKLVPLDYGEDDKNATKGTVNTEEKRKHIKSLIEKIPTAKPELFAYPLDWSIVDSILMERRIRPWINKKIIEYIGEEEATLVDFVCSKVMAHSSPQSILDDVAMVLDEEAEVFIVKMWRLLIYETEAKKIGLVK

SEQ ID NO: 75236 - protein, 843 aa, Homo sapiens; identical to SEQ ID NO: 75235
  Payload ID: 14869
  Gene Symbol: RBM25
  Gene Name: RNA binding motif protein 25
  Uniprot ID: P49756
  ENSP ID: ENSP00000431150

SEQ ID NO: 75237 - protein, 127 aa, Homo sapiens
  Payload ID: 14869
  Gene Symbol: RBM25
  Gene Name: RNA binding motif protein 25
  ENSP ID: ENSP00000434004
MSFPPHLNRPPMGIPALPPGIPPPQFPGFPPPVPPGTPMIPVPMSIMAPAPTVLVPTVSMVGKHLGARKDHPGLKAKENDENCGPTTTVFVGNISEKASDMLIRQLLAKCGLVLSWKRVQGASGKLQ

SEQ ID NO: 75238 - protein, 243 aa, Homo sapiens
  Payload ID: 14869
  Gene Symbol: RBM25
  Gene Name: RNA binding motif protein 25
  ENSP ID: ENSP00000434333
MSFPPHLNRPPMGIPALPPGIPPPQFPGFPPPVPPGTPMIPVPMSIMAPAPTVLVPTVSMVGKHLGARKDHPGLKAKENDENCGPTTTVFVGNISEKASDMLIRQLLAKCGLVLSWKRVQGASGKLQAFGFCEYKEPESTLRALRLLHDLQIGEKKLLVKVDAKTKAQLDEWKAKKKASNGNARPETVTNDDEEALDEETKRRDQMIKGAIEVLIREYSSELNAPSQESDSHPRKKKKEKKED

SEQ ID NO: 75239 - protein, 164 aa, Homo sapiens
  Payload ID: 14869
  Gene Symbol: RBM25
  Gene Name: RNA binding motif protein 25
  Uniprot ID: P49756
  ENSP ID: ENSP00000434444
MSFPPHLNRPPMGIPALPPGIPPPQFPGFPPPVPPGTPMIPVPMSIMAPAPTVLVPTVSMVGKHLGARKDHPGLKAKENDENCGPTTTVFVGNISEKASDMLIRQLLAPSDSVSTRSQNLPSVHSDYYMTCKLERKSYSLKLMQRQRHSWMNGKQRRKLLMGLG

SEQ ID NO: 75240 - protein, 73 aa, Homo sapiens
  Payload ID: 14869
  Gene Symbol: RBM25
  Gene Name: RNA binding motif protein 25
  ENSP ID: ENSP00000434950
  MOD_RES (1)..(1): Any amino acid
XNAPSQESDSHPRKKKKEKKEDIFRRFPVAPLIPYPLITKEDINAIEMEEDKRDLISREISKFRDTHKRSYGD

SEQ ID NO: 75241 - protein, 294 aa, Homo sapiens
  Payload ID: 14869
  Gene Symbol: RBM25
  Gene Name: RNA binding motif protein 25
  Uniprot ID: P49756
  ENSP ID: ENSP00000436225
MSFPPHLNRPPMGIPALPPGIPPPQFPGFPPPVPPGTPMIPVPMSIMAPAPTVLVPTVSMVGKHLGARKDHPGLKAKENDENCGPTTTVFVGNISEKASDMLIRQLLAKCGLVLSWKRVQGASGKLQAFGFCEYKEPESTLRALRLLHDLQIGEKKLLVKVDAKTKAQLDEWKAKKKASNGNARPETVTNDDEEALDEETKRRDQMIKGAIEVLIREYSSELNAPSQESDSHPRKKKKEKKEDIFRRFPVAPLIPYPLITKEDINAIEMEEDKRDLISREISKFRDTHKRSYGD

SEQ ID NO: 75242 - protein, 300 aa, Homo sapiens
  Payload ID: 14869
  Gene Symbol: RBM25
  Gene Name: RNA binding motif protein 25
  Uniprot ID: P49756
  ENSP ID: ENSP00000436868
MSFPPHLNRPPMGIPALPPGIPPPQFPGFPPPVPPGTPMIPVPMSIMAPAPTVLVPTVSMVGKHLGARKDHPGLKAKENDENCGPTTTVFVGNISEKASDMLIRQLLAKCGLVLSWKRVQGASGKLQAFGFCEYKEPESTLRALRLLHDLQIGEKKLLVKVDAKTKAQLDEWKAKKKASNGNARPETVTNDDEEALDEETKRRDQMIKGAIEVLIREYSSELNAPSQESDSHPRKKKKEKKEDIFRRFPVAPLIPYPLITKEDINAIEMEEDKRDLISREISKFRDTHKVVFLSFHLIPI

SEQ ID NO: 75243 - protein, 980 aa, Homo sapiens
  Payload ID: 14870
  Gene Symbol: RBM26
  Gene Name: RNA binding motif protein 26
  Uniprot ID: Q5T8P6
  ENSP ID: ENSP00000267229
MVSKMIIENFEALKSWLSKTLEPICDADPSALAKYVLALVKKDKSEKELKALCIDQLDVFLQKETQIFVEKLFDAVNTKSYLPPPEQPSSGSLKVEFFPHQEKDIKKEEITKEEEREKKFSRRLNHSPPQSSSRYRENRSRDERKKDDRSRKRDYDRNPPRRDSYRDRYNRRRGRSRSYSRSRSRSWSKERLRERDRDRSRTRSRSRTRSRERDLVKPKYDLDRTDPLENNYTPVSSVPSISSGHYPVPTLSSTITVIAPTHHGNNTTESWSEFHEDQVDHNSYVRPPMPKKRCRDYDEKGFCMRGDMCPFDHGSDPVVVEDVNLPGMLPFPAQPPVVEGPPPPGLPPPPPILTPPPVNLRPPVPPPGPLPPSLPPVTGPPPPLPPLQPSGMDAPPNSATSSVPTVVTTGIHHQPPPAPPSLFTADTYDTDGYNPEAPSITNTSRPMYRHRVHAQRPNLIGLTSGDMDLPPREKPPNKSSMRIVVDSESRKRTIGSGEPGVPTKKTWFDKPNFNRTNSPGFQKKVQFGNENTKLELRKVPPELNNISKLNEHFSRFGTLVNLQVAYNGDPEGALIQFATYEEAKKAISSTEAVLNNRFIKVYWHREGSTQQLQTTSPKPLVQQPILPVVKQSVKERLGPVPSSTIEPAEAQSASSDLPQVLSTSTGLTKTVYNPAALKAAQKTLLVSTSAVDNNEAQKKKQEALKLQQDVRKRKQEILEKHIETQKMLISKLEKNKTMKSEDKAEIMKTLEVLTKNITKLKDEVKAASPGRCLPKSIKTKTQMQKELLDTELDLYKKMQAGEEVTELRRKYTELQLEAAKRGILSSGRGRGIHSRGRGAVHGRGRGRGRGRGVPGHAVVDHRPRALEISAFTESDREDLLPHFAQYGEIEDCQIDDSSLHAVITFKTRAEAEAAAVHGARFKGQDLKLAWNKPVTNISAVETEEVEPDEEEFQEESLVDDSLLQDDDEEEEDNESRSWRR

SEQ ID NO: 75244 - protein, 1007 aa, Homo sapiens
  Payload ID: 14870
  Gene Symbol: RBM26
  Gene Name: RNA binding motif protein 26
  Uniprot ID: Q5T8P6
  ENSP ID: ENSP00000387531
MVSKMIIENFEALKSWLSKTLEPICDADPSALAKYVLALVKKDKSEKELKALCIDQLDVFLQKETQIFVEKLFDAVNTKSYLPPPEQPSSGSLKVEFFPHQEKDIKKEEITKEEEREKKFSRRLNHSPPQSSSRYRENRSRDERKKDDRSRKRDYDRNPPRRDSYRDRYNRRRGRSRSYSRSRSRSWSKERLRERDRDRSRTRSRSRTRSRERDLVKPKYDLDRTDPLENNYTPVSSVPSISSGHYPVPTLSSTITVIAPTHHGNNTTESWSEFHEDQVDHNSYVRPPMPKKRCRDYDEKGFCMRGDMCPFDHGSDPVVVEDVNLPGMLPFPAQPPVVEGPPPPGLPPPPPILTPPPVNLRPPVPPPGPLPPSLPPVTGPPPPLPPLQPSGMDAPPNSATSSVPTVVTTGIHHQPPPAPPSLFTADTYDTDGYNPEAPSITNTSRPMYRHRVHAQRPNLIGLTSGDMDLPPREKPPNKSSMRIVVDSESRKRTIGSGEPGVPTKKTWFDKPNFNRTNSPGFQKKVQFGNENTKLELRKVPPELNNISKLNEHFSRFGTLVNLQVAYNGDPEGALIQFATYEEAKKAISSTEAVLNNRFIKVYWHREGSTQQLQTTSPKVMQPLVQQPILPVVKQSVKERLGPVPSSTIEPAEAQSASSDLPQNVTKLSVKDRLGFVSKPSVSATEKVLSTSTGLTKTVYNPAALKAAQKTLLVSTSAVDNNEAQKKKQEALKLQQDVRKRKQEILEKHIETQKMLISKLEKNKTMKSEDKAEIMKTLEVLTKNITKLKDEVKAASPGRCLPKSIKTKTQMQKELLDTELDLYKKMQAGEEVTELRRKYTELQLEAAKRGILSSGRGRGIHSRGRGAVHGRGRGRGRGRGVPGHAVVDHRPRALEISAFTESDREDLLPHFAQYGEIEDCQIDDSSLHAVITFKTRAEAEAAAVHGARFKGQDLKLAWNKPVTNISAVETEEVEPDEEEFQEESLVDDSLLQDDDEEEEDNESRSWRR

SEQ ID NO: 75245 - protein, 983 aa, Homo sapiens
  Payload ID: 14870
  Gene Symbol: RBM26
  Gene Name: RNA binding motif protein 26
  Uniprot ID: Q5T8P6
  ENSP ID: ENSP00000390222
MVSKMIIENFEALKSWLSKTLEPICDADPSALAKYVLALVKKDKSEKELKALCIDQLDVFLQKETQIFVEKLFDAVNTKSYLPPPEQPSSGSLKVEFFPHQEKDIKKEEITKEEEREKKFSRRLNHSPPQSSSRYRENRSRDERKKDDRSRKRDYDRNPPRRDSYRDRYNRRRGRSRSYSRSRSRSWSKERLRERDRDRSRTRSRSRTRSRERDLVKPKYDLDRTDPLENNYTPVSSVPSISSGHYPVPTLSSTITVIAPTHHGNNTTESWSEFHEDQVDHNSYVRPPMPKKRCRDYDEKGFCMRGDMCPFDHGSDPVVVEDVNLPGMLPFPAQPPVVEGPPPPGLPPPPPILTPPPVNLRPPVPPPGPLPPSLPPVTGPPPPLPPLQPSGMDAPPNSATSSVPTVVTTGIHHQPPPAPPSLFTADTYDTDGYNPEAPSITNTSRPMYRHRVHAQRPNLIGLTSGDMDLPPREKPPNKSSMRIVVDSESRKRTIGSGEPGVPTKKTWFDKPNFNRTNSPGFQKKVQFGNENTKLELRKVPPELNNISKLNEHFSRFGTLVNLQVAYNGDPEGALIQFATYEEAKKAISSTEAVLNNRFIKVYWHREGSTQQLQTTSPKVMQPLVQQPILPVVKQSVKERLGPVPSSTIEPAEAQSASSDLPQVLSTSTGLTKTVYNPAALKAAQKTLLVSTSAVDNNEAQKKKQEALKLQQDVRKRKQEILEKHIETQKMLISKLEKNKTMKSEDKAEIMKTLEVLTKNITKLKDEVKAASPGRCLPKSIKTKTQMQKELLDTELDLYKKMQAGEEVTELRRKYTELQLEAAKRGILSSGRGRGIHSRGRGAVHGRGRGRGRGRGVPGHAVVDHRPRALEISAFTESDREDLLPHFAQYGEIEDCQIDDSSLHAVITFKTRAEAEAAAVHGARFKGQDLKLAWNKPVTNISAVETEEVEPDEEEFQEESLVDDSLLQDDDEEEEDNESRSWRR

SEQ ID NO: 75246 - protein, 171 aa, Homo sapiens
  Payload ID: 14870
  Gene Symbol: RBM26
  Gene Name: RNA binding motif protein 26
  ENSP ID: ENSP00000401474
LDTELDLYKKMQAGEEVTELRRKYTELQLEAAKRGILSSGRGRGIHSRGRGAVHGRGRGRGRGRGVPGHAVVDHRPRALEISAFTESDREDLLPHFAQYGEIEDCQIDDSSLHAVITFKTRAEAEAAAVHGARFKGQDLKLAWNKPVTNISAVETEEVEPDEEEQREIIIA

SEQ ID NO: 75247 - protein, 1009 aa, Homo sapiens
  Payload ID: 14870
  Gene Symbol: RBM26
  Gene Name: RNA binding motif protein 26
  ENSP ID: ENSP00000483408
MVSKMIIENFEALKSWLSKTLEPICDADPSALAKYVLALVKKDKSEKELKALCIDQLDVFLQKETQIFVEKLFDAVNTKSYLPPPEQPSSGSLKVEFFPHQEKDIKKEEITKEEEREKKFSRRLNHSPPQSSSRYRENRSRDERKKDDRSRKRDYDRNPPRRDSYRDRYNRRRGRSRSYSRSRSRSWSKERLRERDRDRSRTRSRSRTRSRERDLVKPKYDLDRTDPLENNYTPVSSVPSISSGHYPVPTLSSTITVIAPTHHGNNTTESWSEFHEDQVDHNSYVRPPMPKKRCRDYDEKGFCMRGDMCPFDHGSDPVVVEDVNLPGMLPFPAQPPVVEGPPPPGLPPPPPILTPPPVNLRPPVPPPGPLPPSLPPVTGPPPPLPPLQPSGMDAPPNSATSSVPTVVTTGIHHQPPPAPPSLFTAVFVLPDTYDTDGYNPEAPSITNTSRPMYRHRVHAQRPNLIGLTSGDMDLPPREKPPNKSSMRIVVDSESRKRTIGSGEPGVPTKKTWFDKPNFNRTNSPGFQKKVQFGNENTKLELRKVPPELNNISKLNEHFSRFGTLVNLQVAYNGDPEGALIQFATYEEAKKAISSTEAVLNNRFIKVYWHREGSTQQLQTTSPKPLVQQPILPVVKQSVKERLGPVPSSTIEPAEAQSASSDLPQNVTKLSVKDRLGFVSKPSVSATEKVLSTSTGLTKTVYNPAALKAAQKTLLVSTSAVDNNEAQKKKQEALKLQQDVRKRKQEILEKHIETQKMLISKLEKNKTMKSEDKAEIMKTLEVLTKNITKLKDEVKAASPGRCLPKSIKTKTQMQKELLDTELDLYKKMQAGEEVTELRRKYTELQLEAAKRGILSSGRGRGIHSRGRGAVHGRGRGRGRGRGVPGHAVVDHRPRALEISAFTESDREDLLPHFAQYGEIEDCQIDDSSLHAVITFKTRAEAEAAAVHGARFKGQDLKLAWNKPVTNISAVETEEVEPDEEEFQEESLVDDSLLQDDDEEEEDNESRSWRR

SEQ ID NO: 75248 - protein, 1060 aa, Homo sapiens
  Payload ID: 14871
  Gene Symbol: RBM27
  Gene Name: RNA binding motif protein 27
  Uniprot ID: Q9P2N5
  ENSP ID: ENSP00000265271
MLIEDVDALKSWLAKLLEPICDADPSALANYVVALVKKDKPEKELKAFCADQLDVFLQKETSGFVDKLFESLYTKNYLPLLEPVKPEPKPLVQEKEEIKEEVFQEPAEEERDGRKKKYPSPQKTRSESSERRTREKKREDGKWRDYDRYYERNELYREKYDWRRGRSKSRSKSRGLSRSRSRSRGRSKDRDPNRNVEHRERSKFKSERNDLESSYVPVSAPPPNSSEQYSSGAQSIPSTVTVIAPAHHSENTTESWSNYYNNHSSSNSFGRNLPPKRRCRDYDERGFCVLGDLCQFDHGNDPLVVDEVALPSMIPFPPPPPGLPPPPPPGMLMPPMPGPGPGPGPGPGPGPGPGPGPGHSMRLPVPQGHGQPPPSVVLPIPRPPITQSSLINSRDQPGTSAVPNLASVGTRLPPPLPQNLLYTVSERQPMYSREHGAAASERLQLGTPPPLLAARLVPPRNLMGSSIGYHTSVSSPTPLVPDTYEPDGYNPEAPSITSSGRSQYRQFFSRTQTQRPNLIGLTSGDMDVNPRAANIVIQTEPPVPVSINSNITRVVLEPDSRKRAMSGLEGPLTKKPWLGKQGNNNQNKPGFLRKNQYTNTKLEVKKIPQELNNITKLNEHFSKFGTIVNIQVAFKGDPEAALIQYLTNEEARKAISSTEAVLNNRFIRVLWHRENNEQPTLQSSAQLLLQQQQTLSHLSQQHHHLPQHLHQQQVLVAQSAPSTVHGGIQKMMSKPQTSGAYVLNKVPVKHRLGHAGGNQSDASHLLNQSGGAGEDCQIFSTPGHPKMIYSSSNLKTPSKLCSGSKSHDVQEVLKKKQEAMKLQQDMRKKRQEVLEKQIECQKMLISKLEKNKNMKPEERANIMKTLKELGEKISQLKDELKTSSAVSTPSKVKTKTEAQKELLDTELDLHKRLSSGEDTTELRKKLSQLQVEAARLGILPVGRGKTMSSQGRGRGRGRGGRGRGSLNHMVVDHRPKALTVGGFIEEEKEDLLQHFSTANQGPKFKDRRLQISWHKPKVPSISTETEEEEVKEEETETSDLFLPDDDDEDEDEYESRSWRR

SEQ ID NO: 75249 - protein, 759 aa, Homo sapiens
  Payload ID: 14872
  Gene Symbol: RBM28
  Gene Name: RNA binding motif protein 28
  Uniprot ID: Q9NW13
  ENSP ID: ENSP00000223073
MAGLTLFVGRLPPSARSEQLEELFSQVGPVKQCFVVTEKGSKACRGFGYVTFSMLEDVQRALKEITTFEGCKINVTVAKKKLRNKTKEKGKNENSECPKKEPKAKKAKVADKKARLIIRNLSFKCSEDDLKTVFAQFGAVLEVNIPRKPDGKMRGFGFVQFKNLLEAGKALKGMNMKEIKGRTVAVDWAVAKDKYKDTQSVSAIGEEKSHESKHQESVKKKGREEEDMEEEENDDDDDDDDEEDGVFDDEDEEEENIESKVTKPVQIQKRAVKRPAPAKSSDHSEEDSDLEESDSIDDGEELAQSDTSTEEQEDKAVQVSNKKKRKLPSDVNEGKTVFIRNLSFDSEEEELGELLQQFGELKYVRIVLHPDTEHSKGCAFAQFMTQEAAQKCLLAASPENEAGGLKLDGRQLKVDLAVTRDEAAKLQTTKVKKPTGTRNLYLAREGLIRAGTKAAEGVSAADMAKRERFELLKHQKLKDQNIFVSRTRLCLHNLPKAVDDKQLRKLLLSATSGEKGVRIKECRVMRDLKGVHGNMKGQSLGYAFAEFQEHEHALKALRLINNNPEIFGPLKRPIVEFSLEDRRKLKMKELRIQRSLQKMRSKPATGEPQKGQPEPAKDQQQKAAQHHTEEQSKVPPEQKRKAGSTSWTGFQTKAEVEQVELPDGKKRRKVLALPSHRGPKIRLRDKGKVKPVHPKKPKPQINQWKQEKQQLSSEQVSRKKAKGNKTETRFNQLVEQYKQKLLGPSKGAPLAKRSKWFDS

SEQ ID NO: 75250 - protein, 618 aa, Homo sapiens
  Payload ID: 14872
  Gene Symbol: RBM28
  Gene Name: RNA binding motif protein 28
  Uniprot ID: Q9NW13
  ENSP ID: ENSP00000390517
MAGLTLFVGRLPPSARSEQLEELFSQVGPVKQCFVVTEKGRTVAVDWAVAKDKYKDTQSVSAIGEEKSHESKHQESVKKKGREEEDMEEEENDDDDDDDDEEDGVFDDEDEEEENIESKVTKPVQIQKRAVKRPAPAKSSDHSEEDSDLEESDSIDDGEELAQSDTSTEEQEDKAVQVSNKKKRKLPSDVNEGKTVFIRNLSFDSEEEELGELLQQFGELKYVRIVLHPDTEHSKGCAFAQFMTQEAAQKCLLAASPENEAGGLKLDGRQLKVDLAVTRDEAAKLQTTKVKKPTGTRNLYLAREGLIRAGTKAAEGVSAADMAKRERFELLKHQKLKDQNIFVSRTRLCLHNLPKAVDDKQLRKLLLSATSGEKGVRIKECRVMRDLKGVHGNMKGQSLGYAFAEFQEHEHALKALRLINNNPEIFGPLKRPIVEFSLEDRRKLKMKELRIQRSLQKMRSKPATGEPQKGQPEPAKDQQQKAAQHHTEEQSKVPPEQKRKAGSTSWTGFQTKAEVEQVELPDGKKRRKVLALPSHRGPKIRLRDKGKVKPVHPKKPKPQINQWKQEKQQLSSEQVSRKKAKGNKTETRFNQLVEQYKQKLLGPSKGAPLAKRSKWFDS

SEQ ID NO: 75251 - protein, 283 aa, Homo sapiens
  Payload ID: 14872
  Gene Symbol: RBM28
  Gene Name: RNA binding motif protein 28
  ENSP ID: ENSP00000418071
MAGLTLFVGRLPPSARSEQLEELFSQVGPVKQCFVVTEKGSKACRGFGYVTFSMLEDVQRALKEITTFEGCKINVTVAKKKLRNKTKEKGKNENSECPKKEPKAKKAKVADKKARLIIRNLSFKCSEDDLKTVFAQFGAVLEVNIPRKPGRTVAVDWAVAKDKYKDTQSVSAIGEEKSHESKHQESVKKKGREEEDMEEEENDDDDDDDDEEDGVFDDEDEEEENIESKVTKPVQIQKRAVKRPAPAKSSDHSEEDSDLEESDSIDDGEELAQSDTSTEEQED

SEQ ID NO: 75252 - protein, 186 aa, Homo sapiens
  Payload ID: 14872
  Gene Symbol: RBM28
  Gene Name: RNA binding motif protein 28
  ENSP ID: ENSP00000419840
  MOD_RES (1)..(1): Any amino acid
XKDTQSVSAIGEEKSHESKHQESVKKKGREEEDMEEEENDDDDDDDDEEDGVFDDEDEEEENIESKVTKPVQIQKRAVKRPAPAKSSDHSEEDSDLEESDSIDDGEELAQSDTSTEEQEDKAVQVSNKKKRKLPSDVNEGKTVFIRNLSFDSEEEELGELLQQFGELKYVRIVLHPDTEHSKGWWA

SEQ ID NO: 75253 - protein, 204 aa, Homo sapiens
  Payload ID: 14872
  Gene Symbol: RBM28
  Gene Name: RNA binding motif protein 28
  ENSP ID: ENSP00000420503
MAGLTLFVGRLPPSARSEQLEELFSQVGPVKQCFVVTEKVYVDQCPVSKGLYPEGDSNAVEREAEHMNYVSFSGSKACRGFGYVTFSMLEDVQRALKEITTFEGCKINVTVAKKKLRNKTKEKGKNENSECPKKEPKAKKAKVADKKARLIIRNLSFKCSEDDLKTVFAQFGAVLEVNIPRKPDGKMRGFGFVQFKNLLEAGKA

SEQ ID NO: 75254 - protein, 268 aa, Homo sapiens
  Payload ID: 14873
  Gene Symbol: RBM33
  Gene Name: RNA binding motif protein 33
  Uniprot ID: Q96EV2
  ENSP ID: ENSP00000287912
MAAALGASGGAGAGDDDFDQFDKPGAERSWRRRAADEDWDSELEDDLLGEDLLSGKKNQSDLSDEELNDDLLQSDNEDEENFSSQGVTISLNATSGMVTSFELSDNTNDQSGEQESEYEQEQGEDELVYHKSDGSELYTQEYPEEGQYEGHEAELTEDQIEYVEEPEEEQLYTDEVLDIEINEPLDEFTGGMETLELQKDIKEESDEEEEDDEESGRLRFKTERKEGTIIRLSDVTRERRNIPETLGNFFACLPSSFTLISTSSIVLL

SEQ ID NO: 75255 - protein, 284 aa, Homo sapiens
  Payload ID: 14873
  Gene Symbol: RBM33
  Gene Name: RNA binding motif protein 33
  ENSP ID: ENSP00000303878
DLLGEDLLSGKKNQSDLSDEELNDDLLQSDNEDEENFSSQGVTISLNATSGMVTSFELSDNTNDQSGEQESEYEQEQGEDELVYHKSDGSELYTQEYPEEGQYEGHEAELTEDQIEYVEEPEEEQLYTDEVLDIEINEPLDEFTGGMETLELQKDIKEESDEEEEDDEESGRLRFKTERKEGTIIRLSDVTRERRNIPETLELSAEAKAALLEFEERERQHKQGRYSSRRGGRRGGPLMCRGVGDQRRESTERGRMKDHRPALLPTQPPVVILPEEELMSDLMP

SEQ ID NO: 75256 - protein, 106 aa, Homo sapiens
  Payload ID: 14873
  Gene Symbol: RBM33
  Gene Name: RNA binding motif protein 33
  ENSP ID: ENSP00000341583
MHGRGRGVAGPMGRGRLMPNKQNLRVVECKPQPCVVSVEGLSSSTTDAQLKSLLMSVGPIQSLQMLPQQRKAIAKFKEPAHALAFQQKFHRHMIDLSHINVALIVE

SEQ ID NO: 75257 - protein, 84 aa, Homo sapiens
  Payload ID: 14873
  Gene Symbol: RBM33
  Gene Name: RNA binding motif protein 33
  ENSP ID: ENSP00000376510
  MOD_RES (1)..(1): Any amino acid
XCKPQPCVVSVEGLSSSTTDAQLKSLLMSVGPIQSLQMLPQQRKAIAKFKEPAHALAFQQKFHRELPAGAEPPGAQVSPGRCPA

SEQ ID NO: 75258 - protein, 308 aa, Homo sapiens
  Payload ID: 14873
  Gene Symbol: RBM33
  Gene Name: RNA binding motif protein 33
  ENSP ID: ENSP00000376513
MAAALGASGGAGAGDDDFDQFDKPGAERSWRRRAADEDWDSELEDDLLGEDLLSGKKNQSDLSDEELNDDLLQSDNEDEENFSSQGVTISLNATSGMVTSFELSDNTNDQSGEQESEYEQEQGEDELVYHKSDGSELYTQEYPEEGQYEGHEAELTEDQIEYVEEPEEEQLYTDEVLDIEINEPLDEFTDEEYLQAYGGQQGLQEQEDCVAEDELDEITDAQVAPATEEGGMETLELQKDIKEESDEEEEDDEESGRLRFKTERKEGTIIRLSDVTRERRNIPETLGNFFACLPSSFTLISTSSIVLL

SEQ ID NO: 75259 - protein, 909 aa, Homo sapiens
  Payload ID: 14873
  Gene Symbol: RBM33
  Gene Name: RNA binding motif protein 33
  ENSP ID: ENSP00000376514
  MOD_RES (1)..(1): Any amino acid
XIRLSDVTRERRNIPETLELSAEAKAALLEFEERERQHKQGRYSSRRGGRRGGPLMCRGVGDQRRESTERGRMKDHRPALLPTQPPVVPQAPPPPPPPPQQQPIRSLFQPQPLQPLLPVQHPHHPSPPQGMHMPPQLETPRMMMTPPPVTPQQPKNIHINPHFKGTVVTPVQVPLLPVPSQPRPAVGPQRFPGPPEFPQHTPGPVPNSFSQPPRLPLQDQWRAPPPPQDRDPFFLGVSGEPRFPSHLFLEQRSPPPPPPPPTLLNSSHPVPTQSPLPFTQPGPAFNQQGQQPVFPRERPVRPALQPPGPVGILHFSQPGSATTRPFIPPRQPFLPGPGQPFLPTHTQPNLQGPLHPPLPPPHQPQPQQPQQQPPPQHQPPHQPPHQPPPQHQPPPQHPPQHPPQHQHHHHHHHLSVPPPPLMPMSQPQFRPHVQTAQPQASSSRMQCPQRQGLRHNTTSQNVSKRPMQQMQPTAPRNSNLRELPIAPSHVIEMSSSRCSATPSAQVKPIVSASPPSRAVAGSRSSQGKTEVKVKPASPVAQPKEEAKTETEFPDEDEETRLYRLKIEEQKRLREEILKQKELRRQQQAGARKKELLERLAQQQQQLYAPPPPAEQEEQALSPSPTNGNPLLPFPGAQVRQNVKNRLLVKNQDVSISNVQPKTSNFVPSSANMQYQGQQMKALKHLRQTRTVPQSQTQPLHKVLPIKPADVEEPAVPQTPRVASIQGRPQDTKPGVKRTVTHRTNSGGGDGPHISSKVRVIKLSGGQGGESDGFFHPEGQPQRLPQPPEVGPQPARKVTLTRGGLQQPPHLPAGPHAHSPVPPGIKSIQGIHPAKKAIMHGRGRGVAGPMGRGRLMPNKQNLRVVECKPQPCVVSVEGLSSSTTDAQLKSLLMSVGPIQVAAWGWHLCHG

SEQ ID NO: 75260 - protein, 1170 aa, Homo sapiens
  Payload ID: 14873
  Gene Symbol: RBM33
  Gene Name: RNA binding motif protein 33
  Uniprot ID: Q96EV2
  ENSP ID: ENSP00000384160
MAAALGASGGAGAGDDDFDQFDKPGAERSWRRRAADEDWDSELEDDLLGEDLLSGKKNQSDLSDEELNDDLLQSDNEDEENFSSQGVTISLNATSGMVTSFELSDNTNDQSGEQESEYEQEQGEDELVYHKSDGSELYTQEYPEEGQYEGHEAELTEDQIEYVEEPEEEQLYTDEVLDIEINEPLDEFTGGMETLELQKDIKEESDEEEEDDEESGRLRFKTERKEGTIIRLSDVTRERRNIPETLELSAEAKAALLEFEERERQHKQGRYSSRRGGRRGGPLMCRGVGDQRRESTERGRMKDHRPALLPTQPPVVPQAPPPPPPPPQQQPIRSLFQPQPLQPLLPVQHPHHPSPPQGMHMPPQLETPRMMMTPPPVTPQQPKNIHINPHFKGTVVTPVQVPLLPVPSQPRPAVGPQRFPGPPEFPQHTPGPVPNSFSQPPRLPLQDQWRAPPPPQDRDPFFLGVSGEPRFPSHLFLEQRSPPPPPPPPTLLNSSHPVPTQSPLPFTQPGPAFNQQGQQPVFPRERPVRPALQPPGPVGILHFSQPGSATTRPFIPPRQPFLPGPGQPFLPTHTQPNLQGPLHPPLPPPHQPQPQQPQQQPPPQHQPPHQPPHQPPPQHQPPPQHPPQHPPQHQHHHHHHHLSVPPPPLMPMSQPQFRPHVQTAQPQASSSRMQCPQRQGLRHNTTSQNVSKRPMQQMQPTAPRNSNLRELPIAPSHVIEMSSSRCSATPSAQVKPIVSASPPSRAVAGSRSSQGKTEVKVKPASPVAQPKEEAKTETEFPDEDEETRLYRLKIEEQKRLREEILKQKELRRQQQAGARKKELLERLAQQQQQLYAPPPPAEQEEQALSPSPTNGNPLLPFPGAQVRQNVKNRLLVKNQDVSISNVQPKTSNFVPSSANMQYQGQQMKALKHLRQTRTVPQSQTQPLHKVLPIKPADVEEPAVPQTPRVASIQGRPQDTKPGVKRTVTHRTNSGGGDGPHISSKVRVIKLSGGGGESDGFFHPEGQPQRLPQPPEVGPQPARKVTLTRGGLQQPPHLPAGPHAHSPVPPGIKSIQGIHPAKKAIMHGRGRGVAGPMGRGRLMPNKQNLRVVECKPQPCVVSVEGLSSSTTDAQLKSLLMSVGPIQSLQMLPQQRKAIAKFKEPAHALAFQQKFHRHMIDLSHINVALIVE

SEQ ID NO: 75261 - protein, 342 aa, Homo sapiens
  Payload ID: 14873
  Gene Symbol: RBM33
  Gene Name: RNA binding motif protein 33
  ENSP ID: ENSP00000394987
QSGEQESEYEQEQGEDELVYHKSDGSELYTQEYPEEGQYEGHEAELTEDQIEYVEEPEEEQLYTDEVLDIEINEPLDEFTGGMETLELQKDIKEESDEEEEDDEESGRLRFKTERKEGTIIRLSDVTRERRNIPETLELSAEAKAALLEFEERERQHKQGRYSSRRGGRRGGPLMCRGVGDQRRESTERGRMKDHRPALLPTQPPVVTHSPRLIPPQPQAPPPPPPPPQQQPIRSLFQPQPLQPLLPVQHPHHPSPPQGMHMPPQLETPRMMMTPPPVTPQQPKNIHINPHFKGTVVTPVQVPLLPVPSQPRPAVGPQRFPGPPEFPQHTPGPVPNSFSQPP

SEQ ID NO: 75262 - protein, 28 aa, Homo sapiens
  Payload ID: 14873
  Gene Symbol: RBM33
  Gene Name: RNA binding motif protein 33
  ENSP ID: ENSP00000405793
MHGRGRGVAGPMGRGRLMPNKQNLRVVE

SEQ ID NO: 75263 - protein, 430 aa, Homo sapiens
  Payload ID: 14874
  Gene Symbol: RBM34
  Gene Name: RNA binding motif protein 34
  Uniprot ID: P42696
  ENSP ID: ENSP00000386226
MALEGMSKRKRKRSVQEGENPDDGVRGSPPEDYRLGQVASSLFRGEHHSRGGTGRLASLFSSLEPQIQPVYVPVPKQTIKKTKRNEEEESTSQIERPLSQEPAKKVKAKKKHTNAEKKLADRESALASADLEEEIHQKQGQKRKNSQPGVKVADRKILDDTEDTVVSQRKKIQINQEEERLKNERTVFVGNLPVTCNKKKLKSFFKEYGQIESVRFRSLIPAEGTLSKKLAAIKRKIHPDQKNINAYVVFKEESAATQALKRNGAQIADGFRIRVDLASETSSRDKRSVFVGNLPYKVEESAIEKHFLDCGSIMAVRIVRDKMTGIGKGFGYVLFENTDSVHLALKLNNSELMGRKLRVMRSVNKEKFKQQNSNPRLKNVSKPKQGLNFTSKTAEGHPKSLFIGEKAVLLKTKKKGQKKSGRPKKQRKQK

SEQ ID NO: 75264 - protein, 408 aa, Homo sapiens
  Payload ID: 14874
  Gene Symbol: RBM34
  Gene Name: RNA binding motif protein 34
  ENSP ID: ENSP00000400000
LEGMSKRKRKRSVQEGENPDDGVRGSPPEDYRLGQVASSLFRGEHHSRGGTGRLASLFSSLEPQIQPVYVPVPKQTIKKTKRNEEEESTSQIERPLSQEPAKKVKAKKKHTNAEKKLADRESALASADLEEEIHQKQGQKRKNSQPGVKVADRKILDDTEDTVVSQRKKIQINQEEERLKNERTVFVGNLPVTCNKKIPAEGTLSKKLAAIKRKIHPDQKNINAYVVFKEESAATQALKRNGAQIADGFRIRVDLASETSSRDKRSVFVGNLPYKVEESAIEKHFLDCGSIMAVRIVRDKMTGIGKGFGYVLFENTDSVHLALKLNNSELMGRKLRVMRSVNKEKFKQQNSNPRLKNVSKPKQGLNFTSKTAEGHPKSLFIGEKAVLLKTKKKGQKKSGRPKKQRKQK

SEQ ID NO: 75265 - protein, 211 aa, Homo sapiens
  Payload ID: 14874
  Gene Symbol: RBM34
  Gene Name: RNA binding motif protein 34
  ENSP ID: ENSP00000413409
MALEGMSKRKRKRSVQEGENPDDGVRGSPPEDYRLGQVASSLFRGEHHSRGGTGRLASLFSSLEPQIQPVYVPVPKQTIKKTKRNEEEESTSQIERPLSQEPAKKVKAKKKHTNAEKKLADSSPFRLMLRPCLSISSNTLYCIYRFTIYFWESALASADLEEEIHQKQGQKRKNSQPGVKVADRKILDDTEDTVVSQRKKIQINQEEERLK

SEQ ID NO: 75266 - protein, 86 aa, Homo sapiens
  Payload ID: 14874
  Gene Symbol: RBM34
  Gene Name: RNA binding motif protein 34
  ENSP ID: ENSP00000420236
  MOD_RES (1)..(1): Any amino acid
XVRMALEGMSKRKRKRSVQEGENPDDGVRGSPPEDYRLGQVASSLFRGEHHSRGGTGRLASLFSSLEPQIQPVYVPVPKGKRSSEC

SEQ ID NO: 75267 - protein, 77 aa, Homo sapiens
  Payload ID: 14875
  Gene Symbol: RBM38
  Gene Name: RNA binding motif protein 38
  ENSP ID: ENSP00000343718
MLLQPAPCAPSAGFPRPLAAPGAMHGSQKDTTFTKIFVGGLPYHTTDASLRKYFEGFGDIEEAVVITDRQTGDYFCP

SEQ ID NO: 75268 - protein, 123 aa, Homo sapiens
  Payload ID: 14875
  Gene Symbol: RBM38
  Gene Name: RNA binding motif protein 38
  ENSP ID: ENSP00000345248
MHGSQKDTTFTKIFVGGLPYHTTDASLRKYFEGFGDIEEAVVITDRQTGKSRGYGFVTMADRAAAERACKDPNPIIDGRKANVNLAYLGAKPRSLQTGFAIGVQQLHPTLIQRTYGGDFMFRK

SEQ ID NO: 75269 - protein, 239 aa, Homo sapiens
  Payload ID: 14875
  Gene Symbol: RBM38
  Gene Name: RNA binding motif protein 38
  Uniprot ID: Q9H0Z9
  ENSP ID: ENSP00000348538
MLLQPAPCAPSAGFPRPLAAPGAMHGSQKDTTFTKIFVGGLPYHTTDASLRKYFEGFGDIEEAVVITDRQTGKSRGYGFVTMADRAAAERACKDPNPIIDGRKANVNLAYLGAKPRSLQTGFAIGVQQLHPTLIQRTYGLTPHYIYPPAIVQPSVVIPAAPVPSLSSPYIEYTPASPAYAQYPPATYDQYPYAASPATAASFVGYSYPAAVPQALSAAAPAGTTFVQYQAPQLQPDRMQ

SEQ ID NO: 75270 - protein, 158 aa, Homo sapiens
  Payload ID: 14875
  Gene Symbol: RBM38
  Gene Name: RNA binding motif protein 38
  ENSP ID: ENSP00000360263
MADRAAAERACKDPNPIIDGRKANVNLAYLGAKPRSLQTGFAIGVQQLHPTLIQRTYGLTPHYIYPPAIVQPSVVIPAAPVPSLSSPYIEYTPASPAYAQYPPATYDQYPYAASPATAASFVGYSYPAAVPQALSAAAPAGTTFVQYQAPQLQPDRMQ

SEQ ID NO: 75271 - protein, 121 aa, Homo sapiens
  Payload ID: 14875
  Gene Symbol: RBM38
  Gene Name: RNA binding motif protein 38
  Uniprot ID: Q9H0Z9
  ENSP ID: ENSP00000407848
MLLQPAPCAPSAGFPRPLAAPGAMHGSQKDTTFTKIFVGGLPYHTTDASLRKYFEGFGDIEEAVVITDRQTGKSRGYGFVTMADRAAAERACKDPNPIIDGRKANVNLAYLGAKPRSLQTG

SEQ ID NO: 75272 - protein, 530 aa, Homo sapiens
  Payload ID: 14876
  Gene Symbol: RBM39
  Gene Name: RNA binding motif protein 39
  Uniprot ID: Q14498
  ENSP ID: ENSP00000253363
MADDIDIEAMLEAPYKKDENKLSSANGHEERSKKRKKSKSRSRSHERKRSKSKERKRSRDRERKKSKSRERKRSRSKERRRSRSRSRDRRFRGRYRSPYSGPKFNSAIRGKIGLPHSIKLSRRRSRSKSPFRKDKSPVREPIDNLTPEERDARTVFCMQLAARIRPRDLEEFFSTVGKVRDVRMISDRNSRRSKGIAYVEFVDVSSVPLAIGLTGQRVLGVPIIVQASQAEKNRAAAMANNLQKGSAGPMRLYVGSLHFNITEDMLRGIFEPFGRIESIQLMMDSETGRSKGYGFITFSDSECAKKALEQLNGFELAGRPMKVGHVTERTDASSASSFLDSDELERTGIDLGTTGRLQLMARLAEGTGLQIPPAAQQALQMSGSLAFGAVAEFSFVIDLQTRLSQQTEASALAAAASVQPLATQCFQLSNMFNPQTEEEVGWDTEIKDDVIEECNKHGGVIHIYVDKNSAQGNVYVKCPSIAAAIAAVNALHGRWFAGKMITAAYVPLPTYHNLFPDSMTATQLLVPSRR

SEQ ID NO: 75273 - protein, 423 aa, Homo sapiens
  Payload ID: 14876
  Gene Symbol: RBM39
  Gene Name: RNA binding motif protein 39
  ENSP ID: ENSP00000344581
MADDIDIEAMLEAPYKKDENKLSSANGHEERSKKRKKSKSRSRSHERKRSKSKERKRSRDRERKKSKSRERKRSRSKERRRSRSRSRDRRFRGRYRSPYSGPKFNSAIRGKIGLPHSIKLSRRRSRSKSPFRKDKSPVREPIDNLTPEERDARTVFCMQLAARIRPRDLEEFFSTVGKVRDVRMISDRNSRRSKGIAYVEFVDVSSVPLAIGLTGQRVLGVPIIVQASQAEKNRAAAMANNLQKGSAGPMRLYVGSLHFNITEDMLRGIFEPFGRIESIQLMMDSETGRSKGYGFITFSDSECAKKALEQLNGFELAGRPMKVGHVTERTDASSASSFLDSDELERTGIDLGTTGRLQLMARLAEGTGLQIPPAAQQALQMSGSLAFGAVADLQTRLSQQTEALFVIMFWNEIWSDNMITLQL

SEQ ID NO: 75274 - protein, 524 aa, Homo sapiens
  Payload ID: 14876
  Gene Symbol: RBM39
  Gene Name: RNA binding motif protein 39
  Uniprot ID: Q14498
  ENSP ID: ENSP00000354437
MADDIDIEAMLEAPYKKDENKLSSANGHEERSKKRKKSKSRSRSHERKRSKSKERKRSRDRERKKSKSRERKRSRSKERRRSRSRSRDRRFRGRYRSPYSGPKFNSAIRGKIGLPHSIKLSRRRSRSKSPFRKDKSPVREPIDNLTPEERDARTVFCMQLAARIRPRDLEEFFSTVGKVRDVRMISDRNSRRSKGIAYVEFVDVSSVPLAIGLTGQRVLGVPIIVQASQAEKNRAAAMANNLQKGSAGPMRLYVGSLHFNITEDMLRGIFEPFGRIESIQLMMDSETGRSKGYGFITFSDSECAKKALEQLNGFELAGRPMKVGHVTERTDASSASSFLDSDELERTGIDLGTTGRLQLMARLAEGTGLQIPPAAQQALQMSGSLAFGAVADLQTRLSQQTEASALAAAASVQPLATQCFQLSNMFNPQTEEEVGWDTEIKDDVIEECNKHGGVIHIYVDKNSAQGNVYVKCPSIAAAIAAVNALHGRWFAGKMITAAYVPLPTYHNLFPDSMTATQLLVPSRR

SEQ ID NO: 75275 - protein, 231 aa, Homo sapiens
  Payload ID: 14876
  Gene Symbol: RBM39
  Gene Name: RNA binding motif protein 39
  ENSP ID: ENSP00000363150
MADDIDIEAMLEAPYKKDENKLSSANGHEERSKKRKKSKSRSRSHERKRSKSKERKRSRDRERKKSKSRERKRSRSKERRRSRSRSRDRRFRGRYRSPYSGPKFNSAIRGKIGLPHSIKLRRRSRSKSPFRKDKSPVREPIDNLTPEERDARTVFCMQLAARIRPRDLEEFFSTVGKVRDVRMISDRNSRRSKGIAYVEFVDVSSVPLAIGLTGQRVLGVPIIVQASQAEK

SEQ ID NO: 75276 - protein, 95 aa, Homo sapiens
  Payload ID: 14876
  Gene Symbol: RBM39
  Gene Name: RNA binding motif protein 39
  ENSP ID: ENSP00000380527
MADDIDIEAMLEAPYKKDENKLSSANGHEERSKKILCIKNLDLLTWKRSNPVIAKHLYCRGHITKKSKGPAQWTIYFSDVQYKISLPLKTLESPF

SEQ ID NO: 75277 - protein, 40 aa, Homo sapiens
  Payload ID: 14876
  Gene Symbol: RBM39
  Gene Name: RNA binding motif protein 39
  ENSP ID: ENSP00000385977
MADDIDIEAMLEAPYKKTCLTISHLYSHEFTFDSSVNCQS

SEQ ID NO: 75278 - protein, 23 aa, Homo sapiens
  Payload ID: 14876
  Gene Symbol: RBM39
  Gene Name: RNA binding motif protein 39
  ENSP ID: ENSP00000389459
TCLTISHLYSHEFTFDSSVNCQS

SEQ ID NO: 75279 - protein, 40 aa, Homo sapiens; identical to SEQ ID NO: 75277
  Payload ID: 14876
  Gene Symbol: RBM39
  Gene Name: RNA binding motif protein 39
  ENSP ID: ENSP00000390303

SEQ ID NO: 75280 - protein, 193 aa, Homo sapiens
  Payload ID: 14876
  Gene Symbol: RBM39
  Gene Name: RNA binding motif protein 39
  ENSP ID: ENSP00000393493
MADDIDIEAMLEAPYKKDENKLSSANGHEERSKKRKKSKSRSRSHERKRSKSKERKRSRDRERKKSKSRERKRSRSKERRRSRSRSRDRRFRGRYRSPYSGPKFNSAIRGKIGLPHSIKLSRRRSRSKSPFRKDKSPVREPIDNLTPEERDARTVFCMQLAARIRPRDLEEFFSTVGKVRDVRMISDRNSRRS

SEQ ID NO: 75281 - protein, 40 aa, Homo sapiens; identical to SEQ ID NO: 75277
  Payload ID: 14876
  Gene Symbol: RBM39
  Gene Name: RNA binding motif protein 39
  ENSP ID: ENSP00000394602

SEQ ID NO: 75282 - protein, 336 aa, Homo sapiens
  Payload ID: 14876
  Gene Symbol: RBM39
  Gene Name: RNA binding motif protein 39
  ENSP ID: ENSP00000394824
  MOD_RES (1)..(1): Any amino acid
XSPFRKDKSPVREPIDNLTPEERDARTVFCMQLAARIRPRDLEEFFSTVGKVRDVRMISDRNSRRSKGIAYVEFVDVSSVPLAIGLTGQRVLGVPIIVQASQAEKNRAAAMANNLQKGSAGPMRLYVGSLHFNITEDMLRGIFEPFGRFSDSECAKKALEQLNGFELAGRPMKVGHVTERTDASSASSFLDSDELERTGIDLGTTGRLQLMARLAEGTGLQIPPAAQQALQMSGSLAFGAVAEFSFVIDLQTRLSQQTEASALAAAASVQPLATQCFQLSNMFNPQTEEEVGWDTEIKDDVIEECNKHGGVIHIYVDKNSAQGNVYVKCPSIAAAI

SEQ ID NO: 75283 - protein, 47 aa, Homo sapiens
  Payload ID: 14876
  Gene Symbol: RBM39
  Gene Name: RNA binding motif protein 39
  ENSP ID: ENSP00000395124
MADDIDIEAMLEAPYKKDENKLSSANGHEERSKKQTFCLLGKLYISL

SEQ ID NO: 75284 - protein, 40 aa, Homo sapiens; identical to SEQ ID NO: 75277
  Payload ID: 14876
  Gene Symbol: RBM39
  Gene Name: RNA binding motif protein 39
  ENSP ID: ENSP00000395563

SEQ ID NO: 75285 - protein, 40 aa, Homo sapiens; identical to SEQ ID NO: 75277
  Payload ID: 14876
  Gene Symbol: RBM39
  Gene Name: RNA binding motif protein 39
  ENSP ID: ENSP00000397443

SEQ ID NO: 75286 - protein, 40 aa, Homo sapiens; identical to SEQ ID NO: 75277
  Payload ID: 14876
  Gene Symbol: RBM39
  Gene Name: RNA binding motif protein 39
  ENSP ID: ENSP00000397917

SEQ ID NO: 75287 - protein, 86 aa, Homo sapiens
  Payload ID: 14876
  Gene Symbol: RBM39
  Gene Name: RNA binding motif protein 39
  ENSP ID: ENSP00000405916
  MOD_RES (1)..(1): Any amino acid
XPYKKDENKLSSANGHEERSKKRKKSKSRSRSHERKRSKSKERKRSRDRERKKSKSRERKRSRSKERRRSRSRSRDRRFRGRYRSP

SEQ ID NO: 75288 - protein, 40 aa, Homo sapiens; identical to SEQ ID NO: 75277
  Payload ID: 14876
  Gene Symbol: RBM39
  Gene Name: RNA binding motif protein 39
  ENSP ID: ENSP00000406900

SEQ ID NO: 75289 - protein, 62 aa, Homo sapiens
  Payload ID: 14876
  Gene Symbol: RBM39
  Gene Name: RNA binding motif protein 39
  ENSP ID: ENSP00000407150
MADDIDIEAMLEAPYKKGEMCDRGGIKLLQSQPSNGNGRRSQEWHRSQEIDSGWLLAWPLGA

SEQ ID NO: 75290 - protein, 39 aa, Homo sapiens
  Payload ID: 14876
  Gene Symbol: RBM39
  Gene Name: RNA binding motif protein 39
  ENSP ID: ENSP00000407466
MADDIDIEAMLEAPYKKDENKLSSANGHEERSKKSLNAS

SEQ ID NO: 75291 - protein, 508 aa, Homo sapiens
  Payload ID: 14876
  Gene Symbol: RBM39
  Gene Name: RNA binding motif protein 39
  Uniprot ID: Q14498
  ENSP ID: ENSP00000436747
MADDIDIEAMLEAPYKKDENKLSSANGHEERSKKRKKSKSRSRSHERKRSKSKERKRSRDRERKKSKSRERKRSRSKERRRSRSRSRDRRFRGRYRSPYRRRSRSKSPFRKDKSPVREPIDNLTPEERDARTVFCMQLAARIRPRDLEEFFSTVGKVRDVRMISDRNSRRSKGIAYVEFVDVSSVPLAIGLTGQRVLGVPIIVQASQAEKNRAAAMANNLQKGSAGPMRLYVGSLHFNITEDMLRGIFEPFGRIESIQLMMDSETGRSKGYGFITFSDSECAKKALEQLNGFELAGRPMKVGHVTERTDASSASSFLDSDELERTGIDLGTTGRLQLMARLAEGTGLQIPPAAQQALQMSGSLAFGAVAEFSFVIDLQTRLSQQTEASALAAAASVQPLATQCFQLSNMFNPQTEEEVGWDTEIKDDVIEECNKHGGVIHIYVDKNSAQGNVYVKCPSIAAAIAAVNALHGRWFAGKMITAAYVPLPTYHNLFPDSMTATQLLVPSRR

SEQ ID NO: 75292 - protein, 59 aa, Homo sapiens
  Payload ID: 14876
  Gene Symbol: RBM39
  Gene Name: RNA binding motif protein 39
  ENSP ID: ENSP00000483837
LERTGIDLGTTGRLQLMARLAEGTGLQIPPAAQQALQMSGSLAFGAVAVEALHCSCTEL

SEQ ID NO: 75293 - protein, 245 aa, Homo sapiens
  Payload ID: 14876
  Gene Symbol: RBM39
  Gene Name: RNA binding motif protein 39
  ENSP ID: ENSP00000489005
TVFCMQLAARIRPRDLEEFFSTVGKVRDVRMISDRNSRRSKGIAYVEFVDVSSVPLAIGLTGQRVLGVPIIVQASQAEKNRAAAMANNLQKGSAGPMRLYVGSLHFNITEDMLRGIFEPFGRIESIQLMMDSETGRSKGYGFITFSDSECAKKALEQLNGFELAGRPMKVGHVTERTDASSASSFLDSDELERTGIDLGTTGRLQLMARLAEGSGSVAQFGVQLCDPGSPQPLPLWLKPSSHPNL

SEQ ID NO: 75294 - protein, 163 aa, Homo sapiens
  Payload ID: 14876
  Gene Symbol: RBM39
  Gene Name: RNA binding motif protein 39
  ENSP ID: ENSP00000489196
  MOD_RES (1)..(1): Any amino acid
XQKGSAGPMRLYVGSLHFNITEDMLRGIFEPFGRIESIQLMMDSETGRSKGYGFITFSDSECAKKALEQLNGFELAGRPMKVGHVTERTDASSASSFLDSDELERTGIDLGTTGRLQLMARLAEGTGLQIPPAAQQALQMSGSLAFGAVAGKKRQILLLFKVY

SEQ ID NO: 75295 - protein, 364 aa, Homo sapiens
  Payload ID: 14877
  Gene Symbol: RBM4
  Gene Name: RNA binding motif protein 4
  Uniprot ID: Q9BWF3
  ENSP ID: ENSP00000309166
MVKLFIGNLPREATEQEIRSLFEQYGKVLECDIIKNYGFVHIEDKTAAEDAIRNLHHYKLHGVNINVEASKNKSKTSTKLHVGNISPTCTNKELRAKFEEYGPVIECDIVKDYAFVHMERAEDAVEAIRGLDNTEFQGKRMHVQLSTSRLRTAPGMGDQSGCYRCGKEGHWSKECPIDRSGRVADLTEQYNEQYGAVRTPYTMSYGDSLYYNNAYGALDAYYKRCRAARSYEAVAAAAASVYNYAEQTLSQLPQVQNTAMASHLTSTSLDPYDRHLLPTSGAAATAAAAAAAAAAVTAASTSYYGRDRSPLRRATAPVPTVGEGYGYGHESELSQASAAARNSLYDMARYEREQYADRARYSAF

SEQ ID NO: 75296 - protein, 143 aa, Homo sapiens
  Payload ID: 14877
  Gene Symbol: RBM4
  Gene Name: RNA binding motif protein 4
  Uniprot ID: Q9BWF3
  ENSP ID: ENSP00000381680
MVKLFIGNLPREATEQEIRSLFEQYGKVLECDIIKNYGFVHIEDKTAAEDAIRNLHHYKLHGVNINVEASKNKSKTSTKLHVGNISPTCTNKELRAKFEEYGPVIECDIVKDYAFVHMERAEDAVEAIRGLDNTEFQGGMCVG

SEQ ID NO: 75297 - protein, 364 aa, Homo sapiens; identical to SEQ ID NO: 75295
  Payload ID: 14877
  Gene Symbol: RBM4
  Gene Name: RNA binding motif protein 4
  Uniprot ID: Q9BWF3
  ENSP ID: ENSP00000386561

SEQ ID NO: 75298 - protein, 364 aa, Homo sapiens; identical to SEQ ID NO: 75295
  Payload ID: 14877
  Gene Symbol: RBM4
  Gene Name: RNA binding motif protein 4
  Uniprot ID: Q9BWF3
  ENSP ID: ENSP00000386894

SEQ ID NO: 75299 - protein, 173 aa, Homo sapiens
  Payload ID: 14877
  Gene Symbol: RBM4
  Gene Name: RNA binding motif protein 4
  Uniprot ID: Q9BWF3
  ENSP ID: ENSP00000413497
MVKLFIGNLPREATEQEIRSLFEQYGKVLECDIIKNYGFVHIEDKTAAEDAIRNLHHYKLHGVNINVEASKNKSKTSTKLHVGNISPTCTNKELRAKFEEYGPVIECDIVKDYAFVHMERAEDAVEAIRGLDNTEFQGKITPVTEGYCCCNKGHTYIFKNCNLILESRKSRRC

SEQ ID NO: 75300 - protein, 240 aa, Homo sapiens
  Payload ID: 14877
  Gene Symbol: RBM4
  Gene Name: RNA binding motif protein 4
  ENSP ID: ENSP00000422301
MVKLFIGNLPREATEQEIRSLFEQYGKVLECDIIKNYGFVHIEDKTAAEDAIRNLHHYKLHGVNINVEASKNKSKTSTKLHVGNISPTCTNKELRAKFEEYGPVIECDIVKDYAFVHMERAEDAVEAIRGLDNTEFQGKRMHVQLSTSRLRTAPGMGDQSGCYRHLLPTSGAAATAAAAAAAAAAVTAASTSYYGRDRSPLRRATAPVPTVGEGYGYGHESELSQASAAARNSLYDMARY

SEQ ID NO: 75301 - protein, 150 aa, Homo sapiens
  Payload ID: 14877
  Gene Symbol: RBM4
  Gene Name: RNA binding motif protein 4
  ENSP ID: ENSP00000423572
MVKLFIGNLPREATEQEIRSLFEQYGKVLECDIIKNYGFVHIEDKTAAEDAIRNLHHYKLHGVNINVEASKNKSKTSTKLHVGNISPTCTNKELRAKFEEYGPVIECDIVKDYAFVHMERAEDAVEAIRGLDNTEFQDIQLCHPSCSVVA

SEQ ID NO: 75302 - protein, 177 aa, Homo sapiens
  Payload ID: 14877
  Gene Symbol: RBM4
  Gene Name: RNA binding motif protein 4
  Uniprot ID: Q9BWF3
  ENSP ID: ENSP00000432020
MVKLFIGNLPREATEQEIRSLFEQYGKVLECDIIKNYGFVHIEDKTAAEDAIRNLHHYKLHGVNINVEASKNKSKTSTKLHVGNISPTCTNKELRAKFEEYGPVIECDIVKDYAFVHMERAEDAVEAIRGLDNTEFQGEPPSLGRGLNTRLCAENGWISKRRGLVKITAVGWLVMKK

SEQ ID NO: 75303 - protein, 143 aa, Homo sapiens; identical to SEQ ID NO: 75296
  Payload ID: 14877
  Gene Symbol: RBM4
  Gene Name: RNA binding motif protein 4
  Uniprot ID: Q9BWF3
  ENSP ID: ENSP00000432150

SEQ ID NO: 75304 - protein, 177 aa, Homo sapiens; identical to SEQ ID NO: 75302
  Payload ID: 14877
  Gene Symbol: RBM4
  Gene Name: RNA binding motif protein 4
  Uniprot ID: Q9BWF3
  ENSP ID: ENSP00000435821

SEQ ID NO: 75305 - protein, 155 aa, Homo sapiens
  Payload ID: 14877
  Gene Symbol: RBM4
  Gene Name: RNA binding motif protein 4
  ENSP ID: ENSP00000464349
MVKLFIGNLPREATEQEIRSLFEQYGKVLECDIIKNYGFVHIEDKTAAEDAIRNLHHYKLHGVNINVEASKNKSKTSTKLHVGNISPTCTNKELRAKFEEYGPVIECDIVKDYAFVHMERAEDAVEAIRGLDNTEFQVETGFHRVNQDGLDLLTS

SEQ ID NO: 75306 - protein, 413 aa, Homo sapiens
  Payload ID: 14878
  Gene Symbol: RBM41
  Gene Name: RNA binding motif protein 41
  Uniprot ID: Q96IZ5
  ENSP ID: ENSP00000361557
MKRVNSCVKSDEHVLEELETEGERQLKSLLQHQLDTSVSIEECMSKKESFAPGTMYKPFGKEAAGTMTLSQFQTLHEKDQETASLRELGLNETEILIWKSHVSGEKKTKLRATPEAIQNRLQDIEERISERQRILCLPQRFAKSKQLTRREMEIEKSLFQGADRHSFLKALYYQDEPQKKNKGDPMNNLESFYQEMIMKKRLEEFQLMRGEPFASHSLVSATSVGDSGTAESPSLLQDKGKQAAQGKGPSLHVANVIDFSPEQCWTGPKKLTQPIEFVPEDEIQRNRLSEEEIRKIPMFSSYNPGEPNKVLYLKNLSPRVTERDLVSLFARFQEKKGPPIQFRMMTGRMRGQAFITFPNKEIAWQALHLVNGYKLHGKILVIEFGKNKKQRSNLQATSLISCATGSTTEISGS

SEQ ID NO: 75307 - protein, 405 aa, Homo sapiens
  Payload ID: 14878
  Gene Symbol: RBM41
  Gene Name: RNA binding motif protein 41
  Uniprot ID: Q96IZ5
  ENSP ID: ENSP00000361565
MKRVNSCVKSDEHVLEELETEGERQLKSLLQHQLDTSVSIEECMSKKESFAPGTMYKPFGKEAAGTMTLSQFQTLHEKDQETASLRELGLNETEILIWKSHVSGEKKTKLRATPEAIQNRLQDIEERISERQRILCLPQRFAKSKQLTRREMEIEKSLFQGADRHSFLKALYYQDEPQKKNKGDPMNNLESFYQEMIMKKRLEEFQLMRGEPFASHSLVSATSVGDSGTAESPSLLQDKGKQAAQGKGPSLHVANVIDFSPEQCWTGPKKLTQPIEFVPEDEIQRNRLSEEEIRKIPMFSSYNPGEPNKVLYLKNLSPRVTERDLVSLFARFQEKKGPPIQFRMMTGRMRGQAFITFPNKEIAWQALHLVNGYKLHGKILVIEFGKNKKQRSNLQATSLISCATG

SEQ ID NO: 75308 - protein, 203 aa, Homo sapiens
  Payload ID: 14878
  Gene Symbol: RBM41
  Gene Name: RNA binding motif protein 41
  ENSP ID: ENSP00000405522
  MOD_RES (1)..(1): Any amino acid
XVNSCVKSDEHVLEELETEGERQLKSLLQHQLDTSVSIEECMSKKESFAPGTMYKPFGKEAAGTMTLSQFQTLHEKDQETASLRELGLNETEILIWKSHVSGEKKTKLRATPEAIQNRLQDIEERISERQRILCLPQRFAKSKQLTRREMEIEKSLFQGADRHSFLKALYYQAYHKKTSADKYMTSMKRKIKLGTKGIIPEEP

SEQ ID NO: 75309 - protein, 311 aa, Homo sapiens
  Payload ID: 14878
  Gene Symbol: RBM41
  Gene Name: RNA binding motif protein 41
  Uniprot ID: Q96IZ5
  ENSP ID: ENSP00000433251
MKRVNSCVKSDEHVLEELETEGERQLKSLLQHQLDTSVSIEECMSKKESFAPGTMYKPFGKEAAGTMTLSQFQTLHEKDQETASLRELGLNETEILIWKSHVSGEKKTKLRATPEAIQNRLQDIEERISERQRILCLPQRFAKSKQLTRREMEIEKSLFQGADRHSFLKALYYQAYHKKTSADKYMTSMKRKIKLGTKDEPQKKNKGDPMNNLESFYQEMIMKKRLEEFQLMRGLTSFPREDFQNLSYEGTTSVLGAKWQKRTGRTSTFSILLVSLLSETVFTSSAMYGIPHLLTMSLKFSTRIGKLSFTP

SEQ ID NO: 75310 - protein, 480 aa, Homo sapiens
  Payload ID: 14879
  Gene Symbol: RBM42
  Gene Name: RNA binding motif protein 42
  Uniprot ID: Q9BTD8
  ENSP ID: ENSP00000262633
MAGAGPAPGLPGAGGPVVPGPGAGIPGKSGEERLKEMEAEMALFEQEVLGAPVPGIPTAVPAVPTVPTVPTVEAMQVPAAPVIRPIIATNTYQQVQQTLEARAAAAATVVPPMVGGPPFVGPVGFGPGDRSHLDSPEAREAMFLRRAAVAPQRAPILRPAFVPHVLQRADSALSSAAAGPRPMALRPPHQALVGPPLPGPPGPPMMLPPMARAPGPPLGSMAALRPPLEEPAAPRELGLGLGLGLKEKEEAVVAAAAGLEEASAAVAVGAGGAPAGPAVIGPSLPLALAMPLPEPEPLPLPLEVVRGLLPPLRIPELLSLRPRPRPPRPEPPPGLMALEVPEPLGEDKKKGKPEKLKRCIRTAAGSSWEDPSLLEWDADDFRIFCGDLGNEVNDDILARAFSRFPSFLKAKVIRDKRTGKTKGYGFVSFKDPSDYVRAMREMNGKYVGSRPIKLRKSMWKDRNLDVVRKKQKEKKKLGLR

SEQ ID NO: 75311 - protein, 450 aa, Homo sapiens
  Payload ID: 14879
  Gene Symbol: RBM42
  Gene Name: RNA binding motif protein 42
  Uniprot ID: Q9BTD8
  ENSP ID: ENSP00000466044
MAGAGPAPGLPGAGGPVVPGPGAGIPGKSGEERLKEMEAEMALFEQEVLGAPVPGIPTAVPAVPTVPTVPTVEAMQVPAAPVIRPIIATNTYQQVQQTLEARAAAAATVVPPMVGGPPFVGPVGFGPGDRSHLDSPEAREAMFLRRAAGPRPMALRPPHQALVGPPLPGPPGPPMMLPPMARAPGPPLGSMAALRPPLEEPAAPRELGLGLGLGLKEKEEAVVAAAAGLEEASAAVAVGAGGAPAGPAVIGPSLPLALAMPLPEPEPLPLPLEVVRGLLPPLRIPELLSLRPRPRPPRPEPPPGLMALEVPEPLGEDKKKGKPEKLKRCIRTAAGSSWEDPSLLEWDADDFRIFCGDLGNEVNDDILARAFSRFPSFLKAKVIRDKRTGKTKGYGFVSFKDPSDYVRAMREMNGKYVGSRPIKLRKSMWKDRNLDVVRKKQKEKKKLGLR

SEQ ID NO: 75312 - protein, 184 aa, Homo sapiens
  Payload ID: 14879
  Gene Symbol: RBM42
  Gene Name: RNA binding motif protein 42
  ENSP ID: ENSP00000466548
MAGAGPAPGLPGAGGPVVPGPGAGIPGKSGEERLKEMEAEMALFEQEVLGAPVPGIPTAVPAVPTVPTVPTVEAMQVPAAPVIRPIIATNTYQQVQQTLEARAAAAATVVPPMAKVIRDKRTGKTKGYGFVSFKDPSDYVRAMREMNGKYVGSRPIKLRKSMWKDRNLDVVRKKQKEKKKLGLR

SEQ ID NO: 75313 - protein, 458 aa, Homo sapiens
  Payload ID: 14879
  Gene Symbol: RBM42
  Gene Name: RNA binding motif protein 42
  ENSP ID: ENSP00000467278
MAGAGPAPGLPGAGGPVVPGPGAGIPGKSGEERLKEMEAEMALFEQEVLGAPVPGIPTAVPAVPTVPTVPTVEAMQVPAAPVIRPIIATNTYQQVQQTLEARAAAAATVVPPMVGGPPFVGPVGFGPGDRSHLDSPEAREAMFLRRADSALSSAAAGPRPMALRPPHQALVGPPLPGPPGPPMMLPPMARAPGPPLGSMAALRPPLEEPAAPRELGLGLGLGLKEKEEAVVAAAAGLEEASAAVAVGAGGAPAGPAVIGPSLPLALAMPLPEPEPLPLPLEVVRGLLPPLRIPELLSLRPRPRPPRPEPPPGLMALEVPEPLGEDKKKGKPEKLKRCIRTAAGSSWEDPSLLEWDADDFRIFCGDLGNEVNDDILARAFSRFPSFLKAKVIRDKRTGKTKGYGFVSFKDPSDYVRAMREMNGKYVGSRPIKLRKSMWKDRNLDVVRKKQKEKKKLGLR

SEQ ID NO: 75314 - protein, 426 aa, Homo sapiens
  Payload ID: 14879
  Gene Symbol: RBM42
  Gene Name: RNA binding motif protein 42
  ENSP ID: ENSP00000467614
MAGAGPAPGLPGAGGPVVPGPGAGIPGKSGEERLKEMEAEMALFEQEVLGAPVPGIPTAVPAVPTVPTVPTVEAMQVPAAPVIRPIIATNTYQQVQQTLEARAAAAATVVPPMVGGPPFVGPAAGPRPMALRPPHQALVGPPLPGPPGPPMMLPPMARAPGPPLGSMAALRPPLEEPAAPRELGLGLGLGLKEKEEAVVAAAAGLEEASAAVAVGAGGAPAGPAVIGPSLPLALAMPLPEPEPLPLPLEVVRGLLPPLRIPELLSLRPRPRPPRPEPPPGLMALEVPEPLGEDKKKGKPEKLKRCIRTAAGSSWEDPSLLEWDADDFRIFCGDLGNEVNDDILARAFSRFPSFLKAKVIRDKRTGKTKGYGFVSFKDPSDYVRAMREMNGKYVGSRPIKLRKSMWKDRNLDVVRKKQKEKKKLGLR

SEQ ID NO: 75315 - protein, 386 aa, Homo sapiens
  Payload ID: 14879
  Gene Symbol: RBM42
  Gene Name: RNA binding motif protein 42
  ENSP ID: ENSP00000468060
MAGAGPAPGLPGAGGPVVPGPGAGIPGKSGEERLKEMEAEMALFEQEVLGAPVPGIPTAVPAVPTVPTVPTVEAMQVPAAPVIRPIIATNTYQQVQQTLEARAAAAATVVPPMVGGPPFVGPVGFGPGDRSHLDSPEAREAMFLRRAAAGPRPMALRPPHQALVGPPLPGPPGPPMMLPPMARAPGPPLGSMAALRPPLEEPAAPRELGLGLGLGLKEKEEAVVAAAAGLEEASAAVAVGAGGAPAGPAVIGPSLPLALAMPLPEPEPLPLPLEVVRGLLPPLRIPELLSLRPRPRPPRPEPPPGLMALEVPEPLGEDKKKGKPEKLKRCIRTAAGSSWEDPSLLEWDAGKYVGSRPIKLRKSMWKDRNLDVVRKKQKEKKKLGLR

SEQ ID NO: 75316 - protein, 357 aa, Homo sapiens
  Payload ID: 14880
  Gene Symbol: RBM43
  Gene Name: RNA binding motif protein 43
  Uniprot ID: Q6ZSC3
  ENSP ID: ENSP00000331211
MASVLNVKESKAPERTVVVAGLPVDLFSDQLLAVLVKSHFQDIKNEGGDVEDVIYPTRTKGVAYVIFKEKKVAENVIRQKKHWLARKTRHAELTVSLRVSHFGDKIFSSVNAILDLSVFGKEVTLETLVKDLKKKIPSLSFSPLKPNGRISVEGSFLAVKRLRESLLARACSLLEKDRNFTSEERKWNRQNPQRNLQRSNNSLASVRTLVPETARSGEMLVLDTDVFLYLKHKCGSYESTLKKFHILSQEKVDGEITTICLKSIQVGSQPNNAKHVKELIEEWSHALYLKLRKETFILEGKENREKRMIKRACEQLSSRYLEVLINLYRTHIDIIGSSSDTYLFKKGVMKLIGQKVS

SEQ ID NO: 75317 - protein, 68 aa, Homo sapiens
  Payload ID: 14880
  Gene Symbol: RBM43
  Gene Name: RNA binding motif protein 43
  ENSP ID: ENSP00000386440
MVAALRAPEIHVRRCSIGPLQRLRTRLSPPTPTAQATGTPPFVEELLRRLLGLNCCPPTPRGEQKWPD

SEQ ID NO: 75318 - protein, 1052 aa, Homo sapiens
  Payload ID: 14881
  Gene Symbol: RBM44
  Gene Name: RNA binding motif protein 44
  ENSP ID: ENSP00000321179
MMQATAVVETASGKGYHSNGGNLQKDKPSNPKKENLLLSSNGCDEVKLTFPDDDWNSSTLEQRANNKEISNIDKMDLLEPFFSVSQDTNTESTQFQSSELEDSTDYAFLNKTYSIPYSESKLKKESLTPLSSELDPEVQKKEEVFFNILEHQDKTVGLERIYNISDANYRESAEDTQKHDTDEDSQQEYHSAEEQEYISNHLSFDQTKALDISNPEVVELGNSGYEVKCASNVEDNRVNSGSGSIISFDSLDVYGQEESLHVSKFQNSVMLREYHDLKHEKYKEQETNSMYHTVFDGSVLRSNSPGNQESQSKSGSLSPQKVLKMKIYTENMKSQINEGKDFCGNKIVENKILLHLENPSTLPQDKALETLLQPCKDCQTSWTSVFDDSIISACGYYESLQNTADSALDFSAMLPKIAVRDNQAIEDNTSLKVAHSSTTKKTCFHNIGEMCTKSLTDAASCTVTINQTVDVSTDFRACFTTSRATSARPSVVSTSSNTEITMMNKKRPDEWQNEKQKSVACSTDWSYSEDCIDTQMAITKGSGKSLSVDSLKPNGNFLNKDFLELRKACGITDLKKHPEREFQLFKDTEKDLPSMCCQKIMQRAIKAELHLLNVHYQMCRRHCCDIYKLVMENREGLNMNLSSNSAKKELGSALLSLLGDLKVRYVTLKEKIHKGIPLEELPPLSLESKLLSTFSTFASRLMKKETHVFSEADAEQDNQRAHDVDVSSNLKKTLSQMSLSSDNSHATQNISPKKDDFKNGDINADFSQLKLGDKDCRHYQETSEDWSDAKESLTGVDVSGTQGNQVEQDTWNLDLTGEMKNVEPSQRDKGYLIHVGGLCPSVSEADLRSHFQKYQVSEISIYDSTNYRYASLAFTKNSDAKIAVKEMNGIEINGKSVNVWPVKILGEYTSPLSSKNGNRISSNNLEKSTNKQIHSEFSISRLPRTRPRQLGSEQDSEVFPSDQGVKKNCKQIESAKLLPDTPVQFIPPNTLNLRSFTKIIKRLAELHPEVSRDHIINALQEVRIRHKGFLNGLSITTIVEMTSSLLKNSASS

SEQ ID NO: 75319 - protein, 1052 aa, Homo sapiens; identical to SEQ ID NO: 75318
  Payload ID: 14881
  Gene Symbol: RBM44
  Gene Name: RNA binding motif protein 44
  ENSP ID: ENSP00000386727

SEQ ID NO: 75320 - protein, 418 aa, Homo sapiens [sequence omitted]

SEQ ID NO: 75321 - protein, 474 aa, Homo sapiens
  Payload ID: 14882
  Gene Symbol: RBM45
  Gene Name: RNA binding motif protein 45
  Uniprot ID: Q8IUH3
  ENSP ID: ENSP00000286070
MDEAGSSASGGGFRPGVDSLDEPPNSRIFLVISKYTPESVLRERFSPFGDIQDIWVVRDKHTKESKGIAFVKFARSSQACRAMEEMHGQCLGPNDTKPIKVFIAQSRSSGSHRDVEDEELTRIFVMIPKSYTEEDLREKFKVYGDIEYCSIIKNKVTGESKGLGYVRYLKPSQAAQAIENCDRSFRAILAEPKNKASESSEQDYYSNMRQEALGHEPRVNMFPFEQQSEFSSFDKNDSRGQEAISKRLSVVSRVPFTEEQLFSIFDIVPGLEYCEVQRDPYSNYGHGVVQYFNVASAIYAKYKLHGFQYPPGNRIGVSFIDDGSNATDLLRKMATQMVAAQLASMVWNNPSQQQFMQFGGSSGSQLPQIQTDVVLPSCKKKAPAETPVKERLFIVFNPHPLPLDVLEDIFCRFGNLIEVYLVSGKNVGYAKYADRISANDAIATLHGKILNGVRLKVMLADSPREESNKRQRTY

SEQ ID NO: 75322 - protein, 73 aa, Homo sapiens
  Payload ID: 14882
  Gene Symbol: RBM45
  Gene Name: RNA binding motif protein 45
  ENSP ID: ENSP00000389134
  MOD_RES (1)..(1): Any amino acid
XWIEEGQAQGRFGNLIEVYLVSGKNVGYAKYADRISANDAIATLHGKILNGVRLKVMLADSPREESNKRQRTY

SEQ ID NO: 75323 - protein, 135 aa, Homo sapiens
  Payload ID: 14882
  Gene Symbol: RBM45
  Gene Name: RNA binding motif protein 45
  ENSP ID: ENSP00000415940
  MOD_RES (1)..(1): Any amino acid
XQLASMVWNNPSQQQFMQFGGSSGSQLPQIQTDVVLPSCKKKAPAETPVKERLFIVFNPHPLPLDVLEDIFCRFGNLIEVYLVSGKNVGYAKYADRISANDAIATLHGKILNGVRLKVMLADSPREESNKRQRTY

SEQ ID NO: 75324 - protein, 476 aa, Homo sapiens
  Payload ID: 14882
  Gene Symbol: RBM45
  Gene Name: RNA binding motif protein 45
  Uniprot ID: Q8IUH3
  ENSP ID: ENSP00000482083
MDEAGSSASGGGFRPGVDSLDEPPNSRIFLVISKYTPESVLRERFSPFGDIQDIWVVRDKHTKESKGIAFVKFARSSQACRAMEEMHGQCLGPNDTKPIKVFIAQSRSSGSHRDVEDEELTRIFVMIPKSYTEEDLREKFKVYGDIEYCSIIKNKVTGESKGLGYVRYLKPSQAAQAIENCDRSFRAILAEPKNKASESSEQDYYSNMRQEALGHEPRVNMFPFVGEQQSEFSSFDKNDSRGQEAISKRLSVVSRVPFTEEQLFSIFDIVPGLEYCEVQRDPYSNYGHGVVQYFNVASAIYAKYKLHGFQYPPGNRIGVSFIDDGSNATDLLRKMATQMVAAQLASMVWNNPSQQQFMQFGGSSGSQLPQIQTDVVLPSCKKKAPAETPVKERLFIVFNPHPLPLDVLEDIFCRFGNLIEVYLVSGKNVGYAKYADRISANDAIATLHGKILNGVRLKVMLADSPREESNKRQRTY

SEQ ID NO: 75325 - protein, 533 aa, Homo sapiens
  Payload ID: 14883
  Gene Symbol: RBM46
  Gene Name: RNA binding motif protein 46
  Uniprot ID: Q8TBY0
  ENSP ID: ENSP00000281722
MNEENIDGTNGCSKVRTGIQNEAALLALMEKTGYNMVQENGQRKFGGPPPGWEGPPPPRGCEVFVGKIPRDMYEDELVPVFERAGKIYEFRLMMEFSGENRGYAFVMYTTKEEAQLAIRILNNYEIRPGKFIGVCVSLDNCRLFIGAIPKEKKKEEILDEMKKVTEGVVDVIVYPSATDKTKNRGFAFVEYESHRAAAMARRKLIPGTFQLWGHTIQVDWADPEKEVDEETMQRVKVLYVRNLMISTTEETIKAEFNKFKPGAVERVKKLRDYAFVHFFNREDAVAAMSVMNGKCIDGASIEVTLAKPVNKENTWRQHLNGQISPNSENLIVFANKEESHPKTLGKLPTLPARLNGQHSPSPPEVERCTYPFYPGTKLTPISMYSLKSNHFNSAVMHLDYYCNKNNWAPPEYYLYSTTSQDGKVLLVYKIVIPAIANGSQSYFMPDKLCTTLEDAKELAAQFTLLHLDYNFHRSSINSLSPVSATLSSGTPSVLPYTSRPYSYPGYPLSPTISLANGSHVGQRLCISNQASFF

SEQ ID NO: 75326 - protein, 470 aa, Homo sapiens
  Payload ID: 14883
  Gene Symbol: RBM46
  Gene Name: RNA binding motif protein 46
  Uniprot ID: Q8TBY0
  ENSP ID: ENSP00000422813
MNEENIDGTNGCSKVRTGIQNEAALLALMEKTGYNMVQENGQRKFGGPPPGWEGPPPPRGCEVFVGKIPRDMYEDELVPVFERAGKIYEFRLMMEFSGENRGYAFVMYTTKEEAQLAIRILNNYEIRPGKFIGVCVSLDNCRLFIGAIPKEKKKEEILDEMKKVTEGVVDVIVYPSATDKTKNRGFAFVEYESHRAAAMARRKLIPGTFQLWGHTIQVDWADPEKEVDEETMQRVKVLYVRNLMISTTEETIKAEFNKFKPGAVERVKKLRDYAFVHFFNREDAVAAMSVMNGKCIDGASIEVTLAKPVNKENTWRQHLNGQISPNSENLIVFANKEESHPKTLGKLPTLPARLNGQHSPSPPEVERCTYPFYPGTKLTPISMYSLKSNHFNSAVMHLDYYCNKNNWAPPEYYLYSTTSQDGKVLLVYKIVIPAIANGSQSYFMPDKLCTTLEDAKELAAQFTLLHLGPF

SEQ ID NO: 75327 - protein, 485 aa, Homo sapiens
  Payload ID: 14883
  Gene Symbol: RBM46
  Gene Name: RNA binding motif protein 46
  Uniprot ID: Q8TBY0
  ENSP ID: ENSP00000424500
MNEENIDGTNGCSKVRTGIQNEAALLALMEKTGYNMVQENGQRKFGGPPPGWEGPPPPRGCEVFVGKIPRDMYEDELVPVFERAGKIYEFRLMMEFSGENRGYAFVMYTTKEEAQLAIRILNNYEIRPGKFIGVCVSLDNCRLFIGAIPKEKKKEEILDEMKKVTEGVVDVIVYPSATDKTKNRGFAFVEYESHRAAAMARRKLIPGTFQLWGHTIQVDWADPEKEVDEETMQRVKVLYVRNLMISTTEETIKAEFNKFKPGAVERVKKLRDYAFVHFFNREDAVAAMSVMNGKCIDGASIEVTLAKPVNKENTWRQHLNGQISPNSENLIVFANKEESHPKTLGKLPTLPARLNGQHSPSPPEVERCTYPFYPGTKLTPISMYSLKSNHFNSAVMHLDYYCNKNNWAPPEYYLYSTTSQDGKVLLVYKIVIPAIANGSQSYFMPDKLCTTLEDAKELAAQFTLLHLDREHNLFSLDLCRRIWRK

SEQ ID NO: 75328 - protein, 133 aa, Homo sapiens
  Payload ID: 14883
  Gene Symbol: RBM46
  Gene Name: RNA binding motif protein 46
  ENSP ID: ENSP00000426672
MNEENIDGTNGCSKVRTGIQNEAALLALMEKTGYNMVQENGQRKFGGPPPGWEGPPPPRGCEVFVGKIPRDMYEDELVPVFERAGKIYEFRLMMEFSGENRGYAFVMYTTKEEAQLAIRILNNYEIRPGKFIG

SEQ ID NO: 75329 - protein, 593 aa, Homo sapiens
  Payload ID: 14884
  Gene Symbol: RBM47
  Gene Name: RNA binding motif protein 47
  Uniprot ID: A0AV96
  ENSP ID: ENSP00000295971
MTAEDSTAAMSSDSAAGSSAKVPEGVAGAPNEAALLALMERTGYSMVQENGQRKYGGPPPGWEGPHPQRGCEVFVGKIPRDVYEDELVPVFEAVGRIYELRLMMDFDGKNRGYAFVMYCHKHEAKRAVRELNNYEIRPGRLLGVCCSVDNCRLFIGGIPKMKKREEILEEIAKVTEGVLDVIVYASAADKMKNRGFAFVEYESHRAAAMARRKLMPGRIQLWGHQIAVDWAEPEIDVDEDVMETVKILYVRNLMIETTEDTIKKSFGQFNPGCVERVKKIRDYAFVHFTSREDAVHAMNNLNGTELEGSCLEVTLAKPVDKEQYSRYQKAARGGGAAEAAQQPSYVYSCDPYTLAYYGYPYNALIGPNRDYFVKAGSIRGRGRGAAGNRAPGPRGSYLGGYSAGRGIYSRYHEGKGKQQEKGYELVPNLEIPTVNPVAIKPGTVAIPAIGAQYSMFPAAPAPKMIEDGKIHTVEHMISPIAVQPDPASAAAAAAAAAAAAAAVIPTVSTPPPFQGRPITPVYTVAPNVQRIPTAGIYGASYVPFAAPATATIATLQKNAAAAAAMYGGYAGYIPQAFPAAAIQVPIPDVYQTY

SEQ ID NO: 75330 - protein, 593 aa, Homo sapiens; identical to SEQ ID NO: 75329
  Payload ID: 14884
  Gene Symbol: RBM47
  Gene Name: RNA binding motif protein 47
  Uniprot ID: A0AV96
  ENSP ID: ENSP00000371212

SEQ ID NO: 75331 - protein, 524 aa, Homo sapiens
  Payload ID: 14884
  Gene Symbol: RBM47
  Gene Name: RNA binding motif protein 47
  Uniprot ID: A0AV96
  ENSP ID: ENSP00000371214
MTAEDSTAAMSSDSAAGSSAKVPEGVAGAPNEAALLALMERTGYSMVQENGQRKYGGPPPGWEGPHPQRGCEVFVGKIPRDVYEDELVPVFEAVGRIYELRLMMDFDGKNRGYAFVMYCHKHEAKRAVRELNNYEIRPGRLLGVCCSVDNCRLFIGGIPKMKKREEILEEIAKVTEGVLDVIVYASAADKMKNRGFAFVEYESHRAAAMARRKLMPGRIQLWGHQIAVDWAEPEIDVDEDVMETVKILYVRNLMIETTEDTIKKSFGQFNPGCVERVKKIRDYAFVHFTSREDAVHAMNNLNGTELEGSCLEVTLAKPVDKEQYSRYQKAARGGGAAEAAQQPSYVYSCDPYTLAYYGYPYNALIGPNRDYFVKVAIPAIGAQYSMFPAAPAPKMIEDGKIHTVEHMISPIAVQPDPASAAAAAAAAAAAAAAVIPTVSTPPPFQGRPITPVYTVAPNVQRIPTAGIYGASYVPFAAPATATIATLQKNAAAAAAMYGGYAGYIPQAFPAAAIQVPIPDVYQTY

SEQ ID NO: 75332 - protein, 193 aa, Homo sapiens
  Payload ID: 14884
  Gene Symbol: RBM47
  Gene Name: RNA binding motif protein 47
  ENSP ID: ENSP00000421589
MTAEDSTAAMSSDSAAGSSAKVPEGVAGAPNEAALLALMERTGYSMVQENGQRKYGGPPPGWEGPHPQRGCEVFVGKIPRDVYEDELVPVFEAVGRIYELRLMMDFDGKNRGYAFVMYCHKHEAKRAVRELNNYEIRPGRLLGVCCSVDNCRLFIGGIPKMKKREEILEEIAKVTEGVLDVIVYASAADKMKN

SEQ ID NO: 75333 - protein, 217 aa, Homo sapiens
  Payload ID: 14884
  Gene Symbol: RBM47
  Gene Name: RNA binding motif protein 47
  ENSP ID: ENSP00000422564
MTAEDSTAAMSSDSAAGSSAKVPEGVAGAPNEAALLALMERTGYSMVQENGQRKYGGPPPGWEGPHPQRGCEVFVGKIPRDVYEDELVPVFEAVGRIYELRLMMDFDGKNRGYAFVMYCHKHEAKRAVRELNNYEIRPGRLLGVCCSVDNCRLFIGGIPKMKKREEILEEIAKVTEGVLDVIVYASAADKMKNRGFAFVEYESHRAAAMARRKLMPG

SEQ ID NO: 75334 - protein, 393 aa, Homo sapiens
  Payload ID: 14884
  Gene Symbol: RBM47
  Gene Name: RNA binding motif protein 47
  ENSP ID: ENSP00000422945
MTAEDSTAAMSSDSAAGSSAKVPEGVAGAPNEAALLALMERTGYSMVQENGQRKYGGPPPGWEGPHPQRGCEVFVGKIPRDVYEDELVPVFEAVGRIYELRLMMDFDGKNRGYAFVMYCHKHEAKRAVRELNNYEIRPGRLLGVCCSVDNCRLFIGGIPKMKKREEILEEIAKVTEGVLDVIVYASAADKMKNRGFAFVEYESHRAAAMARRKLMPGRIQLWGHQIAVDWAEPEIDVDEDVMETVKILYVRNLMIETTEDTIKKSFGQFNPGCVERVKKIRDYAFVHFTSREDAVHAMNNLNGTELEGSCLEVTLAKPVDKEQYSRYQKAARGGGAAEAAQQPSYVYSCDPYTLAYYGYPYNALIGPNRDYFVKDTILETHPASLPLVLRRHA

SEQ ID NO: 75335 - protein, 555 aa, Homo sapiens
  Payload ID: 14884
  Gene Symbol: RBM47
  Gene Name: RNA binding motif protein 47
  ENSP ID: ENSP00000423243
MERTGYSMVQENGQRKYGGPPPGWEGPHPQRGCEVFVGKIPRDVYEDELVPVFEAVGRIYELRLMMDFDGKNRGYAFVMYCHKHEAKRAVRELNNYEIRPGRLLGVCCSVDNCRLFIGGIPKMKKREEILEEIAKVTEGVLDVIVYASAADKMKNRGFAFVEYESHRAAAMARRKLMPGRIQLWGHQIAVDWAEPEIDVDEDVMETVKILYVRNLMIETTEDTIKKSFGQFNPGCVERVKKIRDYAFVHFTSREDAVHAMNNLNGTELEGSCLEVTLAKPVDKEQYSRYQKAARGGGAAEAAQQPSYVYSCDPYTLAYYGYPYNALIGPNRDYFVKAGSIRGRGRGAAGNRAPGPRGSYLGGYSAGRGIYSRYHEGKGKQQEKGYELVPNLEIPTVNPVAIKPGTVAIPAIGAQYSMFPAAPAPKMIEDGKIHTVEHMISPIAVQPDPASAAAAAAAAAAAAAAVIPTVSTPPPFQGRPITPVYTVAPNVQRIPTAGIYGASYVPFAAPATATIATLQKNAAAAAAMYGGYAGYIPQAFPAAAIQVPIPDVYQTY

SEQ ID NO: 75336 - protein, 123 aa, Homo sapiens
  Payload ID: 14884
  Gene Symbol: RBM47
  Gene Name: RNA binding motif protein 47
  ENSP ID: ENSP00000423398
MTAEDSTAAMSSDSAAGSSAKVPEGVAGAPNEAALLALMERTGYSMVQENGQRKYGGPPPGWEGPHPQRGCEVFVGKIPRDVYEDELVPVFEAVGRIYELRLMMDFDGKNRGYAFVMYCHKHE

SEQ ID NO: 75337 - protein, 158 aa, Homo sapiens
  Payload ID: 14884
  Gene Symbol: RBM47
  Gene Name: RNA binding motif protein 47
  ENSP ID: ENSP00000423527
MTAEDSTAAMSSDSAAGSSAKVPEGVAGAPNEAALLALMERTGYSMVQENGQRKYGGPPPGWEGPHPQRGCEVFVGKIPRDVYEDELVPVFEAVGRIYELRLMMDFDGKNRGYAFVMYCHKHEAKRAVRELNNYEIRPGRLLGVCCSVDNCRLFIGGI

SEQ ID NO: 75338 - protein, 113 aa, Homo sapiens
  Payload ID: 14884
  Gene Symbol: RBM47
  Gene Name: RNA binding motif protein 47
  ENSP ID: ENSP00000424019
MTAEDSTAAMSSDSAAGSSAKVPEGVAGAPNEAALLALMERTGYSMVQENGQRKYGGPPPGWEGPHPQRGCEVFVGKIPRDVYEDELVPVFEAVGRIYELRLMMDFDGKNRGY

SEQ ID NO: 75339 - protein, 59 aa, Homo sapiens
  Payload ID: 14884
  Gene Symbol: RBM47
  Gene Name: RNA binding motif protein 47
  ENSP ID: ENSP00000425111
MTAEDSTAAMSSDSAAGSSAKVPEGVAGAPNEAALLALMERTGYSMVQENGQRKYGGPP

SEQ ID NO: 75340 - protein, 59 aa, Homo sapiens; identical to SEQ ID NO: 75339
  Payload ID: 14884
  Gene Symbol: RBM47
  Gene Name: RNA binding motif protein 47
  ENSP ID: ENSP00000425507

SEQ ID NO: 75341 - protein, 137 aa, Homo sapiens
  Payload ID: 14884
  Gene Symbol: RBM47
  Gene Name: RNA binding motif protein 47
  ENSP ID: ENSP00000426542
MTAEDSTAAMSSDSAAGSSAKVPEGVAGAPNEAALLALMERTGYSMVQENGQRKYGGPPPGWEGPHPQRGCEVFVGKIPRDVYEDELVPVFEAVGRIYELRLMMDFDGKNRGYAFVMYCHKHEAKRAVRELNNYEIR

SEQ ID NO: 75342 - protein, 367 aa, Homo sapiens
  Payload ID: 14885
  Gene Symbol: RBM48
  Gene Name: RNA binding motif protein 48
  Uniprot ID: Q5RL73
  ENSP ID: ENSP00000265732
MASSGGELGSLFDHHVQRAVCDTRAKYREGRRPRAVKVYTINLESQYLLIQGVPAVGVMKELVERFALYGAIEQYNALDEYPAEDFTEVYLIKFMNLQSARTAKRKMDEQSFFGGLLHVCYAPEFETVEETRKKLQMRKAYVVKTTENKDHYVTKKKLVTEHKDTEDFRQDFHSEMSGFCKAALNTSAGNSNPYLPYSCELPLCYFSSKCMCSSGGPVDRAPDSSKDGRNHHKTMGHYNHNDSLRKTQINSLKNSVACPGAQKAITSSEAVDRFMPRTTQLQERKRRREDDRKLGTFLQTNPTGNEIMIGPLLPDISKVDMHDDSLNTTANLIRHKLKEVISSVPKPPEDKPEDVHTSHPLKQRRRI

SEQ ID NO: 75343 - protein, 91 aa, Homo sapiens
  Payload ID: 14885
  Gene Symbol: RBM48
  Gene Name: RNA binding motif protein 48
  ENSP ID: ENSP00000418333
MKELVERFALYGAIEQYNALDEYPAEDFTEVYLIKFMNLQSARTAKRKMDEQSFFGGLLHVCYAPEFETVEETRKKLQMRKAYVVKTTENK

SEQ ID NO: 75344 - protein, 376 aa, Homo sapiens
  Payload ID: 14885
  Gene Symbol: RBM48
  Gene Name: RNA binding motif protein 48
  Uniprot ID: Q5RL73
  ENSP ID: ENSP00000419242
MASSGGELGSLFDHHVQRAVCDTRAKYREGRRPRAVKVYTINLESQYLLIQGVPAVGVMKELVERFALYGAIEQYNALDEYPAEDFTEVYLIKFMNLQSARTAKRKMDEQSFFGGLLHVCYAPEFETVEETRKKLQMRKAYVVKTTENKDHYVTKKKLVTEHKDTEDFRQDFHSEMSGFCKAALNTSAGNSNPYLPYSCELPLCYFSSKCMCSSGGPVDRAPDSSKDGRNHHKTMGHYNHNDSLRKTQINSLKNSVACPGAQKAITSSEAVDRFMPRTTQLQERKRRREDDRKLGTFLQTNPTGNEIMIGPLLPDISKVDMHDDSLNTTANLIRHKLKEVRLFLKNYSKTRFGYRIKWRIICGNNSTVIFFHFLVF

SEQ ID NO: 75345 - protein, 360 aa, Homo sapiens [sequence omitted]

SEQ ID NO: 75346 - protein, 359 aa, Homo sapiens
  Payload ID: 14886
  Gene Symbol: RBM4B
  Gene Name: RNA binding motif protein 4B
  Uniprot ID: Q9BQ04
  ENSP ID: ENSP00000310471
MVKLFIGNLPREATEQEIRSLFEQYGKVLECDIIKNYGFVHIEDKTAAEDAIRNLHHYKLHGVNINVEASKNKSKASTKLHVGNISPTCTNQELRAKFEEYGPVIECDIVKDYAFVHMERAEDAVEAIRGLDNTEFQGKRMHVQLSTSRLRTAPGMGDQSGCYRCGKEGHWSKECPVDRTGRVADFTEQYNEQYGAVRTPYTMGYGESMYYNDAYGALDYYKRYRVRSYEAVAAAAAASAYNYAEQTMSHLPQVQSTTVTSHLNSTSVDPYDRHLLPNSGAAATSAAMAAAAATTSSYYGRDRSPLRRAAAMLPTVGEGYGYGPESELSQASAATRNSLYDMARYEREQYVDRARYSAF

SEQ ID NO: 75347 - protein, 359 aa, Homo sapiens; identical to SEQ ID NO: 75346
  Payload ID: 14886
  Gene Symbol: RBM4B
  Gene Name: RNA binding motif protein 4B
  Uniprot ID: Q9BQ04
  ENSP ID: ENSP00000433071

SEQ ID NO: 75348 - protein, 147 aa, Homo sapiens
  Payload ID: 14886
  Gene Symbol: RBM4B
  Gene Name: RNA binding motif protein 4B
  ENSP ID: ENSP00000433113
MVKLFIGNLPREATEQEIRSLFEQYGKVLECDIIKNYGFVHIEDKTAAEDAIRNLHHYKLHGVNINVEASKNKSKASTKLHVGNISPTCTNQELRAKFEEYGPVIECDIVKDYAFVHMERAEDAVEAIRGLDNTEFQGWWSTRLPLA

SEQ ID NO: 75349 - protein, 20 aa, Homo sapiens
  Payload ID: 14886
  Gene Symbol: RBM4B
  Gene Name: RNA binding motif protein 4B
  ENSP ID: ENSP00000433601
  MOD_RES (1)..(1): Any amino acid
XDMARYEREQYVDRARYSAF

SEQ ID NO: 75350 - protein, 143 aa, Homo sapiens
  Payload ID: 14886
  Gene Symbol: RBM4B
  Gene Name: RNA binding motif protein 4B
  ENSP ID: ENSP00000435239
MVKLFIGNLPREATEQEIRSLFEQYGKVLECDIIKNYGFVHIEDKTAAEDAIRNLHHYKLHGVNINVEASKNKSKASTKLHVGNISPTCTNQELRAKFEEYGPVIECDIVKDYAFVHMERAEDAVEAIRGLDNTEFQGRIIAD

SEQ ID NO: 75351 - protein, 151 aa, Homo sapiens
  Payload ID: 14886
  Gene Symbol: RBM4B
  Gene Name: RNA binding motif protein 4B
  ENSP ID: ENSP00000475784
MVKLFIGNLPREATEQEIRSLFEQYGKVLECDIIKNYGFVHIEDKTAAEDAIRNLHHYKLHGVNINVEASKNKSKASTKLHVGNISPTCTNQELRAKFEEYGPVIECDIVKDYAFVHMERAEDAVEAIRGLDNTEFQGELLWAWVVAPSGV

SEQ ID NO: 75352 - protein, 815 aa, Homo sapiens
  Payload ID: 14887
  Gene Symbol: RBM5
  Gene Name: RNA binding motif protein 5
  Uniprot ID: P52756
  ENSP ID: ENSP00000343054
MGSDKRVSRTERSGRYGSIIDRDDRDERESRSRRRDSDYKRSSDDRRGDRYDDYRDYDSPERERERRNSDRSEDGYHSDGDYGEHDYRHDISDERESKTIMLRGLPITITESDIREMMESFEGPQPADVRLMKRKTGVSRGFAFVEFYHLQDATSWMEANQKKLVIQGKHIAMHYSNPRPKFEDWLCNKCCLNNFRKRLKCFRCGADKFDSEQEVPPGTTESVQSVDYYCDTIILRNIAPHTVVDSIMTALSPYASLAVNNIRLIKDKQTQQNRGFAFVQLSSAMDASQLLQILQSLHPPLKIDGKTIGVDFAKSARKDLVLSDGNRVSAFSVASTAIAAAQWSSTQSQSGEGGSVDYSYLQPGQDGYAQYAQYSQDYQQFYQQQAGGLESDASSASGTAVTTTSAAVVSQSPQLYNQTSNPPGSPTEEAQPSTSTSTQAPAASPTGVVPGTKYAVPDTSTYQYDESSGYYYDPTTGLYYDPNSQYYYNSLTQQYLYWDGEKETYVPAAESSSHQQSGLPPAKEGKEKKEKPKSKTAQQIAKDMERWAKSLNKQKENFKNSFQPVNSLREEERRESAAADAGFALFEKKGALAERQQLIPELVRNGDEENPLKRGLVAAYSGDSDNEEELVERLESEEEKLADWKKMACLLCRRQFPNKDALVRHQQLSDLHKQNMDIYRRSRLSEQELEALELREREMKYRDRAAERREKYGIPEPPEPKRKKQFDAGTVNYEQPTKDGIDHSNIGNKMLQAMGWREGSGLGRKCQGITAPIEAQVRLKGAGLGAKGSAYGLSGADSYKDAVRKAMFARFTEME

SEQ ID NO: 75353 - protein, 56 aa, Homo sapiens
  Payload ID: 14887
  Gene Symbol: RBM5
  Gene Name: RNA binding motif protein 5
  ENSP ID: ENSP00000378603
RESVKEGTVTDPKMATIQMVTMVSTTIGMTSVTRGRARPSCCAAFPSPSQRAIFEK

SEQ ID NO: 75354 - protein, 138 aa, Homo sapiens
  Payload ID: 14887
  Gene Symbol: RBM5
  Gene Name: RNA binding motif protein 5
  ENSP ID: ENSP00000384872
MGSDKRVSRTERSGRYGSIIDRDDRDERESRSRRRDSDYKRSSDDRRGDRYDDYRDYDSPERERERRNSDRSEDGYHSDGDYDSRNDGVLRRPSACGCEADEEENRCKPWFRLRGVLSLARCYQLDGSQSEKVGDSRK

SEQ ID NO: 75355 - protein, 137 aa, Homo sapiens
  Payload ID: 14887
  Gene Symbol: RBM5
  Gene Name: RNA binding motif protein 5
  ENSP ID: ENSP00000390711
MGSDKRVSRTERSGRYGSIIDRDDRDERESRSRRRDSDYKRSSDDRRGDRYDDYRDYDSPERERERRNSDRSEDGYHSDGDYGEHDYRHDISDERESKTIMLRGLPITITESDIREMMESFEGPQPADVRLMKRKTG

SEQ ID NO: 75356 - protein, 105 aa, Homo sapiens
  Payload ID: 14887
  Gene Symbol: RBM5
  Gene Name: RNA binding motif protein 5
  ENSP ID: ENSP00000394622
MGSDKRVSRTERSGRYGSIIDRDDRDERESRSRRRDSDYKRSSDDRRGDRYDDYRDYDSPERERERRNSDRSEDGYHSDGDYGEHDYRHDISDERESKTIMLRGL

SEQ ID NO: 75357 - protein, 120 aa, Homo sapiens
  Payload ID: 14887
  Gene Symbol: RBM5
  Gene Name: RNA binding motif protein 5
  ENSP ID: ENSP00000406119
MGSDKRVSRTERSGRYGSIIDRDDRDERESRSRRRDSDYKRSSDDRRGDRYDDYRDYDSPERERERRNSDRSEDGYHSDGDYGEHDYRHDISDERESKTIMLRGLPITITESDIREMMES

SEQ ID NO: 75358 - protein, 81 aa, Homo sapiens
  Payload ID: 14887
  Gene Symbol: RBM5
  Gene Name: RNA binding motif protein 5
  ENSP ID: ENSP00000414218
MGSDKRVSRTERSGRYGSIIDRDDRDERESRSRRRDSDYKRSSDDRRGDRYDDYRDYDSPELFSLVTQAGVQWCDLSYSGG

SEQ ID NO: 75359 - protein, 143 aa, Homo sapiens
  Payload ID: 14887
  Gene Symbol: RBM5
  Gene Name: RNA binding motif protein 5
  Uniprot ID: P52756
  ENSP ID: ENSP00000419534
MGSDKRVSRTERSGRYGSIIDRDDRDERESRSRRRDSDYKRSSDDRRGDRYDDYRDYDSPERERERRNSDRSEDGYHSDGDYGEHDYRHDISDERESKTIMLRGLPITITESDIREMMESFEGPQPADVRLMKRKTGESLLSS

SEQ ID NO: 75360 - protein, 1123 aa, Homo sapiens
  Payload ID: 14888
  Gene Symbol: RBM6
  Gene Name: RNA binding motif protein 6
  Uniprot ID: P78332
  ENSP ID: ENSP00000266022
MWGDSRPANRTGPFRGSQEERFAPGWNRDYPPPPLKSHAQERHSGNFPGRDSLPFDFQGHSGPPFANVEEHSFSYGARDGPHGDYRGGEGPGHDFRGGDFSSSDFQSRDSSQLDFRGRDIHSGDFRDREGPPMDYRGGDGTSMDYRGREAPHMNYRDRDAHAVDFRGRDAPPSDFRGRGTYDLDFRGRDGSHADFRGRDLSDLDFRAREQSRSDFRNRDVSDLDFRDKDGTQVDFRGRGSGTTDLDFRDRDTPHSDFRGRHRSRTDQDFRGREMGSCMEFKDREMPPVDPNILDYIQPSTQDREHSGMNVNRREESTHDHTIERPAFGIQKGEFEHSETREGETQGVAFEHESPADFQNSQSPVQDQDKSQLSGREEQSSDAGLFKEEGGLDFLGRQDTDYRSMEYRDVDHRLPGSQMFGYGQSKSFPEGKTARDAQRDLQDQDYRTGPSEEKPSRLIRLSGVPEDATKEEILNAFRTPDGMPVKNLQLKEYNTGYDYGYVCVEFSLLEDAIGCMEANQGTLMIQDKEVTLEYVSSLDFWYCKRCKANIGGHRSSCSFCKNPREVTEAKQELITYPQPQKTSIPAPLEKQPNQPLRPADKEPEPRKREEGQESRLGHQKREAERYLPPSRREGPTFRRDRERESWSGETRQDGESKTIMLKRIYRSTPPEVIVEVLEPYVRLTTANVRIIKNRTGPMGHTYGFIDLDSHAEALRVVKILQNLDPPFSIDGKMVAVNLATGKRRNDSGDHSDHMHYYQGKKYFRDRRGGGRNSDWSSDTNRQGQQSSSDCYIYDSATGYYYDPLAGTYYDPNTQQEVYVPQDPGLPEEEEIKEKKPTSQGKSSSKKEMSKRDGKEKKDRGVTRFQENASEGKAPAEDVFKKPLPPTVKKEESPPPPKVVNPLIGLLGEYGGDSDYEEEEEEEQTPPPQPRTAQPQKREEQTKKENEEDKLTDWNKLACLLCRRQFPNKEVLIKHQQLSDLHKQNLEIHRKIKQSEQELAYLERREREGKFKGRGNDRREKLQSFDSPERKRIKYSRETDSDRKLVDKEDIDTSSKGGCVQQATGWRKGTGLGYGHPGLASSEEAEGRMRGPSVGASGRTSKRQSNETYRDAVRRVMFARYKELD

SEQ ID NO: 75361 - protein, 76 aa, Homo sapiens
  Payload ID: 14888
  Gene Symbol: RBM6
  Gene Name: RNA binding motif protein 6
  ENSP ID: ENSP00000389763
MWGDSRPANRTGPFRGSQEERFAPGWNRDYPPPPLKSHAQERHSGNFPGRDSLPFDFQGHSGPPFANVEEHSFSYG

SEQ ID NO: 75362 - protein, 119 aa, Homo sapiens
  Payload ID: 14888
  Gene Symbol: RBM6
  Gene Name: RNA binding motif protein 6
  ENSP ID: ENSP00000392475
MIAGKSSSLLTLQKGNGLSTPGKLTGSDGVCFFCSDRKLVDKEDIDTSSKGGCVQQATGWRKGTGLGYGHPGLASSEEAEGRMRGPSVGASGRTSKRQSNETYRDAVRRVMFARYKELD

SEQ ID NO: 75363 - protein, 601 aa, Homo sapiens
  Payload ID: 14888
  Gene Symbol: RBM6
  Gene Name: RNA binding motif protein 6
  Uniprot ID: P78332
  ENSP ID: ENSP00000392939
MIQDKEVTLEYVSSLDFWYCKRCKANIGGHRSSCSFCKNPREVTEAKQELITYPQPQKTSIPAPLEKQPNQPLRPADKEPEPRKREEGQESRLGHQKREAERYLPPSRREGPTFRRDRERESWSGETRQDGESKTIMLKRIYRSTPPEVIVEVLEPYVRLTTANVRIIKNRTGPMGHTYGFIDLDSHAEALRVVKILQNLDPPFSIDGKMVAVNLATGKRRNDSGDHSDHMHYYQGKKYFRDRRGGGRNSDWSSDTNRQGQQSSSDCYIYDSATGYYYDPLAGTYYDPNTQQEVYVPQDPGLPEEEEIKEKKPTSQGKSSSKKEMSKRDGKEKKDRGVTRFQENASEGKAPAEDVFKKPLPPTVKKEESPPPPKVVNPLIGLLGEYGGDSDYEEEEEEEQTPPPQPRTAQPQKREEQTKKENEEDKLTDWNKLACLLCRRQFPNKEVLIKHQQLSDLHKQNLEIHRKIKQSEQELAYLERREREGKFKGRGNDRREKLQSFDSPERKRIKYSRETDSDRKLVDKEDIDTSSKGGCVQQATGWRKGTGLGYGHPGLASSEEAEGRMRGPSVGASGRTSKRQSNETYRDAVRRVMFARYKELD

SEQ ID NO: 75364 - protein, 601 aa, Homo sapiens; identical to SEQ ID NO: 75363
  Payload ID: 14888
  Gene Symbol: RBM6
  Gene Name: RNA binding motif protein 6
  Uniprot ID: P78332
  ENSP ID: ENSP00000393530

SEQ ID NO: 75365 - protein, 156 aa, Homo sapiens
  Payload ID: 14888
  Gene Symbol: RBM6
  Gene Name: RNA binding motif protein 6
  ENSP ID: ENSP00000394336
MIQDKEVTLEYVSSLDFWYCKRCKANIGGHRSSCSFCKNPREVTEAKQELITYPQPQKTSIPAPLEKQPNQPLRPADKEPEPRKREEGQESRLGHQKREAERYLPPSRREGPTFRRDRERESWSGETRQDGESKTIMLKRIYRSTPPEVIVEVLEP

SEQ ID NO: 75366 - protein, 35 aa, Homo sapiens
  Payload ID: 14888
  Gene Symbol: RBM6
  Gene Name: RNA binding motif protein 6
  ENSP ID: ENSP00000396410
MWGDSRPANRTGPFRVRQTLVGTDLPVHSARTQEK

SEQ ID NO: 75367 - protein, 991 aa, Homo sapiens
  Payload ID: 14888
  Gene Symbol: RBM6
  Gene Name: RNA binding motif protein 6
  ENSP ID: ENSP00000396466
MDYRGGDGTSMDYRGREAPHMNYRDRDAHAVDFRGRDAPPSDFRGRGTYDLDFRGRDGSHADFRGRDLSDLDFRAREQSRSDFRNRDVSDLDFRDKDGTQVDFRGRGSGTTDLDFRDRDTPHSDFRGRHRSRTDQDFRGREMGSCMEFKDREMPPVDPNILDYIQPSTQDREHSGMNVNRREESTHDHTIERPAFGIQKGEFEHSETREGETQGVAFEHESPADFQNSQSPVQDQDKSQLSGREEQSSDAGLFKEEGGLDFLGRQDTDYRSMEYRDVDHRLPGSQMFGYGQSKSFPEGKTARDAQRDLQDQDYRTGPSEEKPSRLIRLSGVPEDATKEEILNAFRTPDGMPVKNLQLKEYNTGYDYGYVCVEFSLLEDAIGCMEANQGTLMIQDKEVTLEYVSSLDFWYCKRCKANIGGHRSSCSFCKNPREVTEAKQELITYPQPQKTSIPAPLEKQPNQPLRPADKEPEPRKREEGQESRLGHQKREAERYLPPSRREGPTFRRDRERESWSGETRQDGESKTIMLKRIYRSTPPEVIVEVLEPYVRLTTANVRIIKNRTGPMGHTYGFIDLDSHAEALRVVKILQNLDPPFSIDGKMVAVNLATGKRRNDSGDHSDHMHYYQGKKYFRDRRGGGRNSDWSSDTNRQGQQSSSDCYIYDSATGYYYDPLAGTYYDPNTQQEVYVPQDPGLPEEEEIKEKKPTSQGKSSSKKEMSKRDGKEKKDRGVTRFQENASEGKAPAEDVFKKPLPPTVKKEESPPPPKVVNPLIGLLGEYGGDSDYEEEEEEEQTPPPQPRTAQPQKREEQTKKENEEDKLTDWNKLACLLCRRQFPNKEVLIKHQQLSDLHKQNLEIHRKIKQSEQELAYLERREREGKFKGRGNDRREKLQSFDSPERKRIKYSRETDSDRKLVDKEDIDTSSKGGCVQQATGWRKGTGLGYGHPGLASSEEAEGRMRGPSVGASGRTSKRQSNETYRDAVRRVMFARYKELD

SEQ ID NO: 75368 - protein, 199 aa, Homo sapiens
  Payload ID: 14888
  Gene Symbol: RBM6
  Gene Name: RNA binding motif protein 6
  ENSP ID: ENSP00000399942
MIQDKEVTLEYVSSLDFWYCKRCKANIGGHRSSCSFCKNPREVTEAKQELITYPQPQKTSIPAPLEKQPNQPLRPADKEPEPRKREEGQESRLGHQKREAERYLPPSRREGPTFRRDRERESWSGETRQDGESKTIMLKRIYRSTPPEVIVEVLEPYVRLTTANVRIIKNRTGPMGHTYGFIDLDSHACVWFYRKLFVW

SEQ ID NO: 75369 - protein, 120 aa, Homo sapiens
  Payload ID: 14888
  Gene Symbol: RBM6
  Gene Name: RNA binding motif protein 6
  ENSP ID: ENSP00000403865
MHYYQGKKYFRDRRGGGRNSDWSSDTNRQGQQSSSDCYIYDSATGYYYDPLAGTYYDPNTQQEVYVPQDPGLPEEEEIKEKKPTSQGKSSSKKEMSKRDGKEKKDRGVTRFQENASEGKA

SEQ ID NO: 75370 - protein, 697 aa, Homo sapiens
  Payload ID: 14888
  Gene Symbol: RBM6
  Gene Name: RNA binding motif protein 6
  ENSP ID: ENSP00000406548
MDYRGGDGTSMDYRGREAPHMNYRDRDAHAVDFRGRDAPPSDFRGRGTYDLDFRGRDGSHADFRGRDLSDLDFRAREQSRSDFRNRDVSDLDFRDKDGTQVDFRGRGSGTTDLDFRDRDTPHSDFRGRHRSRTDQDFRGREMGSCMEFKDREMPPVDPNILDYIQPSTQDREHSGMNVNRREESTHDHTIERPAFGIQKGEFEHSETREGETQGVAFEHESPADFQNSQSPVQDQDKSQLSGREEQSSDAGLFKEEGGLDFLGRQDTDYRSMEYRDVDHRLPGSQMFGYGQSKSFPEGKTARDAQRDLQDQDYRTGPSEEKPSRLIRLSGVPEDATKEEILNAFRTPDGMPVKNLQLKEYNTGYDYGYVCVEFSLLEDAIGCMEANQGTLMIQDKEVTLEYVSSLDFWYCKRCKANIGGHRSSCSFCKNPREVTEAKQELITYPQPQKTSIPAPLEKQPNQPLRPADKEPEPRKREEGQESRLGHQKREAERYLPPSRREGPTFRRDRERESWSGETRQDGESKTIMLKRIYRSTPPEVIVEVLEPYVRLTTANVRIIKNRTGPMGHTYGFIDLDSHAEALRVVKILQNLDPPFSIDGKMVAVNLATGKRRNDSGDHSDHMHYYQGKKYFRDRRGGGRNSDWSSDTNRQGQQSSSDCYIYDSATGYYYDPLAGTYYDPNTQVSLGLFFFFFFFYLCQ

SEQ ID NO: 75371 - protein, 520 aa, Homo sapiens
  Payload ID: 14888
  Gene Symbol: RBM6
  Gene Name: RNA binding motif protein 6
  Uniprot ID: P78332
  ENSP ID: ENSP00000408665
MWGDSRPANRTGPFRGSQEERFAPGWNRDYPPPPLKSHAQERHSGNFPGRDSLPFDFQGHSGPPFANVEEHSFSYGARDGPHGDYRGGEGPGHDFRGGDFSSSDFQSRDSSQLDFRGRDIHSGDFRDREGPPMDYRGGDGTSMDYRGREAPHMNYRDRDAHAVDFRGRDAPPSDFRGRGTYDLDFRGRDGSHADFRGRDLSDLDFRAREQSRSDFRNRDVSDLDFRDKDGTQVDFRGRGSGTTDLDFRDRDTPHSDFRGRHRSRTDQDFRGREMGSCMEFKDREMPPVDPNILDYIQPSTQDREHSGMNVNRREESTHDHTIERPAFGIQKGEFEHSETREGETQGVAFEHESPADFQNSQSPVQDQDKSQLSGREEQSSDAGLFKEEGGLDFLGRQDTDYRSMEYRDVDHRLPGSQMFGYGQSKSFPEGKTARDAQRDLQDQDYRTGPSEEKPSRLIRLSGVPEDATKEEILNAFRTPDGMPVKNLQLKEYNTGNSNDPGQRSYPGVCIKPGFLVLQTM

SEQ ID NO: 75372 - protein, 267 aa, Homo sapiens
  Payload ID: 14889
  Gene Symbol: RBM7
  Gene Name: RNA binding motif protein 7
  ENSP ID: ENSP00000364639
MGAAAAEADRTLFVGNLETKVTEELLFELFHQAGPVIKVKIPKDKDGKPKQFAFVNFKHEVSVPYAMNLLNGIKLYGRPIKIQFRSGSSHAPQDVSLSYPQHHVGNSSPTSTSPSSRYERTMDNMTSSAQIIQRSFSSPENFQRQAVMNSALRQMSYGGKFGSSPLDQSGFSPSVQSHSHSFNQSSSSQWRQGTPSSQRKVRMNSYPYLADRHYSREQRYTDHGSDHHYRGKRDDFFYEDRNHDDWSHDYDNRRDSSRDGKWRSSRH

SEQ ID NO: 75373 - protein, 70 aa, Homo sapiens
  Payload ID: 14889
  Gene Symbol: RBM7
  Gene Name: RNA binding motif protein 7
  ENSP ID: ENSP00000437847
MGAAAAEADRTLFVGNLETKVTEELLFELFHQEVVMPHKMSVCHIPNIMLEIQALPPHLLAAGTKGLWIT

SEQ ID NO: 75374 - protein, 123 aa, Homo sapiens
  Payload ID: 14889
  Gene Symbol: RBM7
  Gene Name: RNA binding motif protein 7
  ENSP ID: ENSP00000437998
MGAAAAEADRTLFVGNLETKVTEELLFELFHQAGPVIKVKIPKDKDGKPKQFAFVNFKHEVSVPYAMNLLNGIKLYGRPIKIQFRSVVMPHKMSVCHIPNIMLEIQALPPHLLAAGTKGLWIT

SEQ ID NO: 75375 - protein, 266 aa, Homo sapiens
  Payload ID: 14889
  Gene Symbol: RBM7
  Gene Name: RNA binding motif protein 7
  Uniprot ID: Q9Y580
  ENSP ID: ENSP00000439918
MGAAAAEADRTLFVGNLETKVTEELLFELFHQAGPVIKVKIPKDKDGKPKQFAFVNFKHEVSVPYAMNLLNGIKLYGRPIKIQFRSGSSHAPQDVSLSYPQHHVGNSSPTSTSPSRYERTMDNMTSSAQIIQRSFSSPENFQRQAVMNSALRQMSYGGKFGSSPLDQSGFSPSVQSHSHSFNQSSSSQWRQGTPSSQRKVRMNSYPYLADRHYSREQRYTDHGSDHHYRGKRDDFFYEDRNHDDWSHDYDNRRDSSRDGKWRSSRH

SEQ ID NO: 75376 - protein, 220 aa, Homo sapiens
  Payload ID: 14889
  Gene Symbol: RBM7
  Gene Name: RNA binding motif protein 7
  ENSP ID: ENSP00000440923
MGAAAAEADRTLFVGNLETKVTEELLFELFHQAGPVIKVKIPKDKDGKPKQFAFVNFKHEVSVPYAMNLLNGIKLYGRPIKIQFRSGSSHAPQDVSLSYPQHHVGNSSPTSTSPSRYERTMDNMTSSAQIIQRSFSSPENFQRQAVVVSSNLYTDQLSHEYGRKPAGLREFSPCATYRFSVLCTGHSSCLCFAGLSAVSSELSEFARLCLPCPPTPHNAA

SEQ ID NO: 75377 - protein, 149 aa, Homo sapiens
  Payload ID: 14889
  Gene Symbol: RBM7
  Gene Name: RNA binding motif protein 7
  ENSP ID: ENSP00000440949
MGAAAAEADRTLFVGNLETKVTEELLFELFHQAGPVIKVKIPKDKDGKPKQFAFVNFKHEVSVPYAMNLLNGIKLYGRPIKIQFRSGSSHAPQDVSLSYPQHHVGNSSPTSTSPSSRYERTMDNMTSSAQIIQRSFSSPENFQRQAVVG

SEQ ID NO: 75378 - protein, 146 aa, Homo sapiens
  Payload ID: 14889
  Gene Symbol: RBM7
  Gene Name: RNA binding motif protein 7
  ENSP ID: ENSP00000445848
MDNMTSSAQIIQRSFSSPENFQRQAVMNSALRQMSYGGKFGSSPLDQSGFSPSVQSHSHSFNQSSSSQWRQGTPSSQRKVRMNSYPYLADRHYSREQRYTDHGSDHHYRGKRDDFFYEDRNHDDWSHDYDNRRDSSRDGKWRSSRH

SEQ ID NO: 75379 - protein, 146 aa, Homo sapiens; identical to SEQ ID NO: 75378
  Payload ID: 14889
  Gene Symbol: RBM7
  Gene Name: RNA binding motif protein 7
  ENSP ID: ENSP00000485655

SEQ ID NO: 75380 - protein, 173 aa, Homo sapiens
  Payload ID: 14890
  Gene Symbol: RBM8A
  Gene Name: RNA binding motif protein 8A
  Uniprot ID: Q9Y5S9
  ENSP ID: ENSP00000358313
MADVLDLHEAGGEDFAMDEDGDESIHKLKEKAKKRKGRGFGSEGSRARMREDYDSVEQDGDEPGPQRSVEGWILFVTGVHEEATEEDIHDKFAEYGEIKNIHLNLDRRTGYLKGYTLVEYETYKEAQAAMEGLNGQDLMGQPISVDWCFVRGPPKGKRRGGRRRSRSPDRRRR

SEQ ID NO: 75381 - protein, 174 aa, Homo sapiens
  Payload ID: 14890
  Gene Symbol: RBM8A
  Gene Name: RNA binding motif protein 8A
  Uniprot ID: Q9Y5S9
  ENSP ID: ENSP00000463058
MADVLDLHEAGGEDFAMDEDGDESIHKLKEKAKKRKGRGFGSEEGSRARMREDYDSVEQDGDEPGPQRSVEGWILFVTGVHEEATEEDIHDKFAEYGEIKNIHLNLDRRTGYLKGYTLVEYETYKEAQAAMEGLNGQDLMGQPISVDWCFVRGPPKGKRRGGRRRSRSPDRRRR

SEQ ID NO: 75382 - protein, 106 aa, Homo sapiens
  Payload ID: 14890
  Gene Symbol: RBM8A
  Gene Name: RNA binding motif protein 8A
  ENSP ID: ENSP00000487764
  MOD_RES (1)..(1): Any amino acid
XVEGWILFVTGVHEEATEEDIHDKFAEYGEIKNIHLNLDRRTGYLKGYTLVEYETYKEAQAAMEGLNGQDLMGQPISVDWCFVRGPPKGKRRGGRRRSRSPDRRRR

SEQ ID NO: 75383 - protein, 174 aa, Homo sapiens; identical to SEQ ID NO: 75381
  Payload ID: 14890
  Gene Symbol: RBM8A
  Gene Name: RNA binding motif protein 8A
  Uniprot ID: Q9Y5S9
  ENSP ID: ENSP00000488265

SEQ ID NO: 75384 - protein, 106 aa, Homo sapiens; identical to SEQ ID NO: 75382
  Payload ID: 14890
  Gene Symbol: RBM8A
  Gene Name: RNA binding motif protein 8A
  ENSP ID: ENSP00000488887
  MOD_RES (1)..(1): Any amino acid

SEQ ID NO: 75385 - protein, 391 aa, Homo sapiens
  Payload ID: 14891
  Gene Symbol: RBMX
  Gene Name: RNA binding motif protein, X-linked
  Uniprot ID: P38159
  ENSP ID: ENSP00000359645
MVEADRPGKLFIGGLNTETNEKALEAVFGKYGRIVEVLLMKDRETNKSRGFAFVTFESPADAKDAARDMNGKSLDGKAIKVEQATKPSFESGRRGPPPPPRSRGPPRGLRGGRGGSGGTRGPPSRGGHMDDGGYSMNFNMSSSRGPLPVKRGPPPRSGGPPPKRSAPSGPVRSSSGMGGRAPVSRGRDSYGGPPRREPLPSRRDVYLSPRDDGYSTKDSYSSRDYPSSRDTRDYAPPPRDYTYRDYGHSSSRDDYPSRGYSDRDGYGRDRDYSDHPSGGSYRDSYESYGNSRSAPPTRGPPPSYGGSSRYDDYSSSRDGYGGSRDSYSSSRSDLYSSGRDRVGRQERGLPPSMERGYPPPRDSYSSSSRGAPRGGGRGGSRSDRGGGRSRY

SEQ ID NO: 75386 - protein, 292 aa, Homo sapiens
  Payload ID: 14891
  Gene Symbol: RBMX
  Gene Name: RNA binding motif protein, X-linked
  ENSP ID: ENSP00000405117
  MOD_RES (1)..(1): Any amino acid
XNMVEADRPGKLFIGGLNTETNEKALEAVFGKYGRIVEVLLMKDRETNKSRGFAFVTFESPADAKDAARDMNGKSLDGKAIKVEQATKPSFESGRRGPPPPPRSRGPPRGLRGGRGGSGGTRGPPSRGGHMDDGGYSMNFNMSSSRGPLPVKRGPPPRSGGPPPKRSAPSGPVRSSSGMGGRAPVSRGRDSYGGPPRREPLPSRRDVYLSPRDDGYSTKDSYSSRDYPSSRDTRDYAPPPRDYTYRDYGHSSSRDDYPSRGYSDRDGYGRDRDYSDHPSGGSYRDSYESYGW

SEQ ID NO: 75387 - protein, 196 aa, Homo sapiens
  Payload ID: 14891
  Gene Symbol: RBMX
  Gene Name: RNA binding motif protein, X-linked
  Uniprot ID: P38159
  ENSP ID: ENSP00000411989
MVEADRPGKLFIGGLNTETNEKALEAVFGKYGRIVEVLLMKDRETNKSRGFAFVTFESPADAKDAARDMNGKLLYHVEEIVMEVHLEGNRCPLVEMFICPQEMMGILLKTAIQAEITQVLVILEIMHHHHEIILTVIMVIPVHVMTIHQEDIAIEMDMVVIVTIQIIQVEVPTEIHMRVMVGDFAHYGRGVLIDSQ

SEQ ID NO: 75388 - protein, 37 aa, Homo sapiens
  Payload ID: 14891
  Gene Symbol: RBMX
  Gene Name: RNA binding motif protein, X-linked
  ENSP ID: ENSP00000454777
MVEADRPGKLFIGGLNTETNEKALEAVFGKYGRIVEG

SEQ ID NO: 75389 - protein, 78 aa, Homo sapiens
  Payload ID: 14891
  Gene Symbol: RBMX
  Gene Name: RNA binding motif protein, X-linked
  ENSP ID: ENSP00000456048
MVEADRPGKLFIGGLNTETNEKALEAVFGKYGRIVEVLLMKDRETNKSRGFAFVTFESPADAKDAARDMNGKMTVDIP

SEQ ID NO: 75390 - protein, 296 aa, Homo sapiens
  Payload ID: 14891
  Gene Symbol: RBMX
  Gene Name: RNA binding motif protein, X-linked
  ENSP ID: ENSP00000457051
MVEADRPGKLFIGGLNTETNEKALEAVFGKYGRIVEVLLMKDRETNKSRGFAFVTFESPADAKDAARDMNGKSLDGKAIKVEQATKPSFESGRRGPPPPPRSRGPPRGLRGGRGGSGGTRGPPSRGGHMDDGGYSMNFNMSSSRGPLPVKRGPPPRSGGPPPKRSAPSGPVRSSSGMGGRAPVSRGRDSYGGPPRREPLPSRRDVYLSPRDDGYSTKDSYSSRDYPSSRDTRDYAPPPRDYTYRDYGHSSSRDDYPSRGYSDRDGYGRDRDYSDHPSGGSYRDSYESYGKILVKGL

SEQ ID NO: 75391 - protein, 78 aa, Homo sapiens; identical to SEQ ID NO: 75389
  Payload ID: 14891
  Gene Symbol: RBMX
  Gene Name: RNA binding motif protein, X-linked
  ENSP ID: ENSP00000457691

SEQ ID NO: 75392 - protein, 263 aa, Homo sapiens
  Payload ID: 14891
  Gene Symbol: RBMX
  Gene Name: RNA binding motif protein, X-linked
  ENSP ID: ENSP00000457866
MDDGGYSMNFNMSSSRGPLPVKRGPPPRSGGPPPKRSAPSGPVRSSSGMGGRAPVSRGRDSYGGPPRREPLPSRRDVYLSPRDDGYSTKDSYSSRDYPSSRDTRDYAPPPRDYTYRDYGHSSSRDDYPSRGYSDRDGYGRDRDYSDHPSGGSYRDSYESYGNSRSAPPTRGPPPSYGGSSRYDDYSSSRDGYGGSRDSYSSSRSDLYSSGRDRVGRQERGLPPSMERGYPPPRDSYSSSSRGAPRGGGRGGSRSDRGGGRSRY

SEQ ID NO: 75393 - protein, 322 aa, Homo sapiens
  Payload ID: 14892
  Gene Symbol: RBMX2
  Gene Name: RNA binding motif protein, X-linked 2
  Uniprot ID: Q9Y388
  ENSP ID: ENSP00000339090
MNPLTKVKLINELNEREVQLGVADKVSWHSEYKDSAWIFLGGLPYELTEGDIICVFSQYGEIVNINLVRDKKTGKSKGFCFLCYEDQRSTILAVDNFNGIKIKGRTIRVDHVSNYRAPKDSEEIDDVTRQLQEKGCGARTPSPSLSESSEDEKPTKKHKKDKKEKKKKKKEKEKADREVQAEQPSSSSPRRKTVKEKDDTGPKKHSSKNSERAQKSEPREGQKLPKSRTAYSGGAEDLERELKKEKPKHEHKSSSRREAREEKTRIRDRGRSSDAHSSWYNGRSEGRSYRSRSRSRDKSHRHKRARRSRERESSNPSDRWRH

SEQ ID NO: 75394 - protein, 58 aa, Homo sapiens
  Payload ID: 14892
  Gene Symbol: RBMX2
  Gene Name: RNA binding motif protein, X-linked 2
  ENSP ID: ENSP00000359985
MNPLTKVKLINELNEREVQLGVADKVSWHSEYKDSAWIFLGGLPYELTEGDIICVFSQ

SEQ ID NO: 75395 - protein, 275 aa, Homo sapiens
  Payload ID: 14892
  Gene Symbol: RBMX2
  Gene Name: RNA binding motif protein, X-linked 2
  ENSP ID: ENSP00000478689
MNPLTKVKLINELNEREVQLGVADKVSWHSEYKDSAWIFLGGLPYELTEGDIICVFSQYGEIVNINLVRDKKTGKSKGFCFLCYEDQRSTILAVDNFNGIKIKGRTIRVDHVSNYRAPKDSEEIDDVTRQLQEKGCGARTPSPSLSESSEDEKPTKKHKKDKKEKKKKKKEKEKADREVQAEQPSSSSPRRKTVKEKDDTGPKKHSSKNSERAQKSEPREGQKLPKSRTAYSGGAEDLERELKKEKPKHEHKSSSRREAREEKTRIRDRGLRCTF

SEQ ID NO: 75396 - protein, 390 aa, Homo sapiens
  Payload ID: 14893
  Gene Symbol: RBMXL1
  Gene Name: RNA binding motif protein, X-linked-like 1
  Uniprot ID: Q96E39
  ENSP ID: ENSP00000318415
MVEADRPGKLFIGGLNTETNEKALETVFGKYGRIVEVLLIKDRETNKSRGFAFVTFESPADAKDAARDMNGKSLDGKAIKVEQATKPSFERGRHGPPPPPRSRGPPRGFGAGRGGSGGTRGPPSRGGHMDDGGYSMNFNMSSSRGPLPVKRGPPPRSGGPSPKRSAPSGLVRSSSGMGGRAPLSRGRDSYGGPPRREPLPSRRDVYLSPRDDGYSTKDSYSSRDYPSSRDTRDYAPPPRDYTYRDYGHSSSRDDYPSRGYGDRDGYGRDRDYSDHPSGGSYRDSYESYGNSRSAPLTRGPPPSYGGSSRYDDYSSSRDGYGGSRDSYSSSRSDLYSSCDRVGRQERGLPPSVERGYPSSRDSYSSSSRGAPRGAGPGGSRSDRGGGRSRY

SEQ ID NO: 75397 - protein, 390 aa, Homo sapiens; identical to SEQ ID NO: 75396
  Payload ID: 14893
  Gene Symbol: RBMXL1
  Gene Name: RNA binding motif protein, X-linked-like 1
  Uniprot ID: Q96E39
  ENSP ID: ENSP00000446099

SEQ ID NO: 75398 - protein, 392 aa, Homo sapiens
  Payload ID: 14894
  Gene Symbol: RBMXL2
  Gene Name: RNA binding motif protein, X-linked-like 2
  Uniprot ID: O75526
  ENSP ID: ENSP00000304139
MVEADRPGKLFIGGLNLETDEKALEAEFGKYGRIVEVLLMKDRETNKSRGFAFVTFESPADAKAAARDMNGKSLDGKAIKVAQATKPAFESSRRGPPPPRSRGRPRFLRGTRGGGGGPRRSPSRGGPDDDGGYTADFDLRPSRAPMPMKRGPPPRRVGPPPKRAAPSGPARSSGGGMRGRALAVRGRDGYSGPPRREPLPPRRDPYLGPRDEGYSSRDGYSSRDYREPRGFAPSPGEYTHRDYGHSSVRDDCPLRGYSDRDGYGGRDRDYGDHLSRGSHREPFESYGELRGAAPGRGTPPSYGGGGRYEEYRGYSPDAYSGGRDSYSSSYGRSDRYSRGRHRVGRPDRGLSLSMERGCPPQRDSYSRSGCRVPRGGGRLGGRLERGGGRSRY

SEQ ID NO: 75399 - protein, 1067 aa, Homo sapiens
  Payload ID: 14895
  Gene Symbol: RBMXL3
  Gene Name: RNA binding motif protein, X-linked-like 3
  Uniprot ID: Q8N7X1
  ENSP ID: ENSP00000417451
MMEADRPEKLFIGGLNLKTDEKALKAEFGKYGHIIKVFLMKDRKTNKSRGFAFVTFESPADAKAAARDMNGKYLDGKAIMVAQTIKPAFKSSRWVPPTPGSGSRSRFSHRTRGGGSSPQRPPSQGRPDDGRGYAGYFDLWPYRAPMPRKRGPPPRHWASPPHKRATPSSLAHSVGCGMRGKAPTVSGQDGYSGLQPRRWAGPPHKRAVPRSSLARIGGSGMPGKAPAVWGQDGYSGPRVREPLPPCRDPGDFVPALRDYSRRYYGHSSVPDYRPLRGDGNQNGYRGRDHEYTDHPSKGSYREPLKSYGGPCGAAPVWGTPPSYGGGCRYEEYQGNSPDACSEGRSSEALPVVLPDAYSRDHSPKAYSGGRSSSSNGYSRSDRYGEEGCYEEYRGRSPDAHSGGRNSSSNSYGQSHHYGGEGRYEEYRGRSHEARSGGRSTDAHSRGRSDDAYSGGHDSSSWSDCCGGGGRYEEYQGRSLDANSGGCSPEAYSGGHDNSSWSDRYGVGGHYEENRGHSLDANSGGRSPDTHSGGHSSSSNSYGQSHRYGGEGRYEYRGRSHDAHSGGCSADAYSGGHDSSSQSNRYGGGGCYEEYRGRSLDANSGGRSPNAYSGGHDSSSWSHRYGGGGRYEEYRGRSLDANSGGRSPDAYSGGHDSSGQSNCYGGGGRYEEYRGRLLDANSGGRSPDAYSGGHDSSSQSNRYGGGGRYEEYRGHSLDANSGGRSPDTYSRGHDSSSQSDHYGGGGRSLDANSSGRLPDAYSGGHDSSSRSHRYGGGGRYEEYRGRSLDANSGGRSPNAYSGGHNSSSRNDPCRGGGRYEENRGHSLDANSGGHSPNAYSGGRDSSSNSYDRSHRYGGGGHYEEYRGRSHDTHSRGRSPDAHSGDHYTEAYSRGRDSFSNSYGRSDHYGRGGCYEEYQGRSPNAYGGGRGLNSSNNSHGRSHRYGGGGRYEEYRGPSPDAHSGGRDSSIKSYGLSDRYGGGGHYEEYQGSLPDAYSGDHDRSSNSYGRSDRYSRGRDRVGRPDRGLPLPMETGSPPLHDSYSRSGCRVPRGGGRQGGRFERGEGRSRY

SEQ ID NO: 75400 - protein, 459 aa, Homo sapiens
  Payload ID: 14896
  Gene Symbol: RBMY1A1
  Gene Name: RNA binding motif protein, Y-linked, family 1, member A1
  Uniprot ID: P0DJD3
  ENSP ID: ENSP00000303712
MVEADHPGKLFIGGLNRETNEKMLKAVFGKHGPISEVLLIKDRTSKSRGFAFITFENPADAKNAAKDMNGKSLHGKAIKVEQAKKPSFQSGGRRRPPASSRNRSPSGSLRSARGSRGGTRGWLPSHEGHLDDGGYTPDLKMSYSRGLIPVKRGPSSRSGGPPPKKSAPSAVARSNSWMGSQGPMSQRRENYGVPPRRATISSWRNDRMSTRHDGYATNDGNHPSCQETRDYAPPSRGYAYRDNGHSNRDEHSSRGYRNHRSSRETRDYAPPSRGHAYRDYGHSRRDESYSRGYRNRRSSRETREYAPPSRGHGYRDYGHSRRHESYSRGYSYHDGYGEALGRDHSEHLSGSSYRDALQRYGTSHGAPPARGPRMSYGGSTCHAYSNTRDRYGRSWESYSSCGDFHYCDREHVCRKDQRNPPSLGRVLPDPREACGSSSYVASIVDGGESRSEKGDSSRY

SEQ ID NO: 75401 - protein, 81 aa, Homo sapiens
  Payload ID: 14896
  Gene Symbol: RBMY1A1
  Gene Name: RNA binding motif protein, Y-linked, family 1, member A1
  ENSP ID: ENSP00000354329
MVEADHPGKLFIGGLNRETNEKMLKAVFGKHGPISEVLLIKDRTSKSRGFAFITFENPADAKNAAKDMNGKMMVDTLLISR

SEQ ID NO: 75402 - protein, 496 aa, Homo sapiens
  Payload ID: 14896
  Gene Symbol: RBMY1A1
  Gene Name: RNA binding motif protein, Y-linked, family 1, member A1
  Uniprot ID: P0DJD3
  ENSP ID: ENSP00000372154
MVEADHPGKLFIGGLNRETNEKMLKAVFGKHGPISEVLLIKDRTSKSRGFAFITFENPADAKNAAKDMNGKSLHGKAIKVEQAKKPSFQSGGRRRPPASSRNRSPSGSLRSARGSRGGTRGWLPSHEGHLDDGGYTPDLKMSYSRGLIPVKRGPSSRSGGPPPKKSAPSAVARSNSWMGSQGPMSQRRENYGVPPRRATISSWRNDRMSTRHDGYATNDGNHPSCQETRDYAPPSRGYAYRDNGHSNRDEHSSRGYRNHRSSRETRDYAPPSRGHAYRDYGHSRRDESYSRGYRNRRSSRETREYAPPSRGHGYRDYGHSRRHESYSRGYRNHPSSRETRDYAPPHRDYAYRDYGHSSWDEHSSRGYSYHDGYGEALGRDHSEHLSGSSYRDALQRYGTSHGAPPARGPRMSYGGSTCHAYSNTRDRYGRSWESYSSCGDFHYCDREHVCRKDQRNPPSLGRVLPDPREACGSSSYVASIVDGGESRSEKGDSSRY

SEQ ID NO: 75403 - protein, 496 aa, Homo sapiens; identical to SEQ ID NO: 75402
  Payload ID: 14896
  Gene Symbol: RBMY1A1
  Gene Name: RNA binding motif protein, Y-linked, family 1, member A1
  Uniprot ID: P0DJD3
  ENSP ID: ENSP00000388006

SEQ ID NO: 75404 - protein, 81 aa, Homo sapiens; identical to SEQ ID NO: 75401
  Payload ID: 14897
  Gene Symbol: RBMY1B
  Gene Name: RNA binding motif protein, Y-linked, family 1, member B
  ENSP ID: ENSP00000372084

SEQ ID NO: 75405 - protein, 496 aa, Homo sapiens
  Payload ID: 14897
  Gene Symbol: RBMY1B
  Gene Name: RNA binding motif protein, Y-linked, family 1, member B
  Uniprot ID: A6NDE4
  ENSP ID: ENSP00000372484
MVEADHPGKLFIGGLNRETNEKMLKAVFGKHGPISEVLLIKDRTSKSRGFAFITFENPADAKNAAKDMNGKSLHGKAIKVEQAKKPSFQSGGRRRPPASSRNRSPSGSLRSARGSRGGTRGWLPSQEGHLDDGGYTPDLKMSYSRGLIPVKRGPSSRSGGPPPKKSAPSAVARSNSWMGSQGPMSQRRENYGVPPRRATISSWRNDRMSTRHDGYATNDGNHPSCQETRDYAPPSRGYAYRDNGHSNRDEHSSRGYRNHRSSRETRDYAPPSRGHAYRDYGHSRRDESYSRGYRNRRSSRETREYAPPSRGHGYRDYGHSRRHESYSRGYRNHPSSRETRDYAPPHRDYAYRDYGHSSWDEHSSRGYSYHDGYGEALGRDHSEHLSGSSYRDALQRYGTSHGAPPARGPRMSYGGSTCHAYSNTRDRYGRSWESYSSCGDFHYCDREHVCRKDQRNPPSLGRVLPDPREAYGSSSYVASIVDGGESRSEKGDSSRY

SEQ ID NO: 75406 - protein, 459 aa, Homo sapiens
  Payload ID: 14897
  Gene Symbol: RBMY1B
  Gene Name: RNA binding motif protein, Y-linked, family 1, member B
  ENSP ID: ENSP00000481627
MVEADHPGKLFIGGLNRETNEKMLKAVFGKHGPISEVLLIKDRTSKSRGFAFITFENPADAKNAAKDMNGKSLHGKAIKVEQAKKPSFQSGGRRRPPASSRNRSPSGSLRSARGSRGGTRGWLPSQEGHLDDGGYTPDLKMSYSRGLIPVKRGPSSRSGGPPPKKSAPSAVARSNSWMGSQGPMSQRRENYGVPPRRATISSWRNDRMSTRHDGYATNDGNHPSCQETRDYAPPSRGYAYRDNGHSNRDEHSSRGYRNHRSSRETRDYAPPSRGHAYRDYGHSRRDESYSRGYRNRRSSRETREYAPPSRGHGYRDYGHSRRHESYSRGYSYHDGYGEALGRDHSEHLSGSSYRDALQRYGTSHGAPPARGPRMSYGGSTCHAYSNTRDRYGRSWESYSSCGDFHYCDREHVCRKDQRNPPSLGRVLPDPREACGSSSYVASIVDGGESRSEKGDSSRY

SEQ ID NO: 75407 - protein, 81 aa, Homo sapiens; identical to SEQ ID NO: 75401
  Payload ID: 14898
  Gene Symbol: RBMY1D
  Gene Name: RNA binding motif protein, Y-linked, family 1, member D
  ENSP ID: ENSP00000372099

SEQ ID NO: 75408 - protein, 496 aa, Homo sapiens
  Payload ID: 14898
  Gene Symbol: RBMY1D
  Gene Name: RNA binding motif protein, Y-linked, family 1, member D
  Uniprot ID: P0C7P1
  ENSP ID: ENSP00000372127
MVEADHPGKLFIGGLNRETNEKMLKAVFGKHGPISEVLLIKDRTSKSRGFAFITFENPADAKNAAKDMNGKSLHGKAIKVEQAKKPSFQSGGRRRPPASSRNRSPSGSLRSARGSRGGTRGWLPSQEGHLDDGGYTPDLKMSYSRGLIPVKRGPSSRSGGPPPKKSAPSAVARSNSWMGSQGPMSQRRENYGVPPRRATISSWRNDRMSTRHDGYATNDGNHPSCQETRDYAPPSRGYAYRDNGHSNRDEHSSRGYRNHRSSRETRDYAPPSRGHAYRDYGHSRRDESYSRGYRNRRSSRETREYAPPSRGHGYRDYGHSRRHESYSRGYRNHPSSRETRDYAPPHRDYAYRDYGHSSWDEHSSRGYSYHDGYGEALGRDHSEHLSGSSYRDALQRYGTSHGAPPARGPRMSYGGSTCHAYSNTRDRYGRSWESYSSCGDFHYCDREHVCRKDQRNPPSLGRVLPDPREACGSSSYVASIVDGGESRSEKGDSSRY

SEQ ID NO: 75409 - protein, 459 aa, Homo sapiens; identical to SEQ ID NO: 75406
  Payload ID: 14898
  Gene Symbol: RBMY1D
  Gene Name: RNA binding motif protein, Y-linked, family 1, member D
  Uniprot ID: P0C7P1
  ENSP ID: ENSP00000399181

SEQ ID NO: 75410 - protein, 81 aa, Homo sapiens; identical to SEQ ID NO: 75401
  Payload ID: 14899
  Gene Symbol: RBMY1E
  Gene Name: RNA binding motif protein, Y-linked, family 1, member E
  ENSP ID: ENSP00000351823

SEQ ID NO: 75411 - protein, 459 aa, Homo sapiens
  Payload ID: 14899
  Gene Symbol: RBMY1E
  Gene Name: RNA binding motif protein, Y-linked, family 1, member E
  ENSP ID: ENSP00000372104
MVEADHPGKLFIGGLNRETNEKMLKAVFGKHGPISEVLLIKDRTSKSRGFAFITFENPADAKNAAKDMNGKSLHGKAIKVEQAKKPSFQSGGRRRPPASSRNRSPSGSLRSARGSRGGTRGWLPSQEGHLDDGGYTPDLKMSYSRGLIPVKRGPSSRSGGPPPKKSAPSAVARSNSWMGSQGPMSQRRENYGVPPRRATISSWRNDRMSTRHDGYATNDGNHPSCQETRDYAPPSRGYAYRDNGHSNRDEHSSRGYRNHRSSRETRDYAPPSRGHAYRDYGHSRRDESYSRGYRNRRSSRETREYAPPSRGHGYRDYGHSRRHESYSRGYSYHDGYGEALGRDHSEHLSGSSYRDALQRYGTAHGAPPARGPRMSYGGSTCHAYSNTRDRYGRSWESYSSCGDFHYCDREHVCRKDQRNPPSLGRVLPDPREACGSSSYVASIVDGGESRSEKGDSSRY

SEQ ID NO: 75412 - protein, 496 aa, Homo sapiens
  Payload ID: 14899
  Gene Symbol: RBMY1E
  Gene Name: RNA binding motif protein, Y-linked, family 1, member E
  Uniprot ID: A6NEQ0
  ENSP ID: ENSP00000372105
MVEADHPGKLFIGGLNRETNEKMLKAVFGKHGPISEVLLIKDRTSKSRGFAFITFENPADAKNAAKDMNGKSLHGKAIKVEQAKKPSFQSGGRRRPPASSRNRSPSGSLRSARGSRGGTRGWLPSQEGHLDDGGYTPDLKMSYSRGLIPVKRGPSSRSGGPPPKKSAPSAVARSNSWMGSQGPMSQRRENYGVPPRRATISSWRNDRMSTRHDGYATNDGNHPSCQETRDYAPPSRGYAYRDNGHSNRDEHSSRGYRNHRSSRETRDYAPPSRGHAYRDYGHSRRDESYSRGYRNRRSSRETREYAPPSRGHGYRDYGHSRRHESYSRGYRNHPSSRETRDYAPPHRDYAYRDYGHSSWDEHSSRGYSYHDGYGEALGRDHSEHLSGSSYRDALQRYGTAHGAPPARGPRMSYGGSTCHAYSNTRDRYGRSWESYSSCGDFHYCDREHVCRKDQRNPPSLGRVLPDPREACGSSSYVASIVDGGESRSEKGDSSRY

SEQ ID NO: 75413 - protein, 496 aa, Homo sapiens; identical to SEQ ID NO: 75408
  Payload ID: 14899
  Gene Symbol: RBMY1E
  Gene Name: RNA binding motif protein, Y-linked, family 1, member E
  ENSP ID: ENSP00000372119

SEQ ID NO: 75414 - protein, 496 aa, Homo sapiens
  Payload ID: 14900
  Gene Symbol: RBMY1F
  Gene Name: RNA binding motif protein, Y-linked, family 1, member F
  Uniprot ID: Q15415
  ENSP ID: ENSP00000307155
MVEADHPGKLFIGGLNRETNEKMLKAVFGKHGPISEVLLIKDRTSKSRGFAFITFENPADAKNAAKDMNGTSLHGKAIKVEQAKKPSFQSGGRRRPPASSRNRSPSGSLRSARGSSGGTRGWLPSHEGHLDDGGYTPDLKMSYSRGLIPVKRGPSSRSGGPPPKKSAPSAVARSNSWMGSQGPMSQRRENYGVPPRRATISSWRNDRMSTRHDGYATNDGNHPSCQETRDYAPPSRGYAYRDNGHSNRDEHSSRGYRNHRSSRETRDYAPPSRGHAYRDYGHSRRDESYSRGYRNHRSSRETREYAPPSRGHGYRDYGHSRRHESYSRGYRNHPSSRETRDYAPPHRDYAYRDYGHSSWDEHSSRGYSYHDGYGEALGRDHSEHLSGSSYRDALQRYGTSHGAPPARGPRMSYGGSTCHAYSNTRDRYGRSWESYSSCGDFHYCDREHVCRKDQRNPPSLGRVLPDPREAYGSSSYVASIVDGGESRSEKGDSSRY

SEQ ID NO: 75415 - protein, 459 aa, Homo sapiens
  Payload ID: 14900
  Gene Symbol: RBMY1F
  Gene Name: RNA binding motif protein, Y-linked, family 1, member F
  ENSP ID: ENSP00000406005
MVEADHPGKLFIGGLNRETNEKMLKAVFGKHGPISEVLLIKDRTSKSRGFAFITFENPADAKNAAKDMNGTSLHGKAIKVEQAKKPSFQSGGRRRPPASSRNRSPSGSLRSARGSSGGTRGWLPSHEGHLDDGGYTPDLKMSYSRGLIPVKRGPSSRSGGPPPKKSAPSAVARSNSWMGSQGPMSQRRENYGVPPRRATISSWRNDRMSTRHDGYATNDGNHPSCQETRDYAPPSRGYAYRDNGHSNRDEHSSRGYRNHRSSRETRDYAPPSRGHAYRDYGHSRRDESYSRGYRNHRSSRETREYAPPSRGHGYRDYGHSRRHESYSRGYSYHDGYGEALGRDHSEHLSGSSYRDALQRYGTSHGAPPARGPRMSYGGSTCHAYSNTRDRYGRSWESYSSCGDFHYCDREHVCRKDQRNPPSLGRVLPDPREAYGSSSYVASIVDGGESRSEKGDSSRY

SEQ ID NO: 75416 - protein, 496 aa, Homo sapiens; identical to SEQ ID NO: 75414
  Payload ID: 14901
  Gene Symbol: RBMY1J
  Gene Name: RNA binding motif protein, Y-linked, family 1, member J
  Uniprot ID: Q15415
  ENSP ID: ENSP00000250831

SEQ ID NO: 75417 - protein, 459 aa, Homo sapiens; identical to SEQ ID NO: 75415
  Payload ID: 14901
  Gene Symbol: RBMY1J
  Gene Name: RNA binding motif protein, Y-linked, family 1, member J
  ENSP ID: ENSP00000389621

SEQ ID NO: 75418 - protein, 496 aa, Homo sapiens; identical to SEQ ID NO: 75414
  Payload ID: 14901
  Gene Symbol: RBMY1J
  Gene Name: RNA binding motif protein, Y-linked, family 1, member J
  Uniprot ID: Q15415
  ENSP ID: ENSP00000405745

SEQ ID NO: 75419 - protein, 406 aa, Homo sapiens
  Payload ID: 14902
  Gene Symbol: RBMS1
  Gene Name: RNA binding motif, single stranded interacting protein 1
  Uniprot ID: P29558
  ENSP ID: ENSP00000294904
MGKVWKQQMYPQYATYYYPQYLQAKQSLVPAHPMAPPSPSTTSSNNNSSSSSNSGWDQLSKTNLYIRGLPPHTTDQDLVKLCQPYGKIVSTKAILDKTTNKCKGYGFVDFDSPAAAQKAVSALKASGVQAQMAKQQEQDPTNLYISNLPLSMDEQELENMLKPFGQVISTRILRDSSGTSRGVGFARMESTEKCEAVIGHFNGKFIKTPPGVSAPTEPLLCKFADGGQKKRQNPNKYIPNGRPWHREGEVRLAGMTLTYDPTTAAIQNGFYPSPYSIATNRMITQTSITPYIASPVSAYQVQSPSWMQPQPYILQHPGAVLTPSMEHTMSLQPASMISPLAQQMSHLSLGSTGTYMPATSAMQGAYLPQYAHMQTTAVPVEEASGQQQVAVETSNDHSPYTFQPNK

SEQ ID NO: 75420 - protein, 386 aa, Homo sapiens [sequence omitted]

SEQ ID NO: 75421 - protein, 370 aa, Homo sapiens
  Payload ID: 14902
  Gene Symbol: RBMS1
  Gene Name: RNA binding motif, single stranded interacting protein 1
  ENSP ID: ENSP00000386347
MAPPSPSTTSSNNNSSSSSNSGWDQLSKTNLYIRGLPPHTTDQDLVKLCQPYGKIVSTKAILDKTTNKCKGYGFVDFDSPAAAQKAVSALKASGVQAQMAKQQEQDPTNLYISNLPLSMDEQELENMLKPFGQVISTRILRDSSGTSRGVGFARMESTEKCEAVIGHFNGKFIKTPPGVSAPTEPLLCKFADGGQKKRQNPNKYIPNGRPWHREGEAGMTLTYDPTTAAIQNGFYPSPYSIATNRMITQTSITPYIASPVSAYQVQSPSWMQPQPYILQHPGAVLTPSMEHTMSLQPASMISPLAQQMSHLSLGSTGTYMPATSAMQGAYLPQYAHMQTTAVPVEEASGQQQVAVETSNDHSPYTFQPNK

SEQ ID NO: 75422 - protein, 370 aa, Homo sapiens; identical to SEQ ID NO: 75421
  Payload ID: 14902
  Gene Symbol: RBMS1
  Gene Name: RNA binding motif, single stranded interacting protein 1
  ENSP ID: ENSP00000386571

SEQ ID NO: 75423 - protein, 370 aa, Homo sapiens; identical to SEQ ID NO: 75421
  Payload ID: 14902
  Gene Symbol: RBMS1
  Gene Name: RNA binding motif, single stranded interacting protein 1
  ENSP ID: ENSP00000387280

SEQ ID NO: 75424 - protein, 127 aa, Homo sapiens
  Payload ID: 14902
  Gene Symbol: RBMS1
  Gene Name: RNA binding motif, single stranded interacting protein 1
  ENSP ID: ENSP00000389016
MAPPSPSTTSSNNNSSSSSNSGWDQLSKTNLYIRGLPPHTTDQDLVKLCQPYGKIVSTKAILDKTTNKCKGYGFVDFDSPAAAQKAVSALKASGVQAQMAKQQEQDPTNLYISNLPLSMDEQELENM

SEQ ID NO: 75425 - protein, 407 aa, Homo sapiens
  Payload ID: 14903
  Gene Symbol: RBMS2
  Gene Name: RNA binding motif, single stranded interacting protein 2
  Uniprot ID: Q15434
  ENSP ID: ENSP00000262031
MLLSVTSRPGISTFGYNRNNKKPYVSLAQQMAPPSPSNSTPNSSSGSNGNDQLSKTNLYIRGLQPGTTDQDLVKLCQPYGKIVSTKAILDKTTNKCKGYGFVDFDSPSAAQKAVTALKASGVQAQMAKQQEQDPTNLYISNLPLSMDEQELEGMLKPFGQVISTRILRDTSGTSRGVGFARMESTEKCEAIITHFNGKYIKTPPGVPAPSDPLLCKFADGGPKKRQNQGKFVQNGRAWPRNADMGVMALTYDPTTALQNGFYPAPYNITPNRMLAQSALSPYLSSPVSSYQRVTQTSPLQVPNPSWMHHHSYLMQPSGSVLTPGMDHPISLQPASMMGPLTQQLGHLSLSSTGTYMPTAAAMQGAYISQYTPVPSSSVSVEESSGQQNQVAVDAPSEHGVYSFQFNK

SEQ ID NO: 75426 - protein, 262 aa, Homo sapiens
  Payload ID: 14903
  Gene Symbol: RBMS2
  Gene Name: RNA binding motif, single stranded interacting protein 2
  ENSP ID: ENSP00000443486
MAKAGVQWRDLDSLQPLPPRFKRFSHLCLLSSWDYRMESTEKCEAIITHFNGKYIKTPPGVPAPSDPLLCKFADGGPKKRQNQGKFVQNGRAWPRNADMGVMALTYDPTTALQNGFYPAPYNITPNRMLAQSALSPYLSSPVSSYQRVTQTSPLQVPNPSWMHHHSYLMQPSGSVLTPGMDHPISLQPASMMGPLTQQLGHLSLSSTGTYMPTAAAMQGAYISQYTPVPSSSVSVEESSGQQNQVAVDAPSEHGVYSFQFNK

SEQ ID NO: 75427 - protein, 344 aa, Homo sapiens
  Payload ID: 14903
  Gene Symbol: RBMS2
  Gene Name: RNA binding motif, single stranded interacting protein 2
  ENSP ID: ENSP00000447426
MLLSVTSRPGISTFGYNRNNKKPYVSLAQQMAPPSPSNSTPNSSSGSNGNDQLSKTNLYIRGLQPGTTDQDLVKLCQPYGKIVSTKAILDKTTNKCKGYGFVDFDSPSAAQKAVTALKASGVQAQMAKQQEQDPTNLYISNLPLSMDEQELEGMLKPFGQVISTRILRDTSGTSRGVGFARMESTEKCEAIITHFNGKYIKTPPGVPAPSDPLLCKFADGGPKKRQNQGKFVQNGRAWPRNADMGVMALTYDPTTALQNGFYPAPYNITPNRMLAQSALSPYLSSPVSSYQYMPTAAAMQGAYISQYTPVPSSSVSVEESSGQQNQVAVDAPSEHGVYSFQFNK

SEQ ID NO: 75428 - protein, 60 aa, Homo sapiens
  Payload ID: 14903
  Gene Symbol: RBMS2
  Gene Name: RNA binding motif, single stranded interacting protein 2
  ENSP ID: ENSP00000447699
MLLSVTSRPGISTFGYNRNNKKMEFRSLLLPRLECNGVISAHCNLCLPAICVIGSADGTT

SEQ ID NO: 75429 - protein, 282 aa, Homo sapiens
  Payload ID: 14903
  Gene Symbol: RBMS2
  Gene Name: RNA binding motif, single stranded interacting protein 2
  ENSP ID: ENSP00000449678
MAKQQEQDPTNLYISNLPLSMDEQELEGMLKPFGQVISTRILRDTSGTSRGVGFARMESTEKCEAIITHFNGKYIKTPPGVPAPSDPLLCKFADGGPKKRQNQGKFVQNGRAWPRNADMGVMALTYDPTTALQNGFYPAPYNITPNRMLAQSALSPYLSSPVSSYQRVTQTSPLQVPNPSWMHHHSYLMQPSGSVLTPGMDHPISLQPASMMGPLTQQLGHLSLSSTGTYMPTAAAMQGAYISQYTPVPSSSVSVEESSGQQNQVAVDAPSEHGVYSFQFNK

SEQ ID NO: 75430 - protein, 84 aa, Homo sapiens
  Payload ID: 14903
  Gene Symbol: RBMS2
  Gene Name: RNA binding motif, single stranded interacting protein 2
  ENSP ID: ENSP00000450127
MLLSVTSRPGISTFGYNRNNKKPYVSLAQQMAPPSPSNSTPNSSSGSNGNDQLSKTNLYIRGLQPGTTDQDLVKLCQPLWLCRF

SEQ ID NO: 75431 - protein, 420 aa, Homo sapiens
  Payload ID: 14904
  Gene Symbol: RBMS3
  Gene Name: RNA binding motif, single stranded interacting protein 3
  Uniprot ID: Q6XE24
  ENSP ID: ENSP00000273139
MGKRLDQPQMYPQYTYYYPHYLQTKQSYAPAPHPMAPPSPSTNSSSNNSSNNSSGEQLSKTNLYIRGLPPGTTDQDLIKLCQPYGKIVSTKAILDKNTNQCKGYGFVDFDSPAAAQKAVASLKANGVQAQMAKQQEQDPTNLYISNLPISMDEQELENMLKPFGHVISTRILRDANGVSRGVGFARMESTEKCEVVIQHFNGKYLKTPPGIPAPSEPLLCKFADGGQKKRQNQSKYTQNGRPWPREGEAGMALTYDPTAAIQNGFYSSPYSIATNRMIPQTSITPFIAASPVSTYQVQSTSWMPHPPYVMQPTGAVITPTMDHPMSMQPANMMGPLTQQMNHLSLGTTGTYMTAAAPMQGTYIPQYTPVPPTAVSIEGVVADTSPQTVAPSSQDTSGQQQQIAVDTSNEHAPAYSYQQSK

SEQ ID NO: 75432 - protein, 419 aa, Homo sapiens
  Payload ID: 14904
  Gene Symbol: RBMS3
  Gene Name: RNA binding motif, single stranded interacting protein 3
  Uniprot ID: Q6XE24
  ENSP ID: ENSP00000373276
MGKRLDQPQMYPQYTYYYPHYLQTKSYAPAPHPMAPPSPSTNSSSNNSSNNSSGEQLSKTNLYIRGLPPGTTDQDLIKLCQPYGKIVSTKAILDKNTNQCKGYGFVDFDSPAAAQKAVASLKANGVQAQMAKQQEQDPTNLYISNLPISMDEQELENMLKPFGHVISTRILRDANGVSRGVGFARMESTEKCEVVIQHFNGKYLKTPPGIPAPSEPLLCKFADGGQKKRQNQSKYTQNGRPWPREGEAGMALTYDPTAAIQNGFYSSPYSIATNRMIPQTSITPFIAASPVSTYQGAVITPTMDHPMSMQPANMMGPLTQQMNHLSLGTTGTIQSQDRIMILHQLLCQYMTAAAPMQGTYIPQYTPVPPTAVSIEGVVADTSPQTVAPSSQDTSGQQQQIAVDTSNEHAPAYSYQQSKP

SEQ ID NO: 75433 - protein, 437 aa, Homo sapiens
  Payload ID: 14904
  Gene Symbol: RBMS3
  Gene Name: RNA binding motif, single stranded interacting protein 3
  Uniprot ID: Q6XE24
  ENSP ID: ENSP00000373277
MGKRLDQPQMYPQYTYYYPHYLQTKQSYAPAPHPMAPPSPSTNSSSNNSSNNSSGEQLSKTNLYIRGLPPGTTDQDLIKLCQPYGKIVSTKAILDKNTNQCKGYGFVDFDSPAAAQKAVASLKANGVQAQMAKQQEQDPTNLYISNLPISMDEQELENMLKPFGHVISTRILRDANGVSRGVGFARMESTEKCEVVIQHFNGKYLKTPPGIPAPSEPLLCKFADGGQKKRQNQSKYTQNGRPWPREGEAGMALTYDPTAAIQNGFYSSPYSIATNRMIPQTSITPFIAASPVSTYQVQSTSWMPHPPYVMQPTGAVITPTMDHPMSMQPANMMGPLTQQMNHLSLGTTGTIQSQDRIMILHQLLCQYMTAAAPMQGTYIPQYTPVPPTAVSIEGVVADTSPQTVAPSSQDTSGQQQQIAVDTSNEHAPAYSYQQSKP

SEQ ID NO: 75434 - protein, 264 aa, Homo sapiens
  Payload ID: 14904
  Gene Symbol: RBMS3
  Gene Name: RNA binding motif, single stranded interacting protein 3
  ENSP ID: ENSP00000391934
MGKRLDQPQMYPQYTYYYPHYLQTKQSYAPAPHPMAPPSPSTNSSSNNSSNNSSGEQLSKTNLYIRGLPPGTTDQDLIKLCQPYGKIVSTKAILDKNTNQCKGYGFVDFDSPAAAQKAVASLKANGVQAQMAKQQEQDPTNLYISNLPISMDEQELENMLKPFGHVISTRILRDANGVSRGVGFARMESTEKCEVVIQHFNGKYLKTPPGIPAPSEPLLCKFADGGQKKRQNQSKYTQNGRPWPREGEAGMALTYDPTAAIQNG

SEQ ID NO: 75435 - protein, 436 aa, Homo sapiens
  Payload ID: 14904
  Gene Symbol: RBMS3
  Gene Name: RNA binding motif, single stranded interacting protein 3
  ENSP ID: ENSP00000395592
MGKRLDQPQMYPQYTYYYPHYLQTKSYAPAPHPMAPPSPSTNSSSNNSSNNSSGEQLSKTNLYIRGLPPGTTDQDLIKLCQPYGKIVSTKAILDKNTNQCKGYGFVDFDSPAAAQKAVASLKANGVQAQMAKQQEQDPTNLYISNLPISMDEQELENMLKPFGHVISTRILRDANGVSRGVGFARMESTEKCEVVIQHFNGKYLKTPPGIPAPSEPLLCKFADGGQKKRQNQSKYTQNGRPWPREGEAGMALTYDPTAAIQNGFYSSPYSIATNRMIPQTSITPFIAASPVSTYQVQSTSWMPHPPYVMQPTGAVITPTMDHPMSMQPANMMGPLTQQMNHLSLGTTGTIQSQDRIMILHQLLCQYMTAAAPMQGTYIPQYTPVPPTAVSIEGVVADTSPQTVAPSSQDTSGQQQQIAVDTSNEHAPAYSYQQSKP

SEQ ID NO: 75436 - protein, 421 aa, Homo sapiens
  Payload ID: 14904
  Gene Symbol: RBMS3
  Gene Name: RNA binding motif, single stranded interacting protein 3
  Uniprot ID: Q6XE24
  ENSP ID: ENSP00000397926
MGKRLDQPQMYPQYTYYYPHYLQTKQSYAPAPHPMAPPSPSTNSSSNNSSNNSSGEQLSKTNLYIRGLPPGTTDQDLIKLCQPYGKIVSTKAILDKNTNQCKGYGFVDFDSPAAAQKAVASLKANGVQAQMAKQQEQDPTNLYISNLPISMDEQELENMLKPFGHVISTRILRDANGVSRGVGFARMESTEKCEVVIQHFNGKYLKTPPGIPAPSEPLLCKFADGGQKKRQNQSKYTQNGRPWPREGEAGMALTYDPTAAIQNGFYSSPYSIATNRMIPQTSITPFIAASPVSTYQVQSTSWMPHPPYVMQPTGAVITPTMDHPMSMQPANMMGPLTQQMNHLSLGTTGTYMTAAAPMQGTYIPQYTPVPPTAVSIEGVVADTSPQTVAPSSQDTSGQQQQIAVDTSNEHAPAYSYQQSKP

SEQ ID NO: 75437 - protein, 433 aa, Homo sapiens
  Payload ID: 14904
  Gene Symbol: RBMS3
  Gene Name: RNA binding motif, single stranded interacting protein 3
  Uniprot ID: Q6XE24
  ENSP ID: ENSP00000400519
MGKRLDQPQMYPQYTYYYPHYLQTKQSYAPAPHPMAPPSPSTNSSSNNSSNNSSGEQLSKTNLYIRGLPPGTTDQDLIKLCQPYGKIVSTKAILDKNTNQCKGYGFVDFDSPAAAQKAVASLKANGVQAQMAKQQEQDPTNLYISNLPISMDEQELENMLKPFGHVISTRILRDANGVSRGVGFARMESTEKCEVVIQHFNGKYLKTPPGIPAPSEPLLCKFADGGQKKRQNQSKYTQNGRPWPREGEVLRGRTVPRQNREAGMALTYDPTAAIQNGFYSSPYSIATNRMIPQTSITPFIAASPVSTYQVQSTSWMPHPPYVMQPTGAVITPTMDHPMSMQPANMMGPLTQQMNHLSLGTTGTYMTAAAPMQGTYIPQYTPVPPTAVSIEGVVADTSPQTVAPSSQDTSGQQQQIAVDTSNEHAPAYSYQQSK

SEQ ID NO: 75438 - protein, 305 aa, Homo sapiens
  Payload ID: 14905
  Gene Symbol: RNPS1
  Gene Name: RNA binding protein S1, serine-rich domain
  Uniprot ID: Q15287
  ENSP ID: ENSP00000301730
MDLSGVKKKSLLGVKENNKKSSTRAPSPTKRKDRSDEKSKDRSKDKGATKESSEKDRGRDKTRKRRSASSGSSSTRSRSSSTSSSGSSTSTGSSSGSSSSSASSRSGSSSTSRSSSSSSSSGSPSPSRRRHDNRRRSRSKSKPPKRDEKERKRRSPSPKPTKVHIGRLTRNVTKDHIMEIFSTYGKIKMIDMPVERMHPHLSKGYAYVEFENPDEAEKALKHMDGGQIDGQEITATAVLAPWPRPPPRRFSPPRRMLPPPPMWRRSPPRMRRRSRSPRRRSPVRRRSRSPGRRRHRSRSSSNSSR

SEQ ID NO: 75439 - protein, 305 aa, Homo sapiens; identical to SEQ ID NO: 75438
  Payload ID: 14905
  Gene Symbol: RNPS1
  Gene Name: RNA binding protein S1, serine-rich domain
  Uniprot ID: Q15287
  ENSP ID: ENSP00000315859

SEQ ID NO: 75440 - protein, 305 aa, Homo sapiens; identical to SEQ ID NO: 75438
  Payload ID: 14905
  Gene Symbol: RNPS1
  Gene Name: RNA binding protein S1, serine-rich domain
  Uniprot ID: Q15287
  ENSP ID: ENSP00000380275

SEQ ID NO: 75441 - protein, 284 aa, Homo sapiens
  Payload ID: 14905
  Gene Symbol: RNPS1
  Gene Name: RNA binding protein S1, serine-rich domain
  ENSP ID: ENSP00000454461
MDLSGVKKKSLLGVKENNKKSSTRAPSPTKRKDRSDEKSKDRSKDKGATKESSEKDRGRDKTRKRRSASSGSSSTRSRSSSTSSSGSSTSTGSSSGSSSSSASSRSGSSSTSRSSSSSSSSGSPSPSRRRHDNRRRSRSKSKPPKRDEKERKRRSPSPKPTKVHIGRLTRNVTKDHIMEIFSTYGKIKMIDMPVERMHPHLSKGYAYVEFENPDEAEKALKHMDGGQIDGQEITATAVLAPWPRPPPRRFSPPRRMLPPPPMWRRSPPRMRRRSRSPRRRSPVR

SEQ ID NO: 75442 - protein, 257 aa, Homo sapiens
  Payload ID: 14905
  Gene Symbol: RNPS1
  Gene Name: RNA binding protein S1, serine-rich domain
  ENSP ID: ENSP00000454513
MAPSPTKRKDRSDEKSKDRSKDKGATKESSEKDRGRDKTRKRRSASSGSSSTRSRSSSTSSSGSSTSTGSSSGSSSSSASSRSGSSSTSRSSSSSSSSGSPSPSRRRHDNRRRSRSKSKPPKRDEKERKRRSPSPKPTKVHIGRLTRNVTKDHIMEIFSTYGKIKMIDMPVERMHPHLSKGYAYVEFENPDEAEKALKHMDGGPAPRGAGPPCAGDHGPRAAAATGAAPAPTPPDKQATEALAPVTYTPPSSVLSLF

SEQ ID NO: 75443 - protein, 85 aa, Homo sapiens
  Payload ID: 14905
  Gene Symbol: RNPS1
  Gene Name: RNA binding protein S1, serine-rich domain
  ENSP ID: ENSP00000454867
MDLSGVKKKSLLGVKENNKKSSTRAPSPTKRKDRSDEKSKDRSKDKGATKESSEKDRGRDKTRKRRSASSGSSSTRSRSSSTSSS

SEQ ID NO: 75444 - protein, 156 aa, Homo sapiens
  Payload ID: 14905
  Gene Symbol: RNPS1
  Gene Name: RNA binding protein S1, serine-rich domain
  ENSP ID: ENSP00000455013
MDLSGVKKKSLLGVKENNKKSSTRAPSPTKRKDRSDEKSKDRSKDKGATKESSEKDRGRDKTRKRRSASSGSSSTRSRSSSTSSSGSSTSTGSSSGSSSSSASSRSGSSSTSRSSSSSSSSGSPNPNHLKEMKRRGKGGAHLLSPPKCTLGDSPGM

SEQ ID NO: 75445 - protein, 98 aa, Homo sapiens
  Payload ID: 14905
  Gene Symbol: RNPS1
  Gene Name: RNA binding protein S1, serine-rich domain
  ENSP ID: ENSP00000455195
MDLSGVKKKSLLGVKENNKKSSTRAPSPTKRKDRSDEKSKDRSKDKGATKESSEKDRGRDKTRKRRSASSGSSSLGPARLPAQAPAPALAQAVAPALP

SEQ ID NO: 75446 - protein, 128 aa, Homo sapiens
  Payload ID: 14905
  Gene Symbol: RNPS1
  Gene Name: RNA binding protein S1, serine-rich domain
  ENSP ID: ENSP00000455306
MEIFSTYGKIKMIDMPVERMHPHLSKGYAYVEFENPDEAEKALKHMDGGQIDGQEITATAVLAPWPRPPPRRFSPPRRMLPPPPMWRRSPPRMRRRSRSPRRRSPVRRRSRSPGRRRHRSRSSSNSSR

SEQ ID NO: 75447 - protein, 128 aa, Homo sapiens; identical to SEQ ID NO: 75446
  Payload ID: 14905
  Gene Symbol: RNPS1
  Gene Name: RNA binding protein S1, serine-rich domain
  ENSP ID: ENSP00000455379

SEQ ID NO: 75448 - protein, 29 aa, Homo sapiens
  Payload ID: 14905
  Gene Symbol: RNPS1
  Gene Name: RNA binding protein S1, serine-rich domain
  ENSP ID: ENSP00000456283
MDLSGVKKKSLLGVKENNKKSSTRAPSPT

SEQ ID NO: 75449 - protein, 282 aa, Homo sapiens
  Payload ID: 14905
  Gene Symbol: RNPS1
  Gene Name: RNA binding protein S1, serine-rich domain
  Uniprot ID: Q15287
  ENSP ID: ENSP00000456352
MAPSPTKRKDRSDEKSKDRSKDKGATKESSEKDRGRDKTRKRRSASSGSSSTRSRSSSTSSSGSSTSTGSSSGSSSSSASSRSGSSSTSRSSSSSSSSGSPSPSRRRHDNRRRSRSKSKPPKRDEKERKRRSPSPKPTKVHIGRLTRNVTKDHIMEIFSTYGKIKMIDMPVERMHPHLSKGYAYVEFENPDEAEKALKHMDGGQIDGQEITATAVLAPWPRPPPRRFSPPRRMLPPPPMWRRSPPRMRRRSRSPRRRSPVRRRSRSPGRRRHRSRSSSNSSR

SEQ ID NO: 75450 - protein, 302 aa, Homo sapiens
  Payload ID: 14905
  Gene Symbol: RNPS1
  Gene Name: RNA binding protein S1, serine-rich domain
  ENSP ID: ENSP00000457110
MDLSGVKKKSLLGVKENNKKSSTRAPSPTKRKDRSDEKSKDRSKDKGATKESSEKDRGRDKTRKRRSASSGSSSTRSRSSSTSSSGSSTSTGSSSGSSSSSASSRSGSSSTSRSSSSSSSSGSPSPSRRRHDNRRRSRSKSKPPKRDEKERKRRSPSPKPTKVHIGRLTRNVTKDHIMEIFSTYGKIKMIDMPVERMHPHLSKGYAYVEFENPDEAEKALKHMDGGQIDGQEITATAVLAPWPRPPPRRFSPPRRMLPPPPMWRRSPPRMRRRSRSPRRRSPVRRRSRSPGRRRHRSRSSSN

SEQ ID NO: 75451 - protein, 127 aa, Homo sapiens
  Payload ID: 14905
  Gene Symbol: RNPS1
  Gene Name: RNA binding protein S1, serine-rich domain
  ENSP ID: ENSP00000457296
MDLSGVKKKSLLGVKENNKKSSTRAPSPTKRKDRSDEKSKDRSKDKGATKESSEKDRGRDKTRKRRSASSGSSSTRSRSSSTSSSGSSTSTGSSSGSSSSSASSRSGSSSTSRSSSSSSSSGSPSPS

SEQ ID NO: 75452 - protein, 45 aa, Homo sapiens
  Payload ID: 14905
  Gene Symbol: RNPS1
  Gene Name: RNA binding protein S1, serine-rich domain
  ENSP ID: ENSP00000457338
MDLSGVKKKSLLGVKENNKKSSTRAPSPTKRKDRSDEKSKDRSKD

SEQ ID NO: 75453 - protein, 150 aa, Homo sapiens
  Payload ID: 14905
  Gene Symbol: RNPS1
  Gene Name: RNA binding protein S1, serine-rich domain
  ENSP ID: ENSP00000457378
MDLSGVKKKSLLGVKENNKKSSTRAPSPTKRKDRSDEKSKDRSKDKGATKESSEKDRGRDKTRKRRSASSGSSSTRSRSSSTSSSGSSTSTGSSSGSSSSSASSRSGSSSTSRSSSSSSSSGSPSPSRRRHDNRRRSRSKSKPPKRDEKE

SEQ ID NO: 75454 - protein, 139 aa, Homo sapiens
  Payload ID: 14905
  Gene Symbol: RNPS1
  Gene Name: RNA binding protein S1, serine-rich domain
  ENSP ID: ENSP00000457618
MDLSGVKKKSLLGVKENNKKSSTRAPSPTKRKDRSDEKSKDRSKDKGATKESSEKDRGRDKTRKRRSASSGSSSTRSRSSSTSSSGSSTSTGSSSGSSSSSASSRSGSSSTSRSSSSSSSSGSPSPSRRRHDNRRRSRS

SEQ ID NO: 75455 - protein, 169 aa, Homo sapiens
  Payload ID: 14905
  Gene Symbol: RNPS1
  Gene Name: RNA binding protein S1, serine-rich domain
  ENSP ID: ENSP00000457690
MDLSGVKKKSLLGVKENNKKSSTRAPSPTKRKDRSDEKSKDRSKDKGATKESSEKDRGRDKTRKRRSASSGSSSTRSRSSSTSSSGSSTSTGSSSGSSSSSASSRSGSSSTSRSSSSSSSSGSPSPSRRRHDNRRRSRSKSKPPKRDEKERKRRSPSPKPTKVHIGRLT

SEQ ID NO: 75456 - protein, 305 aa, Homo sapiens; identical to SEQ ID NO: 75438
  Payload ID: 14905
  Gene Symbol: RNPS1
  Gene Name: RNA binding protein S1, serine-rich domain
  Uniprot ID: Q15287
  ENSP ID: ENSP00000457723

SEQ ID NO: 75457 - protein, 305 aa, Homo sapiens; identical to SEQ ID NO: 75438
  Payload ID: 14905
  Gene Symbol: RNPS1
  Gene Name: RNA binding protein S1, serine-rich domain
  Uniprot ID: Q15287
  ENSP ID: ENSP00000457820

SEQ ID NO: 75458 - protein, 211 aa, Homo sapiens
  Payload ID: 14905
  Gene Symbol: RNPS1
  Gene Name: RNA binding protein S1, serine-rich domain
  ENSP ID: ENSP00000457987
MDLSGVKKKSLLGVKENNKKSSTSSSSGSPSPSRRRHDNRRRSRSKSKPPKRDEKERKRRSPSPKPTKVHIGRLTRNVTKDHIMEIFSTYGKIKMIDMPVERMHPHLSKGYAYVEFENPDEAEKALKHMDGGQIDGQEITATAVLAPWPRPPPRRFSPPRRMLPPPPMWRRSPPRMRRRSRSPRRRSPVRRRSRSPGRRRHRSRSSSNSSR

SEQ ID NO: 75459 - protein, 204 aa, Homo sapiens
  Payload ID: 14906
  Gene Symbol: RBPMS
  Gene Name: RNA binding protein with multiple splicing
  Uniprot ID: Q93062
  ENSP ID: ENSP00000287771
MNNGGKAEKENTPSEANLQEEEVRTLFVSGLPLDIKPRELYLLFRPFKGYEGSLIKLTSKQPVGFVSFDSRSEAEAAKNALNGIRFDPEIPQTLRLEFAKANTKMAKNKLVGTPNPSTPLPNTVPQFIAREPYELTVPALYPSSPEVWAPYPLYPAELAPALPPPAFTYPASLHAQLCEGQTVRRSHPLSAPSPDSASLAWFPV

SEQ ID NO: 75460 - protein, 196 aa, Homo sapiens
  Payload ID: 14906
  Gene Symbol: RBPMS
  Gene Name: RNA binding protein with multiple splicing
  Uniprot ID: Q93062
  ENSP ID: ENSP00000318102
MNNGGKAEKENTPSEANLQEEEVRTLFVSGLPLDIKPRELYLLFRPFKGYEGSLIKLTSKQPVGFVSFDSRSEAEAAKNALNGIRFDPEIPQTLRLEFAKANTKMAKNKLVGTPNPSTPLPNTVPQFIAREPYELTVPALYPSSPEVWAPYPLYPAELAPALPPPAFTYPASLHAQMRWLPPSEATSQGWKSRQFC

SEQ ID NO: 75461 - protein, 219 aa, Homo sapiens
  Payload ID: 14906
  Gene Symbol: RBPMS
  Gene Name: RNA binding protein with multiple splicing
  Uniprot ID: Q93062
  ENSP ID: ENSP00000340176
MNNGGKAEKENTPSEANLQEEEVRTLFVSGLPLDIKPRELYLLFRPFKGYEGSLIKLTSKQPVGFVSFDSRSEAEAAKNALNGIRFDPEIPQTLRLEFAKANTKMAKNKLVGTPNPSTPLPNTVPQFIAREPYELTVPALYPSSPEVWAPYPLYPAELAPALPPPAFTYPASLHAQCFSPEAKPNTPVFCPLLQQIRFVSGNVFVTYQPTADQQRELPC

SEQ ID NO: 75462 - protein, 196 aa, Homo sapiens; identical to SEQ ID NO: 75460
  Payload ID: 14906
  Gene Symbol: RBPMS
  Gene Name: RNA binding protein with multiple splicing
  Uniprot ID: Q93062
  ENSP ID: ENSP00000380486

SEQ ID NO: 75463 - protein, 115 aa, Homo sapiens
  Payload ID: 14906
  Gene Symbol: RBPMS
  Gene Name: RNA binding protein with multiple splicing
  ENSP ID: ENSP00000427896
MAKNKLVGTPNPSTPLPNTVPQFIAREPYELTVPALYPSSPEVWAPYPLYPAELAPALPPPAFTYPASLHAQCFSPEAKPNTPVFCPLLQQIRFVSGNVFVTYQPTADQQRELPC

SEQ ID NO: 75464 - protein, 224 aa, Homo sapiens
  Payload ID: 14906
  Gene Symbol: RBPMS
  Gene Name: RNA binding protein with multiple splicing
  ENSP ID: ENSP00000428675
MNNGGKAEKENTPSEANLQEEEVRTLFVSGLPLDIKPRELYLLFRPFKGYEGSLIKLTSKQPVGFVSFDSRSEAEAAKNALNGIRFDPEIPQTLRLEFAKANTKMAKNKLVGTPNPSTPLPNTVPQFIAREPYELTVPALYPSSPEVWAPYPLYPAELAPALPPPAFTYPASLHAQVIDTHRPGLHSLHHQSFQTWFPRAHHTTNTYPANRSTLKRLMIPSKSS

SEQ ID NO: 75465 - protein, 49 aa, Homo sapiens
  Payload ID: 14906
  Gene Symbol: RBPMS
  Gene Name: RNA binding protein with multiple splicing
  ENSP ID: ENSP00000429086
MAKNKLVGTPNPSTPLPNTVPQFIAREPYELTVPALYPSSPEVWAPYPL

SEQ ID NO: 75466 - protein, 115 aa, Homo sapiens; identical to SEQ ID NO: 75463
  Payload ID: 14906
  Gene Symbol: RBPMS
  Gene Name: RNA binding protein with multiple splicing
  ENSP ID: ENSP00000430342

SEQ ID NO: 75467 - protein, 119 aa, Homo sapiens
  Payload ID: 14906
  Gene Symbol: RBPMS
  Gene Name: RNA binding protein with multiple splicing
  ENSP ID: ENSP00000430370
  MOD_RES (1)..(1): Any amino acid
XLFVSGLPLDIKPRELYLLFRPFKGYEGSLIKLTSKQPVGFVSFDSRSEAEAAKNALNGIRFDPEIPQTLRLEFAKANTKMAKNKLVGTPNPSTPLPNTVPQFIAREPLGGANEHGERQ

SEQ ID NO: 75468 - protein, 120 aa, Homo sapiens
  Payload ID: 14906
  Gene Symbol: RBPMS
  Gene Name: RNA binding protein with multiple splicing
  ENSP ID: ENSP00000430638
MAKNKLVGTPNPSTPLPNTVPQFIAREPYELTVPALYPSSPEVWAPYPLYPAELAPALPPPAFTYPASLHAQVIDTHRPGLHSLHHQSFQTWFPRAHHTTNTYPANRSTLKRLMIPSKSS

SEQ ID NO: 75469 - protein, 113 aa, Homo sapiens
  Payload ID: 14906
  Gene Symbol: RBPMS
  Gene Name: RNA binding protein with multiple splicing
  ENSP ID: ENSP00000430893
SFDSRSEAEAAKNALNGIRFDPEIPQTLRLEFAKANTKMAKNKLVGTPNPSTPLPNTVPQFIAREPYELTVPALYPSSPEVWAPYPLYPAELAPALPPPAFTYPASLHAQETL

SEQ ID NO: 75470 - protein, 209 aa, Homo sapiens
  Payload ID: 14907
  Gene Symbol: RBPMS2
  Gene Name: RNA binding protein with multiple splicing 2
  Uniprot ID: Q6ZRY4
  ENSP ID: ENSP00000300069
MSNLKPDGEHGGSTGTGSGAGSGGALEEEVRTLFVSGLPVDIKPRELYLLFRPFKGYEGSLIKLTARQPVGFVIFDSRAGAEAAKNALNGIRFDPENPQTLRLEFAKANTKMAKSKLMATPNPSNVHPALGAHFIARDPYDLMGAALIPASPEAWAPYPLYTTELTPAISHAAFTYPTATAAAAALHAQVRWYPSSDTTQQGWKYRQFC

SEQ ID NO: 75471 - protein, 98 aa, Homo sapiens
  Payload ID: 14907
  Gene Symbol: RBPMS2
  Gene Name: RNA binding protein with multiple splicing 2
  Uniprot ID: Q6ZRY4
  ENSP ID: ENSP00000456720
MAKSKLMATPNPSNVHPALGAHFIARDPYDLMGAALIPASPEAWAPYPLYTTELTPAISHAAFTYPTATAAAAALHAQVRWYPSSDTTQQGWKYRQFC

SEQ ID NO: 75472 - protein, 418 aa, Homo sapiens
  Payload ID: 14908
  Gene Symbol: RBFOX1
  Gene Name: RNA binding protein, fox-1 homolog (C. elegans) 1
  Uniprot ID: Q9NWB1
  ENSP ID: ENSP00000309117
MLASQGVLLHPYGVPMIVPAAPYLPGLIQGNQEAAAAPDTMAQPYASAQFAPPQNGIPAEYTAPHPHPAPEYTGQTTVPEHTLNLYPPAQTHSEQSPADTSAQTVSGTATQTDDAAPTDGQPQTQPSENTENKSQPKRLHVSNIPFRFRDPDLRQMFGQFGKILDVEIIFNERGSKGFGFVTFENSADADRAREKLHGTVVEGRKIEVNNATARVMTNKKTVNPYTNGWKLNPVVGAVYSPEFYAGTVLLCQANQEGSSMYSAPSSLVYTSAMPGFPYPAATAAAAYRGAHLRGRGRTVYNTFRAAAPPPPIPAYGGVVYQEPVYGNKLLQGGYAAYRYAQPTPATAAAYSDSYGRVYAADPYHHALAPAPTYGVGAMNAFAPLTDAKTRSHADDVGLVLSSLQASIYRGGYNRFAPY

SEQ ID NO: 75473 - protein, 402 aa, Homo sapiens
  Payload ID: 14908
  Gene Symbol: RBFOX1
  Gene Name: RNA binding protein, fox-1 homolog (C. elegans) 1
  ENSP ID: ENSP00000344196
MIVPAAPYLPGLIQGNQEAAAAPDTMAQPYASAQFAPPQNGIPAEYTAPHPHPAPEYTGQTTVPEHTLNLYPPAQTHSEQSPADTSAQTVSGTATQTDDAAPTDGQPQTQPSENTENKSQPKRLHVSNIPFRFRDPDLRQMFGQFGKILDVEIIFNERGSKGFGFVTFENSADADRAREKLHGTVVEGRKIEVNNATARVMTNKKTVNPYTNGWKLNPVVGAVYSPEFYAGTVLLCQANQEGSSMYSAPSSLVYTSAMPGFPYPAATAAAAYRGAHLRGRGRTVYNTFRAAAPPPPIPAYGGVVYQDGFYGADIYGGYAAYRYAQPTPATAAAYSDSYGRVYAADPYHHALAPAPTYGVGAMNAFAPLTDAKTRSHADDVGLVLSSLQASIYRGGYNRFAPY

SEQ ID NO: 75474 - protein, 395 aa, Homo sapiens
  Payload ID: 14908
  Gene Symbol: RBFOX1
  Gene Name: RNA binding protein, fox-1 homolog (C. elegans) 1
  Uniprot ID: Q9NWB1
  ENSP ID: ENSP00000347855
MLASQGVLLHPYGVPMIVPAAPYLPGLIQGNQEAAAAPDTMAQPYASAQFAPPQNGIPAEYTAPHPHPAPEYTGQTTVPEHTLNLYPPAQTHSEQSPADTSAQTVSGTATQTDDAAPTDGQPQTQPSENTENKSQPKRLHVSNIPFRFRDPDLRQMFGQFGKILDVEIIFNERGSKGFGFVTFENSADADRAREKLHGTVVEGRKIEVNNATARVMTNKKTVNPYTNGWKLNPVVGAVYSPEFYAGTVLLCQANQEGSSMYSAPSSLVYTSAMPGFPYPAATAAAAYRGAHLRGRGRTVYNTFRAAAPPPPIPAYGGVVYQEPVYGNKLLQGGYAAYRYAQPTPATAAAYSDRNQFVFVAADEISCNTSAVTDEFMLPTPTTTHLLQPPPTALVP

SEQ ID NO: 75475 - protein, 425 aa, Homo sapiens
  Payload ID: 14908
  Gene Symbol: RBFOX1
  Gene Name: RNA binding protein, fox-1 homolog (C. elegans) 1
  ENSP ID: ENSP00000391269
METGQRTHASGTYSFLDRTQHSDIKADCNTCVEIEDRKVSRQQMNCEREQLRGNQEAAAAPDTMAQPYASAQFAPPQNGIPAEYTAPHPHPAPEYTGQTTVPEHTLNLYPPAQTHSEQSPADTSAQTVSGTATQTDDAAPTDGQPQTQPSENTENKSQPKRLHVSNIPFRFRDPDLRQMFGQFGKILDVEIIFNERGSKGFGFVTFENSADADRAREKLHGTVVEGRKIEVNNATARVMTNKKTVNPYTNGWKLNPVVGAVYSPEFYAGTVLLCQANQEGSSMYSAPSSLVYTSAMPGFPYPAATAAAAYRGAHLRGRGRTVYNTFRAAAPPPPIPAYGGVVYQDGFYGADIYGGYAAYRYAQPTPATAAAYSDSYGRVYAADPYHHALAPAPTYGVGAMPQGSSPSTDFRGAKLHTSRPLLSGS

SEQ ID NO: 75476 - protein, 392 aa, Homo sapiens
  Payload ID: 14908
  Gene Symbol: RBFOX1
  Gene Name: RNA binding protein, fox-1 homolog (C. elegans) 1
  Uniprot ID: Q9NWB1
  ENSP ID: ENSP00000402745
MLASQGVLLHPYGVPMIVPAAPYLPGLIQGNQEAAAAPDTMAQPYASAQFAPPQNGIPAEYTAPHPHPAPEYTGQTTVPEHTLNLYPPAQTHSEQSPADTSAQTVSGTATQTDDAAPTDGQPQTQPSENTENKSQPKRLHVSNIPFRFRDPDLRQMFGQFGKILDVEIIFNERGSKGFGFVTFENSADADRAREKLHGTVVEGRKIEVNNATARVMTNKKTVNPYTNGWKLNPVVGAVYSPEFYAGTVLLCQANQEGSSMYSAPSSLVYTSAMPGFPYPAATAAAAYRGAHLRGRGRTVYNTFRAAAPPPPIPAYGGVVYQEPVYGNKLLQGGYAAYRYAQPTPATAAAYSDSYGRVYAADPYHHALAPAPTYGVGAMASIYRGGYNRFAPY

SEQ ID NO: 75477 - protein, 380 aa, Homo sapiens
  Payload ID: 14908
  Gene Symbol: RBFOX1
  Gene Name: RNA binding protein, fox-1 homolog (C. elegans) 1
  ENSP ID: ENSP00000438768
MKSWQLIAVVGDALQDIKADCNTCVEIEDRKVSRQQMNCEREQLRGNQEAAAAPDTMAQPYASAQFAPPQNGIPAEYTAPHPHPAPEYTGQTTVPEHTLNLYPPAQTHSEQSPADTSAQTVSGTATQFGKILDVEIIFNERGSKVNNATARVMTNKKTVNPYTNGWKLNPVVGAVYSPEFYAGTVLLCQANQEGSSMYSAPSSLVYTSAMPGFPYPAATAAAAYRGAHLRGRGRTVYNTFRAAAPPPPIPAYGGVVYQDGFYGADIYGGYAAYRYAQPTPATAAAYSDRNQFVFVAADEISCNTSAVTDEFMLPTPTTTHLLQPPPTALVPCPKVPAPAQTSEELSCTLPGLCCQAAENLTASPPLLQFMFKVIVAQERK

SEQ ID NO: 75478 - protein, 466 aa, Homo sapiens
  Payload ID: 14908
  Gene Symbol: RBFOX1
  Gene Name: RNA binding protein, fox-1 homolog (C. elegans) 1
  ENSP ID: ENSP00000446842
METGQRTHASGTYSFLDRTQHSDIKADCNTCVEIEDRKVSRQQMNCEREQLRGNQEAAAAPDTMAQPYASAQFAPPQNGIPAEYTAPHPHPAPEYTGQTTVPEHTLNLYPPAQTHSEQSPADTSAQTVSGTATQTDDAAPTDGQPQTQPSENTENKSQPKRLHVSNIPFRFRDPDLRQMFGQFGKILDVEIIFNERGSKGFGFVTFENSADADRAREKLHGTVVEGRKIEVNNATARVMTNKKTVNPYTNGWKLNPVVGAVYSPEFYAGTVLLCQANQEGSSMYSAPSSLVYTSAMPGFPYPAATAAAAYRGAHLRGRGRTVYNTFRAAAPPPPIPAYGGVVYQDGFYGADIYGGYAAYRYAQPTPATAAAYSDRNQFVFVAADEISCNTSAVTDEFMLPTPTTTHLLQPPPTALVPCPKVPAPAQTSEELSCTLPGLCCQAAENLTASPPLLQFMFKVIVAQERK

SEQ ID NO: 75479 - protein, 263 aa, Homo sapiens
  Payload ID: 14908
  Gene Symbol: RBFOX1
  Gene Name: RNA binding protein, fox-1 homolog (C. elegans) 1
  ENSP ID: ENSP00000447281
MNCEREQLRGNQEAAAAPDTMAQPYASAQFAPPQNGIPAEYTAPHPHPAPEYTGQTTVPEHTLNLYPPAQTHSEQSPADTSAQTVSGTATQTDDAAPTDGQPQTQPSENTENKSQPKRLHVSNIPFRFRDPDLRQMFGQFGKILDVEIIFNERGSKGFGFVTFENSADADRAREKLHGTVVEGRKIEVNNATARVMTNKKTVNPYTNGWKLNPVVGAVYSPEFYAGTVLLCQANQEGSSMYSAPSSLVYTSAMPGFPYPAATA

SEQ ID NO: 75480 - protein, 397 aa, Homo sapiens
  Payload ID: 14908
  Gene Symbol: RBFOX1
  Gene Name: RNA binding protein, fox-1 homolog (C. elegans) 1
  Uniprot ID: Q9NWB1
  ENSP ID: ENSP00000447717
MNCEREQLRGNQEAAAAPDTMAQPYASAQFAPPQNGIPAEYTAPHPHPAPEYTGQTTVPEHTLNLYPPAQTHSEQSPADTSAQTVSGTATQTDDAAPTDGQPQTQPSENTENKSQPKRLHVSNIPFRFRDPDLRQMFGQFGKILDVEIIFNERGSKGFGFVTFENSADADRAREKLHGTVVEGRKIEVNNATARVMTNKKTVNPYTNGWKLNPVVGAVYSPEFYAGTVLLCQANQEGSSMYSAPSSLVYTSAMPGFPYPAATAAAAYRGAHLRGRGRTVYNTFRAAAPPPPIPAYGGVVYQDGFYGADIYGGYAAYRYAQPTPATAAAYSDSYGRVYAADPYHHALAPAPTYGVGAMNAFAPLTDAKTRSHADDVGLVLSSLQASIYRGGYNRFAPY

SEQ ID NO: 75481 - protein, 370 aa, Homo sapiens
  Payload ID: 14908
  Gene Symbol: RBFOX1
  Gene Name: RNA binding protein, fox-1 homolog (C. elegans) 1
  Uniprot ID: Q9NWB1
  ENSP ID: ENSP00000447753
MNCEREQLRGNQEAAAAPDTMAQPYASAQFAPPQNGIPAEYTAPHPHPAPEYTGQTTVPEHTLNLYPPAQTHSEQSPADTSAQTVSGTATQTDDAAPTDGQPQTQPSENTENKSQPKRLHVSNIPFRFRDPDLRQMFGQFGKILDVEIIFNERGSKGFGFVTFENSADADRAREKLHGTVVEGRKIEVNNATARVMTNKKTVNPYTNGWKLNPVVGAVYSPEFYAVPGFPYPAATAAAAYRGAHLRGRGRTVYNTFRAAAPPPPIPAYGGVVYQDGFYGADIYGGYAAYRYAQPTPATAAAYSDSYGRVYAADPYHHALAPAPTYGVGAMNAFAPLTDAKTRSHADDVGLVLSSLQASIYRGGYNRFAPY

SEQ ID NO: 75482 - protein, 391 aa, Homo sapiens
  Payload ID: 14908
  Gene Symbol: RBFOX1
  Gene Name: RNA binding protein, fox-1 homolog (C. elegans) 1
  ENSP ID: ENSP00000448496
MKSWQLIAVVGDALQDIKADCNTCVEIEDRKVSRQQMNCEREQLRGNQEAAAAPDTMAQPYASAQFAPPQNGIPAEYTAPHPHPAPEYTGQTTVPEHTLNLYPPAQTHSEQSPADTSAQTVSGTATTDDAAPTDGQPQTQPSENTENKSQPKRLHVSNIPFRFRDPDLRQMFGGFGFVTFENSADADRAREKLHGTVVEGRKIEVNNATARVMTNKKTVNPYTNGWKLNPVVGAVYSPEFYAGTVLLCQANQEGSSMYSAPSSLVYTSAMPGFPYPAATAAAAYRGAHLRGRGRTVYNTFRAAAPPPPIPAYGGVVYQDGFYGADIYGGYAAYRYAQPTPATAAAYSDRNQFVFVAADEISCNTSAVTDEFMLPTPTTTHLLQPPPTALVP

SEQ ID NO: 75483 - protein, 397 aa, Homo sapiens; identical to SEQ ID NO: 75480
  Payload ID: 14908
  Gene Symbol: RBFOX1
  Gene Name: RNA binding protein, fox-1 homolog (C. elegans) 1
  Uniprot ID: Q9NWB1
  ENSP ID: ENSP00000450031

SEQ ID NO: 75484 - protein, 262 aa, Homo sapiens
  Payload ID: 14908
  Gene Symbol: RBFOX1
  Gene Name: RNA binding protein, fox-1 homolog (C. elegans) 1
  ENSP ID: ENSP00000450402
MNCEREQLRGNQEAAAAPDTMAQPYASAQFAPPQNGIPAEYTAPHPHPAPEYTGQTTVPEHTLNLYPPAQTHSEQSPADTSAQTVSGTATTDDAAPTDGQPQTQPSENTENKSQPKRLHVSNIPFRFRDPDLRQMFGQFGKILDVEIIFNERGSKGFGFVTFENSADADRAREKLHGTVVEGRKIEVNNATARVMTNKKTVNPYTNGWKLNPVVGAVYSPEFYAGTVLLCQANQEGSSMYSAPSSLVYTSAMPGFPYPAATA

SEQ ID NO: 75485 - protein, 74 aa, Homo sapiens
  Payload ID: 14908
  Gene Symbol: RBFOX1
  Gene Name: RNA binding protein, fox-1 homolog (C. elegans) 1
  ENSP ID: ENSP00000454250
  MOD_RES (1)..(1): Any amino acid
XHLRGRGRTVYNTFRAAAPPPPIPAYGGVVMLHTATPSLPLPLPLPTVTVTDEFMLPTPTTTHLLQPPPTALVP

SEQ ID NO: 75486 - protein, 189 aa, Homo sapiens
  Payload ID: 14908
  Gene Symbol: RBFOX1
  Gene Name: RNA binding protein, fox-1 homolog (C. elegans) 1
  ENSP ID: ENSP00000458748
MEEKGSRMVQQGNQEAAAAPDTMAQPYASAQFAPPQNGIPAEYTAPHPHPAPEYTGQTTVPEHTLNLYPPAQTHSEQSPADTSAQTVSGTATQTDDAAPTDGQPQTQPSENTENKSQPKRLHVSNIPFRFRDPDLRQMFGQFGKILDVEIIFNERGSKGFGFVTFENSADADRAREKLHGTVVEGRKIE

SEQ ID NO: 75487 - protein, 375 aa, Homo sapiens
  Payload ID: 14908
  Gene Symbol: RBFOX1
  Gene Name: RNA binding protein, fox-1 homolog (C. elegans) 1
  ENSP ID: ENSP00000484837
MIVPAAPYLPGLIQGNQEAAAAPDTMAQPYASAQFAPPQNGIPAEYTAPHPHPAPEYTGQTTVPEHTLNLYPPAQTHSEQSPADTSAQTVSGTATQTDDAAPTDGQPQTQPSENTENKSQPKRLHVSNIPFRFRDPDLRQMFGQFGKILDVEIIFNERGSKGFGFVTFENSADADRAREKLHGTVVEGRKIEVNNATARVMTNKKTVNPYTNGWKLNPVVGAVYSPEFYAVPGFPYPAATAAAAYRGAHLRGRGRTVYNTFRAAAPPPPIPAYGGVVYQDGFYGADIYGGYAAYRYAQPTPATAAAYSDSYGRVYAADPYHHALAPAPTYGVGAMNAFAPLTDAKTRSHADDVGLVLSSLQASIYRGGYNRFAPY

SEQ ID NO: 75488 - protein, 358 aa, Homo sapiens
  Payload ID: 14909
  Gene Symbol: RBFOX2
  Gene Name: RNA binding protein, fox-1 homolog (C. elegans) 2
  Uniprot ID: O43251
  ENSP ID: ENSP00000262829
MEKKKMVTQGNQEPTTTPDAMVQPFTTIPFPPPPQNGIPTEYGVPHTQDYAGQTGEHNLTLYGSTQAHGEQSSNSPSTQNGSLTTEGGAQTDGQQSQTQSSENSESKSTPKRLHVSNIPFRFRDPDLRQMFGGFGFVTFENSADADRAREKLHGTVVEGRKIEVNNATARVMTNKKMVTPYANGWKLSPVVGAVYGPELYAASSFQADVSLGNDAAVPLSGRGGINTYIPLIIPGFPYPTAATTAAAFRGAHLRGRGRTVYGAVRAVPPTAIPAYPGVVYQDGFYGADLYGGYAAYRYAQPATATAATAAAAAAAAYSDGYGRVYTADPYHALAPAASYGVGAVASLYRGGYSRFAPY

SEQ ID NO: 75489 - protein, 370 aa, Homo sapiens
  Payload ID: 14909
  Gene Symbol: RBFOX2
  Gene Name: RNA binding protein, fox-1 homolog (C. elegans) 2
  ENSP ID: ENSP00000352328
MVQPFTTIPFPPPPQNGIPTEYGVPHTQDYAGQTGEHNLTLYGSTQAHGEQSSNSPSTQNGSLTTEGGAQTDGQQSQTQSSENSESKSTPKRLHVSNIPFRFRDPDLRQMFGQFGKILDVEIIFNERGSKGFGFVTFENSADADRAREKLHGTVVEGRKIEVNNATARVMTNKKMVTPYANGWKLSPVVGAVYGPELYAASSFQADVSLGNDAAVPLSGRGGINTYIPLIIPGFPYPTAATTAAAFRGAHLRGRGRTVYGAVRAVPPTAIPAYPGVVYQDGFYGADLYIESANCFRSNRVDMQPTDMHSLLLQPQPPLLQPLQPLTVTVMAGCTQPTPTMPLPLPLAMELALWRVYTEVATADLPPTEVT

SEQ ID NO: 75490 - protein, 357 aa, Homo sapiens
  Payload ID: 14909
  Gene Symbol: RBFOX2
  Gene Name: RNA binding protein, fox-1 homolog (C. elegans) 2
  ENSP ID: ENSP00000380470
MVQPFTTIPFPPPPQNGIPTEYGVPHTQDYAGQTGEHNLTLYGSTQAHGEQSSNSPSTQNGSLTQTEGGAQTDGQQSQTQSSENSESKSTPKRLHVSNIPFRFRDPDLRQMFGQFGKILDVEIIFNERGSKGFGFVTFENSADADRAREKLHGTVVEGRKIEVNNATARVMTNKKMVTPYANGWKLSPVVGAVYGPELYAASSFQADVSLGNDAAVPLSGRGGINTYIPLIIPGFPYPTAATTAAAFRGAHLRGRGRTVYGAVRAVPPTAIPAYPGVVYQDGFYGADLYGGYAAYRYAQPATATAATAAAAAAAAYSDGYGRVYTADPYHALAPAASYGVGAVASLYRGGYSRFAPY

SEQ ID NO: 75491 - protein, 128 aa, Homo sapiens
  Payload ID: 14909
  Gene Symbol: RBFOX2
  Gene Name: RNA binding protein, fox-1 homolog (C. elegans) 2
  ENSP ID: ENSP00000380472
MVQPFTTIPFPPPPQNGIPTEYGVPHTQDYAGQTGEHNLTLYGSTQAHGEQSSNSPSTQNGSLTTEGGAQTDGQQSQTQSSENSESKSTPKRLHVSNIPFRFRDPDLRQMFGFGKILDVEIIFNERGS

SEQ ID NO: 75492 - protein, 367 aa, Homo sapiens
  Payload ID: 14909
  Gene Symbol: RBFOX2
  Gene Name: RNA binding protein, fox-1 homolog (C. elegans) 2
  Uniprot ID: O43251
  ENSP ID: ENSP00000384944
MEKKKMVTQGNQEPTTTPDAMVQPFTTIPFPPPPQNGIPTEYGVPHTQDYAGQTGEHNLTLYGSTQAHGEQSSNSPSTQNGSLTQTEGGAQTDGQQSQTQSSENSESKSTPKRLHVSNIPFRFRDPDLRQMFGQFGKILDVEIIFNERGSKGFGFVTFENSADADRAREKLHGTVVEGRKIEVNNATARVMTNKKMVTPYANGWKLSPVVGAVYGPELYAASSFQADVSLGNDAAVPLSGRGGINTYIPLIIPGFPYPTAATTAAAFRGAHLRGRGRTVYGAVRAVPPTAIPAYPGVDMQPTDMHSLLLQPQPPLLQPLQPLTVTVMAGCTQPTPTMPLPLPLAMELALWRVYTEVATADLPPTEVT

SEQ ID NO: 75493 - protein, 200 aa, Homo sapiens
  Payload ID: 14909
  Gene Symbol: RBFOX2
  Gene Name: RNA binding protein, fox-1 homolog (C. elegans) 2
  ENSP ID: ENSP00000386177
MSSDSMDQPRNPCENEPLTPGYHGFPARDSQGNQEPTTTPDAMVQPFTTIPFPPPPQNGIPTEYGVPHTQDYAGQTGEHNLTLYGSTQAHGEQSSNSPSTQNGSLTQTEGGAQTDGQQSQTQSSENSESKSTPKRLHVSNIPFRFRDPDLRQMFGQFGKILDVEIIFNERGSKGFGFVTFENSADADRAREKLHGTVVEG

SEQ ID NO: 75494 - protein, 380 aa, Homo sapiens
  Payload ID: 14909
  Gene Symbol: RBFOX2
  Gene Name: RNA binding protein, fox-1 homolog (C. elegans) 2
  Uniprot ID: O43251
  ENSP ID: ENSP00000391670
MEKKKMVTQGNQEPTTTPDAMVQPFTTIPFPPPPQNGIPTEYGVPHTQDYAGQTGEHNLTLYGSTQAHGEQSSNSPSTQNGSLTTEGGAQTDGQQSQTQSSENSESKSTPKRLHVSNIPFRFRDPDLRQMFGQFGKILDVEIIFNERGSKGFGFVTFENSADADRAREKLHGTVVEGRKIEVNNATARVMTNKKMVTPYANGWKLSPVVGAVYGPELYAASSFQADVSLGNDAAVPLSGRGGINTYIPLISLPLVPGFPYPTAATTAAAFRGAHLRGRGRTVYGAVRAVPPTAIPAYPGVVYQDGFYGADLYGGYAAYRYAQPATATAATAAAAAAAAYSDGYGRVYTADPYHALAPAASYGVGAVASLYRGGYSRFAPY

SEQ ID NO: 75495 - protein, 376 aa, Homo sapiens
  Payload ID: 14909
  Gene Symbol: RBFOX2
  Gene Name: RNA binding protein, fox-1 homolog (C. elegans) 2
  Uniprot ID: O43251
  ENSP ID: ENSP00000405651
MEKKKMVTQGNQEPTTTPDAMVQPFTTIPFPPPPQNGIPTEYGVPHTQDYAGQTGEHNLTLYGSTQAHGEQSSNSPSTQNGSLTTEGGAQTDGQQSQTQSSENSESKSTPKRLHVSNIPFRFRDPDLRQMFGQFGKILDVEIIFNERGSKGFGFVTFENSADADRAREKLHGTVVEGRKIEVNNATARVMTNKKMVTPYANGWKLSPVVGAVYGPELYAASSFQADVSLGNDAAVPLSGRGGINTYIPLIIPGFPYPTAATTAAAFRGAHLRGRGRTVYGAVRAVPPTAIPAYPGVVYQDGFYGADLYGGYAAYRYAQPATATAATAAAAAAAAYSDGYGRVYTADPYHALAPAASYGVGAVASLYRGGYSRFAPY

SEQ ID NO: 75496 - protein, 370 aa, Homo sapiens
  Payload ID: 14909
  Gene Symbol: RBFOX2
  Gene Name: RNA binding protein, fox-1 homolog (C. elegans) 2
  Uniprot ID: O43251
  ENSP ID: ENSP00000407855
MEKKKMVTQGNQEPTTTPDAMVQPFTTIPFPPPPQNGIPTEYGVPHTQDYAGQTGEHNLTLYGSTQAHGEQSSNSPSTQNGSLTTEGGAQTDGQQSQTQSSENSESKSTPKRLHVSNIPFRFRDPDLRQMFGQFGKILDVEIIFNERGSKGFGFVTFENSADADRAREKLHGTVVEGRKIEVNNATARVMTNKKMVTPYANGWKLSPVVGAVYGPELYAASSFQADVSLGNDAAVPLSGRGGINTYIPLISLPLVPGFPYPTAATTAAAFRGAHLRGRGRTVYGAVRAVPPTAIPAYPGVDMQPTDMHSLLLQPQPPLLQPLQPLTVTVMAGCTQPTPTMPLPLPLAMELALWRVYTEVATADLPPTEVT

SEQ ID NO: 75497 - protein, 451 aa, Homo sapiens
  Payload ID: 14909
  Gene Symbol: RBFOX2
  Gene Name: RNA binding protein, fox-1 homolog (C. elegans) 2
  Uniprot ID: O43251
  ENSP ID: ENSP00000413035
MAEGAQPHQPPQLGPGAAARGMKRESELELPVPGAGGDGADPGLSKRPRTEEAAADGGGGMQNEPLTPGYHGFPARDSQGNQEPTTTPDAMVQPFTTIPFPPPPQNGIPTEYGVPHTQDYAGQTGEHNLTLYGSTQAHGEQSSNSPSTQNGSLTQTEGGAQTDGQQSQTQSSENSESKSTPKRLHVSNIPFRFRDPDLRQMFGQFGKILDVEIIFNERGSKGFGFVTFENSADADRAREKLHGTVVEGRKIEVNNATARVMTNKKMVTPYANGWKLSPVVGAVYGPELYAASSFQADVSLGNDAAVPLSGRGGINTYIPLISLPLVPGFPYPTAATTAAAFRGAHLRGRGRTVYGAVRAVPPTAIPAYPGVVYQDGFYGADLYGGYAAYRYAQPATATAATAAAAAAAAYSDGYGRVYTADPYHALAPAASYGVGAVASLYRGGYSRFAPY

SEQ ID NO: 75498 - protein, 230 aa, Homo sapiens
  Payload ID: 14909
  Gene Symbol: RBFOX2
  Gene Name: RNA binding protein, fox-1 homolog (C. elegans) 2
  ENSP ID: ENSP00000474464
  MOD_RES (1)..(1): Any amino acid
XSKGFGFVTFENSADADRAREKLHGTVVEGRKIEVNNATARVMTNKKMVTPYANGWKLSPVVGAVYGPELYAASSFQADVSLGNDAAVPLSGRGGINTYIPLIIPGFPYPTAATTAAAFRGAHLRGRGRTVYGAVRAVPPTAIPAYPGIVLQEPIISAKIPQGGYAAYRYAQPATATAATAAAAAAAAYSDGYGRVYTADPYHALAPAASYGVGAVASLYRGGYSRFAPY

SEQ ID NO: 75499 - protein, 234 aa, Homo sapiens
  Payload ID: 14909
  Gene Symbol: RBFOX2
  Gene Name: RNA binding protein, fox-1 homolog (C. elegans) 2
  ENSP ID: ENSP00000475142
MVQPFTTIPFPPPPQNGIPTEYGVPHTQDYAGQTGEHNLTLYGSTQAHGEQSSNSPSTQNGSLTTEGGAQTDGQQSQTQSSENSESKSTPKRLHVSNIPFRFRDPDLRQMFGQFGKILDVEIIFNERGSKGFGFVTFENSADADRAREKLHGTVVEGRKIEVNNATARVMTNKKMVTPYANGWKLSPVVGAVYGPELYAASSFQADVSLGNDAAVPLSGRGGINTYIPLIIPGF

SEQ ID NO: 75500 - protein, 380 aa, Homo sapiens; identical to SEQ ID NO: 75494
  Payload ID: 14909
  Gene Symbol: RBFOX2
  Gene Name: RNA binding protein, fox-1 homolog (C. elegans) 2
  Uniprot ID: O43251
  ENSP ID: ENSP00000479761

SEQ ID NO: 75501 - protein, 367 aa, Homo sapiens; identical to SEQ ID NO: 75492
  Payload ID: 14909
  Gene Symbol: RBFOX2
  Gene Name: RNA binding protein, fox-1 homolog (C. elegans) 2
  Uniprot ID: O43251
  ENSP ID: ENSP00000482053

SEQ ID NO: 75502 - protein, 358 aa, Homo sapiens; identical to SEQ ID NO: 75488
  Payload ID: 14909
  Gene Symbol: RBFOX2
  Gene Name: RNA binding protein, fox-1 homolog (C. elegans) 2
  Uniprot ID: O43251
  ENSP ID: ENSP00000485711

SEQ ID NO: 75503 - protein, 357 aa, Homo sapiens; identical to SEQ ID NO: 75490
  Payload ID: 14909
  Gene Symbol: RBFOX2
  Gene Name: RNA binding protein, fox-1 homolog (C. elegans) 2
  ENSP ID: ENSP00000485961

SEQ ID NO: 75504 - protein, 370 aa, Homo sapiens; identical to SEQ ID NO: 75496
  Payload ID: 14909
  Gene Symbol: RBFOX2
  Gene Name: RNA binding protein, fox-1 homolog (C. elegans) 2
  Uniprot ID: O43251
  ENSP ID: ENSP00000485984

SEQ ID NO: 75505 - protein, 234 aa, Homo sapiens; identical to SEQ ID NO: 75499
  Payload ID: 14909
  Gene Symbol: RBFOX2
  Gene Name: RNA binding protein, fox-1 homolog (C. elegans) 2
  ENSP ID: ENSP00000486468

SEQ ID NO: 75506 - protein, 389 aa, Homo sapiens
  Payload ID: 14909
  Gene Symbol: RBFOX2
  Gene Name: RNA binding protein, fox-1 homolog (C. elegans) 2
  ENSP ID: ENSP00000486570
NEPLTPGYHGFPARDSQGNQEPTTTPDAMVQPFTTIPFPPPPQNGIPTEYGVPHTQDYAGQTGEHNLTLYGSTQAHGEQSSNSPSTQNGSLTQTEGGAQTDGQQSQTQSSENSESKSTPKRLHVSNIPFRFRDPDLRQMFGQFGKILDVEIIFNERGSKGFGFVTFENSADADRAREKLHGTVVEGRKIEVNNATARVMTNKKMVTPYANGWKLSPVVGAVYGPELYAASSFQADVSLGNDAAVPLSGRGGINTYIPLISLPLVPGFPYPTAATTAAAFRGAHLRGRGRTVYGAVRAVPPTAIPAYPGVVYQDGFYGADLYGGYAAYRYAQPATATAATAAAAAAAAYSDGYGRVYTADPYHALAPAASYGVGAVASLYRGGYSRFAPY

SEQ ID NO: 75507 - protein, 227 aa, Homo sapiens
  Payload ID: 14909
  Gene Symbol: RBFOX2
  Gene Name: RNA binding protein, fox-1 homolog (C. elegans) 2
  ENSP ID: ENSP00000486646
GFGFVTFENSADADRAREKLHGTVVEGRKIEVNNATARVMTNKKMVTPYANGWKLSPVVGAVYGPELYAASSFQADVSLGNDAAVPLSGRGGINTYIPLIIPGFPYPTAATTAAAFRGAHLRGRGRTVYGAVRAVPPTAIPAYPGIVLQEPIISAKIPQGGYAAYRYAQPATATAATAAAAAAAAYSDGYGRVYTADPYHALAPAASYGVGAVASLYRGGYSRFAPY

SEQ ID NO: 75508 - protein, 128 aa, Homo sapiens; identical to SEQ ID NO: 75491
  Payload ID: 14909
  Gene Symbol: RBFOX2
  Gene Name: RNA binding protein, fox-1 homolog (C. elegans) 2
  ENSP ID: ENSP00000486659

SEQ ID NO: 75509 - protein, 370 aa, Homo sapiens; identical to SEQ ID NO: 75489
  Payload ID: 14909
  Gene Symbol: RBFOX2
  Gene Name: RNA binding protein, fox-1 homolog (C. elegans) 2
  ENSP ID: ENSP00000487328

SEQ ID NO: 75510 - protein, 376 aa, Homo sapiens; identical to SEQ ID NO: 75495
  Payload ID: 14909
  Gene Symbol: RBFOX2
  Gene Name: RNA binding protein, fox-1 homolog (C. elegans) 2
  Uniprot ID: O43251
  ENSP ID: ENSP00000487477

SEQ ID NO: 75511 - protein, 186 aa, Homo sapiens
  Payload ID: 14909
  Gene Symbol: RBFOX2
  Gene Name: RNA binding protein, fox-1 homolog (C. elegans) 2
  ENSP ID: ENSP00000487500
NEPLTPGYHGFPARDSQGNQEPTTTPDAMVQPFTTIPFPPPPQNGIPTEYGVPHTQDYAGQTGEHNLTLYGSTQAHGEQSSNSPSTQNGSLTQTEGGAQTDGQQSQTQSSENSESKSTPKRLHVSNIPFRFRDPDLRQMFGQFGKILDVEIIFNERGSKGFGFVTFENSADADRAREKLHGTVVEG

SEQ ID NO: 75512 - protein, 325 aa, Homo sapiens
  Payload ID: 14910
  Gene Symbol: RBFOX3
  Gene Name: RNA binding protein, fox-1 homolog (C. elegans) 3
  Uniprot ID: A6NFN3
  ENSP ID: ENSP00000462007
MAQPYPPAQYPPPPQNGIPAEYAPPPPHPTQDYSGQTPVPTEHGMTLYTPAQTHPEQPGSEASTQPIAGTQTVPQTDEAAQTDSQPLHPSDPTEKQQPKRLHVSNIPFRFRDPDLRQMFGQFGKILDVEIIFNERGSKGFGFVTFETSSDADRAREKLNGTIVEGRKIEVNNATARVMTNKKTGNPYTNGWKLNPVVGAVYGPEFYAVTGFPYPTTGTAVAYRGAHLRGRGRAVYNTFRAAPPPPPIPTYGAVVYQDGFYGAEIYGGYAAYRYAQPAAAAAAYSDSYGRVYAAADPYHHTIGPAATYSIGTMVRSPGPPSPGCQS

SEQ ID NO: 75513 - protein, 312 aa, Homo sapiens
  Payload ID: 14910
  Gene Symbol: RBFOX3
  Gene Name: RNA binding protein, fox-1 homolog (C. elegans) 3
  Uniprot ID: A6NFN3
  ENSP ID: ENSP00000463653
MAQPYPPAQYPPPPQNGIPAEYAPPPPHPTQDYSGQTPVPTEHGMTLYTPAQTHPEQPGSEASTQPIAGTQTVPQTDEAAQTDSQPLHPSDPTEKQQPKRLHVSNIPFRFRDPDLRQMFGQFGKILDVEIIFNERGSKGFGFVTFETSSDADRAREKLNGTIVEGRKIEVNNATARVMTNKKTGNPYTNGWKLNPVVGAVYGPEFYAVTGFPYPTTGTAVAYRGAHLRGRGRAVYNTFRAAPPPPPIPTYGAVVYQDGFYGAEIYGGYAAYRYAQPAAAAAAYSDSYGRVYAAADPYHHTIGPAATYSIGTM

SEQ ID NO: 75514 - protein, 328 aa, Homo sapiens
  Payload ID: 14910
  Gene Symbol: RBFOX3
  Gene Name: RNA binding protein, fox-1 homolog (C. elegans) 3
  ENSP ID: ENSP00000463964
MAQPYPPAQYPPPPQNGIPAEYAPPPPHPTQDYSGQTPVPTEHGMTLYTPAQTHPEQPGSEASTQPIAGTQTVPQTDEAAQTDSQPLHPSDPTEKQQPKRLHVSNIPFRFRDPDLRQMFGQFGKILDVEIIFNERGSKVNNATARVMTNKKTGNPYTNGWKLNPVVGAVYGPEFYAVTGFPYPTTGTAVAYRGAHLRGRGRAVYNTFRAAPPPPPIPTYGAALEQTLVKMPVPWAGLAPCPLPPQQTPEPAYPTSPAFPPLSCPFASRVVYQDGFYGAEIYGGYAAYRYAQPAAAAAAYSDSYGRVYAAADPYHHTIGPAATYSIGTM

SEQ ID NO: 75515 - protein, 358 aa, Homo sapiens
  Payload ID: 14910
  Gene Symbol: RBFOX3
  Gene Name: RNA binding protein, fox-1 homolog (C. elegans) 3
  ENSP ID: ENSP00000464186
MAQPYPPAQYPPPPQNGIPAEYAPPPPHPTQDYSGQTPVPTEHGMTLYTPAQTHPEQPGSEASTQPIAGTQTVPTDEAAQTDSQPLHPSDPTEKQQPKRLHVSNIPFRFRDPDLRQMFGQFGKILDVEIIFNERGSKGFGFVTFETSSDADRAREKLNGTIVEGRKIEVNNATARVMTNKKTGNPYTNGWKLNPVVGAVYGPEFYAVTGFPYPTTGTAVAYRGAHLRGRGRAVYNTFRAAPPPPPIPTYGAALEQTLVKMPVPWAGLAPCPLPPQQTPEPAYPTSPAFPPLSCPFASRVVYQDGFYGAEIYGGYAAYRYAQPAAAAAAYSDSYGRVYAAADPYHHTIGPAATYSIGTM

SEQ ID NO: 75516 - protein, 4 aa, Homo sapiens
  Payload ID: 14910
  Gene Symbol: RBFOX3
  Gene Name: RNA binding protein, fox-1 homolog (C. elegans) 3
  ENSP ID: ENSP00000464946
MAQP

SEQ ID NO: 75517 - protein, 75 aa, Homo sapiens
  Payload ID: 14910
  Gene Symbol: RBFOX3
  Gene Name: RNA binding protein, fox-1 homolog (C. elegans) 3
  ENSP ID: ENSP00000465367
  MOD_RES (1)..(1): Any amino acid
XVVYQDGFYGAEIYGGYAAYRYAQPAAAAAAYSDSYGRVYAAADPYHHTIGPAATYSIGTMASLCRGGYSRFTPY

SEQ ID NO: 75518 - protein, 52 aa, Homo sapiens
  Payload ID: 14910
  Gene Symbol: RBFOX3
  Gene Name: RNA binding protein, fox-1 homolog (C. elegans) 3
  ENSP ID: ENSP00000467872
MLCSMANSGCLLLSNSGSMLPHSVPCPPAFLYLQQSDQDATAPPEAMAQPYP

SEQ ID NO: 75519 - protein, 131 aa, Homo sapiens
  Payload ID: 14910
  Gene Symbol: RBFOX3
  Gene Name: RNA binding protein, fox-1 homolog (C. elegans) 3
  ENSP ID: ENSP00000468693
  MOD_RES (1)..(1): Any amino acid
XVGAVYGPEFYAVTGFPYPTTGTAVAYRGAHLRGRGRAVYNTFRAAPPPPPIPTYGAVVYQDGFYGAEIYGGYAAYRYAQPAAAAAAYSDSYGRVYAAADPYHHTIGPAATYSIGTMASLCRGGYSRFTPY

SEQ ID NO: 75520 - protein, 237 aa, Homo sapiens
  Payload ID: 14911
  Gene Symbol: REXO2
  Gene Name: RNA exonuclease 2
  Uniprot ID: Q9Y3B8
  ENSP ID: ENSP00000265881
MLGGSLGSRLLRGVGGSHGRFGARGVREGGAAMAAGESMAQRMVWVDLEMTGLDIEKDQIIEMACLITDSDLNILAEGPNLIIKQPDELLDSMSDWCKEHHGKSGLTKAVKESTITLQQAEYEFLSFVRQQTPPGLCPLAGNSVHEDKKFLDKYMPQFMKHLHYRIIDVSTVKELCRRWYPEEYEFAPKKAASHRALDDISESIKELQFYRNNIFKKKIDEKKRKIIENGENEKTVS

SEQ ID NO: 75521 - protein, 67 aa, Homo sapiens
  Payload ID: 14911
  Gene Symbol: REXO2
  Gene Name: RNA exonuclease 2
  ENSP ID: ENSP00000437380
IEKDQIIEMACLITDSDLNILAEGPNLIIKQPDELLDSMSDWCKEHHGKEIQFMKIRSFLTNTCPSS

SEQ ID NO: 75522 - protein, 85 aa, Homo sapiens
  Payload ID: 14911
  Gene Symbol: REXO2
  Gene Name: RNA exonuclease 2
  ENSP ID: ENSP00000437460
MLGGSLGSRLLRGVGGSHGRFGARGVREGGAAMAAGESMAQRMVWVDLEMTGLDIEKDQIIEMACLITDSDLNILAEVKEVRTYF

SEQ ID NO: 75523 - protein, 222 aa, Homo sapiens
  Payload ID: 14911
  Gene Symbol: REXO2
  Gene Name: RNA exonuclease 2
  ENSP ID: ENSP00000440665
MLGGSLGSRLLRGVGGSHGRFGARGVREGGAAMAAGESMAQRMVWVDLEMTGLDIEKDQIIEMACLITDSDLNILAEGPNLIIKQPDELLDSMSDWCKEHHGKQAEYEFLSFVRQQTPPGLCPLAGNSVHEDKKFLDKYMPQFMKHLHYRIIDVSTVKELCRRWYPEEYEFAPKKAASHRALDDISESIKELQFYRNNIFKKKIDEKKRKIIENGENEKTVS

SEQ ID NO: 75524 - protein, 90 aa, Homo sapiens
  Payload ID: 14911
  Gene Symbol: REXO2
  Gene Name: RNA exonuclease 2
  ENSP ID: ENSP00000441639
  MOD_RES (1)..(1): Any amino acid
XGSRLLRGVGGSHGRFGARGVREGGAAMAAGESMAQRMVWVDLEMTGLDIEKDQIIEMACLITDSDLNILAEEIQFMKIRSFLTNTCPSS

SEQ ID NO: 75525 - protein, 188 aa, Homo sapiens
  Payload ID: 14911
  Gene Symbol: REXO2
  Gene Name: RNA exonuclease 2
  ENSP ID: ENSP00000441844
MTGLDIEKDQIIEMACLITDSDLNILAEGPNLIIKQPDELLDSMSDWCKEHHGKSGLTKAVKESTITLQQAEYEFLSFVRQQTPPGLCPLAGNSVHEDKKFLDKYMPQFMKHLHYRIIDVSTVKELCRRWYPEEYEFAPKKAASHRALDDISESIKELQFYRNNIFKKKIDEKKRKIIENGENEKTVS

SEQ ID NO: 75526 - protein, 67 aa, Homo sapiens
  Payload ID: 14911
  Gene Symbol: REXO2
  Gene Name: RNA exonuclease 2
  ENSP ID: ENSP00000442380
MLGGSLGSRLLRGVGGSHGRFGARGVREGGAAMAAGESMAQRMVWVDLEEIQFMKIRSFLTNTCPSS

SEQ ID NO: 75527 - protein, 121 aa, Homo sapiens
  Payload ID: 14911
  Gene Symbol: REXO2
  Gene Name: RNA exonuclease 2
  ENSP ID: ENSP00000442703
MLGGSLGSRLLRGVGGSHGRFGARGVREGGAAMAAGESMAQRMVWVDLEMTGLDIEKDQIIEMACLITDSDLNILAEGPNLIIKQPDELLDSMSDWCKEHHGKEIQFMKIRSFLTNTCPSS

SEQ ID NO: 75528 - protein, 79 aa, Homo sapiens
  Payload ID: 14911
  Gene Symbol: REXO2
  Gene Name: RNA exonuclease 2
  ENSP ID: ENSP00000443842
MLGGSLGSRLLRGVGGSHGRFGARGVREGGAAMAAGESMAQRMVWVDLEMTGLDIEKDQIIEMACLITDSDLNILAEGT

SEQ ID NO: 75529 - protein, 192 aa, Homo sapiens
  Payload ID: 14911
  Gene Symbol: REXO2
  Gene Name: RNA exonuclease 2
  ENSP ID: ENSP00000444421
  MOD_RES (1)..(1): Any amino acid
XGRFGARGVREGGAAMAAGESMAQRMVWVDLEGPNLIIKQPDELLDSMSDWCKEHHGKSGLTKAVKESTITLQQAEYEFLSFVRQQTPPGLCPLAGNSVHEDKKFLDKYMPQFMKHLHYRIIDVSTVKELCRRWYPEEYEFAPKKAASHRALDDISESIKELQFYRNNIFKKKIDEKKRKIIENGENEKTVS

SEQ ID NO: 75530 - protein, 237 aa, Homo sapiens; identical to SEQ ID NO: 75520
  Payload ID: 14911
  Gene Symbol: REXO2
  Gene Name: RNA exonuclease 2
  Uniprot ID: Q9Y3B8
  ENSP ID: ENSP00000480535

SEQ ID NO: 75531 - protein, 574 aa, Homo sapiens
  Payload ID: 14912
  Gene Symbol: RNGTT
  Gene Name: RNA guanylyltransferase and 5'-phosphatase
  Uniprot ID: O60942
  ENSP ID: ENSP00000358487
MAHNKIPPRWLNCPRRGQPVAGRFLPLKTMLGPRYDSQVAEENRFHPSMLSNYLKSLKVKMGLLVDLTNTSRFYDRNDIEKEGIKYIKLQCKGHGECPTTENTETFIRLCERFNERNPPELIGVHCTHGFNRTGFLICAFLVEKMDWSIEAAVATFAQARPPGIYKGDYLKELFRRYGDIEEAPPPPLLPDWCFEDDEDEDEDEDGKKESEPGSSASFGKRRKERLKLGAIFLEGVTVKGVTQVTTQPKLGEVQQKCHQFCGWEGSGFPGAQPVSMDKQNIKLLDLKPYKVSWKADGTRYMMLIDGTNEVFMIDRDNSVFHVSNLEFPFRKDLRMHLSNTLLDGEMIIDRVNGQAVPRYLIYDIIKFNSQPVGDCDFNVRLQCIEREIISPRHEKMKTGLIDKTQEPFSVRNKPFFDICTSRKKYKPGRCDDILKWKPPSLNSVDFRLKITRMGGEGLLPQNVGLLYVGGYERPFAQIKVTKELKQYDNKIIECKFENNSWVFMRQRTDKSFPNAYNTAMAVCNSISNPVTKEMLFEFIDRCTAASQGQKRKHHLDPDTELMPPPPPKRPRPLT

SEQ ID NO: 75532 - protein, 597 aa, Homo sapiens
  Payload ID: 14912
  Gene Symbol: RNGTT
  Gene Name: RNA guanylyltransferase and 5'-phosphatase
  Uniprot ID: O60942
  ENSP ID: ENSP00000358497
MAHNKIPPRWLNCPRRGQPVAGRFLPLKTMLGPRYDSQVAEENRFHPSMLSNYLKSLKVKMGLLVDLTNTSRFYDRNDIEKEGIKYIKLQCKGHGECPTTENTETFIRLCERFNERNPPELIGVHCTHGFNRTGFLICAFLVEKMDWSIEAAVATFAQARPPGIYKGDYLKELFRRYGDIEEAPPPPLLPDWCFEDDEDEDEDEDGKKESEPGSSASFGKRRKERLKLGAIFLEGVTVKGVTQVTTQPKLGEVQQKCHQFCGWEGSGFPGAQPVSMDKQNIKLLDLKPYKVSWKADGTRYMMLIDGTNEVFMIDRDNSVFHVSNLEFPFRKDLRMHLSNTLLDGEMIIDRVNGQAVPRYLIYDIIKFNSQPVGDCDFNVRLQCIEREIISPRHEKMKTGLIDKTQEPFSVRNKPFFDICTSRKLLEGNFAKEVSHEMDGLIFQPTGKYKPGRCDDILKWKPPSLNSVDFRLKITRMGGEGLLPQNVGLLYVGGYERPFAQIKVTKELKQYDNKIIECKFENNSWVFMRQRTDKSFPNAYNTAMAVCNSISNPVTKEMLFEFIDRCTAASQGQKRKHHLDPDTELMPPPPPKRPRPLT

SEQ ID NO: 75533 - protein, 457 aa, Homo sapiens
  Payload ID: 14912
  Gene Symbol: RNGTT
  Gene Name: RNA guanylyltransferase and 5'-phosphatase
  Uniprot ID: O60942
  ENSP ID: ENSP00000442609
MAHNKIPPRWLNCPRRGQPVAGRFLPLKTMLGPRYDSQVAEENRFHPSMLSNYLKSLKVKMGLLVDLTNTSRFYDRNDIEKEGIKYIKLQCKGHGECPTTENTETFIRLCERFNERNPPELIGVHCTHGFNRTGFLICAFLVEKMDWSIEAAVATFAQARPPGIYKGDYLKELFRRYGDIEEAPPPPLLPDWCFEDDEDEDEDEDGKKESEPGSSASFGKRRKERLKLGAIFLEGVTVKGVTQVTTQPKLGEVQQKCHQFCGWEGSGFPGAQPVSMDKQNIKLLDLKPYKVSWKADGTRYMMLIDGTNEVFMIDRDNSVFHVSNLEFPFRKDLRMHLSNTLLDGEMIIDRVNGQAVPRYLIYDIIKFNSQPVGDCDFNVRLQCIEREIISPRHEKMKTGLIDKTQEPFSVRNKPFFDICTSRKKYKPGRCDDILKWKPPSLNSVDFRLKITRMGGEG

SEQ ID NO: 75534 - protein, 420 aa, Homo sapiens
  Payload ID: 14913
  Gene Symbol: RNMTL1
  Gene Name: RNA methyltransferase like 1
  Uniprot ID: Q9HC36
  ENSP ID: ENSP00000306080
MAALVRPARFVVRPLLQVVQAWDLDARRWVRALRRSPVKVVFPSGEVVEQKRAPGKQPRKAPSEASAQEQREKQPLEESASRAPSTWEESGLRYDKAYPGDRRLSSVMTIVKSRPFREKQGKILLEGRRLISDALKAGAVPKMFFFSRLEYLKELPVDKLKGVSLIKVKFEDIKDWSDLVTPQGIMGIFAKPDHVKMTYPKTQLQHSLPLLLICDNLRDPGNLGTILRSAAGAGCSKVLLTKGCVDAWEPKVLRAGMGAHFRMPIINNLEWETVPNYLPPDTRVYVADNCGLYAQAEMSNKASDHGWVCDQRVMKFHKYEEEEDVETGASQDWLPHVEVQSYDSDWTEAPAAVVIGGETYGVSLESLQLAESTGGKRLLIPVVPGVDSLNSAMAASILLFEGKRQLRGRAEDLSRDRSYH

SEQ ID NO: 75535 - protein, 110 aa, Homo sapiens
  Payload ID: 14913
  Gene Symbol: RNMTL1
  Gene Name: RNA methyltransferase like 1
  ENSP ID: ENSP00000458328
MAALVRPARFVVRPLLQVVQAWDLDARRWVRALRRSPVKVVFPSGEVVEQKRAPGKQPRKAPSEASAQEQREKQPLEESASRAPSTWEESGLRYDKAYPGDRRLRDFCQA

SEQ ID NO: 75536 - protein, 177 aa, Homo sapiens
  Payload ID: 14913
  Gene Symbol: RNMTL1
  Gene Name: RNA methyltransferase like 1
  ENSP ID: ENSP00000460957
  MOD_RES (1)..(1): Any amino acid
XPLEESASRAPSTWEESGLRYDKAYPGDRRLSSVMTIVKSRPFREKQGKILLEGRRLISDALKAGAVPKMFFFSRLEYLKELPVDKLKGVSLIKVKFEDIKDWSDLVTPQGIMGIFAKPDHVKMTYPKTQLQHSLPLLLICDNLRDPGNLGTILRSAAGAGCSKVLLTKGKDIKGQA

SEQ ID NO: 75537 - protein, 1393 aa, Homo sapiens
  Payload ID: 14914
  Gene Symbol: RPAP1
  Gene Name: RNA polymerase II associated protein 1
  Uniprot ID: Q9BWH6
  ENSP ID: ENSP00000306123
MLSRPKPGESEVDLLHFQSQFLAAGAAPAVQLVKKGNRGGGDANSDRPPLQDHRDVVMLDNLPDLPPALVPSPPKRARPSPGHCLPEDEDPEERLRRHDQHITAVLTKIIERDTSSVAVNLPVPSGVAFPAVFLRSRDTQGKSATSGKRSIFAQEIAARRIAEAKGPSVGEVVPNVGPPEGAVTCETPTPRNQGCQLPGSSHSFQGPNLVTGKGLRDQEAEQEAQTIHEENIARLQAMAPEEILQEQQRLLAQLDPSLVAFLRSHSHTQEQTGETASEEQRPGGPSANVTKEEPLMSAFASEPRKRDKLEPEAPALALPVTPQKEWLHMDTVELEKLHWTQDLPPVRRQQTQERMQARFSLQGELLAPDVDLPTHLGLHHHGEEAERAGYSLQELFHLTRSQVSQQRALALHVLAQVISRAQAGEFGDRLAGSVLSLLLDAGFLFLLRFSLDDRVDGVIATAIRALRALLVAPGDEELLDSTFSWYHGALTFPLMPSQEDKEDEDEDEECPAGKAKRKSPEEESRPPPDLARHDVIKGLLATSLLPRLRYVLEVTYPGPAVVLDILAVLIRLARHSLESATRVLECPRLIETIVREFLPTSWSPVGAGPTPSLYKVPCATAMKLLRVLASAGRNIAARLLSSFDLRSRLCRIIAEAPQELALPPEEAEMLSTEALRLWAVAASYGQGGYLYRELYPVLMRALQVVPRELSTHPPQPLSMQRIASLLTLLTQLTLAAGSTPAETISDSAEASLSATPSLVTWTQVSGLQPLVEPCLRQTLKLLSRPEMWRAVGPVPVACLLFLGAYYQAWSQQPSSCPEDWLQDMQRLSEELLLPLLSQPTLGSLWDSLRHCSLLCNPLSCVPALEAPPSLVSLGCSGGCPRLSLAGSASPFPFLTALLSLLNTLAQIHKGLCGQLAAILAAPGLQNYFLQCVAPGAAPHLTPFSAWALRHEYHLQYLALALAQKAAALQPLPATHAALYHGMALALLSRLLPGSEYLTHELLLSCVFRLEFLPERTSGGPEAADFSDQLSLGSSRVPRCGQGTLLAQACQDLPSIRNCYLTHCSPARASLLASQALHRGELQRVPTLLLPMPTEPLLPTDWPFLPLIRLYHRASDTPSGLSPTDTMGTAMRVLQWVLVLESWRPQALWAVPPAARLARLMCVFLVDSELFRESPVQHLVAALLAQLCQPQVLPNLNLDCRLPGLTSFPDLYANFLDHFEAVSFGDHLFGALVLLPLQRRFSVTLRLALFGEHVGALRALSLPLTQLPVSLECYTVPPEDNLALLQLYFRTLVTGALRPRWCPVLYAVAVAHVNSFIFSQDPQSSDEVKAARRSMLQKTWLLADEGLRQHLLHYKLPNSTLPEGFELYSQLPPLRQHYLQRLTSTVLQNGVSET

SEQ ID NO: 75538 - protein, 1315 aa, Homo sapiens
  Payload ID: 14914
  Gene Symbol: RPAP1
  Gene Name: RNA polymerase II associated protein 1
  Uniprot ID: Q9BWH6
  ENSP ID: ENSP00000455363
MLSRPKPGESEVDLLHFQSQFLAAGAAPAVQLVKKGNRGGGDANSDRPPLQDHRDVVMLDNLPDLPPALVPSPPKRARPSPGHCLPEDEDPEERLRRHDQHITAVLTKIIERDTSSVAVNLPVPSGVAFPAVFLRSRDTQGKSATSGKRSIFAQEIAARRIAEAKGPSVGEVVPNVGPPEGAVTCETPTPRNQGCQLPGSSHSFQGPNLVTGKGLRDQEAEQEAQTIHEENIARLQAMAPEEILQEQQRLLAQLDPSLVAFLRSHSHTQEQTGETASEEQRPGGPSANVTKEEPLMSAFASEPRKRDKLEPEAPALALPVTPQKEWLHMDTVELEKLHWTQDLPPVRRQQTQERMQARFSLQGELLAPDVDLPTHLGLHHHGEEAERAGYSLQELFHLTRSQVSQQRALALHVLAQVISRAQAGEFGDRLAGSVLSLLLDAGFLFLLRFSLDDRVDGVIATAIRALRALLVAPGDEELLDSTFSWYHGALTFPLMPSQEDKEDEDEDEECPAGKAKRKSPEEESRPPPDLARHDVIKGLLATSLLPRLRYVLEVTYPGPAVVLDILAVLIRLARHSLESATRVLECPRLIETIVREFLPTSWSPVGAGPTPSLYKVPCATAMKLLRVLASAGRNIAARLLSSFDLRSRLCRIIAEAPQELALPPEEAEMLSTEALRLWAVAASYGQGGYLYRELYPVLMRALQVVPRELSTHPPQPLSMQRIASLLTLLTQLTLAAGSTPAETISDSAEASLSATPSLVTWTQVSGLQPLVEPCLRQTLKLLSRPEMWRAVGPVPVACLLFLGAYYQAWSQQPSSCPEDWLQDMQRLSEELLLPLLSQPTLGSLWDSLRHCSLLCNPLSCVPALEAPPSLVSLGCSGGCPRLSLAGSASPFPFLTALLSLLNTLAQIHKGLCGQLAAILAAPGLQNYFLQCVAPGAAPHLTPFSAWALRHEYHLQYLALALAQKAAALQPLPATHAALYHGMALALLSRLLPGSEYLTHELLLSCVFRLEFLPERTSGGPEAADFSDQLSLGSSRVPRCGQGTLLAQACQDLPSIRNCYLTHCSPARASLLASQALHRGELQRVPTLLLPMPTEPLLPTDWPFLPLIRLYHRASDTPSGLSPTDTMGTAMRVLQWVLVLESWRPQALWAVPPAARLARLMCVFLVDSELFRESPVQHLVAALLAQLCQPQVLPNLNLDCRLPGLTSFPDLYANFLDHFEAVSFGDHLFGALVLLPLQRRFSVTLRLALFGEHVGALRALSLPLTQVLSQPSRTCKGTLHWASGAVLSLEELWKTSASSSYLLGALRGLRESMKRA

SEQ ID NO: 75539 - protein, 180 aa, Homo sapiens
  Payload ID: 14914
  Gene Symbol: RPAP1
  Gene Name: RNA polymerase II associated protein 1
  ENSP ID: ENSP00000455381
MLSRPKPGESEVDLLHFQSQFLAAGAAPAVQLVKKGNRGGGDANSDRPPLQDHRDVVMLDNLPDLPPALVPSPPKRARPSPGHCLPEDEDPEERLRRHDQHITAVLTKIIERDTSSVAVNLPVPSGVAFPAVFLRSRDTQGKSATSGKRSIFAQEIAARRIAEAKGPSVGEVVPNVGPPE

SEQ ID NO: 75540 - protein, 128 aa, Homo sapiens
  Payload ID: 14914
  Gene Symbol: RPAP1
  Gene Name: RNA polymerase II associated protein 1
  ENSP ID: ENSP00000455527
MLSRPKPGESEVDLLHFQSQFLAAGAAPAVQLVKKGNRGGGDANSDRPPLQDHRDVVMLDNLPDLPPALVPSPPKRARPSPGHCLPEDEDPEERLRRHDQHITAVLTKIIERDTSSVAVNLPVPSGVA

SEQ ID NO: 75541 - protein, 1128 aa, Homo sapiens
  Payload ID: 14914
  Gene Symbol: RPAP1
  Gene Name: RNA polymerase II associated protein 1
  ENSP ID: ENSP00000456207
MLSRPKPGESEVDLLHFQSQFLAAGAAPAVQLVKKGNRGGGDANSDRPPLQDHRDVVMLDNLPDLPPALVPSPPKRARPSPGHCLPEDEDPEERLRRHDQHITAVLTKIIERDTSSVAVNLPVPSGVAFPAVFLRSRDTQGKSATSGKRSIFAQEIAARRIAEAKGPSVGEVVPNVGPPEGAVTCETPTPRNQGCQLPGSSHSFQGPNLVTGKGLRDQEAEQEAQTIHEENIARLQAMAPEEILQEQQRLLAQLDPSLVAFLRSHSHTQEQTGETASEEQRPGGPSANVTKEEPLMSAFASEPRKRDKLEPEAPALALPVTPQKEWLHMDTVELEKLHWTQDLPPVRRQQTQERMQARFSLQGELLAPDVDLPTHLGLHHHGEEAERAGYSLQELFHLTRSQVSQQRALALHVLAQVISRAQAGEFGDRLAGSVLSLLLDAGFLFLLRFSLDDRVDGVIATAIRALRALLVAPGDEELLDSTFSWYHGALTFPLMPSQEDKEDEDEDEECPAGKAKRKSPEEESRPPPDLARHDVIKGLLATSLLPRLRYVLEVTYPGPAVVLDILAVLIRLARHSLESATRVLECPRLIETIVREFLPTSWSPVGAGPTPSLYKVPCATAMKLLRVLASAGRNIAARLLSSFDLRSRLCRIIAEAPQELALPPEEAEMLSTEALRLWAVAASYGQGGYLYRELYPVLMRALQVVPRELSTHPPQPLSMQRIASLLTLLTQLTLAAGSTPAETISDSAEASLSATPSLVTWTQVSGLQPLVEPCLRQTLKLLSRPEMWRAVGPVPVACLLFLGAYYQAWSQQPSSCPEDWLQDMQRLSEELLLPLLSQPTLGSLWDSLRHCSLLCNPLSCVPALEAPPSLVSLGCSGGCPRLSLAGSASPFPFLTALLSLLNTLAQIHKGLCGQLAAILAAPGLQNYFLQCVAPGAAPHLTPFSAWALRHEYHLQYLALALAQKAAALQPLPATHAALYHGMALALLSRLLPGSEYLTHELLLSCVFRLEFLPCLCPWSVTQCLLKTTWPSFSSTSGPWLLVRSAHVGAPCSMLWLWLMSIASSSLRTHRAQMRSKLPAGVCCRKHGCWQMRVSGSTSCTISFPIPRSQRALSSILSCPLCVSTTSRD

SEQ ID NO: 75542 - protein, 200 aa, Homo sapiens
  Payload ID: 14914
  Gene Symbol: RPAP1
  Gene Name: RNA polymerase II associated protein 1
  ENSP ID: ENSP00000457203
STLCYCHETTSCPGLSWEEYCCPADCAHFQLSSFDLRSRLCRIIAEAPQELALPPEEAEMLSTEALRLWAVAASYGQGGYLYRELYPVLMRALQVVPRELSTHPPQPLSMQRIASLLTLLTQLTLAAGSTPAETISDSAEASLSATPSLVTWTQVSGLQPLVEPCLRQTLKLLSRPEMWRAVGPVPVACLLFLGAYYQAW

SEQ ID NO: 75543 - protein, 612 aa, Homo sapiens
  Payload ID: 14915
  Gene Symbol: RPAP2
  Gene Name: RNA polymerase II associated protein 2
  Uniprot ID: Q8IXW5
  ENSP ID: ENSP00000476948
MADFAGPSSAGRKAGAPRCSRKAAGTKQTSTLKQEDASKRKAELEAAVRKKIEFERKALHIVEQLLEENITEEFLMECGRFITPAHYSDVVDERSIVKLCGYPLCQKKLGIVPKQKYKISTKTNKVYDITERKSFCSNFCYQASKFFEAQIPKTPVWVREEERHPDFQLLKEEQSGHSGEEVQLCSKAIKTSDIDNPSHFEKQYESSSSSTHSDSSSDNEQDFVSSILPGNRPNSTNIRPQLHQKSIMKKKAGHKANSKHKDKEQTVVDVTEQLGDCKLDSQEKDATCELPLQKVNTQSSSNSTLPERLKASENSESEYSRSEITLVGISKKSAEHFKRKFAKSNQVSRSVSSSVQVCPEVGKRNLLKVLKETLIEWKTEETLRFLYGQNYASVCLKPEASLVKEELDEDDIISDPDSHFPAWRESQNSLDESLPFRGSGTAIKPLPSYENLKKETEKLNLRIREFYRGRYVLGEETTKSQDSEEHDSTFPLIDSSSQNQIRKRIVLEKLSKVLPGLLVPLQITLGDIYTQLKNLVRTFRLTNRNIIHKPAEWTLIAMVLLSLLTPILGIQKHSQEGMVFTRFLDTLLEELHLKNEDLESLTIIFRTSCLPE

SEQ ID NO: 75544 - protein, 665 aa, Homo sapiens
  Payload ID: 14916
  Gene Symbol: RPAP3
  Gene Name: RNA polymerase II associated protein 3
  Uniprot ID: Q9H6T3
  ENSP ID: ENSP00000005386
MTSANKAIELQLQVKQNAEELQDFMRDLENWEKDIKQKDMELRRQNGVPEENLPPIRNGNFRKKKKGKAKESSKKTREENTKNRIKSYDYEAWAKLDVDRILDELDKDDSTHESLSQESESEEDGIHVDSQKALVLKEKGNKYFKQGKYDEAIDCYTKGMDADPYNPVLPTNRASAYFRLKKFAVAESDCNLAVALNRSYTKAYSRRGAARFALQKLEEAKKDYERVLELEPNNFEATNELRKISQALASKENSYPKEADIVIKSTEGERKQIEAQQNKQQAISEKDRGNGFFKEGKYERAIECYTRGIAADGANALLPANRAMAYLKIQKYEEAEKDCTQAILLDGSYSKAFARRGTARTFLGKLNEAKQDFETVLLLEPGNKQAVTELSKIKKELIEKGHWDDVFLDSTQRQNVVKPIDNPPHPGSTKPLKKVIIEETGNLIQTIDVPDSTTAAAPENNPINLANVIAATGTTSKKNSSQDDLFPTSDTPRAKVLKIEEVSDTSSLQPQASLKQDVCQSYSEKMPIEIEQKPAQFATTVLPPIPANSFQLESDFRQLKSSPDMLYQYLKQIEPSLYPKLFQKNLDPDVFNQIVKILHDFYIEKEKPLLIFEILQRLSELKRFDMAVMFMSETEKKIARALFNHIDKSGLKDSSVEELKKRYGG

SEQ ID NO: 75545 - protein, 631 aa, Homo sapiens
  Payload ID: 14916
  Gene Symbol: RPAP3
  Gene Name: RNA polymerase II associated protein 3
  Uniprot ID: Q9H6T3
  ENSP ID: ENSP00000370024
MTSANKAIELQLQVKQNAEELQDFMRDLENWEKDIKQKDMELRRQNGVPEENLPPIRNGNFRKKKKGKAKESSKKTREENTKNRIKSYDYEAWAKLDVDRILDELDKDDSTHESLSQESESEEDGIHVDSQKALVLKEKGNKYFKQGKYDEAIDCYTKGMDADPYNPVLPTNRASAYFRLKKFAVAESDCNLAVALNRSYTKAYSRRGAARFALQKLEEAKKDYERVLELEPNNFEATNELRKISQALASKENSYPKEADIVIKSTEGERKQIEAQQNKQQAISEKDRGNGFFKEGKYERAIECYTRGIAADGANALLPANRAMAYLKIQKYEEAEKDCTQAILLDGSYSKAFARRGTARTFLGKLNEAKQDFETVLLLEPGNKQAVTELSKIKKKPLKKVIIEETGNLIQTIDVPDSTTAAAPENNPINLANVIAATGTTSKKNSSQDDLFPTSDTPRAKVLKIEEVSDTSSLQPQASLKQDVCQSYSEKMPIEIEQKPAQFATTVLPPIPANSFQLESDFRQLKSSPDMLYQYLKQIEPSLYPKLFQKNLDPDVFNQIVKILHDFYIEKEKPLLIFEILQRLSELKRFDMAVMFMSETEKKIARALFNHIDKSGLKDSSVEELKKRYGG

SEQ ID NO: 75546 - protein, 506 aa, Homo sapiens
  Payload ID: 14916
  Gene Symbol: RPAP3
  Gene Name: RNA polymerase II associated protein 3
  Uniprot ID: Q9H6T3
  ENSP ID: ENSP00000401823
MDADPYNPVLPTNRASAYFRLKKFAVAESDCNLAVALNRSYTKAYSRRGAARFALQKLEEAKKDYERVLELEPNNFEATNELRKISQALASKENSYPKEADIVIKSTEGERKQIEAQQNKQQAISEKDRGNGFFKEGKYERAIECYTRGIAADGANALLPANRAMAYLKIQKYEEAEKDCTQAILLDGSYSKAFARRGTARTFLGKLNEAKQDFETVLLLEPGNKQAVTELSKIKKELIEKGHWDDVFLDSTQRQNVVKPIDNPPHPGSTKPLKKVIIEETGNLIQTIDVPDSTTAAAPENNPINLANVIAATGTTSKKNSSQDDLFPTSDTPRAKVLKIEEVSDTSSLQPQASLKQDVCQSYSEKMPIEIEQKPAQFATTVLPPIPANSFQLESDFRQLKSSPDMLYQYLKQIEPSLYPKLFQKNLDPDVFNQIVKILHDFYIEKEKPLLIFEILQRLSELKRFDMAVMFMSETEKKIARALFNHIDKSGLKDSSVEELKKRYGG

SEQ ID NO: 75547 - protein, 312 aa, Homo sapiens
  Payload ID: 14917
  Gene Symbol: RPUSD1
  Gene Name: RNA pseudouridylate synthase domain containing 1
  Uniprot ID: Q9UJJ7
  ENSP ID: ENSP00000007264
MEPGSVENLSIVYRSRDFLVVNKHWDVRIDSKAWRETLTLQKQLRYRFPELADPDTCYGFRFCHQLDFSTSGALCVALNKAAAGSAYRCFKERRVTKAYLALLRGHIQESRVTISHAIGRNSTEGRAHTMCIEGSQGCENPKPSLTDLVVLEHGLYAGDPVSKVLLKPLTGRTHQLRVHCSALGHPVVGDLTYGEVSGREDRPFRMMLHAFYLRIPTDTECVEVCTPDPFLPSLDACWSPHTLLQSLDQLVQALRATPDPDPEDRGPRPGSPSALLPGPGRPPPPPTKPPETEAQRGPCLQWLSEWTLEPDS

SEQ ID NO: 75548 - protein, 181 aa, Homo sapiens
  Payload ID: 14917
  Gene Symbol: RPUSD1
  Gene Name: RNA pseudouridylate synthase domain containing 1
  ENSP ID: ENSP00000454616
MCIEGSQGVAGCENPKPSLTDLVVLEHGLYAGDPVSKVLLKPLTGRTHQLRVHCSALGHPVVGDLTYGEVSGREDRPFRMMLHAFYLRIPTDTECVEVCTPDPFLPSLDACWSPHTLLQSLDQLVQALRATPDPDPEDRGPRPGSPSALLPGPGRPPPPPTKPPETEAQRGPCLQWLSEWT

SEQ ID NO: 75549 - protein, 312 aa, Homo sapiens; identical to SEQ ID NO: 75547
  Payload ID: 14917
  Gene Symbol: RPUSD1
  Gene Name: RNA pseudouridylate synthase domain containing 1
  Uniprot ID: Q9UJJ7
  ENSP ID: ENSP00000455026

SEQ ID NO: 75550 - protein, 183 aa, Homo sapiens
  Payload ID: 14917
  Gene Symbol: RPUSD1
  Gene Name: RNA pseudouridylate synthase domain containing 1
  ENSP ID: ENSP00000455862
MCIEGSQGCENPKPSLTDLVVLEHGLYAGDPVSKVLLKPLTGRTHQLRVHCSALGHPVVGDLTYGEVSGREDRPFRMMLHAFYLRIPTDTECVEVCTPDPFLPSLDACWSPHTLLQSLDQLVQALRATPDPDPEDRGPRPGSPSALLPGPGRPPPPPTKPPETEAQRGPCLQWLSEWTLEPDS

SEQ ID NO: 75551 - protein, 168 aa, Homo sapiens
  Payload ID: 14917
  Gene Symbol: RPUSD1
  Gene Name: RNA pseudouridylate synthase domain containing 1
  ENSP ID: ENSP00000456231
MEPGSVENLSIVYRSRDFLVVNKHWDVRIDSKAWRETLTLQKQLRYRFPELADPDTCYGFRFCHQLDFSTSGALCVALNKAAAGSAYRCFKERRVTKAYLALLRGHIQESRVTISHAIGRNSTEGRAHTMCIEGSQGVAGCENPKPSLTDLVVLEHGLYAGDPVSKVL

SEQ ID NO: 75552 - protein, 97 aa, Homo sapiens
  Payload ID: 14917
  Gene Symbol: RPUSD1
  Gene Name: RNA pseudouridylate synthase domain containing 1
  ENSP ID: ENSP00000456545
MEPGSVENLSIVYRSRDFLVVNKHWDVRIDSKAWRETLTLQKQLRYRFPELADPDTCYGFRFCHQLDFSTSGALCVALNKAAAGSAYSCGGTSRRAG

SEQ ID NO: 75553 - protein, 173 aa, Homo sapiens
  Payload ID: 14917
  Gene Symbol: RPUSD1
  Gene Name: RNA pseudouridylate synthase domain containing 1
  ENSP ID: ENSP00000456692
MCIEGSQGCENPKPSLTDLVVLEHGLYAGDPVSKVLLKPLTGRTHQLRVHCSALGHPVVGDLTYGEVSGREDRPFRMMLHAFYLRIPTDTECVEVCTPDPFLPSLDACWSPHTLLQSLDQLVQALRATPDPDPEDRGPRPGSPSALLPGPGRPPPPPTKPPETEAQRGPCLQW

SEQ ID NO: 75554 - protein, 141 aa, Homo sapiens
  Payload ID: 14917
  Gene Symbol: RPUSD1
  Gene Name: RNA pseudouridylate synthase domain containing 1
  ENSP ID: ENSP00000457527
MEPGSVENLSIVYRSRDFLVVNKHWDVRIDSKAWRETLTLQKQLRYRFPELADPDTCYGFRFCHQLDFSTSGALCVALNKAAAGSAYRCFKERRVTKAYLALVRPAAGAHPGEPGNHQPCHWQEQHGGPGPHHVHRGLAGL

SEQ ID NO: 75555 - protein, 131 aa, Homo sapiens
  Payload ID: 14917
  Gene Symbol: RPUSD1
  Gene Name: RNA pseudouridylate synthase domain containing 1
  ENSP ID: ENSP00000457722
MEPGSVENLSIVYRSRDFLVVNKHWDVRIDSKAWRETLTLQKQLRYRFPELADPDTCYGFRFCHQLDFSTSGALCVALNKAAAGSAYRCFKERRVTKAYLALVVRTQSQASQISWFWNTGCTQAILSPKCC

SEQ ID NO: 75556 - protein, 178 aa, Homo sapiens
  Payload ID: 14917
  Gene Symbol: RPUSD1
  Gene Name: RNA pseudouridylate synthase domain containing 1
  ENSP ID: ENSP00000458059
  MOD_RES (1)..(1): Any amino acid
XQLDFSTSGALCVALNKAAAGSAYRCFKERRVTKAYLALLRGHIQESRVTISHAIGRNSTEGRAHTMCIEGSQGCENPKPSLTDLVVLEHGLYAGDPVSKVLLKPLTGVSGVGGVLVVTEGKLRHRATKLMLGHPEHQGRAGNKHSCVLNSTPCSLSASHLTQGPCWLLTDSLGVWLA

SEQ ID NO: 75557 - protein, 545 aa, Homo sapiens
  Payload ID: 14918
  Gene Symbol: RPUSD2
  Gene Name: RNA pseudouridylate synthase domain containing 2
  Uniprot ID: Q8IZ73
  ENSP ID: ENSP00000323288
MWLDRRGWLRVLGHWRYDLRRPSFTRTWSGDKGPMAETVSTQVGTEGGLRASHQQNGDAGGDAKVELSPGPPKPAGREVEPAPVGGEHPSAAAPGPGKHKKRRGATRERVVPPPKKRRTGVSFGDEHFAETSYYFEGGLRKVRPYYFDFRTYCKGRWVGHSLLHVFSTEFRAQPLAYYEAAVRAGRLQLNEKPVQDLNIVLKDNDFLRNTVHRHEPPVTAEPIRLLAENEDVVVVDKPSSIPVHPCGRFRHNTVIFILGKEHQLKELHPLHRLDRLTSGVLMFAKTAAVSERIHEQVRDRQLEKEYVCRVEGEFPTEEVTCKEPILVVSYKVGVCRVDPRGKPCETVFQRLSYNGQSSVVRCRPLTGRTHQIRVHLQFLGHPILNDPIYNSVAWGPSRGRGGYIPKTNEELLRDLVAEHQAKQSLDVLDLCEGDLSPGLTDSTAPSSELGKDDLEELAAAAQKMEEVAEAAPQELDTIALASEKAVETDVMNQETDPLCAECRLVRQDPLPQDLVMFLHALRYKGPGFEYFSPMPAWAQDDWQKD

SEQ ID NO: 75558 - protein, 484 aa, Homo sapiens
  Payload ID: 14918
  Gene Symbol: RPUSD2
  Gene Name: RNA pseudouridylate synthase domain containing 2
  Uniprot ID: Q8IZ73
  ENSP ID: ENSP00000453036
MWLDRRGWLRVLGHWRYDLRRPSFTRTWSGDKGPMAETVSTQVGTEGGLRASHQQNGDAGGDAKVELSPGPPKPAGREVEPAPVGGEHPSAAAPGPGKHKKRRGATRERVVPPPKKRRTGVSFGDEHFAETSYYFEGGLRKDNDFLRNTVHRHEPPVTAEPIRLLAENEDVVVVDKPSSIPVHPCGRFRHNTVIFILGKEHQLKELHPLHRLDRLTSGVLMFAKTAAVSERIHEQVRDRQLEKEYVCRVEGEFPTEEVTCKEPILVVSYKVGVCRVDPRGKPCETVFQRLSYNGQSSVVRCRPLTGRTHQIRVHLQFLGHPILNDPIYNSVAWGPSRGRGGYIPKTNEELLRDLVAEHQAKQSLDVLDLCEGDLSPGLTDSTAPSSELGKDDLEELAAAAQKMEEVAEAAPQELDTIALASEKAVETDVMNQETDPLCAECRLVRQDPLPQDLVMFLHALRYKGPGFEYFSPMPAWAQDDWQKD

SEQ ID NO: 75559 - protein, 172 aa, Homo sapiens
  Payload ID: 14918
  Gene Symbol: RPUSD2
  Gene Name: RNA pseudouridylate synthase domain containing 2
  ENSP ID: ENSP00000480942
PMAETVSTQVGTEGGLRASHQQNGDAGGDAKVELSPGPPKPAGREVEPAPVGGEHPSAAAPGPGKHKKRRGATRERVVPPPKKRRTGVSFGDEHFAETSYYFEGGLRKVRPYYFDFRTYCKGRWVGHSLLHVFSTEFRAQPLAYYEAAVRAGRLQLNEKPVQDLNIVLKVES

SEQ ID NO: 75560 - protein, 351 aa, Homo sapiens
  Payload ID: 14919
  Gene Symbol: RPUSD3
  Gene Name: RNA pseudouridylate synthase domain containing 3
  Uniprot ID: Q6P087
  ENSP ID: ENSP00000373331
MRAVLAREMDGRRVLGRFWSGWRRGLGVRPVPEDAGFGTEARHQRQPRGSCQRSGPLGDQPFAGLLPKNLSREELVDALRAAVVDRKGPLVTLNKPQGLPVTGKPGELTLFSVLPELSQSLGLREQELQVVRASGKESSGLVLLSSCPQTASRLQKYFTHARRAQRPTATYCAVTDGIPAASEGKIQAALKLEHIDGVNLTVPVKAPSRKDILEGVKKTLSHFRVVATGSGCALVQLQPLTVFSSQLQVHMVLQLCPVLGDHMYSARVGTVLGQRFLLPAENNKPQRQVLDEALLRRLHLTPSQAAQLPLHLHLHRLLLPGTRARDTPVELLAPLPPYFSRTLQCLGLRLQ

SEQ ID NO: 75561 - protein, 151 aa, Homo sapiens
  Payload ID: 14919
  Gene Symbol: RPUSD3
  Gene Name: RNA pseudouridylate synthase domain containing 3
  ENSP ID: ENSP00000395446
NQRAGWSAGLPLWTHMRAVLAREMDGRRVLGRFWSGWRRGLGVRPVPEDAGFGTEARHQRQPRGSCQRSGPLGDQPFAGLLPKNLSREELVDALRAAVVDRKGPLVTLNKPQGLPVTGKPGELTLFSVLPELSQSLGLREQELQVVRASGK

SEQ ID NO: 75562 - protein, 36 aa, Homo sapiens
  Payload ID: 14919
  Gene Symbol: RPUSD3
  Gene Name: RNA pseudouridylate synthase domain containing 3
  ENSP ID: ENSP00000395492
  MOD_RES (1)..(1): Any amino acid
XEMDGRRVLGRFWSGWRRGLGVRPVPEDAGFGTEAR

SEQ ID NO: 75563 - protein, 102 aa, Homo sapiens
  Payload ID: 14919
  Gene Symbol: RPUSD3
  Gene Name: RNA pseudouridylate synthase domain containing 3
  ENSP ID: ENSP00000396405
  MOD_RES (1)..(1): Any amino acid
XVLGRFWSGWRRGLGVRPVPEDAGFGTEARTSSDVEQATGSTSDRKTRRADVVLSAARAEPVPRAQGAGASGCPSIWEVSGRGDRKLGVQASICGGETAAWG

SEQ ID NO: 75564 - protein, 336 aa, Homo sapiens
  Payload ID: 14919
  Gene Symbol: RPUSD3
  Gene Name: RNA pseudouridylate synthase domain containing 3
  Uniprot ID: Q6P087
  ENSP ID: ENSP00000398921
MRAVLAREMDGRRVLGRFWSGWRRGLGVRPVPEDAGFGTEARHQRQPRGSCQRSGPLGDQPFAGLLPKNLSREELVDALRAAVVDRKGKPGELTLFSVLPELSQSLGLREQELQVVRASGKESSGLVLLSSCPQTASRLQKYFTHARRAQRPTATYCAVTDGIPAASEGKIQAALKLEHIDGVNLTVPVKAPSRKDILEGVKKTLSHFRVVATGSGCALVQLQPLTVFSSQLQVHMVLQLCPVLGDHMYSARVGTVLGQRFLLPAENNKPQRQVLDEALLRRLHLTPSQAAQLPLHLHLHRLLLPGTRARDTPVELLAPLPPYFSRTLQCLGLRLQ

SEQ ID NO: 75565 - protein, 280 aa, Homo sapiens
  Payload ID: 14919
  Gene Symbol: RPUSD3
  Gene Name: RNA pseudouridylate synthase domain containing 3
  ENSP ID: ENSP00000400397
  MOD_RES (1)..(1): Any amino acid
XGRRVLGRFWSGWRRGLGVRPVPEDAGFGTEARHQRQPRGSCQRSGPLGDQPFAGLLPKNLSREELVDALRAAVVDRKGPLVTLNKPQGLPVTGKPGELTLFSVLPELSQSLGLREQELQVVRASGKESSGLVLLSSCPQTASRLQKYFTHARRAQRPTATYCAVTDGIPAASEGKIQAALKLEHIDGVNLACSLLAGTTDSSSEGPIPKGHPGRCQEDSQSLSCGSHRLWLCPGPAAATDSVLQSTTGAHGTTALPCAWGPHVLCPCGHCPGPAISAAS

SEQ ID NO: 75566 - protein, 144 aa, Homo sapiens
  Payload ID: 14919
  Gene Symbol: RPUSD3
  Gene Name: RNA pseudouridylate synthase domain containing 3
  ENSP ID: ENSP00000405054
  MOD_RES (1)..(1): Any amino acid
XAVTDGIPAASEGKIQAALKLEHIDGVNLTVPVKAPSRKDILEGVKKTLSHFRVVATGSGCALVQLQPLTVFSSQLQVHMVLQLCPVLGDHMYSARVGTVLGQRFLLPAENNKPQRQVLQPTCLLLSEGWRERSWMKPSSDAST

SEQ ID NO: 75567 - protein, 212 aa, Homo sapiens
  Payload ID: 14919
  Gene Symbol: RPUSD3
  Gene Name: RNA pseudouridylate synthase domain containing 3
  ENSP ID: ENSP00000408693
MGPVVPEFSRHQRQPRGSCQRSGPLGDQPFAGLLPKNLSREELVDALRAAVVDRKGPLVTLNKPQGLPVTGKPGELTLFSVLPELSQSLGLREQELQVVRASGKESSGLVLLSSCPQTASRLQKYFTHARRAQRPTATYCAVTDGIPAASEGKIQAALKLEHIDGVNLTVPVKAPSRKDILEGVKKTLSHFRVVATGSGCALVQLQPLTGPG

SEQ ID NO: 75568 - protein, 246 aa, Homo sapiens
  Payload ID: 14919
  Gene Symbol: RPUSD3
  Gene Name: RNA pseudouridylate synthase domain containing 3
  ENSP ID: ENSP00000415616
LAREMDGRRVLGRFWSGWRRGLGVRPVPEDAGFGTEARHQRQPRGSCQRSGPLGDQPFAGLLPKNLSREELVDALRAAVVDRKGPLVTLNKPQGLPVTGKPGELTLFSVLPELSQSLGLREQELQVVRASGKESSGLVLLSSCPQTASRLQKYFTHARRAQRPTATYCAVTDGIPAASEGKIQAALKLEHIDGVNLTVPVKAPSRKDILEGVKKTLSHFRVVATGSGCALVQLQPLTGRSGTLASL

SEQ ID NO: 75569 - protein, 377 aa, Homo sapiens
  Payload ID: 14920
  Gene Symbol: RPUSD4
  Gene Name: RNA pseudouridylate synthase domain containing 4
  Uniprot ID: Q96CM3
  ENSP ID: ENSP00000298317
MAAPRWSASGPWIRGNGQGCGSLFTLVSKPFCAAAAASTAINAQRLAEKLRAQKREQDTKKEPVSTNAVQRRVQEIVRFTRQLQRVHPNVLAKALTRGILHQDKNLVVINKPYGLPVHGGPGVQLCITDVLPILAKMLHGHKAEPLHLCHRLDKETTGVMVLAWDKDMAHQVQELFRTRQVVKKYWAITVHVPMPSAGVVDIPIVEKEAQGQQQHHKMTLSPSYRMDDGKMVKVRRSRNAQVAVTQYQVLSSTLSSALVELQPITGIKHQLRVHLSFGLDCPILGDHKYSDWNRLAPQKLSVGTLKKLGLEQSKARYIPLHLHARQLILPALGSGKEELNLVCKLPRFFVHSLHRLRLEMPNEDQNENNEAKCLGAQ

SEQ ID NO: 75570 - protein, 346 aa, Homo sapiens
  Payload ID: 14920
  Gene Symbol: RPUSD4
  Gene Name: RNA pseudouridylate synthase domain containing 4
  Uniprot ID: Q96CM3
  ENSP ID: ENSP00000433065
MAAPRWSASGPWIRGNGQGCGSLFTLVSKPFCAAAAASTAINAQRLAEKLRAQKREQDTKKEPVSTNAVQRRVQEIVRFTRQLQRVHPNVLAKALTRGILHQDKNLVVINKPYGLPVHGGPGVQLCITDVLPILAKMLHGHKAEPLHLCHRLDKETTGVMVLAWDKDMAHQVQELFRTRQVVKKYWAITVHVPMPSAGVVDIPIVEKEAQVAVTQYQVLSSTLSSALVELQPITGIKHQLRVHLSFGLDCPILGDHKYSDWNRLAPQKLSVGTLKKLGLEQSKARYIPLHLHARQLILPALGSGKEELNLVCKLPRFFVHSLHRLRLEMPNEDQNENNEAKCLGAQ

SEQ ID NO: 75571 - protein, 176 aa, Homo sapiens
  Payload ID: 14920
  Gene Symbol: RPUSD4
  Gene Name: RNA pseudouridylate synthase domain containing 4
  ENSP ID: ENSP00000433709
MAAPRWSASGPWIRGNGQGCGSLFTLVSKPFCAAAAASTAINAQRLAEKLRAQKREQDTKKEPVSTNAVQRRVQEIVRFTRQLQRVHPNVLAKALTRGILHQDKNLVVINKPYGLPVHGGPGVQLCITDVLPILAKMLHGHKAEPLHLCHRLDKETTGAQQHSLLRPRGAPAHHWN

SEQ ID NO: 75572 - protein, 187 aa, Homo sapiens
  Payload ID: 14921
  Gene Symbol: RCL1
  Gene Name: RNA terminal phosphate cyclase-like 1
  Uniprot ID: Q9Y2P8
  ENSP ID: ENSP00000371147
MTSLTPGCRYSVRVSPQMANRIVDSARSILNKFIPDIYIYTDHMKGVNSGKSPGFGLSLVAETTSGTFLSAELASNPQGQGAAVLPEDLGRNCARLLLEEIYRGGCVDSTNQSLALLLMTLGQQDVSKVLLGPLSPYTIEFLRHLKSFFQIMFKIETKPCGEELKGGDKVLMTCVGIGFSNLSKTLK

SEQ ID NO: 75573 - protein, 187 aa, Homo sapiens; identical to SEQ ID NO: 75572
  Payload ID: 14921
  Gene Symbol: RCL1
  Gene Name: RNA terminal phosphate cyclase-like 1
  Uniprot ID: Q9Y2P8
  ENSP ID: ENSP00000371149

SEQ ID NO: 75574 - protein, 175 aa, Homo sapiens
  Payload ID: 14921
  Gene Symbol: RCL1
  Gene Name: RNA terminal phosphate cyclase-like 1
  ENSP ID: ENSP00000371151
MATQAHSLSYAGCNFLRQRLVLSTLSGRPVKIRKIRARDDNPGLRDFEASFIRLLDKITNGSRIEINQTGTTLYYQPGLLYGGSVEHDCSVLRGIGYYLESLLCLAPFMKHPLKIVLRGVTNDQVDPSVSIENKPWCGFCFVSCHNPTCEKKVPYKAQFYYKCILLLLFTLRFRG

SEQ ID NO: 75575 - protein, 373 aa, Homo sapiens
  Payload ID: 14921
  Gene Symbol: RCL1
  Gene Name: RNA terminal phosphate cyclase-like 1
  Uniprot ID: Q9Y2P8
  ENSP ID: ENSP00000371169
MATQAHSLSYAGCNFLRQRLVLSTLSGRPVKIRKIRARDDNPGLRDFEASFIRLLDKITNGSRIEINQTGTTLYYQPGLLYGGSVEHDCSVLRGIGYYLESLLCLAPFMKHPLKIVLRGVTNDQVDPSVDVLKATALPLLKQFGIDGESFELKIVRRGMPPGGGGEVVFSCPVRKVLKPIQLTDPGKIKRIRGMAYSVRVSPQMANRIVDSARSILNKFIPDIYIYTDHMKGVNSGKSPGFGLSLVAETTSGTFLSAELASNPQGQGAAVLPEDLGRNCARLLLEEIYRGGCVDSTNQSLALLLMTLGQQDVSKVLLGPLSPYTIEFLRHLKSFFQIMFKIETKPCGEELKGGDKVLMTCVGIGFSNLSKTLK

SEQ ID NO: 75576 - protein, 187 aa, Homo sapiens; identical to SEQ ID NO: 75572
  Payload ID: 14921
  Gene Symbol: RCL1
  Gene Name: RNA terminal phosphate cyclase-like 1
  Uniprot ID: Q9Y2P8
  ENSP ID: ENSP00000388096

SEQ ID NO: 75577 - protein, 215 aa, Homo sapiens
  Payload ID: 14921
  Gene Symbol: RCL1
  Gene Name: RNA terminal phosphate cyclase-like 1
  ENSP ID: ENSP00000412000
MPPGGGGEVVFSCPVRKVLKPIQLTDPGKIKRIRGMAYSVRVSPQMANRIVDSARSILNKFIPDIYIYTDHMKGVNSGKSPGFGLSLVAETTSGTFLSAELASNPQGQGAAVLPEDLGRNCARLLLEEIYRGGCVDSTNQSLALLLMTLGQQDVSKVLLGPLSPYTIEFLRHLKSFFQIMFKIETKPCGEELKGGDKVLMTCVGIGFSNLSKTLK

SEQ ID NO: 75578 - protein, 137 aa, Homo sapiens
  Payload ID: 14921
  Gene Symbol: RCL1
  Gene Name: RNA terminal phosphate cyclase-like 1
  ENSP ID: ENSP00000413381
MTSLTPGCRYSVRVSPQMANRIVDSARSILNKFIPDIYIYTDHMKGVNSGKSPGFGLSLVAETTSGTFLSAELASNPQGQGAAVLPEDLGRNCARLLLEEIYRGGCVDSTNQSLALLLMTLGQQDVSKVLLGPLSPY

SEQ ID NO: 75579 - protein, 517 aa, Homo sapiens
  Payload ID: 14922
  Gene Symbol: RNPC3
  Gene Name: RNA-binding region (RNP1, RRM) containing 3
  Uniprot ID: Q96LT9
  ENSP ID: ENSP00000391432
MAAPEQPLAISRGCTSSSSLSPPRGDRTLLVRHLPAELTAEEKEDLLKYFGAQSVRVLSDKGRLKHTAFATFPNEKAAIKALTRLHQLKLLGHTLVVEFAKEQDRVHSPCPTSGSEKKKRSDDPVEDDKEKKELGYLTVENGIAPNHGLTFPLNSCLKYMYPPPSSTILANIVNALASVPKFYVQVLHLMNKMNLPTPFGPITARPPMYEDYMPLHAPLPPTSPQPPEEPPLPDEDEELSSEESEYESTDDEDRQRMNKLMELANLQPKRPKTIKQRHVRKKRKIKDMLNTPLCPSHSSLHPVLLPSDVFDQPQPVGNKRIEFHISTDMPAAFKKDLEKEQNCEEKNHDLPATEVDASNIGFGKIFPKPNLDITEEIKEDSDEMPSECISRRELEKGRISREEMETLSVFRSYEPGEPNCRIYVKNLAKHVQEKDLKYIFGRYVDFSSETQRIMFDIRLMKEGRMKGQAFIGLPNEKAAAKALKEANGYVLFGKPMVVQFARSARPKQDPKEGKRKC

SEQ ID NO: 75580 - protein, 185 aa, Homo sapiens
  Payload ID: 14922
  Gene Symbol: RNPC3
  Gene Name: RNA-binding region (RNP1, RRM) containing 3
  ENSP ID: ENSP00000431344
MAAPEQPLAISRGCTSSSSLSPPRGDRTLLVRHLPAELTAEEKEDLLKYFGAQSVRVLSDKGRLKHTAFATFPNEKAAIKALTRLHQLKLLGHTLVVEFAKEQDRVHSPCPTSGSEKKKRSDDPVEDDKEKKELGYLTVENGIAPNHGLTFPLNSCLKYMYPPPSSTILANIVNALASVPKFYVQ

SEQ ID NO: 75581 - protein, 517 aa, Homo sapiens; identical to SEQ ID NO: 75579
  Payload ID: 14922
  Gene Symbol: RNPC3
  Gene Name: RNA-binding region (RNP1, RRM) containing 3
  Uniprot ID: Q96LT9
  ENSP ID: ENSP00000432886

SEQ ID NO: 75582 - protein, 18 aa, Homo sapiens
  Payload ID: 14922
  Gene Symbol: RNPC3
  Gene Name: RNA-binding region (RNP1, RRM) containing 3
  ENSP ID: ENSP00000434721
FARSARPKQDPKEGKRKC

SEQ ID NO: 75583 - protein, 182 aa, Homo sapiens
  Payload ID: 14922
  Gene Symbol: RNPC3
  Gene Name: RNA-binding region (RNP1, RRM) containing 3
  ENSP ID: ENSP00000435440
  MOD_RES (1)..(1): Any amino acid
XMELANLQPKRPKTIKQRHVRKKRKIKDMLNTPLCPSHSSLHPVLLPSDVFDQPQPVGNKRIEFHISTDMPAAFKKDLEKEQNCEEKNHGFGKIFPKPNLDITEEIKEDSDEMPSECISRRELEKGRISREEMETLSVFRSYEPGEPNCRIYVKNLAKHVQEKDLKYIFGRYVDFSSETQRI

SEQ ID NO: 75584 - protein, 138 aa, Homo sapiens
  Payload ID: 14922
  Gene Symbol: RNPC3
  Gene Name: RNA-binding region (RNP1, RRM) containing 3
  ENSP ID: ENSP00000436315
MYPPPSSTILANIVNALASVPKFYVQVLHLMNKMNLPTPFGPITARPPMYEDYMPLHAPLPPTSPQPPEEPPLPDEDEELSSEESEYESTDDEDRQRMNKLMELANLQPKRPKTIKQRHVRKKRKIKDMLNTPLCPSH

SEQ ID NO: 75585 - protein, 516 aa, Homo sapiens
  Payload ID: 14922
  Gene Symbol: RNPC3
  Gene Name: RNA-binding region (RNP1, RRM) containing 3
  Uniprot ID: Q96LT9
  ENSP ID: ENSP00000437278
MAAPEQPLAISRGCTSSSSLSPPRGDRTLLVRHLPAELTAEEKEDLLKYFGAQSVRVLSDKGRLKHTAFATFPNEKAAIKALTRLHQLKLLGHTLVVEFAKEQDRVHSPCPTSGSEKKKRSDDPVEDDKEKKELGYLTVENGIAPNHGLTFPLNSCLKYMYPPPSSTILANIVNALASVPKFYVQVLHLMNKMNLPTPFGPITARPPMYEDYMPLHAPLPPTSPQPPEEPPLPDEDEELSSEESEYESTDDEDRQRMNKLMELANLQPKRPKTIKQRHVRKKRKIKDMLNTPLCPSHSLHPVLLPSDVFDQPQPVGNKRIEFHISTDMPAAFKKDLEKEQNCEEKNHDLPATEVDASNIGFGKIFPKPNLDITEEIKEDSDEMPSECISRRELEKGRISREEMETLSVFRSYEPGEPNCRIYVKNLAKHVQEKDLKYIFGRYVDFSSETQRIMFDIRLMKEGRMKGQAFIGLPNEKAAAKALKEANGYVLFGKPMVVQFARSARPKQDPKEGKRKC

SEQ ID NO: 75586 - protein, 233 aa, Homo sapiens
  Payload ID: 14923
  Gene Symbol: RNASEK-C17orf49
  Gene Name: RNASEK-C17orf49 readthrough
  ENSP ID: ENSP00000450085
  MOD_RES (1)..(1): Any amino acid
XDFENGPQNIYNLYEQVSYNCFIAAGLYLLLGGFSFCQVRLNKRKEYMVGEIFSAAGAAFTKLGELTMQLHPVADSSPAGAKWTETEIEMLRAAVKRFGDDLNHISCVIKERTVAQIKATVKRKVYEDSGIPLPAESPKKGPKKVASGVLSPPPAAPPPSSSSVPEAGGPPIKKQKADVTLSALNDSDANSDVVDIEGLGETPPAKKLNFDQDSLTLDSGLLMTSADPPLLSC

SEQ ID NO: 75587 - protein, 221 aa, Homo sapiens
  Payload ID: 14924
  Gene Symbol: RNF103-CHMP3
  Gene Name: RNF103-CHMP3 readthrough
  ENSP ID: ENSP00000392995
MWLKLFFLLLYFLVLFVLARFFEAIVWYETGIFATQLVDPVALSFKKLKTILECRGLGYSGLPEKKDVRELVEKSGDLMEGELYSALKEEEASESVSSTNFSGEMHFYELVEDTKDGIWLVQVNEWSLKIRKEMRVVDRQIRDIQREEEKVKRSVKDAAKKGQKDVCIVLAKEMIRSRKAVSKLYASKAHMNSVLMGMKNQLAVLRVAGSLQKSTEVMKAM

SEQ ID NO: 75588 - protein, 251 aa, Homo sapiens
  Payload ID: 14924
  Gene Symbol: RNF103-CHMP3
  Gene Name: RNF103-CHMP3 readthrough
  ENSP ID: ENSP00000474823
MEGELYSALKEEEASESVSSTNFSGEMHFYELVEDTKDGIWLVQVNEWSLKIRKEMRVVDRQIRDIQREEEKVKRSVKDAAKKGQKDVCIVLAKEMIRSRKAVSKLYASKAHMNSVLMGMKNQLAVLRVAGSLQKSTEVMKAMQSLVKIPEIQATMRELSKEMMKAGIIEEMLEDTFESMDDQEEMEEEAEMEIDRILFEITAGALGKAPSKVTDALPEPEPPGAMAASEDEEEEEEALEAMQSRLATLRS

SEQ ID NO: 75589 - protein, 287 aa, Homo sapiens
  Payload ID: 14925
  Gene Symbol: ROGDI
  Gene Name: rogdi homolog
  Uniprot ID: Q9GZN7
  ENSP ID: ENSP00000322832
MATVMAATAAERAVLEEEFRWLLHDEVHAVLKQLQDILKEASLRFTLPGSGTEGPAKQENFILGSCGTDQVKGVLTLQGDALSQADVNLKMPRNNQLLHFAFREDKQWKLQQIQDARNHVSQAIYLLTSRDQSYQFKTGAEVLKLMDAVMLQLTRARNRLTTPATLTLPEIAASGLTRMFAPALPSDLLVNVYINLNKLCLTVYQLHALQPNSTKNFRPAGGAVLHSPGAMFEWGSQRLEVSHVHKVECVIPWLNDALVYFTVSLQLCQQLKDKISVFSSYWSYRPF

SEQ ID NO: 75590 - protein, 121 aa, Homo sapiens
  Payload ID: 14925
  Gene Symbol: ROGDI
  Gene Name: rogdi homolog
  ENSP ID: ENSP00000464699
DVNLKMPRNNQLLHFAFREDKQWKLQQIQDARNHVSQAIYLLTSRDQSYQFKTGAEVLKRMFAPALPSDLLVNVYINLNKLCLTVYQLHALQPNSTKNFRPAGGAVLHSPGAMFGALSAWR

SEQ ID NO: 75591 - protein, 217 aa, Homo sapiens
  Payload ID: 14925
  Gene Symbol: ROGDI
  Gene Name: rogdi homolog
  ENSP ID: ENSP00000465076
  MOD_RES (1)..(1): Any amino acid
XLTLQGDALSQADVNLKMPRNNQLLHFAFREDKQWKLQQIQDARNHVSQAIYLLTSRDQSYQFKTGAEVLKLMDAVMLQLTRARNRLTTPATLTLPEIAASGLTRMFAPALPSDLLVNVYINLNKLCLTVYQLHALQPNSTKRVGLSAPGGEPRAQSGVRDPLAQRRPGLLHRLPAALPAAQGQDLRVLQLLELQTLLITAPRSLSPGRRPRPLLIP

SEQ ID NO: 75592 - protein, 68 aa, Homo sapiens
  Payload ID: 14925
  Gene Symbol: ROGDI
  Gene Name: rogdi homolog
  ENSP ID: ENSP00000465970
MATVMAATAAERAVLEEEFRWLLHDEVHAVLKQLQDILKEASLRFTLPGSGTEGPAKQENFILGSCGM

SEQ ID NO: 75593 - protein, 119 aa, Homo sapiens
  Payload ID: 14925
  Gene Symbol: ROGDI
  Gene Name: rogdi homolog
  ENSP ID: ENSP00000466529
MATVMAATAAERAVLEEEFRWLLHDEVHAVLKQLQDILKEASLRFTLPGSGTEGPAKQENFILGSCGTDQVKGVLTLQGDALSQAVSPPALSPPILPMGKSMGAPTFSLYKPCDSGRDP

SEQ ID NO: 75594 - protein, 171 aa, Homo sapiens
  Payload ID: 14925
  Gene Symbol: ROGDI
  Gene Name: rogdi homolog
  ENSP ID: ENSP00000467459
MATVMAATAAERAVLEEEFRWLLHDEVHAVLKQLQDILKLMDAVMLQLTRARNRLTTPATLTLPEIAASGLTRMFAPALPSDLLVNVYINLNKLCLTVYQLHALQPNSTKNFRPAGGAVLHSPGAMFEWGSQRLEVSHVHKVECVIPWLNDALVYFTVSLQLCQQLKDKVG

SEQ ID NO: 75595 - protein, 253 aa, Homo sapiens
  Payload ID: 14925
  Gene Symbol: ROGDI
  Gene Name: rogdi homolog
  ENSP ID: ENSP00000467509
MATVMAATAAERAVLEASLRFTLPGSGTEGPAKQENFILGSCGTDQVKGVLTLQGDALSQADVNLKMPRNNQLLHFAFREDKQWKLQQIQDARNHVSQAIYLLTSRDQSYQFKTGAEVLKLMDAVMLQLTRARNRLTTPATLTLPEIAASGLTRMFAPALPSDLLVNVYINLNKLCLTVYQLHALQPNSTKNFRPAGGAVLHSPGAMFEWGSQRLEVSHVHKVECVIPWLNDALVYFTVSLQLCQQLKDKVGP

SEQ ID NO: 75596 - protein, 73 aa, Homo sapiens
  Payload ID: 14925
  Gene Symbol: ROGDI
  Gene Name: rogdi homolog
  ENSP ID: ENSP00000468334
  MOD_RES (1)..(1): Any amino acid
XNQLLHFAFREDKQWKLQQIQDARNHVSHVHKVECVIPWLNDALVYFTVSLQLCQQLKDKISVFSSYWSYRPF

SEQ ID NO: 75597 - protein, 230 aa, Homo sapiens
  Payload ID: 14925
  Gene Symbol: ROGDI
  Gene Name: rogdi homolog
  ENSP ID: ENSP00000468343
MATVMAATAAERAVLEEEFRWLLHDEVHAVLKQLQDILKEASLRFTLPGSGTEGPAKQENFILGSCGTDQVKGVLTLQGDALSQADVNLKMPRNNQLLHFAFREDKQWKLQQIQDARNHVSQAIYLLTSRDQSYQFKTGAEPTPPLPAADGRSDAAADQSPKPAHHPRHPHPPRDRRQRPHADVRPCPAVRPAGQRLHQPQQALPHGVPAACPAAQLHQELPPSWGRGAA

SEQ ID NO: 75598 - protein, 2341 aa, Homo sapiens
  Payload ID: 14926
  Gene Symbol: ROS1
  Gene Name: ROS proto-oncogene 1 , receptor tyrosine kinase
  ENSP ID: ENSP00000357493
MKNIYCLIPKLVNFATLGCLWISVVQCTVLNSCLKSCVTNLGQQLDLGTPHNLSEPCIQGCHFWNSVDQKNCALKCNDTYATVCERESCEVGCSSAEGAYEEEVLENADLPTAPFASSIGSHNMTLRWKSANFSGVKYIIQWKYAQLLGSWTYTKTVSRPSYVVKPLHPFTEYIFRVVWIFTAQLQLYSPPSPSYRTHPHGVPETAPLIRNIESSSPDTVEVSWDPPQFPGGPILGYNLRLISKNQKLDAGTQRTSFQFYSTLPNTIYRFSIAAVNEVGEGPEAESSITTSSSAVQQEEQWLFLSRKTSLRKRSLKHLVDEAHCLRLDAIYHNITGISVDVHQQIVYFSEGTLIWAKKAANMSDVSDLRIFYRGSGLISSISIDWLYQRMYFIMDELVCVCDLENCSNIEEITPPSISAPQKIVADSYNGYVFYLLRDGIYRADLPVPSGRCAEAVRIVESCTLKDFAIKPQAKRIIYFNDTAQVFMSTFLDGSASHLILPRIPFADVKSFACENNDFLVTDGKVIFQQDALSFNEFIVGCDLSHIEEFGFGNLVIFGSSSQLHPLPGRPQELSVLFGSHQALVQWKPPALAIGASPSAWQNWTYEVKVSTQDPPEVTHIFLNISGTMLNVPELQSAMKYKVSVRASSPKRPGPWSEPSVGTTLVPASEPPFIMAVKEDGLWSKPLNSFGPGEFLSSDIGNVSDMDWYNNSLYYSDTKGDVFVWLLNGTDISENYHLPSIAGAGALAFEWLGHFLYWAGKTYVIQRQSVLTGHTDIVTHVKLLVNDMVVDSVGGYLYWTTLYSVESTRLNGESSLVLQTQPWFSGKKVIALTLDLSDGLLYWLVQDSQCIHLYTAVLRGQSTGDTTITEFAAWSTSEISQNALMYYSGRLFWINGFRIITTQEIGQKTSVSVLEPARFNQFTIIQTSLKPLPGNFSFTPKVIPDSVQESSFRIEGNASSFQILWNGPPAVDWGVVFYSVEFSAHSKFLASEQHSLPVFTVEGLEPYALFNLSVTPYTYWGKGPKTSLSLRAPETVPSAPENPRIFILPSGKCCNKNEVVVEFRWNKPKHENGVLTKFEIFYNISNQSITNKTCEDWIAVNVTPSVMSFQLEGMSPRCFIAFQVRAFTSKGPGPYADVVKSTTSEINPFPHLITLLGNKIVFLDMDQNQVVWTFSAERVISAVCYTADNEMGYYAEGDSLFLLHLHNRSSSELFQDSLVFDITVITIDWISRHLYFALKESQNGMQVFDVDLEHKVKYPREVKIHNRNSTIISFSVYPLLSRLYWTEVSNFGYQMFYYSIISHTLHRILQPTATNQQNKRNQCSCNVTEFELSGAMAIDTSNLEKPLIYFAKAQEIWAMDLEGCQCWRVITVPAMLGKTLVSLTVDGDLIYWIITAKDSTQIYQAKKGNGAIVSQVKALRSRHILAYSSVMQPFPDKAFLSLASDTVEPTILNATNTSLTIRLPLAKTNLTWYGITSPTPTYLVYYAEVNDRKNSSDLKYRILEFQDSIALIEDLQPFSTYMIQIAVKNYYSDPLEHLPPGKEIWGKTKNGVPEAVQLINTTVRSDTSLIISWRESHKPNGPKESVRYQLAISHLALIPETPLRQSEFPNGRLTLLVTRLSGGNIYVLKVLACHSEEMWCTESHPVTVEMFNTPEKPYSLVPENTSLQFNWKAPLNVNLIRFWVELQKWKYNEFYHVKTSCSQGPAYVCNITNLQPYTSYNVRVVVVYKTGENSTSLPESFKTKAGVPNKPGIPKLLEGSKNSIQWEKAEDNGCRITYYILEIRKSTSNNLQNQNLRWKMTFNGSCSSVCTWKSKNLKGIFQFRVVAANNLGFGEYSGISENIILVGDDFWIPETSFILTIIVGIFLVVTIPLTFVWHRRLKNQKSAKEGVTVLINEDKELAELRGLAAGVGLANACYAIHTLPTQEEIENLPAFPREKLTLRLLLGSGAFGEVYEGTAVDILGVGSGEIKVAVKTLKKGSTDQEKIEFLKEAHLMSKFNHPNILKQLGVCLLNEPQYIILELMEGGDLLTYLRKARMATFYGPLLTLVDLVDLCVDISKGCVYLERMHFIHRDLAARNCLVSVKDYTSPRIVKIGDFGLARDIYKNDYYRKRGEGLLPVRWMAPESLMDGIFTTQSDVWSFGILIWEILTLGHQPYPAHSNLDVLNYVQTGGRLEPPRNCPDDLWNLMTQCWAQEPDQRPTFHRIQDQLQLFRNFFLNSIYKSRDEANNSGVINESFEGEDGDVICLNSDDIMPVALMETKNREGLNYMVLATECGQGEEKSEGPLGSQESESCGLRKEEKEPHADKDFCQEKQVAYCPSGKPEGLNYACLTHSGYGDGSD

SEQ ID NO: 75599 - protein, 2347 aa, Homo sapiens
  Payload ID: 14926
  Gene Symbol: ROS1
  Gene Name: ROS proto-oncogene 1 , receptor tyrosine kinase
  Uniprot ID: P08922
  ENSP ID: ENSP00000357494
MKNIYCLIPKLVNFATLGCLWISVVQCTVLNSCLKSCVTNLGQQLDLGTPHNLSEPCIQGCHFWNSVDQKNCALKCRESCEVGCSSAEGAYEEEVLENADLPTAPFASSIGSHNMTLRWKSANFSGVKYIIQWKYAQLLGSWTYTKTVSRPSYVVKPLHPFTEYIFRVVWIFTAQLQLYSPPSPSYRTHPHGVPETAPLIRNIESSSPDTVEVSWDPPQFPGGPILGYNLRLISKNQKLDAGTQRTSFQFYSTLPNTIYRFSIAAVNEVGEGPEAESSITTSSSAVQQEEQWLFLSRKTSLRKRSLKHLVDEAHCLRLDAIYHNITGISVDVHQQIVYFSEGTLIWAKKAANMSDVSDLRIFYRGSGLISSISIDWLYQRMYFIMDELVCVCDLENCSNIEEITPPSISAPQKIVADSYNGYVFYLLRDGIYRADLPVPSGRCAEAVRIVESCTLKDFAIKPQAKRIIYFNDTAQVFMSTFLDGSASHLILPRIPFADVKSFACENNDFLVTDGKVIFQQDALSFNEFIVGCDLSHIEEFGFGNLVIFGSSSQLHPLPGRPQELSVLFGSHQALVQWKPPALAIGANVILISDIIELFELGPSAWQNWTYEVKVSTQDPPEVTHIFLNISGTMLNVPELQSAMKYKVSVRASSPKRPGPWSEPSVGTTLVPASEPPFIMAVKEDGLWSKPLNSFGPGEFLSSDIGNVSDMDWYNNSLYYSDTKGDVFVWLLNGTDISENYHLPSIAGAGALAFEWLGHFLYWAGKTYVIQRQSVLTGHTDIVTHVKLLVNDMVVDSVGGYLYWTTLYSVESTRLNGESSLVLQTQPWFSGKKVIALTLDLSDGLLYWLVQDSQCIHLYTAVLRGQSTGDTTITEFAAWSTSEISQNALMYYSGRLFWINGFRIITTQEIGQKTSVSVLEPARFNQFTIIQTSLKPLPGNFSFTPKVIPDSVQESSFRIEGNASSFQILWNGPPAVDWGVVFYSVEFSAHSKFLASEQHSLPVFTVEGLEPYALFNLSVTPYTYWGKGPKTSLSLRAPETVPSAPENPRIFILPSGKCCNKNEVVVEFRWNKPKHENGVLTKFEIFYNISNQSITNKTCEDWIAVNVTPSVMSFQLEGMSPRCFIAFQVRAFTSKGPGPYADVVKSTTSEINPFPHLITLLGNKIVFLDMDQNQVVWTFSAERVISAVCYTADNEMGYYAEGDSLFLLHLHNRSSSELFQDSLVFDITVITIDWISRHLYFALKESQNGMQVFDVDLEHKVKYPREVKIHNRNSTIISFSVYPLLSRLYWTEVSNFGYQMFYYSIISHTLHRILQPTATNQQNKRNQCSCNVTEFELSGAMAIDTSNLEKPLIYFAKAQEIWAMDLEGCQCWRVITVPAMLAGKTLVSLTVDGDLIYWIITAKDSTQIYQAKKGNGAIVSQVKALRSRHILAYSSVMQPFPDKAFLSLASDTVEPTILNATNTSLTIRLPLAKTNLTWYGITSPTPTYLVYYAEVNDRKNSSDLKYRILEFQDSIALIEDLQPFSTYMIQIAVKNYYSDPLEHLPPGKEIWGKTKNGVPEAVQLINTTVRSDTSLIISWRESHKPNGPKESVRYQLAISHLALIPETPLRQSEFPNGRLTLLVTRLSGGNIYVLKVLACHSEEMWCTESHPVTVEMFNTPEKPYSLVPENTSLQFNWKAPLNVNLIRFWVELQKWKYNEFYHVKTSCSQGPAYVCNITNLQPYTSYNVRVVVVYKTGENSTSLPESFKTKAGVPNKPGIPKLLEGSKNSIQWEKAEDNGCRITYYILEIRKSTSNNLQNQNLRWKMTFNGSCSSVCTWKSKNLKGIFQFRVVAANNLGFGEYSGISENIILVGDDFWIPETSFILTIIVGIFLVVTIPLTFVWHRRLKNQKSAKEGVTVLINEDKELAELRGLAAGVGLANACYAIHTLPTQEEIENLPAFPREKLTLRLLLGSGAFGEVYEGTAVDILGVGSGEIKVAVKTLKKGSTDQEKIEFLKEAHLMSKFNHPNILKQLGVCLLNEPQYIILELMEGGDLLTYLRKARMATFYGPLLTLVDLVDLCVDISKGCVYLERMHFIHRDLAARNCLVSVKDYTSPRIVKIGDFGLARDIYKNDYYRKRGEGLLPVRWMAPESLMDGIFTTQSDVWSFGILIWEILTLGHQPYPAHSNLDVLNYVQTGGRLEPPRNCPDDLWNLMTQCWAQEPDQRPTFHRIQDQLQLFRNFFLNSIYKSRDEANNSGVINESFEGEDGDVICLNSDDIMPVALMETKNREGLNYMVLATECGQGEEKSEGPLGSQESESCGLRKEEKEPHADKDFCQEKQVAYCPSGKPEGLNYACLTHSGYGDGSD

SEQ ID NO: 75600 - protein, 97 aa, Homo sapiens
  Payload ID: 14926
  Gene Symbol: ROS1
  Gene Name: ROS proto-oncogene 1 , receptor tyrosine kinase
  ENSP ID: ENSP00000384647
WKYNEFYHVKTSCSQGPAYVCNITNLQPYTSYNVRVVVVYKTGENSTSLPESFKTKAGVPNKPGIPKLLEGSKNSIQWEKAEDNGCRITYYILEIRD

SEQ ID NO: 75601 - protein, 2226 aa, Homo sapiens
  Payload ID: 14927
  Gene Symbol: RTTN
  Gene Name: rotatin
  Uniprot ID: Q86VV8
  ENSP ID: ENSP00000255674
MVLAGLIRKLGHQLAEIRERALKSILCKIEHNLICYADLIQERQLFLHLLEWFNFPSVPMKEEVLNLLSRLVKYPPAVQHLVDVGAVEFLSKLRSNVEPNLQAEIDGILDGLFLLPSEVPALSSASYQTNQTELSKNPEILTGYFPQDKSNFQQMEVPPRPVVNQTVKCLKFSTFPWLPLTTTDRHVLSSNESSLRSSNHTLIWNTCELLKDVIMQDFPAEIFLQRPKIVQSLLSLLKLAFGDGKHRLALQSVSCLQQLCMYLRNRLNFHRDPGFFSNKHDTVSQNSSLSYCHEARGTHHSQNPSPGSSSPRPSVVGRTGQRPRGDGQDWDAASSSGSSSHAHVNSRISVHSPLDMGHIDLPELETEDTLELQFQQLSLPQFCVSILESAVPLLRTGSRQVIIRVLELLTEDMTLIGEAISTDIWDDSSLFGIDMKEKLLLVLGALGETMCYHKSSISLEQPEVMLVHHRMAFISISLFAVRLLQTLLPVEKASEFLSEPMSTALFLLSLDMPISLEYPNIHEAVVAYLEQLNSENYSIYKRTAEAVYSIECTCNFLSDIGKEGEKNLLELVELADQALRSFSYHQHFPLIKEIISICSKIWKSAQASPLLQGESQKVLLHMLSHPLPRVKAETYHCCLEITKECLGVHNVTKPVSSLCNGIHFLLHPKVLYEISVFGIQEPESEVNTAAKAILLYLLQGRLMMTALTWNKFIESLCPVIPILQGYADTEDPLGNCILLLSKASSDTEEMLPCTTRLKSMLRLLLVKKPSVRSLALKLLAFHLTSEEGADTKRPLIDARVLSRVTDLFIGKKPIELRLDDRRELVIKLETVEKVYEIFTSDDVDLVLRKSAAEQLAVIMQDIKMHAVVKKLCLIDKIIEYLNECVSQDGKVVECLVQPCLTLLRKVLCGDPVMRVSLSQQSSLLTVLFRVSLIFHEDCSVVTEVGALFCLLLFDEVSRMDMWSVNPSNKPSLPSVFSLPVSVFRRYHLPVHVIGHHAVSPYSIVLPLSADCLALKPVSDMLRIAWNLSWYHGSDNLLKQMNSETKTQEILDALKLSTEDILTLKITHMASGLQDCLHSIVQAATHREVRAAVTRMSFYLLNDRLSLKGCPGPCGVTLKSLAWHTALNRFLQVLPACTEDEKLLIDIIHFLNKLIKEQRKNSSLELLNWILELLLRHSANPLLDLLVLTESQAREETDDIRTAVRQQLQKELIALFDTLLLNFMEVTDRKCSELLYVFQTQLALKLLQCLKVTDAPHFYGLPSLERTLRGMANLTAFPGWSSHSPLTKPLDICVKYLSGLLEVITSFYVERGGNAMSFMGKGVTKSTILCLLHLSHEMMAQAGSLEWMSLWFLPLGSHSEEHIPTQQGLAWLIPLWVDRDPEVRFTSLGLGSALTTLETGCVALANSCQNISGGLWGTVVNILLDQSECSMVRREAAFILQNLLVIPMPTEIIKDYTWQGPCVHDEDSGLSLIGKPALQALLYHCHFYEHLNQMVKHCYLGRCMFDLNFSAFDRNSESNDLNGLDDSFKFWRAPSRTSQDRDPSSLSTSETTVAPSLGSTEFQPLVQSTTLLPEASHDQFVAQGHQESTSPRPPHDSSLSAPLPKLCVFVTPSLLSAMCSLLDNLLTIAPRDTAKAFRQAHLIELLCSIADATLIQTCVQELRALLPSSPPAEHTQAQVSFLLEYLSSLSRLLQSCLLVEPDLVIQDELVKPLITNIIGILTICTKDVLDKELISAFYHTWTHLFNLLAMLLRKAGAITLPFVTVALAKHWTAAIDMFCTCAGLSATCPALYTASLQFLSVLLTEEAKGHLQAKSKTHLCCSPTVASLLDDSQENQKSLEQLSDVILQCYEGKSSKDILKRVAANALMSLLAVSRRAQKHALKANLIDNCMEQMKHINAQLNLDSLRPGKAALKKKEDGVIKELSIAMQLLRNCLYQNEECKEAALEAHLVPVLHSLWPWILMDDSLMQISLQLLCVYTANFPNGCSSLCWSSCGQHPVQATHRGAVSNSLMLCILKLASQMPLENTTVQQMVFMLLSNLALSHDCKGVIQKSNFLQNFLSLALPKGGNKHLSNLTILWLKLLLNISSGEDGQQMILRLDGCLDLLTEMSKYKHKSSPLLPLLIFHNVCFSPANKPKILANEKVITVLAACLESENQNAQRIGAAALWALIYNYQKAKTALKSPSVKRRVDEAYSLAKKTFPNSEANPLNAYYLKCLENLVQLLNSS

SEQ ID NO: 75602 - protein, 184 aa, Homo sapiens
  Payload ID: 14927
  Gene Symbol: RTTN
  Gene Name: rotatin
  ENSP ID: ENSP00000462675
  MOD_RES (1)..(1): Any amino acid
XASQMPLENTTVQQMVFMLLSNLALSHDCKGVIQKSNFLQNFLSLALPKGGNKHLSNLTILWLKLLLNISSGEDGQQMILRLDGCLDLLTEMSKYKHKSSPLLPLLIFHNVCFSPANKPKILANEKVITVLAACLESENQNAQRIGAAALWALIYNYQKAKTALKSPSVKRRVDEAYSLAKKTP

SEQ ID NO: 75603 - protein, 669 aa, Homo sapiens
  Payload ID: 14927
  Gene Symbol: RTTN
  Gene Name: rotatin
  ENSP ID: ENSP00000462733
KDVIMQDFPAEIFLQRPKIVQSLLSLLKLAFGDGKHRLALQSVSCLQQLCMYLRNRLNFHRDPGFFSNKHDTVSQNSSLSYCHEARGTHHSQNPSPGSSSPRPSVVGRTGQRPRGDGQDWDAASSSGSSSHAHVNSRISVHSPLDMGHIDLPELETEDTLELQFQQLSLPQFCVSILESAVPLLRTGSRQVIIRVLELLTEDMTLIGEAISTDIWDDSSLFGIDMKEKLLLVLGALGETMCYHKSSISLEQPEVMLVHHRMAFISISLFAVRLLQTLLPVEKASEFLSEPMSTALFLLSLDMPISLEYPNIHEAVVAYLEQLNSENYSIYKRTAEAVYSIECTCNFLSDIGKEGEKNLLELVELADQALRSFSYHQHFPLIKEIISICSKIWKSAQASPLLQGESQKVLLHMLSHPLPRVKAETYHCCLEITKECLGVHNVTKPVSSLCNGIHFLLHPKVLYEISVFGIQEPESEVNTAAKAILLYLLQGRLMMTALTWNKFIESLCPVIPILQGYADTEDPLGNCILLLSKASSDTEEMLPCTTRLKSMLRLLLVKKPSVRSLALKLLAFHLTSEEGADTKRPLIDARVLSRVTDLFIGKKPIELRLDDRRELVIKLETVEKVYEIFTSDDVDLVLRKSAAEQLAVIMQGCRMFGTTMPHTLEEGFMW

SEQ ID NO: 75604 - protein, 500 aa, Homo sapiens
  Payload ID: 14927
  Gene Symbol: RTTN
  Gene Name: rotatin
  ENSP ID: ENSP00000462926
MVLAGLIRKLGHQLAEIRERALKSILCKIEHNLICYADLIQERQLFLHLLEWFNFPSVPMKEEVLNLLSRLVKYPPAVQHLVDVGAVEFLSKLRSNVEPNLQAEIDGILDGLFLLPSEVPALSSASYQTNQTELSKNPEILTGYFPQDKSNFQQMEVPPRPVVNQTVKCLKFSTFPWLPLTTTDRHVLSSNESSLRSSNHTLIWNTCELLKDVIMQDFPAEIFLQRPKIVQSLLSLLKLAFGDGKHRLALQSVSCLQQLCMYLRNRLNFHRDPGFFSNKHDTVSQNSSLSYCHEARGTHHSQNPSPGSSSPRPSVVGRTGQRPRGDGQDWDAASSSGSSSHAHVNSRISVHSPLDMGHIDLPELETEDTLELQFQQLSLPQFCVSILESAVPLLRTGSRQVIIRVLELLTEDMTLIGEAISTDIWDDSSLFGIDMKEKLLLVLGALGETMCYHKSSISLEQPEVMLVHHRMAFISISLFAVRLLQTLLPVEKLLWPIWNS

SEQ ID NO: 75605 - protein, 802 aa, Homo sapiens
  Payload ID: 14928
  Gene Symbol: RSBN1
  Gene Name: round spermatid basic protein 1
  Uniprot ID: Q5VWQ0
  ENSP ID: ENSP00000261441
MFISGRRTADKWRAEERLQCPAGSARAALARCADGGAVGPFKCVFVGEMAAQVGAVRVVRAVAAQEEPDKEGKEKPHAGVSPRGVKRQRRSSSGGSQEKRGRPSQEPPLAPPHRRRRSRQHPGPLPPTNAAPTVPGPVEPLLLPPPPPPSLAPAGPAVAAPLPAPSTSALFTFSPLTVSAAGPKHKGHKERHKHHHHRGPDGDPSSCGTDLKHKDKQENGERTGGVPLIKAPKRETPDENGKTQRADDFVLKKIKKKKKKKHREDMRGRRLKMYNKEVQTVCAGLTRISKEILTQGQINSTSGLNKESFRYLKDEQLCRLNLGMQEYRVPQGVQTPFMTHQEHSIRRNFLKTGTKFSNFIHEEHQSNGGALVLHAYMDELSFLSPMEMERFSEEFLALTFSENEKNAAYYALAIVHGAAAYLPDFLDYFAFNFPNTPVKMEILGKKDIETTTISNFHTQVNRTYCCGTYRAGPMRQISLVGAVDEEVGDYFPEFLDMLEESPFLKMTLPWGTLSSLRLQCRSQSDDGPIMWVRPGEQMIPTADMPKSPFKRRRSMNEIKNLQYLPRTSEPREVLFEDRTRAHADHVGQGFDWQSTAAVGVLKAVQFGEWSDQPRITKDVICFHAEDFTDVVQRLQLDLHEPPVSQCVQWVDEAKLNQMRREGIRYARIQLCDNDIYFIPRNVIHQFKTVSAVCSLAWHIRLKQYHPVVEATQNTESNSNMDCGLTGKRELEVDSQCVRIKTESEEACTEIQLLTTASSSFPPASELNLQQDQKTQPIPVLKVESRLDSDQQHNLQEHSTTSV

SEQ ID NO: 75606 - protein, 411 aa, Homo sapiens
  Payload ID: 14928
  Gene Symbol: RSBN1
  Gene Name: round spermatid basic protein 1
  ENSP ID: ENSP00000433256
MAAQVGAVRVVRAVAAQEEPDKEGKEKPHAGVSPRGVKRQRRSSSGGSQEKRGRPSQEPPLAPPHRRRRSRQHPGPLPPTNAAPTVPGPVEPLLLPPPPPPSLAPAGPAVAAPLPAPSTSALFTFSPLTVSAAGPKHKGHKERHKHHHHRGPDGDPSSCGTDLKHKDKQENGERTGGVPLIKAPKRETPDENGKTQRADDFVLKKIKKKKKKKHREDMRGRRLKMYNKEVQTVCAGLTRISKEILTQGQINSTSGLNKESFRYLKDEQLCRLNLGMQEYRVPQGVQTPFMTHQEHSIRRNFLKTGTKFSNFIHEEHQSNGGALVLHAYMDELSFLSPMEMERFSEEFLALTFSENEKNAAYYALAIVHGAAAYLPDFLDYFAFNFPNTPVKMEILGKKDIETTTISNFHTQ

SEQ ID NO: 75607 - protein, 685 aa, Homo sapiens [sequence omitted]

SEQ ID NO: 75608 - protein, 802 aa, Homo sapiens; identical to SEQ ID NO: 75605
  Payload ID: 14928
  Gene Symbol: RSBN1
  Gene Name: round spermatid basic protein 1
  Uniprot ID: Q5VWQ0
  ENSP ID: ENSP00000479490

SEQ ID NO: 75609 - protein, 754 aa, Homo sapiens
  Payload ID: 14928
  Gene Symbol: RSBN1
  Gene Name: round spermatid basic protein 1
  ENSP ID: ENSP00000480408
MAAQVGAVRVVRAVAAQEEPDKEGKEKPHAGVSPRGVKRQRRSSSGGSQEKRGRPSQEPPLAPPHRRRRSRQHPGPLPPTNAAPTVPGPVEPLLLPPPPPPSLAPAGPAVAAPLPAPSTSALFTFSPLTVSAAGPKHKGHKERHKHHHHRGPDGDPSSCGTDLKHKDKQENGERTGGVPLIKAPKRETPDENGKTQRADDFVLKKIKKKKKKKHREDMRGRRLKMYNKEVQTVCAGLTRISKEILTQGQINSTSGLNKESFRYLKDEQLCRLNLGMQEYRVPQGVQTPFMTHQEHSIRRNFLKTGTKFSNFIHEEHQSNGGALVLHAYMDELSFLSPMEMERFSEEFLALTFSENEKNAAYYALAIVHGAAAYLPDFLDYFAFNFPNTPVKMEILGKKDIETTTISNFHTQVNRTYCCGTYRAGPMRQISLVGAVDEEVGDYFPEFLDMLEESPFLKMTLPWGTLSSLRLQCRSQSDDGPIMWVRPGEQMIPTADMPKSPFKRRRSMNEIKNLQYLPRTSEPREVLFEDRTRAHADHVGQGFDWQSTAAVGVLKAVQFGEWSDQPRITKDVICFHAEDFTDVVQRLQLDLHEPPVSQCVQWVDEAKLNQMRREGIRYARIQLCDNDIYFIPRNVIHQFKTVSAVCSLAWHIRLKQYHPVVEATQNTESNSNMDCGLTGKRELEVDSQCVRIKTESEEACTEIQLLTTASSSFPPASELNLQQDQKTQPIPVLKVESRLDSDQQHNLQEHSTTSV

SEQ ID NO: 75610 - protein, 846 aa, Homo sapiens
  Payload ID: 14929
  Gene Symbol: RSBN1L
  Gene Name: round spermatid basic protein 1-like
  Uniprot ID: Q6PCB5
  ENSP ID: ENSP00000334040
MAEPPSPVHCVAAAAPTATVSEKEPFGKLQLSSRDPPGSLSAKKVRTEEKKAPRRVNGEGGSGGNSRQLQPPAAPSPQSYGSPASWSFAPLSAAPSPSSSRSSFSFSAGTAVPSSASASLSQPVPRKLLVPPTLLHAQPHHLLLPAAAAAASANAKSRRPKEKREKERRRHGLGGAREAGGASREENGEVKPLPRDKIKDKIKERDKEKEREKKKHKVMNEIKKENGEVKILLKSGKEKPKTNIEDLQIKKVKKKKKKKHKENEKRKRPKMYSKSIQTICSGLLTDVEDQAAKGILNDNIKDYVGKNLDTKNYDSKIPENSEFPFVSLKEPRVQNNLKRLDTLEFKQLIHIEHQPNGGASVIHAYSNELSHLSPMEMERFAEEFVGLVFSENENSAAFYVMGIVHGAATYLPDFLDYFSFNFPNSPVKMEILGKKDIETTTMSNFHAQVKRTYSHGTYRAGPMRQISLVGAVDEEVGDYFPEFLDMLEESPFLKCTLPWGTLSSLKLQSRKDSDDGPIMWVRPGEQMIPVADMPKSPFKRKRTTNEIKNLQYLPRTSEPREMLFEDRTRAHADHIGQGFERQTTAAVGVLKAVHCGEWPDQPRITKDVICFHAEDFLEVVQRMQLDLHEPPLSQCVQWVDDAKLNQLRREGIRYARIQLYDNDIYFIPRNVVHQFKTVSAVCSLAWHIRLKLYHSEEDTSQNTATHETGTSSDSTSSVLGPHTDNMICAVSKASLDSVFSDKLHSKYELQQIKHEPIASVRIKEEPVNVNIPEKTTALNNMDGKNVKAKLDHVQFAEFKIDMDSKFENSNKDLKEELCPGNLSLVDTRQHSSAHSNQDKKDDDILC

SEQ ID NO: 75611 - protein, 576 aa, Homo sapiens
  Payload ID: 14929
  Gene Symbol: RSBN1L
  Gene Name: round spermatid basic protein 1-like
  Uniprot ID: Q6PCB5
  ENSP ID: ENSP00000393888
MYSKSIQTICSGLLTDVEDQAAKGILNDNIKDYVGKNLDTKNYDSKIPENSEFPFVSLKEPRVQNNLKRLDTLEFKQLIHIEHQPNGGASVIHAYSNELSHLSPMEMERFAEEFVGLVFSENENSAAFYVMGIVHGAATYLPDFLDYFSFNFPNSPVKMEILGKKDIETTTMSNFHAQVKRTYSHGTYRAGPMRQISLVGAVDEEVGDYFPEFLDMLEESPFLKCTLPWGTLSSLKLQSRKDSDDGPIMWVRPGEQMIPVADMPKSPFKRKRTTNEIKNLQYLPRTSEPREMLFEDRTRAHADHIGQGFERQTTAAVGVLKAVHCGEWPDQPRITKDVICFHAEDFLEVVQRMQLDLHEPPLSQCVQWVDDAKLNQLRREGIRYARIQLYDNDIYFIPRNVVHQFKTVSAVCSLAWHIRLKLYHSEEDTSQNTATHETGTSSDSTSSVLGPHTDNMICAVSKASLDSVFSDKLHSKYELQQIKHEPIASVRIKEEPVNVNIPEKTTALNNMDGKNVKAKLDHVQFAEFKIDMDSKFENSNKDLKEELCPGNLSLVDTRQHSSAHSNQDKKDDDILC

SEQ ID NO: 75612 - protein, 177 aa, Homo sapiens
  Payload ID: 14929
  Gene Symbol: RSBN1L
  Gene Name: round spermatid basic protein 1-like
  ENSP ID: ENSP00000405231
CTLPWGTLSSLKLQSRKDSDDGPIMWVRPGEQMIPVADMPKSPFKRKRTTNEIKNLQYLPRTSEPREMLFEDRTRAHADHIGQGFERQTTAAVGVLKAVHCGEWPDQPRITKDVICFHAEDFLEVVQRMQLDLHEPPLSQECCSSVQDSFSCMQFSMAYSAQIISLRGGHFSEYSYS

SEQ ID NO: 75613 - protein, 199 aa, Homo sapiens
  Payload ID: 14929
  Gene Symbol: RSBN1L
  Gene Name: round spermatid basic protein 1-like
  ENSP ID: ENSP00000414313
MRQISLVGAVDEEVGDYFPEFLDMLEESPFLKCTLPWGTLSSLKLQSRKDSDDGPIMWVRPGEQMIPVADMPKSPFKRKRTTNEIKNLQYLPRTSEPREMLFEDRTRAHADHIGQGFERQTTAAVGVLKAVHCGEWPDQPRITKDVICFHAEDFLEVVQRMQLDLHEPPLSQCVQWVDDAKLNQLRREGIRYARIQLYD

SEQ ID NO: 75614 - protein, 843 aa, Homo sapiens
  Payload ID: 14929
  Gene Symbol: RSBN1L
  Gene Name: round spermatid basic protein 1-like
  ENSP ID: ENSP00000484678
MAEPPSPVHCVAAAAPTATVSEKEPFGKLQLSSRDPPGSLSAKKVRTEEKKAPRRVNGEGGSGGNSRQLQPPAAPSPQSYGSPASWSFAPLSAAPSPSSSRSSFSFSAGTAVPSSASASLSQPVPRKLLVPPTLLHAQPHHLLLPAAAAAASANAKSRRPKEKREKERRRHGLGGAREAGGASREENGEVKPLPRDKIKDKIKERDKEKEREKKKHKVMNEIKKENGEVKILLKSGKEKPKTNIEDLQIKKVKKKKKKKHKENEKRKRPKMYSKSIQTICSGLLTDVEDQAAKGILNDNIKDYVGKNLDTKNYDSKIPENSEFPFVSLKEPRVQNNLKRLDTLEFKQLIHIEHQPNGGASVIHAYSNELSHLSPMEMERFAEEFVGLVFSENENSAAFYVMGIVHGAATYLPDFLDYFSFNFPNSPVKMEIERKITTTMSNFHAQVKRTYSHGTYRAGPMRQISLVGAVDEEVGDYFPEFLDMLEESPFLKCTLPWGTLSSLKLQSRKDSDDGPIMWVRPGEQMIPVADMPKSPFKRKRTTNEIKNLQYLPRTSEPREMLFEDRTRAHADHIGQGFERQTTAAVGVLKAVHCGEWPDQPRITKDVICFHAEDFLEVVQRMQLDLHEPPLSQCVQWVDDAKLNQLRREGIRYARIQLYDNDIYFIPRNVVHQFKTVSAVCSLAWHIRLKLYHSEEDTSQNTATHETGTSSDSTSSVLGPHTDNMICAVSKASLDSVFSDKLHSKYELQQIKHEPIASVRIKEEPVNVNIPEKTTALNNMDGKNVKAKLDHVQFAEFKIDMDSKFENSNKDLKEELCPGNLSLVDTRQHSSAHSNQDKKDDDILC

SEQ ID NO: 75615 - protein, 1531 aa, Homo sapiens
  Payload ID: 14930
  Gene Symbol: ROBO1
  Gene Name: roundabout guidance receptor 1
  ENSP ID: ENSP00000406043
MLLPSGSLFFLRIVHGRKSRPDEGVYVCVARNYLGEAVSHNASLEVAILRDDFRQNPSDVMVAVGEPAVMECQPPRGHPEPTISWKKDGSPLDDKDERITIRGGKLMITYTRKSDAGKYVCVGTNMVGERESEVAELTVLERPSFVKRPSNLAVTVDDSAEFKCEARGDPVPTVRWRKDDGELPKSRYEIRDDHTLKIRKVTAGDMGSYTCVAENMVGKAEASATLTVQEPPHFVVKPRDQVVALGRTVTFQCEATGNPQPAIFWRREGSQNLLFSYQPPQSSSRFSVSQTGDLTITNVQRSDVGYYICQTLNVAGSIITKAYLEVTDVIADRPPPVIRQGPVNQTVAVDGTFVLSCVATGSPVPTILWRKDGVLVSTQDSRIKQLENGVLQIRYAKLGDTGRYTCIASTPSGEATWSAYIEVQEFGVPVQPPRPTDPNLIPSAPSKPEVTDVSRNTVTLSWQPNLNSGATPTSYIIEAFSHASGSSWQTVAENVKTETSAIKGLKPNAIYLFLVRAANAYGISDPSQISDPVKTQDVLPTSQGVDHKQVQRELGNAVLHLHNPTVLSSSSIEVHWTVDQQSQYIQGYKILYRPSGANHGESDWLVFEVRTPAKNSVVIPDLRKGVNYEIKARPFFNEFQGADSEIKFAKTLEEGNAPPQGVTVSKNDGNGTAILVSWQPPPEDTQNGMVQEYKVWCLGNETRYHINKTVDGSTFSVVIPFLVPGIRYSVEVAASTGAGSGVKSEPQFIQLDAHGNPVSPEDQVSLAQQISDVVKQPAFIAGIGAACWIILMVFSIWLYRHRKKRNGLTSTYAGIRKVPSFTFTPTVTYQRGGEAVSSGGRPGLLNISEPAAQPWLADTWPNTGNNHNDCSISCCTAGNGNSDSNLTTYSRPADCIANYNNQLDNKQTNLMLPESTVYGDVDLSNKINEMKTFNSPNLKDGRFVNPSGQPTPYATTQLIQSNLSNNMNNGSGDSGEKHWKPLGQQKQEVAPVQYNIVEQNKLNKDYRANDTVPPTIPYNQSYDQNTGGSYNSSDRGSSTSGNQGHKKGARTPKVPKQGGMNWADLLPPPPAHPPPHSNSEEYNISVDESYDQEMPCPVPPARMYLQQDELEEEEDERGPTPPVRGAASSPAAVSYSHQSTATLTPSPQEELQPMLQDCPEETGHMQHQPDRRRQPVSPPPPPRPISPPHTYGYISGPLVSDMDTDAPEEEEDEADMEVAKMQTRRLLLRGLEQTPASSVGDLESSVTGSMINGWGSASEEDNISSGRSSVSSSDGSFFTDADFAQAVAAAAEYAGLKVARRQMQDAAGRRHFHASQCPRPTSPVSTDSNMSAAVMQKTRPAKKLKHQPGHLRRETYTDDLPPPPVPPPAIKSPTAQSKTQLEVRPVVVPKLPSMDARTDRSSDRKGSSYKGREVLDGRQVVDMRTNPGDPREAQEQQNDGKGRGNKAAKRDLPPAKTHLIQEDILPYCRPTFPTSNNPRDPSSSSSMSSRGSGSRQREQANVGRRNIAEMQVLGGYERGEDNNEELEETES

SEQ ID NO: 75616 - protein, 1551 aa, Homo sapiens
  Payload ID: 14930
  Gene Symbol: ROBO1
  Gene Name: roundabout guidance receptor 1
  Uniprot ID: Q9Y6N7
  ENSP ID: ENSP00000417992
MIAEPAHFYLFGLICLCSGSRLRQEDFPPRIVEHPSDLIVSKGEPATLNCKAEGRPTPTIEWYKGGERVETDKDDPRSHRMLLPSGSLFFLRIVHGRKSRPDEGVYVCVARNYLGEAVSHNASLEVAILRDDFRQNPSDVMVAVGEPAVMECQPPRGHPEPTISWKKDGSPLDDKDERITIRGGKLMITYTRKSDAGKYVCVGTNMVGERESEVAELTVLERPSFVKRPSNLAVTVDDSAEFKCEARGDPVPTVRWRKDDGELPKSRYEIRDDHTLKIRKVTAGDMGSYTCVAENMVGKAEASATLTVQVGSEPPHFVVKPRDQVVALGRTVTFQCEATGNPQPAIFWRREGSQNLLFSYQPPQSSSRFSVSQTGDLTITNVQRSDVGYYICQTLNVAGSIITKAYLEVTDVIADRPPPVIRQGPVNQTVAVDGTFVLSCVATGSPVPTILWRKDGVLVSTQDSRIKQLENGVLQIRYAKLGDTGRYTCIASTPSGEATWSAYIEVQEFGVPVQPPRPTDPNLIPSAPSKPEVTDVSRNTVTLSWQPNLNSGATPTSYIIEAFSHASGSSWQTVAENVKTETSAIKGLKPNAIYLFLVRAANAYGISDPSQISDPVKTQDVLPTSQGVDHKQVQRELGNAVLHLHNPTVLSSSSIEVHWTVDQQSQYIQGYKILYRPSGANHGESDWLVFEVRTPAKNSVVIPDLRKGVNYEIKARPFFNEFQGADSEIKFAKTLEEAPSAPPQGVTVSKNDGNGTAILVSWQPPPEDTQNGMVQEYKVWCLGNETRYHINKTVDGSTFSVVIPFLVPGIRYSVEVAASTGAGSGVKSEPQFIQLDAHGNPVSPEDQVSLAQQISDVVKQPAFIAGIGAACWIILMVFSIWLYRHRKKRNGLTSTYAGIRKVTYQRGGEAVSSGGRPGLLNISEPAAQPWLADTWPNTGNNHNDCSISCCTAGNGNSDSNLTTYSRPGQPTPYATTQLIQSNLSNNMNNGSGDSGEKHWKPLGQQKQEVAPVQYNIVEQNKLNKDYRANDTVPPTIPYNQSYDQNTGGSYNSSDRGSSTSGSQGHKKGARTPKVPKQGGMNWADLLPPPPAHPPPHSNSEEYNISVDESYDQEMPCPVPPARMYLQQDELEEEEDERGPTPPVRGAASSPAAVSYSHQSTATLTPSPQEELQPMLQDCPEETGHMQHQPDRRRQPVSPPPPPRPISPPHTYGYISGPLVSDMDTDAPEEEEDEADMEVAKMQTRRLLLRGLEQTPASSVGDLESSVTGSMINGWGSASEEDNISSGRSSVSSSDGSFFTDADFAQAVAAAAEYAGLKVARRQMQDAAGRRHFHASQCPRPTSPVSTDSNMSAAVMQKTRPAKKLKHQPGHLRRETYTDDLPPPPVPPPAIKSPTAQSKTQLEVRPVVVPKLPSMDARTDRSSDRKGSSYKGREVLDGRQVVDMRTNPGDPREAQEQQNDGKGRGNKAAKRDLPPAKTHLIQEDILPYCRPTFPTSNNPRDPSSSSSMSSRGSGSRQREQANVGRRNIAEMQVLGGYERGEDNNEELEETES

SEQ ID NO: 75617 - protein, 192 aa, Homo sapiens
  Payload ID: 14930
  Gene Symbol: ROBO1
  Gene Name: roundabout guidance receptor 1
  ENSP ID: ENSP00000418553
VDGTFVLSCVATGSPVPTILWRKDGVLVSTQDSRIKQLENGVLQIRYAKLGDTGRYTCIASTPSGEATWSAYIEVQGKVNEFGVPVQPPRPTDPNLIPSAPSKPEVTDVSRNTVTLSWQPNLNSGATPTSYIIEAFSHASGSSWQTVAENVKTETSAIKGLKPNAIYLFLVRAANAYGISDPSQISDPVKTQ

SEQ ID NO: 75618 - protein, 190 aa, Homo sapiens
  Payload ID: 14930
  Gene Symbol: ROBO1
  Gene Name: roundabout guidance receptor 1
  ENSP ID: ENSP00000418946
  MOD_RES (1)..(1): Any amino acid
XFQNSDLLFILLVSRFGMSDHNKEPGMQLDDRLLLTTFQWQAYHLDFHLCLNYRANDTVPPTIPYNQSYDQNTGGSYNSSDRGSSTSGSQGHKKGARTPKVPKQGGMNWADLLPPPPAHPPPHSNSEEYNISVDESYDQEMPCPVPPARMYLQQDELEEEEDERGPTPPVRGAASSPAAVSYSHQSTATL

SEQ ID NO: 75619 - protein, 41 aa, Homo sapiens
  Payload ID: 14930
  Gene Symbol: ROBO1
  Gene Name: roundabout guidance receptor 1
  ENSP ID: ENSP00000419915
MKWKHVPFLVMISLLSLSPNHLFLAQLIPGLKPTKEPRKIL

SEQ ID NO: 75620 - protein, 1651 aa, Homo sapiens
  Payload ID: 14930
  Gene Symbol: ROBO1
  Gene Name: roundabout guidance receptor 1
  Uniprot ID: Q9Y6N7
  ENSP ID: ENSP00000420321
MKWKHVPFLVMISLLSLSPNHLFLAQLIPDPEDVERGNDHGTPIPTSDNDDNSLGYTGSRLRQEDFPPRIVEHPSDLIVSKGEPATLNCKAEGRPTPTIEWYKGGERVETDKDDPRSHRMLLPSGSLFFLRIVHGRKSRPDEGVYVCVARNYLGEAVSHNASLEVAILRDDFRQNPSDVMVAVGEPAVMECQPPRGHPEPTISWKKDGSPLDDKDERITIRGGKLMITYTRKSDAGKYVCVGTNMVGERESEVAELTVLERPSFVKRPSNLAVTVDDSAEFKCEARGDPVPTVRWRKDDGELPKSRYEIRDDHTLKIRKVTAGDMGSYTCVAENMVGKAEASATLTVQEPPHFVVKPRDQVVALGRTVTFQCEATGNPQPAIFWRREGSQNLLFSYQPPQSSSRFSVSQTGDLTITNVQRSDVGYYICQTLNVAGSIITKAYLEVTDVIADRPPPVIRQGPVNQTVAVDGTFVLSCVATGSPVPTILWRKDGVLVSTQDSRIKQLENGVLQIRYAKLGDTGRYTCIASTPSGEATWSAYIEVQEFGVPVQPPRPTDPNLIPSAPSKPEVTDVSRNTVTLSWQPNLNSGATPTSYIIEAFSHASGSSWQTVAENVKTETSAIKGLKPNAIYLFLVRAANAYGISDPSQISDPVKTQDVLPTSQGVDHKQVQRELGNAVLHLHNPTVLSSSSIEVHWTVDQQSQYIQGYKILYRPSGANHGESDWLVFEVRTPAKNSVVIPDLRKGVNYEIKARPFFNEFQGADSEIKFAKTLEEAPSAPPQGVTVSKNDGNGTAILVSWQPPPEDTQNGMVQEYKVWCLGNETRYHINKTVDGSTFSVVIPFLVPGIRYSVEVAASTGAGSGVKSEPQFIQLDAHGNPVSPEDQVSLAQQISDVVKQPAFIAGIGAACWIILMVFSIWLYRHRKKRNGLTSTYAGIRKVPSFTFTPTVTYQRGGEAVSSGGRPGLLNISEPAAQPWLADTWPNTGNNHNDCSISCCTAGNGNSDSNLTTYSRPADCIANYNNQLDNKQTNLMLPESTVYGDVDLSNKINEMKTFNSPNLKDGRFVNPSGQPTPYATTQLIQSNLSNNMNNGSGDSGEKHWKPLGQQKQEVAPVQYNIVEQNKLNKDYRANDTVPPTIPYNQSYDQNTGGSYNSSDRGSSTSGSQGHKKGARTPKVPKQGGMNWADLLPPPPAHPPPHSNSEEYNISVDESYDQEMPCPVPPARMYLQQDELEEEEDERGPTPPVRGAASSPAAVSYSHQSTATLTPSPQEELQPMLQDCPEETGHMQHQPDRRRQPVSPPPPPRPISPPHTYGYISGPLVSDMDTDAPEEEEDEADMEVAKMQTRRLLLRGLEQTPASSVGDLESSVTGSMINGWGSASEEDNISSGRSSVSSSDGSFFTDADFAQAVAAAAEYAGLKVARRQMQDAAGRRHFHASQCPRPTSPVSTDSNMSAAVMQKTRPAKKLKHQPGHLRRETYTDDLPPPPVPPPAIKSPTAQSKTQLEVRPVVVPKLPSMDARTDRSSDRKGSSYKGREVLDGRQVVDMRTNPGDPREAQEQQNDGKGRGNKAAKRDLPPAKTHLIQEDILPYCRPTFPTSNNPRDPSSSSSMSSRGSGSRQREQANVGRRNIAEMQVLGGYERGEDNNEELEETES

SEQ ID NO: 75621 - protein, 1606 aa, Homo sapiens
  Payload ID: 14930
  Gene Symbol: ROBO1
  Gene Name: roundabout guidance receptor 1
  Uniprot ID: Q9Y6N7
  ENSP ID: ENSP00000420637
MIAEPAHFYLFGLICLCSGSRLRQEDFPPRIVEHPSDLIVSKGEPATLNCKAEGRPTPTIEWYKGGERVETDKDDPRSHRMLLPSGSLFFLRIVHGRKSRPDEGVYVCVARNYLGEAVSHNASLEVAILRDDFRQNPSDVMVAVGEPAVMECQPPRGHPEPTISWKKDGSPLDDKDERITIRGGKLMITYTRKSDAGKYVCVGTNMVGERESEVAELTVLERPSFVKRPSNLAVTVDDSAEFKCEARGDPVPTVRWRKDDGELPKSRYEIRDDHTLKIRKVTAGDMGSYTCVAENMVGKAEASATLTVQVGSEPPHFVVKPRDQVVALGRTVTFQCEATGNPQPAIFWRREGSQNLLFSYQPPQSSSRFSVSQTGDLTITNVQRSDVGYYICQTLNVAGSIITKAYLEVTDVIADRPPPVIRQGPVNQTVAVDGTFVLSCVATGSPVPTILWRKDGVLVSTQDSRIKQLENGVLQIRYAKLGDTGRYTCIASTPSGEATWSAYIEVQEFGVPVQPPRPTDPNLIPSAPSKPEVTDVSRNTVTLSWQPNLNSGATPTSYIIEAFSHASGSSWQTVAENVKTETSAIKGLKPNAIYLFLVRAANAYGISDPSQISDPVKTQDVLPTSQGVDHKQVQRELGNAVLHLHNPTVLSSSSIEVHWTVDQQSQYIQGYKILYRPSGANHGESDWLVFEVRTPAKNSVVIPDLRKGVNYEIKARPFFNEFQGADSEIKFAKTLEEAPSAPPQGVTVSKNDGNGTAILVSWQPPPEDTQNGMVQEYKVWCLGNETRYHINKTVDGSTFSVVIPFLVPGIRYSVEVAASTGAGSGVKSEPQFIQLDAHGNPVSPEDQVSLAQQISDVVKQPAFIAGIGAACWIILMVFSIWLYRHRKKRNGLTSTYAGIRKVTYQRGGEAVSSGGRPGLLNISEPAAQPWLADTWPNTGNNHNDCSISCCTAGNGNSDSNLTTYSRPADCIANYNNQLDNKQTNLMLPESTVYGDVDLSNKINEMKTFNSPNLKDGRFVNPSGQPTPYATTQLIQSNLSNNMNNGSGDSGEKHWKPLGQQKQEVAPVQYNIVEQNKLNKDYRANDTVPPTIPYNQSYDQNTGGSYNSSDRGSSTSGSQGHKKGARTPKVPKQGGMNWADLLPPPPAHPPPHSNSEEYNISVDESYDQEMPCPVPPARMYLQQDELEEEEDERGPTPPVRGAASSPAAVSYSHQSTATLTPSPQEELQPMLQDCPEETGHMQHQPDRRRQPVSPPPPPRPISPPHTYGYISGPLVSDMDTDAPEEEEDEADMEVAKMQTRRLLLRGLEQTPASSVGDLESSVTGSMINGWGSASEEDNISSGRSSVSSSDGSFFTDADFAQAVAAAAEYAGLKVARRQMQDAAGRRHFHASQCPRPTSPVSTDSNMSAAVMQKTRPAKKLKHQPGHLRRETYTDDLPPPPVPPPAIKSPTAQSKTQLEVRPVVVPKLPSMDARTDRSSDRKGSSYKGREVLDGRQVVDMRTNPGDPREAQEQQNDGKGRGNKAAKRDLPPAKTHLIQEDILPYCRPTFPTSNNPRDPSSSSSMSSRGSGSRQREQANVGRRNIAEMQVLGGYERGEDNNEELEETES

SEQ ID NO: 75622 - protein, 1606 aa, Homo sapiens [sequence omitted]

SEQ ID NO: 75623 - protein, 1525 aa, Homo sapiens
  Payload ID: 14930
  Gene Symbol: ROBO1
  Gene Name: roundabout guidance receptor 1
  ENSP ID: ENSP00000482448
MLLPSGSLFFLRIVHGRKSRPDEGVYVCVARNYLGEAVSHNASLEVAILRDDFRQNPSDVMVAVGEPAVMECQPPRGHPEPTISWKKDGSPLDDKDERITIRGGKLMITYTRKSDAGKYVCVGTNMVGERESEVAELTVLERPSFVKRPSNLAVTVDDSAEFKCEARGDPVPTVRWRKDDGELPKSRYEIRDDHTLKIRKVTAGDMGSYTCVAENMVGKAEASATLTVQVGSEPPHFVVKPRDQVVALGRTVTFQCEATGNPQPAIFWRREGSQNLLFSYQPPQSSSRFSVSQTGDLTITNVQRSDVGYYICQTLNVAGSIITKAYLEVTDVIADRPPPVIRQGPVNQTVAVDGTFVLSCVATGSPVPTILWRKDGVLVSTQDSRIKQLENGVLQIRYAKLGDTGRYTCIASTPSGEATWSAYIEVQEFGVPVQPPRPTDPNLIPSAPSKPEVTDVSRNTVTLSWQPNLNSGATPTSYIIEAFSHASGSSWQTVAENVKTETSAIKGLKPNAIYLFLVRAANAYGISDPSQISDPVKTQDVLPTSQGVDHKQVQRELGNAVLHLHNPTVLSSSSIEVHWTVDQQSQYIQGYKILYRPSGANHGESDWLVFEVRTPAKNSVVIPDLRKGVNYEIKARPFFNEFQGADSEIKFAKTLEEGNAPPQGVTVSKNDGNGTAILVSWQPPPEDTQNGMVQEYKVWCLGNETRYHINKTVDGSTFSVVIPFLVPGIRYSVEVAASTGAGSGVKSEPQFIQLDAHGNPVSPEDQVSLAQQISDVVKQPAFIAGIGAACWIILMVFSIWLYRHRKKRNGLTSTYAGIRKVTYQRGGEAVSSGGRPGLLNISEPAAQPWLADTWPNTGNNHNDCSISCCTAGNGNSDSNLTTYSRPADCIANYNNQLDNKQTNLMLPESTVYGDVDLSNKINEMKTFNSPNLKDGRFVNPSGQPTPYATTQLIQSNLSNNMNNGSGDSGEKHWKPLGQQKQEVAPVQYNIVEQNKLNKDYRANDTVPPTIPYNQSYDQNTGGSYNSSDRGSSTSGNQGHKKGARTPKVPKQGGMNWADLLPPPPAHPPPHSNSEEYNISVDESYDQEMPCPVPPARMYLQQDELEEEEDERGPTPPVRGAASSPAAVSYSHQSTATLTPSPQEELQPMLQDCPEETGHMQHQPDRRRQPVSPPPPPRPISPPHTYGYISGPLVSDMDTDAPEEEEDEADMEVAKMQTRRLLLRGLEQTPASSVGDLESSVTGSMINGWGSASEEDNISSGRSSVSSSDGSFFTDADFAQAVAAAAEYAGLKVARRQMQDAAGRRHFHASQCPRPTSPVSTDSNMSAAVMQKTRPAKKLKHQPGHLRRETYTDDLPPPPVPPPAIKSPTAQSKTQLEVRPVVVPKLPSMDARTDRSSDRKGSSYKGREVLDGRQVVDMRTNPGDPREAQEQQNDGKGRGNKAAKRDLPPAKTHLIQEDILPYCRPTFPTSNNPRDPSSSSSMSSRGSGSRQREQANVGRRNIAEMQVLGGYERGEDNNEELEETES

SEQ ID NO: 75624 - protein, 1439 aa, Homo sapiens
  Payload ID: 14931
  Gene Symbol: ROBO2
  Gene Name: roundabout guidance receptor 2
  ENSP ID: ENSP00000327536
MSLLMFTQLLLCGFLYVRVDGSRLRQEDFPPRIVEHPSDVIVSKGEPTTLNCKAEGRPTPTIEWYKDGERVETDKDDPRSHRMLLPSGSLFFLRIVHGRRSKPDEGSYVCVARNYLGEAVSRNASLEVALLRDDFRQNPTDVVVAAGEPAILECQPPRGHPEPTIYWKKDKVRIDDKEERISIRGGKLMISNTRKSDAGMYTCVGTNMVGERDSDPAELTVFERPTFLRRPINQVVLEEEAVEFRCQVQGDPQPTVRWKKDDADLPRGRYDIKDDYTLRIKKTMSTDEGTYMCIAENRVGKMEASATLTVRAPPQFVVRPRDQIVAQGRTVTFPCETKGNPQPAVFWQKEGSQNLLFPNQPQQPNSRCSVSPTGDLTITNIQRSDAGYYICQALTVAGSILAKAQLEVTDVLTDRPPPIILQGPANQTLAVDGTALLKCKATGDPLPVISWLKEGFTFPGRDPRATIQEQGTLQIKNLRISDTGTYTCVATSSSGETSWSAVLDVTESGATISKNYDLSDLPGPPSKPQVTDVTKNSVTLSWQPGTPGTLPASAYIIEAFSQSVSNSWQTVANHVKTTLYTVRGLRPNTIYLFMVRAINPQGLSDPSPMSDPVRTQDISPPAQGVDHRQVQKELGDVLVRLHNPVVLTPTTVQVTWTVDRQPQFIQGYRVMYRQTSGLQATSSWQNLDAKVPTERSAVLVNLKKGVTYEIKVRPYFNEFQGMDSESKTVRTTEEAPSAPPQSVTVLTVGSYNSTSISVSWDPPPPDHQNGIIQEYKIWCLGNETRFHINKTVDAAIRSVIIGGLFPGIQYRVEVAASTSAGVGVKSEPQPIIIGRRNEVVITENNNSITEQITDVVKQPAFIAGIGGACWVILMGFSIWLYWRRKKRKGLSNYAVTFQRGDGGLMSNGSRPGLLNAGDPSYPWLADSWPATSLPVNNSNSGPNEIGNFGRGDVLPPVPGQGDKTATMLSDGAIYSSIDFTTKTSYNSSSQITQATPYATTQILHSNSIHELAVDLPDPQWKSSIQQKTDLMGFGYSLPDQNKGNNGGKGGKKKKNKNSSKPQKNNGSTWANVPLPPPPVQPLPGTELEHYAVEQQENGYDSDSWCPPLPVQTYLHQGLEDELEEDDDRVPTPPVRGVASSPAISFGQQSTATLTPSPREEMQPMLQAHLDELTRAYQFDIAKQTWHIQSNNQPPQPPVPPLGYVSGALISDLETDVADDDADDEEEALEIPRPLRALDQTPGSSMDNLDSSVTGSMVNGWGSASDEDRNFSSHRSSVGSSSDGSIFASGSFAQALVAAADKAGFRLDGTSLTRTGKAFTSSQRPRPTSPFSTDSNTSAALSQSQRPRPTKKHKGGRMDQQPALPHRREGMTDEEALVPYSKPSFPSPGGHSSSGTASSKGSTGPRKTEVLRAGHQRNASDLLDIGYMGSNSQGQFTGEL

SEQ ID NO: 75625 - protein, 1378 aa, Homo sapiens
  Payload ID: 14931
  Gene Symbol: ROBO2
  Gene Name: roundabout guidance receptor 2
  Uniprot ID: Q9HCK4
  ENSP ID: ENSP00000417164
MSLLMFTQLLLCGFLYVRVDGSRLRQEDFPPRIVEHPSDVIVSKGEPTTLNCKAEGRPTPTIEWYKDGERVETDKDDPRSHRMLLPSGSLFFLRIVHGRRSKPDEGSYVCVARNYLGEAVSRNASLEVALLRDDFRQNPTDVVVAAGEPAILECQPPRGHPEPTIYWKKDKVRIDDKEERISIRGGKLMISNTRKSDAGMYTCVGTNMVGERDSDPAELTVFERPTFLRRPINQVVLEEEAVEFRCQVQGDPQPTVRWKKDDADLPRGRYDIKDDYTLRIKKTMSTDEGTYMCIAENRVGKMEASATLTVRAPPQFVVRPRDQIVAQGRTVTFPCETKGNPQPAVFWQKEGSQNLLFPNQPQQPNSRCSVSPTGDLTITNIQRSDAGYYICQALTVAGSILAKAQLEVTDVLTDRPPPIILQGPANQTLAVDGTALLKCKATGDPLPVISWLKEGFTFPGRDPRATIQEQGTLQIKNLRISDTGTYTCVATSSSGETSWSAVLDVTESGATISKNYDLSDLPGPPSKPQVTDVTKNSVTLSWQPGTPGTLPASAYIIEAFSQSVSNSWQTVANHVKTTLYTVRGLRPNTIYLFMVRAINPQGLSDPSPMSDPVRTQDISPPAQGVDHRQVQKELGDVLVRLHNPVVLTPTTVQVTWTVDRQPQFIQGYRVMYRQTSGLQATSSWQNLDAKVPTERSAVLVNLKKGVTYEIKVRPYFNEFQGMDSESKTVRTTEEAPSAPPQSVTVLTVGSYNSTSISVSWDPPPPDHQNGIIQEYKIWCLGNETRFHINKTVDAAIRSVIIGGLFPGIQYRVEVAASTSAGVGVKSEPQPIIIGRRNEVVITENNNSITEQITDVVKQPAFIAGIGGACWVILMGFSIWLYWRRKKRKGLSNYAVTFQRGDGGLMSNGSRPGLLNAGDPSYPWLADSWPATSLPVNNSNSGPNEIGNFGRGDVLPPVPGQGDKTATMLSDGAIYSSIDFTTKTSYNSSSQITQATPYATTQILHSNSIHELAVDLPDPQWKSSIQQKTDLMGFGYSLPDQNKGNNGGKGGKKKKNKNSSKPQKNNGSTWANVPLPPPPVQPLPGTELEHYAVEQQENGYDSDSWCPPLPVQTYLHQGLEDELEEDDDRVPTPPVRGVASSPAISFGQQSTATLTPSPREEMQPMLQAHLDELTRAYQFDIAKQTWHIQSNNQPPQPPVPPLGYVSGALISDLETDVADDDADDEEEALEIPRPLRALDQTPGSSMDNLDSSVTGKAFTSSQRPRPTSPFSTDSNTSAALSQSQRPRPTKKHKGGRMDQQPALPHRREGMTDEEALVPYSKPSFPSPGGHSSSGTASSKGSTGPRKTEVLRAGHQRNASDLLDIGYMGSNSQGQFTGEL

SEQ ID NO: 75626 - protein, 1394 aa, Homo sapiens
  Payload ID: 14931
  Gene Symbol: ROBO2
  Gene Name: roundabout guidance receptor 2
  Uniprot ID: Q9HCK4
  ENSP ID: ENSP00000417335
MARRHERVTRRMWTWAPGLLMMTVVFWGHQGNGQGQGSRLRQEDFPPRIVEHPSDVIVSKGEPTTLNCKAEGRPTPTIEWYKDGERVETDKDDPRSHRMLLPSGSLFFLRIVHGRRSKPDEGSYVCVARNYLGEAVSRNASLEVALLRDDFRQNPTDVVVAAGEPAILECQPPRGHPEPTIYWKKDKVRIDDKEERISIRGGKLMISNTRKSDAGMYTCVGTNMVGERDSDPAELTVFERPTFLRRPINQVVLEEEAVEFRCQVQGDPQPTVRWKKDDADLPRGRYDIKDDYTLRIKKTMSTDEGTYMCIAENRVGKMEASATLTVRAPPQFVVRPRDQIVAQGRTVTFPCETKGNPQPAVFWQKEGSQNLLFPNQPQQPNSRCSVSPTGDLTITNIQRSDAGYYICQALTVAGSILAKAQLEVTDVLTDRPPPIILQGPANQTLAVDGTALLKCKATGDPLPVISWLKEGFTFPGRDPRATIQEQGTLQIKNLRISDTGTYTCVATSSSGETSWSAVLDVTESGATISKNYDLSDLPGPPSKPQVTDVTKNSVTLSWQPGTPGTLPASAYIIEAFSQSVSNSWQTVANHVKTTLYTVRGLRPNTIYLFMVRAINPQGLSDPSPMSDPVRTQDISPPAQGVDHRQVQKELGDVLVRLHNPVVLTPTTVQVTWTVDRQPQFIQGYRVMYRQTSGLQATSSWQNLDAKVPTERSAVLVNLKKGVTYEIKVRPYFNEFQGMDSESKTVRTTEEAPSAPPQSVTVLTVGSYNSTSISVSWDPPPPDHQNGIIQEYKIWCLGNETRFHINKTVDAAIRSVIIGGLFPGIQYRVEVAASTSAGVGVKSEPQPIIIGRRNEVVITENNNSITEQITDVVKQPAFIAGIGGACWVILMGFSIWLYWRRKKRKGLSNYAVTFQRGDGGLMSNGSRPGLLNAGDPSYPWLADSWPATSLPVNNSNSGPNEIGNFGRGDVLPPVPGQGDKTATMLSDGAIYSSIDFTTKTSYNSSSQITQATPYATTQILHSNSIHELAVDLPDPQWKSSIQQKTDLMGFGYSLPDQNKGNNGGKGGKKKKNKNSSKPQKNNGSTWANVPLPPPPVQPLPGTELEHYAVEQQENGYDSDSWCPPLPVQTYLHQGLEDELEEDDDRVPTPPVRGVASSPAISFGQQSTATLTPSPREEMQPMLQAHLDELTRAYQFDIAKQTWHIQSNNQPPQPPVPPLGYVSGALISDLETDVADDDADDEEEALEIPRPLRALDQTPGSSMDNLDSSVTGKAFTSSQRPRPTSPFSTDSNTSAALSQSQRPRPTKKHKGGRMDQQPALPHRREGMTDEEALVPYSKPSFPSPGGHSSSGTASSKGSTGPRKTEVLRAGHQRNASDLLDIGYMGSNSQGQFTGEL

SEQ ID NO: 75627 - protein, 198 aa, Homo sapiens
  Payload ID: 14931
  Gene Symbol: ROBO2
  Gene Name: roundabout guidance receptor 2
  ENSP ID: ENSP00000417471
  MOD_RES (1)..(1): Any amino acid
XSNTSAALSQSQRPRPTKKHKGGRMDQQPALPHRREGMTDDLPPPPDPPPGQGLRQQIGPSQQAGNVENSAERKGSSLERQHASSLEDTKSSLDCPARTSLEWQRQTQEWISSTERQEDIRKAPHKQGVGSEEALVPYSKPSFPSPGGHSSSGTASSKGSTGPRKTEVLRAGHQRNASDLLDIGYMGSNSQGQFTGEL

SEQ ID NO: 75628 - protein, 564 aa, Homo sapiens
  Payload ID: 14931
  Gene Symbol: ROBO2
  Gene Name: roundabout guidance receptor 2
  ENSP ID: ENSP00000418117
MSLLMFTQLLLCGFLYVRVDGSRLRQEDFPPRIVEHPSDVIVSKGEPTTLNCKAEGRPTPTIEWYKDGERVETDKDDPRSHRMLLPSGSLFFLRIVHGRRSKPDEGSYVCVARNYLGEAVSRNASLEVALLRDDFRQNPTDVVVAAGEPAILECQPPRGHPEPTIYWKKDKVRIDDKEERISIRGGKLMISNTRKSDAGMYTCVGTNMVGERDSDPAELTVFERPTFLRRPINQVVLEEEAVEFRCQVQGDPQPTVRWKKDDADLPRGRYDIKDDYTLRIKKTMSTDEGTYMCIAENRVGKMEASATLTVRAPPQFVVRPRDQIVAQGRTVTFPCETKGNPQPAVFWQKEGSQNLLFPNQPQQPNSRCSVSPTGDLTITNIQRSDAGYYICQALTVAGSILAKAQLEVTDVLTDRPPPIILQGPANQTLAVDGTALLKCKATGDPLPVISWLKEGFTFPGRDPRATIQEQGTLQIKNLRISDTGTYTCVATSSSGETSWSAVLDVTESGATISKNYDLSDLPGPPSKPQVTDVTKNSVTLSWQPGTPGTLPASAYIIEAFRYVV

SEQ ID NO: 75629 - protein, 214 aa, Homo sapiens
  Payload ID: 14931
  Gene Symbol: ROBO2
  Gene Name: roundabout guidance receptor 2
  ENSP ID: ENSP00000418190
  MOD_RES (1)..(1): Any amino acid
XSWPATSLPVNNSNSGPNEIGNFGRGDVLPPVPGQGDKTATMLSDGAIYSSIDFTTKTSYNSSSQITQATPYATTQILHSNSIHELAVDLPDPQWKSSIQQKTDLMGFGYSLPDQNKGNNALLYIPDYRLAEGLSNRMPHNQSQDFSTTSSHNSSERSGSLSGGKGGKKKKNKNSSKPQKNNGSTWANVPLPPPPVQPLPGTELEHYAVEQQEN

SEQ ID NO: 75630 - protein, 342 aa, Homo sapiens
  Payload ID: 14931
  Gene Symbol: ROBO2
  Gene Name: roundabout guidance receptor 2
  ENSP ID: ENSP00000418344
  MOD_RES (1)..(1): Any amino acid
XNNSITEQITDVVKQPAFIAGIGGACWVILMGFSIWLYWRRKKRKGLSNYAVTFQRGDGGLMSNGSRPGLLNAGDPSYPWLADSWPATSLPVNNSNSGPNEIGNFGRGDVLPPVPGQGDKTATMLSDGAIYSSIDFTTKTSYNSSSQITQATPYATTQILHSNSIHELAVDLPDPQWKSSIQQKTDLMGFGYSLPDQNKGNNGGKGGKKKKNKNSSKPQKNNGSTWANVPLPPPPVQPLPGTELEHYAVEQQENGYDSDSWCPPLPVQTYLHQGLEDELEEDDDRVPTPPVRGVASSPAISFGQQSTATLTPSPREEMQPMLQAHLDELTRAYQFDIAKQTW

SEQ ID NO: 75631 - protein, 208 aa, Homo sapiens
  Payload ID: 14931
  Gene Symbol: ROBO2
  Gene Name: roundabout guidance receptor 2
  ENSP ID: ENSP00000418446
  MOD_RES (1)..(1): Any amino acid
XDELTRAYQFDIAKQTWHIQSNNQPPQPPVPPLGYVSGALISDLETDVADDDADDEEEALEIPRPLRALDQTPGSSMDNLDSSVTGKAFTSSQRPRPTSPFSTDSNTSAALSQSQRPRPTKKHKGGRMDQQPALPHRREGMTDEEALVPYSKPSFPSPGGHSSSGTASSKGSTGPRKTEVLRAGHQRNASDLLDIGYMGSNSQGQFTE

SEQ ID NO: 75632 - protein, 1070 aa, Homo sapiens
  Payload ID: 14931
  Gene Symbol: ROBO2
  Gene Name: roundabout guidance receptor 2
  ENSP ID: ENSP00000473268
MARRHERVTRRMWTWAPGLLMMTVVFWGHQGNGQGQGSRLRQEDFPPRIVEHPSDVIVSKGEPTTLNCKAEGRPTPTIEWYKDGERVETDKDDPRSHRMLLPSGSLFFLRIVHGRRSKPDEGSYVCVARNYLGEAVSRNASLEVALLRDDFRQNPTDVVVAAGEPAILECQPPRGHPEPTIYWKKDKVRIDDKEERISIRGGKLMISNTRKSDAGMYTCVGTNMVGERDSDPAELTVFERPTFLRRPINQVVLEEEAVEFRCQVQGDPQPTVRWKKDDADLPRGRYDIKDDYTLRIKKTMSTDEGTYMCIAENRVGKMEASATLTVRARPVAPPQFVVRPRDQIVAQGRTVTFPCETKGNPQPAVFWQKEGSQNLLFPNQPQQPNSRCSVSPTGDLTITNIQRSDAGYYICQALTVAGSILAKAQLEVTDVLTDRPPPIILQGPANQTLAVDGTALLKCKATGDPLPVISWLKEGFTFPGRDPRATIQEQGTLQIKNLRISDTGTYTCVATSSSGETSWSAVLDVTESGATISKNYDLSDLPGPPSKPQVTDVTKNSVTLSWQPGTPGTLPASAYIIEAFSQSVSNSWQTVANHVKTTLYTVRGLRPNTIYLFMVRAINPQGLSDPSPMSDPVRTQDISPPAQGVDHRQVQKELGDVLVRLHNPVVLTPTTVQVTWTVDRQPQFIQGYRVMYRQTSGLQATSSWQNLDAKVPTERSAVLVNLKKGVTYEIKVRPYFNEFQGMDSESKTVRTTEEAPSAPPQSVTVLTVGSYNSTSISVSWDPPPPDHQNGIIQEYKIWCLGNETRFHINKTVDAAIRSVIIGGLFPGIQYRVEVAASTSAGVGVKSEPQPIIIGRRNEVVITENNNSITEQITDVVKQPAFIAGIGGACWVILMGFSIWLYWRRKKRKGLSNYAVTFQRGDGGLMSNGSRPGLLNAGDPSYPWLADSWPATSLPVNNSNSGPNEIGNFGRGDVLPPVPGQGDKTATMLSDGAIYSSIDFTTKTSYNSSSQITQATPYATTQILHSNSIHELAVDLPDPQWKSSIQQKTDLMGFGYSLPDQNKGNNGGKGG

SEQ ID NO: 75633 - protein, 1250 aa, Homo sapiens [sequence omitted]

SEQ ID NO: 75634 - protein, 1386 aa, Homo sapiens
  Payload ID: 14932
  Gene Symbol: ROBO3
  Gene Name: roundabout guidance receptor 3
  Uniprot ID: Q96MS0
  ENSP ID: ENSP00000380903
MLRYLLKTLLQMNLFADSLAGDISNSSELLLGFNSSLAALNHTLLPPGDPSLNGSRVGPEDAMPRIVEQPPDLLVSRGEPATLPCRAEGRPRPNIEWYKNGARVATVREDPRAHRLLLPSGALFFPRIVHGRRARPDEGVYTCVARNYLGAAASRNASLEVAVLRDDFRQSPGNVVVAVGEPAVLECVPPRGHPEPSVSWRKDGARLKEEEGRITIRGGKLMMSHTLKSDAGMYVCVASNMAGERESAAAEVMVLERPSFLRRPVNQVVLADAPVTFLCEVKGDPPPRLRWRKEDGELPTGRYEIRSDHSLWIGHVSAEDEGTYTCVAENSVGRAEASGSLSVHVPPQLVTQPQDQMAAPGESVAFQCETKGNPPPAIFWQKEGSQVLLFPSQSLQPTGRFSVSPRGQLNITAVQRGDAGYYVCQAVSVAGSILAKALLEIKGASLDGLPPVILQGPANQTLVLGSSVWLPCRVTGNPQPSVRWKKDGQWLQGDDLQFKTMANGTLYIANVQEMDMGFYSCVAKSSTGEATWSGWLKMREDWGVSPDPPTEPSSPPGAPSQPVVTEITKNSITLTWKPNPQTGAAVTSYVIEAFSPAAGNTWRTVADGVQLETHTVSGLQPNTIYLFLVRAVGAWGLSEPSPVSEPVRTQDSSPSRPVEDPWRGQQGLAEVAVRLQEPIVLGPRTLQVSWTVDGPVQLVQGFRVSWRVAGPEGGSWTMLDLQSPSQQSTVLRGLPPGTQIQIKVQAQGQEGLGAESLSVTRSIPEEAPSGPPQGVAVALGGDGNSSITVSWEPPLPSQQNGVITEYQIWCLGNESRFHLNRSAAGWARSAMLRGLVPGLLYRTLVAAATSAGVGVPSAPVLVQLPSPPDLEPGLEVGAGLAVRLARVLREPAFLAGSGAACGALLLGLCAALYWRRKQRKELSHYTASFAYTPAVSFPHSEGLSGASSRPPMGLGPAPYSWLADSWPHPSRSPSAQEPRGSCCPSNPDPDDRYYNEAGISLYLAQTARGTAAPGEGPVYSTIDPAGEELQTFHGGFPQHPSGDLGPWSQYAPPEWSQGDSGAKGGKVKLLGKPVQMPSLNWPEALPPPPPSCELSCLEGPEEELEGSSEPEEWCPPMPERSHLTEPSSSGGCLVTPSRRETPSPTPSYGQQSTATLTPSPPDPPQPPTDMPHLHQMPRRVPLGPSSPLSVSQPMLGIREARPAGLGAGPAASPHLSPSPAPSTASSAPGRTWQGNGEMTPPLQGPRARFRKKPKALPYRRENSPGDLPPPPLPPPEEEASWALELRAAGSMSSLERERSGERKAVQAVPLAAQRVLHPDEEAWLPYSRPSFLSRGQGTSTCSTAGSNSSRGSSSSRGSRGPGRSRSRSQSRSQSQRPGQKRREEPR

SEQ ID NO: 75635 - protein, 149 aa, Homo sapiens
  Payload ID: 14932
  Gene Symbol: ROBO3
  Gene Name: roundabout guidance receptor 3
  ENSP ID: ENSP00000438799
MTPPLQGPRARFRKKPKALPYRRENSPGDLPPPPLPPPEEEASWALELRAAGSMSSLERERSGERKAVQAVPLAAQRVLHPDEEAWLPYSRPSFLSRGQGTSTCSTAGSNSSRGSSSSRGSRGPGRSRSRSQSRSQSQRPGQKRREEPR

SEQ ID NO: 75636 - protein, 1364 aa, Homo sapiens
  Payload ID: 14932
  Gene Symbol: ROBO3
  Gene Name: roundabout guidance receptor 3
  ENSP ID: ENSP00000441797
MERPEDSLSLWSLNLSPQFPCLNALRHPLSPGSRVGPEDAMPRIVEQPPDLLVSRGEPATLPCRAEGRPRPNIEWYKNGARVATVREDPRAHRLLLPSGALFFPRIVHGRRARPDEGVYTCVARNYLGAAASRNASLEVAVLRDDFRQSPGNVVVAVGEPAVLECVPPRGHPEPSVSWRKDGARLKEEEGRITIRGGKLMMSHTLKSDAGMYVCVASNMAGERESAAAEVMVLERPSFLRRPVNQVVLADAPVTFLCEVKGDPPPRLRWRKEDGELPTGRYEIRSDHSLWIGHVSAEDEGTYTCVAENSVGRAEASGSLSVHVPPQLVTQPQDQMAAPGESVAFQCETKGNPPPAIFWQKEGSQVLLFPSQSLQPTGRFSVSPRGQLNITAVQRGDAGYYVCQAVSVAGSILAKALLEIKGASLDGLPPVILQGPANQTLVLGSSVWLPCRVTGNPQPSVRWKKDGQWLQGDDLQFKTMANGTLYIANVQEMDMGFYSCVAKSSTGEATWSGWLKMREDWGVSPDPPTEPSSPPGAPSQPVVTEITKNSITLTWKPNPQTGAAVTSYVIEAFSPAAGNTWRTVADGVQLETHTVSGLQPNTIYLFLVRAVGAWGLSEPSPVSEPVRTQDSSPSRPVEDPWRGQQGLAEVAVRLQEPIVLGPRTLQVSWTVDGPVQLVQGFRVSWRVAGPEGGSWTMLDLQSPSQQSTVLRGLPPGTQIQIKVQAQGQEGLGAESLSVTRSIPEEAPSGPPQGVAVALGGDGNSSITVSWEPPLPSQQNGVITEYQIWCLGNESRFHLNRSAAGWARSAMLRGLVPGLLYRTLVAAATSAGVGVPSAPVLVQLPSPPDLEPGLEVGAGLAVRLARVLREPAFLAGSGAACGALLLGLCAALYWRRKQRKELSHYTASFAYTPAVSFPHSEGLSGASSRPPMGLGPAPYSWLADSWPHPSRSPSAQEPRGSCCPSNPDPDDRYYNEAGISLYLAQTARGTAAPGEGPVYSTIDPAGEELQTFHGGFPQHPSGDLGPWSQYAPPEWSQGDSGAKGGKVKLLGKPVQMPSLNWPEALPPPPPSCELSCLEGPEEELEGSSEPEEWCPPMPERSHLTEPSSSGGCLVTPSRRETPSPTPSYGQQSTATLTPSPPDPPQPPTDMPHLHQMPRRVPLGPSSPLSVSQPMLGIREARPAGLGAGPAASPHLSPSPAPSTASSAPGRTWQGNGEMTPPLQGPRARFRKKPKALPYRRENSPGDLPPPPLPPPEEEASWALELRAAGSMSSLERERSGERKAVQAVPLAAQRVLHPDEEAWLPYSRPSFLSRGQGTSTCSTAGSNSSRGSSSSRGSRGPGRSRSRSQSRSQSQRPGQKRREEPR

SEQ ID NO: 75637 - protein, 1007 aa, Homo sapiens
  Payload ID: 14933
  Gene Symbol: ROBO4
  Gene Name: roundabout guidance receptor 4
  Uniprot ID: Q8WZ75
  ENSP ID: ENSP00000304945
MGSGGDSLLGGRGSLPLLLLLIMGGMAQDSPPQILVHPQDQLFQGPGPARMSCQASGQPPPTIRWLLNGQPLSMVPPDPHHLLPDGTLLLLQPPARGHAHDGQALSTDLGVYTCEASNRLGTAVSRGARLSVAVLREDFQIQPRDMVAVVGEQFTLECGPPWGHPEPTVSWWKDGKPLALQPGRHTVSGGSLLMARAEKSDEGTYMCVATNSAGHRESRAARVSIQEPQDYTEPVELLAVRIQLENVTLLNPDPAEGPKPRPAVWLSWKVSGPAAPAQSYTALFRTQTAPGGQGAPWAEELLAGWQSAELGGLHWGQDYEFKVRPSSGRARGPDSNVLLLRLPEKVPSAPPQEVTLKPGNGTVFVSWVPPPAENHNGIIRGYQVWSLGNTSLPPANWTVVGEQTQLEIATHMPGSYCVQVAAVTGAGAGEPSRPVCLLLEQAMERATQEPSEHGPWTLEQLRATLKRPEVIATCGVALWLLLLGTAVCIHRRRRARVHLGPGLYRYTSEDAILKHRMDHSDSQWLADTWRSTSGSRDLSSSSSLSSRLGADARDPLDCRRSLLSWDSRSPGVPLLPDTSTFYGSLIAELPSSTPARPSPQVPAVRRLPPQLAQLSSPCSSSDSLCSRRGLSSPRLSLAPAEAWKAKKKQELQHANSSPLLRGSHSLELRACELGNRGSKNLSQSPGAVPQALVAWRALGPKLLSSSNELVTRHLPPAPLFPHETPPTQSQQTQPPVAPQAPSSILLPAAPIPILSPCSPPSPQASSLSGPSPASSRLSSSSLSSLGEDQDSVLTPEEVALCLELSEGEETPRNSVSPMPRAPSPPTTYGYISVPTASEFTDMGRTGGGVGPKGGVLLCPPRPCLTPTPSEGSLANGWGSASEDNAASARASLVSSSDGSFLADAHFARALAVAVDSFGFGLEPREADCVFIDASSPPSPRDEIFLTPNLSLPLWEWRPDWLEDMEVSHTQRLGRGMPPWPPDSQISSQRSQLHCRMPKAGASPVDYS

SEQ ID NO: 75638 - protein, 862 aa, Homo sapiens
  Payload ID: 14933
  Gene Symbol: ROBO4
  Gene Name: roundabout guidance receptor 4
  ENSP ID: ENSP00000437129
MVAVVGEQFTLECGPPWGHPEPTVSWWKDGKPLALQPGRHTVSGGSLLMARAEKSDEGTYMCVATNSAGHRESRAARVSIQEPQDYTEPVELLAVRIQLENVTLLNPDPAEGPKPRPAVWLSWKVSGPAAPAQSYTALFRTQTAPGGQGAPWAEELLAGWQSAELGGLHWGQDYEFKVRPSSGRARGPDSNVLLLRLPEKVPSAPPQEVTLKPGNGTVFVSWVPPPAENHNGIIRGYQVWSLGNTSLPPANWTVVGEQTQLEIATHMPGSYCVQVAAVTGAGAGEPSRPVCLLLEQAMERATQEPSEHGPWTLEQLRATLKRPEVIATCGVALWLLLLGTAVCIHRRRRARVHLGPGLYRYTSEDAILKHRMDHSDSQWLADTWRSTSGSRDLSSSSSLSSRLGADARDPLDCRRSLLSWDSRSPGVPLLPDTSTFYGSLIAELPSSTPARPSPQVPAVRRLPPQLAQLSSPCSSSDSLCSRRGLSSPRLSLAPAEAWKAKKKQELQHANSSPLLRGSHSLELRACELGNRGSKNLSQSPGAVPQALVAWRALGPKLLSSSNELVTRHLPPAPLFPHETPPTQSQQTQPPVAPQAPSSILLPAAPIPILSPCSPPSPQASSLSGPSPASSRLSSSSLSSLGEDQDSVLTPEEVALCLELSEGEETPRNSVSPMPRAPSPPTTYGYISVPTASEFTDMGRTGGGVGPKGGVLLCPPRPCLTPTPSEGSLANGWGSASEDNAASARASLVSSSDGSFLADAHFARALAVAVDSFGFGLEPREADCVFIDASSPPSPRDEIFLTPNLSLPLWEWRPDWLEDMEVSHTQRLGRGMPPWPPDSQISSQRSQLHCRMPKAGASPVDYS

SEQ ID NO: 75639 - protein, 118 aa, Homo sapiens
  Payload ID: 14934
  Gene Symbol:
  Gene Name: RP11-1012A1.4
  ENSP ID: ENSP00000450554
  MOD_RES (1)..(1): Any amino acid
XRIVNVSSLAHHLGRIHFHNLQGEKFYNAGLAYCHSKLANILFTQELARRLKGSGVTTYSVHPGTVQSELVRHSSFMRWMWWLFSFFIKTPQQGAQTSLHCALTEGLEILSGNHFRGD

SEQ ID NO: 75640 - protein, 91 aa, Homo sapiens
  Payload ID: 14934
  Gene Symbol:
  Gene Name: RP11-1012A1.4
  ENSP ID: ENSP00000450614
  MOD_RES (1)..(1): Any amino acid
XRIVNVSSLAHHLGRIHFHNLQGEKFYNAGLAYCHSKLANILFTQELARRLKEEKKKLIRDFDEKQQEANETLAEMEEELRYAPLSFRNPM

SEQ ID NO: 75641 - protein, 107 aa, Homo sapiens
  Payload ID: 14935
  Gene Symbol:
  Gene Name: RP11-101E3.5
  ENSP ID: ENSP00000417556
MEASGTTWSPENWSSRELWTILLGRSALRELSQIEAELNKHWRRLLEGLSYYKPPSPSSAEKVKANKDVASPLKELGLRISKFLGLDEEQSVQLLQCYLQEDYRGTR

SEQ ID NO: 75642 - protein, 118 aa, Homo sapiens
  Payload ID: 14936
  Gene Symbol:
  Gene Name: RP11-1021N1.1
  ENSP ID: ENSP00000454340
MAGWWPALSRAARRHPWPTNVLLYGSLVSAGDALQQRLQGREANWRQTRRVATLVVTFHANFNYVWLRLLERALPGRAPHALLAKLLCDQVVGAPIAVSAFYVDQLDIISMAETTMMP

SEQ ID NO: 75643 - protein, 97 aa, Homo sapiens
  Payload ID: 14936
  Gene Symbol:
  Gene Name: RP11-1021N1.1
  ENSP ID: ENSP00000455081
  MOD_RES (1)..(1): Any amino acid
XTNVLLYGSLVSAGDALQQRLQGREANWRQTRRVATLVVTFHANFNYVWLRLLERALPGRAPHALLAKLLCDQVVGAPIAVSAFYVGSHSIPQAEVQ

SEQ ID NO: 75644 - protein, 120 aa, Homo sapiens
  Payload ID: 14936
  Gene Symbol:
  Gene Name: RP11-1021N1.1
  ENSP ID: ENSP00000457071
  MOD_RES (1)..(1): Any amino acid
XTNVLLYGSLVSAGDALQQRLQGREANWRQTRRVATLVVTFHANFNYVWLRLLERALPGRAPHALLAKLLCDQVVGAPIAVSAFYVELSPAPLSPYPAPKPPLQASTAHVPCIPAPSGYP

SEQ ID NO: 75645 - protein, 120 aa, Homo sapiens; identical to SEQ ID NO: 75644
  Payload ID: 14936
  Gene Symbol:
  Gene Name: RP11-1021N1.1
  ENSP ID: ENSP00000487660
  MOD_RES (1)..(1): Any amino acid

SEQ ID NO: 75646 - protein, 97 aa, Homo sapiens; identical to SEQ ID NO: 75643
  Payload ID: 14936
  Gene Symbol:
  Gene Name: RP11-1021N1.1
  ENSP ID: ENSP00000487779
  MOD_RES (1)..(1): Any amino acid

SEQ ID NO: 75647 - protein, 118 aa, Homo sapiens; identical to SEQ ID NO: 75642
  Payload ID: 14936
  Gene Symbol:
  Gene Name: RP11-1021N1.1
  ENSP ID: ENSP00000488150

SEQ ID NO: 75648 - protein, 237 aa, Homo sapiens
  Payload ID: 14937
  Gene Symbol:
  Gene Name: RP11-1035H13.3
  ENSP ID: ENSP00000454746
MAEGDNRSTNLLAAETASLEEQLQGWGEVMLMADKVLRWERAWFPPAIMGVVSLVFLIIYYLDPSVLSGVSCFVMFLCLADYLVPILAPRIFGSNKWTTEQQQRFHEICSNLVKTRRRAVGWWKRLFTLKEEKPKMYFMTMIVSLAAVAWVGQQVHNLLLTYLIATMVRMNVLADALKSINNAEKRGKRQVLIRPCSKVIVRFLTVMMKHGYIGEFEIIDDHRAGKIVVNLTGRLNK

SEQ ID NO: 75649 - protein, 227 aa, Homo sapiens
  Payload ID: 14938
  Gene Symbol:
  Gene Name: RP11-106M3.2
  ENSP ID: ENSP00000478716
MTSSRLWFSLLLAAAFAGRATALWPWPQNFQTSDQRYVLYPNNFQFQYDVSSAAQPGCSVLDEAFQRYRDLLFGSGSWPRPYLTGKRHTLEKNVLVVSVVTPGCNQLPTLESVENYTLTINDDQCLLLSETVWGALRGTPEQKALVIGGEACMWGEYVDNTNLVPRLWPRAGAVAERLWSNKLTSDLTFAYERLSHFRCELLRLQGRRMCLRLRGKKVVKDTEDRDV

SEQ ID NO: 75650 - protein, 481 aa, Homo sapiens; identical to SEQ ID NO: 20762
  Payload ID: 14939
  Gene Symbol:
  Gene Name: RP11-106M3.5
  ENSP ID: ENSP00000454749

SEQ ID NO: 75651 - protein, 1700 aa, Homo sapiens
  Payload ID: 14940
  Gene Symbol:
  Gene Name: RP11-1070B7.1
  ENSP ID: ENSP00000480274
MTSAQCPALACVMSPLRFWGPWPLLMWQLLWLLVKEAQPLEWVKDPLQLTSNPLGPPEPWSSHSSHFPRESPHAPTLPADPWDFDHLGPSASSEMPAPPQESTENLVPFLDTWDSAGELPLEPEQFLASQQDLKDKLSPQERLPVSPKKLKKDPAQRWSLAEIIGIIRQLSTPQSQKQTLQNEYSSTDTPYPGSLPPELRVKSDEPPGPSEQVGPSQFHLEPETQNPETLEDIQSSSLQQEAPAQLPQLLEEEPSSMQQEAPALPPESSMESLTLPNHEVSVQPPGEDQAYYHLPNITVKPADVEVTITSEPTNETESSQAQQETPIQFPEEVEPSATQQEAPIEPPVPPMEHELSISEQQQPVQPSESPREVESSPTQQETPGQPPEHHEVTVSPPGHHQTHHLASPSVSVKPPDVQLTIAAEPSAEVGTSLVHQEATTRLSGSGNDVEPPAIQHGGPPLLPESSEEAGPLAVQQETSFQSPEPINNENPSPTQQEAAAEHPQTAEEGESSLTHQEAPAQTPEFPNVVVAQPPEHSHLTQATVQPLDLGFTITPESKTEVELSPTMKETPTQPPKKVVPQLRVYQGVTNPTPGQDQAQHPVSPSVTVQLLDLGLTITPEPTTEVGHSTPPKRTIVSPKHPEVTLPHPDQVQTQHSHLTRATVQPLDLGFTITPKSMTEVEPSTALMTTAPPPGHPEVTLPPSDKGQAQHSHLTQATVQPLDLELTITTKPTTEVKPSPTTEETSTQPPDLGLAIIPEPTTETGHSTALEKTTAPRPDRVQTLHRSLTEVTGPPTELEPAQDSLVQSESYTQNKALTAPEEHKASTSTNICELCTCGDEMLSCIDLNPEQRLRQVPVPEPNTHNGTFTILNFQGNYISYIDGNVWKAYSWTEKLILRENNLTELHKDSFEGLLSLQYLDLSCNKIQSIERHTFEPLPFLKFINLSCNVITELSFGTFQAWHGMQFLHKLILNHNPLTTVEDPYLFKLPALKYLDMGTTLVPLTTLKNILMMTVELEKLILPSHMACCLCQFKNSIEAVCKTVKLHCNSACLTNTIHCPEEASVGNPEGAFMKVLQARKNYTSTELIVEPEEPSDSSGINLSGFGSEQLDTNDESDFISTLRYILPYFSAVNLDVKSLLLPLIKLPTTGNSLAKIQTVGQNRQRVKRVLMGPRSIQKRHFKEVGRQSIRREQGAQASVENAAEEKRLGSPAPREVEQPHTQQGPEKLAGNAVYTKPSFTQEHKAAVSVLKPFSKGAPSTSSPAKALPQVRDRWKDLTHAISILESAKARVTNTKTSKPIVHARKKYRFHKTRSHVTHRTPKVKKSPKVRKKSYLSRLMLANRLPFSAAKSLINSPSQGAFSSLGDLSPQENPFLEVSAPSEHFIEKNNTKHTTARNAFEENDFMENTNMPEGTISENTNYNHPPEADSAGTAFNLGPTVKQTETKWEYNNVGTDPSPEPKSFNYPLLSSPGDQFEIQLTQQLQSLIPNNNVRRLIAHVIRTLKMDCSGAHVQVTCAKLISRTGHLMKLLSGQQEVKASKIEWDTDQWKIENYINESTEAQSEQKEKSLELKKEVPGYGYTDKLILALIVTGILTILIILFCLIVICCHRRSLQEDEEGFSRGIFRFLPRRGCSSRRESQDGLSSFGQPLWFKDMYKPLSATRINNHAWKLHKKSSNEDKILNRDPGDSEAPTEEEESEALP

SEQ ID NO: 75652 - protein, 738 aa, Homo sapiens
  Payload ID: 14940
  Gene Symbol:
  Gene Name: RP11-1070B7.1
  ENSP ID: ENSP00000485882
MQFLHKLILNHNPLTTVEDPYLFKLPALKYLDMGTTLVPLTTLKNILMMTVELEKLILPSHMACCLCQFKNSIEAVCKTVKLHCNSACLTNTIHCPEEASVGNPEGAFMKVLQARKNYTSTELIVEPEEPSDSSGINLSGFGSEQLDTNDESDFISTLRYILPYFSAVNLDVKSLLLPLIKLPTTGNSLAKIQTVGQNRQRVKRVLMGPRSIQKRHFKEVGRQSIRREQGAQASVENAAEEKRLGSPAPREVEQPHTQQGPEKLAGNAVYTKPSFTQEHKAAVSVLKPFSKGAPSTSSPAKALPQVRDRWKDLTHAISILESAKARVTNTKTSKPIVHARKKYRFHKTRSHVTHRTPKVKKSPKVRKKSYLSRLMLANRLPFSAAKSLINSPSQGAFSSLGDLSPQENPFLEVSAPSEHFIEKNNTKHTTARNAFEENDFMENTNMPEGTISENTNYNHPPEADSAGTAFNLGPTVKQTETKWEYNNVGTDPSPEPKSFNYPLLSSPGDQFEIQLTQQLQSLIPNNNVRRLIAHVIRTLKMDCSGAHVQVTCAKLISRTGHLMKLLSGQQEVKASKIEWDTDQWKIENYINESTEAQSEQKEKSLELKKEVPGYGYTDKLILALIVTGILTILIILFCLIVICCHRRSLQEDEEGFSRGIFRFLPRRGCSSRRESQDGLSSFGQPLWFKDMYKPLSATRINNHAWKLHKKSSNEDKILNRDPGDSEAPTEEEESEALP

SEQ ID NO: 75653 - protein, 1635 aa, Homo sapiens
  Payload ID: 14940
  Gene Symbol:
  Gene Name: RP11-1070B7.1
  ENSP ID: ENSP00000487050
MTSAQCPALACVMSPLRFWGPWPLLMWQLLWLLVKEAQPLEWVKDPLQLTSNPLGPPEPWSSHSSHFPRESPHAPTLPADPWDFDHLGPSASSEMPAPPQESTENLVPFLDTWDSAGELPLEPEQFLASQQDLKDKLSPQERLPVSPKKLKKDPAQRWSLAEIIGIIRQLSTPQSQKQTLQNEYSSTDTPYPGSLPPELRVKSDEPPGPSEQVGPSQFHLEPETQNPETLEDIQSSSLQQEAPAQLPQLLEEEPSSMQQEAPALPPESSMESLTLPNHEVSVQPPGEDQAYYHLPNITVKPADVEVTITSEPTNETESSQAQQETPIQFPEEVEPSATQQEAPIEPPVPPMEHELSISEQQQPVQPSESPREVESSPTQQETPGQPPEHHEVTVSPPGHHQTHHLASPSVSVKPPDVQLTIAAEPSAEVGTSLVHQEATTRLSGSGNDVEPPAIQHGGPPLLPESSEEAGPLAVQQETSFQSPEPINNENPSPTQQEAAAEHPQTAEEGESSLTHQEAPAQTPEFPNVVVAQPPEHSHLTQATVQPLDLGFTITPESKTEVELSPTMKETPTQPPKKVVPQLRVYQGVTNPTPGQDQAQHPVSPSVTVQLLDLGLTITPEPTTEVGHSTPPKRTIVSPKHPEVTLPHPDQVQTQHSHLTRATVQPLDLGFTITPKSMTEVEPSTALMTTAPPPGHPEVTLPPSDKGQAQHSHLTQATVQPLDLELTITTKPTTEVKPSPTTEETSTQPPDLGLAIIPEPTTETGHSTALEKTTAPRPDRVQTLHRSLTEVTGPPTELEPAQDSLVQSESYTQNKALTAPEEHKASTSTNICELCTCGDEMLSCIDLNPEQRLRQVPVPEPNTHNGTFTILNFQGNYISYIDGNVWKAYSWTEKLILRENNLTELHKDSFEGLLSLQYLDLSCNKIQSIERHTFEPLPFLKFINLSCNVITELSFGTFQAWHGMQFLHKLILNHNPLTTVEDPYLFKLPALKYLDMGTTLVPLTTLKNILMMTVELEKLILPSHMACCLCQFKNSIEAVCKTVKLHCNSACLTNTIHCPEEASVGNPEGAFMKVLQARKNYTSTELIVEPEEPSDSSGINLSGFGSEQLDTNDESDFISTLRYILPYFSAVNLDVKSLLLPLIKLPTTGNSLAKIQTVGQNRQRVKRVLMGPRSIQKRHFKEVGRQSIRREQGAQASVENAAEEKRLGSPAPREVEQPHTQQGPEKLAGNAVYTKPSFTQEHKAAVSVLKPFSKGAPSTSSPAKALPQVRDRWKDLTHAISILESAKARVTNTKTSKPIVHARKKYRFHKTRSHVTHRTPKVKKSPKVRKKSYLSRLMLANRLPFSAAKSLINSPSQGAFSSLGDLSPQENPFLEVSAPSEHFIEKNNTKHTTARNAFEENDFMENTNMPEGTISENTNYNHPPEADSAGTAFNLGPTVKQTETKWEYNNVGTDPSPEPKSFNYPLLSSPGDQFEIQLTQQLQSLIPNNNVRRLIAHVIRTLKMDCSGAHVQVTCAKLISRTGHLMKLLSGQQEVKASKIEWDTDQWKIENYINESTEAQSEQKEKSLELKKEVPGYGYTDKLILALIVTGILTILIILFCLIVICCHRRSLQEDEEGFSRDSEAPTEEEESEALP

SEQ ID NO: 75654 - protein, 339 aa, Homo sapiens
  Payload ID: 14941
  Gene Symbol:
  Gene Name: RP11-108K14.8
  ENSP ID: ENSP00000436767
MDTSPDPVCGGSHTSHVLLHDARGSAVGMEGGRPPPQSVGPAGLKKMQSSLKLVDCIIEVHDARIPLSGRNPLFQETLGLKPHLLVLNKMDLADLTEQQKIMQHLEGEGLKNVIFTNCVKDENVKQIIPMVTELIGRSHRYHRKENLEYCIMVIGVPNVGKSSLINSLRRQHLRKGKATRVGGEPGITRAVMSKIQVSERPLMFLLDTPGVLAPRIESVETGLKLALCGTVLDHLVGEETMADYLLYTLNKHQRFGYVQHYGLGSACDNVERVLKSVAVKLGKTQKVKVLTGTGNVNIIQPNYPAAARDFLQTFRRGLLGSVMLDLDVLRGHPPAETLP

SEQ ID NO: 75655 - protein, 213 aa, Homo sapiens
  Payload ID: 14942
  Gene Symbol:
  Gene Name: RP11-108O10.8
  ENSP ID: ENSP00000441304
  MOD_RES (1)..(1): Any amino acid
XKAVAGYKCTGYRSQDKSFHVEGALNHIFTRSLPFEGSQPRIFRIKLGNQWFSFPEPEALVGKLNRGFLEAPSCHPIKTINEKLIAELGKVFPLKRLKCSYPLLPQEGTSVLPFWNCDFLSAAFWISLHEDNSNSESLTGGTSQDVEDFLVSFSELSLLKNPGRDGKEEACEGTCGQAKICLRPSLLVHVQDVIEVPDFLSGLPWLVEGLGSA

SEQ ID NO: 75656 - protein, 144 aa, Homo sapiens
  Payload ID: 14942
  Gene Symbol:
  Gene Name: RP11-108O10.8
  ENSP ID: ENSP00000479200
  MOD_RES (1)..(1): Any amino acid
XSQPRIFRIKLGNQWFSFPEPEALVGKLNRLSGNKAGQVWAPEGSTAFKCLLSARLCAALLSNISDCDETFNYWEPTHYLIYGEGFQTWEYSPAYAIRSYAYLLLHAWPAAFHARILQTNKILVFYFLRCLLAFVSCICELYFY

SEQ ID NO: 75657 - protein, 844 aa, Homo sapiens
  Payload ID: 14942
  Gene Symbol:
  Gene Name: RP11-108O10.8
  ENSP ID: ENSP00000482396
MAPRRLLLVGEGNFSFAAALSETLDQSTQLTATCLQRPAELARDPLAWENLQCLRERGIDVRFGVDCTQLADVFELHEREFDQIYFIFPHCGRKAGVAKNRELLAKFFQSCADVLAEEGEVHVALCRGQGGTPADKPQREWHNSWQVVAMAALGGLILSDVYPFSCKAVAGYKCTGYRSQDKSFHVEGALNHIFTRSLPFEGSQPRIFRIKLGNQWFSFPEPEALVGKLNRLAMASRGARQRLKGSGASSGDTAPAADKLRELLGSREAGGAEHRTELSGNKAGQVWAPEGSTAFKCLLSARLCAALLSNISDCDETFNYWEPTHYLIYGEGFQTWEYSPAYAIRSYAYLLLHAWPAAFHARILQTNKILVFYFLRCLLAFVSCICELYFYKAVCKKFGLHVSRMMLAFLVLSTGMFCSSSAFLPSSFCMYTTLIAMTGWYMDKTSIAVLGVAAGAILGWPFSAALGLPIAFDLLVMKHRWKSFFHWSLMALILFLVPVVVIDSYYYGKLVIAPLNIVLYNVFTPHGPDLYGTEPWYFYLINGFLNFNVAFALALLVLPLTSLMEYLLQRFHVQNLGHPYWLTLAPMYIWFIIFFIQPHKEERFLFPVYPLICLCGAVALSALQKCYHFVFQRYRLEHYTVTSNWLALGTVFLFGLLSFSRSVALFRGYHGPLDLYPEFYRIATDPTIHTVPEGRPVNVCVGKEWYRFPSSFLLPDNWQLQFIPSEFRGQLPKPFAEGPLATRIVPTDMNDQNLEEPSRYIDISKCHYLVDLDTMRETPREPKYSSNKEEWISLAYRPFLDASRSSKLLRAFYVPFLSDQYTVYVNYTILKPRKAKQIRKKSGG

SEQ ID NO: 75658 - protein, 5 aa, Homo sapiens
  Payload ID: 14943
  Gene Symbol:
  Gene Name: RP11-1099M24.7
  ENSP ID: ENSP00000461816
  MOD_RES (1)..(1): Any amino acid
XARAG

SEQ ID NO: 75659 - protein, 191 aa, Homo sapiens
  Payload ID: 14944
  Gene Symbol:
  Gene Name: RP11-111H13.1
  ENSP ID: ENSP00000390891
MSSTLGKLSNQVEETLPLLKKPLKRAITTLMAGILRLVVQWPPGRLQTVTKGVESLICTDWIRHKFTRSRIPEKVFQASPEDHEKYGGDPQNPHKLHIVTRIKSTRRRPYWEKDIIKMLGLEKAHTPQVHKNIPSVNAKLKVVKHLIRIKPLKLPQGLPAEENMSNTCLKSTGELVVQWHLKPVEQKAHES

SEQ ID NO: 75660 - protein, 234 aa, Homo sapiens; identical to SEQ ID NO: 67852
  Payload ID: 14945
  Gene Symbol:
  Gene Name: RP11-111K18.1
  ENSP ID: ENSP00000455744

SEQ ID NO: 75661 - protein, 48 aa, Homo sapiens
  Payload ID: 14945
  Gene Symbol:
  Gene Name: RP11-111K18.1
  ENSP ID: ENSP00000456999
MAERGYSFSLTTFSPSGKLVQIEYALAAVAGGAPSVGIKECLCTELEN

SEQ ID NO: 75662 - protein, 254 aa, Homo sapiens
  Payload ID: 14946
  Gene Symbol:
  Gene Name: RP11-111M22.2
  Uniprot ID: Q3ZCU0
  ENSP ID: ENSP00000323821
MSDRYLEQRISIKFCVKLNKSASETHHLLKEAYGDEVMSRARVFDWHKRFKEGREDVRDDARSGRPVTHRTDDNIQKVKDLVCSNRQLTVRMMAEELNLDKETVRLILKENLNMRKISAKVISGVLKETEPHYVAQAGLELLVSRDPPTLASQSSGIISMSHHAKPKPGVQWCKFQSESTGRRARSADVQGQEKMDVTAQEARTNLPFYLFVLFRSSMNWMMSMHIREGCLFITRSTNSNANLFRKHPHRHTQK

SEQ ID NO: 75663 - protein, 187 aa, Homo sapiens
  Payload ID: 14946
  Gene Symbol:
  Gene Name: RP11-111M22.2
  ENSP ID: ENSP00000489195
MSDRYLEQRISIKFCVKLNKSASETHHLLKEAYGDEVMSRARVFDWHKRFKEGREDVRDDARSGRPVTHRTDDNIQKVKDLVCSNRQLTVRMMAEELNLDKETVRLILKENLNMRKISAKVISGVLKGEPKPRKLDFRSDLSKETRKNSSCLRKKRRNLTMLPRLVSNSLSQGILPPWPPKALGLSA

SEQ ID NO: 75664 - protein, 210 aa, Homo sapiens
  Payload ID: 14946
  Gene Symbol:
  Gene Name: RP11-111M22.2
  ENSP ID: ENSP00000489606
MSDRYLEQRISIKFCVKLNKSASETHHLLKEAYGDEVMSRARVFDWHKRFKEGREDVRDDARSGRPVTHRTDDNIQKVKDLVCSNRQLTVRMMAEELNLDKETVRLILKENLNMRKISAKVISGVLKGEPKPRKLDFRSDLSKETRKNSSCLRKKVTGSETWSYLQGEAGGEMPLPVSHPRVHYSASQLLQASSSTSLPPRVAENWFTPW

SEQ ID NO: 75665 - protein, 43 aa, Homo sapiens
  Payload ID: 14947
  Gene Symbol:
  Gene Name: RP11-11N7.5
  ENSP ID: ENSP00000479468
  MOD_RES (1)..(1): Any amino acid
XILGSEAMESALSPRILLNTQIKRTDTYFSKTFTRSRLFSLVG

SEQ ID NO: 75666 - protein, 64 aa, Homo sapiens
  Payload ID: 14947
  Gene Symbol:
  Gene Name: RP11-11N7.5
  ENSP ID: ENSP00000482621
  MOD_RES (1)..(1): Any amino acid
XGRGSYSNRGNYNRGGMPNRGNYNQNFRGRGNNRGYKNQSQGYNQWQQGSVHVNVLCGRVKGPN

SEQ ID NO: 75667 - protein, 153 aa, Homo sapiens; identical to SEQ ID NO: 1173
  Payload ID: 14948
  Gene Symbol:
  Gene Name: RP11-1212A22.4
  ENSP ID: ENSP00000331567

SEQ ID NO: 75668 - protein, 369 aa, Homo sapiens; identical to SEQ ID NO: 1174
  Payload ID: 14948
  Gene Symbol:
  Gene Name: RP11-1212A22.4
  ENSP ID: ENSP00000389275

SEQ ID NO: 75669 - protein, 232 aa, Homo sapiens; identical to SEQ ID NO: 1177
  Payload ID: 14948
  Gene Symbol:
  Gene Name: RP11-1212A22.4
  ENSP ID: ENSP00000431760

SEQ ID NO: 75670 - protein, 224 aa, Homo sapiens
  Payload ID: 14948
  Gene Symbol:
  Gene Name: RP11-1212A22.4
  ENSP ID: ENSP00000437314
  MOD_RES (1)..(1): Any amino acid
XRHRGTDFGGSPWLLIITVFLRSYKFAISLCTSYLCVSFLKTIFPSQNGHDGSTDVQQRARRSNCRRQEGIKIVLEDIFTLWRQVETKVRAKIRKMKVTTKVNRHDKINGKRKTAKEHLRKLSMKEREHGEKERQVSEAEENGKLDMKEIHTYMEMFQRAQALRRRAEDYYRCKITPSARKPLCNRVSLLVFLAFGHSLPGQDMDTFFSLRLCAQALQREMAER

SEQ ID NO: 75671 - protein, 232 aa, Homo sapiens; identical to SEQ ID NO: 1177
  Payload ID: 14948
  Gene Symbol:
  Gene Name: RP11-1212A22.4
  ENSP ID: ENSP00000440825

SEQ ID NO: 75672 - protein, 79 aa, Homo sapiens; identical to SEQ ID NO: 23494
  Payload ID: 14949
  Gene Symbol:
  Gene Name: RP11-1236K1.1
  ENSP ID: ENSP00000392568

SEQ ID NO: 75673 - protein, 64 aa, Homo sapiens
  Payload ID: 14950
  Gene Symbol:
  Gene Name: RP11-123K3.4
  ENSP ID: ENSP00000477227
YFGMDHNVDQTGKAVIINKTSNTRIPEQRFSEHIKDEKNTEFQQRFILKRDDASMDRDDNQGEP

SEQ ID NO: 75674 - protein, 94 aa, Homo sapiens
  Payload ID: 14951
  Gene Symbol:
  Gene Name: RP11-125O5.2
  ENSP ID: ENSP00000454306
  MOD_RES (1)..(1): Any amino acid
XYGWSASKTNFLLVLDAFLCAVGLTSYSVLVIRIVQPELKALAIGFHSMIMRSLGGILVPIYFGALIDTTCMKWSTNSCGARGACRIYNSTYLG

SEQ ID NO: 75675 - protein, 63 aa, Homo sapiens
  Payload ID: 14951
  Gene Symbol:
  Gene Name: RP11-125O5.2
  ENSP ID: ENSP00000465144
  MOD_RES (1)..(1): Any amino acid
XIVQPELKALAIGFHSMIMRSLGGILVPIYFGALIDTTCMKWSTNSCGARGACRIYNSTYLGY

SEQ ID NO: 75676 - protein, 78 aa, Homo sapiens
  Payload ID: 14951
  Gene Symbol:
  Gene Name: RP11-125O5.2
  ENSP ID: ENSP00000466239
  MOD_RES (1)..(1): Any amino acid
XCAVGLTSYSVLVIRIVQPELKALAIGFHSMIMRSLGGILVPIYFGALIDTTCMKWSTNSCGARGACRIYNSTYLGIF

SEQ ID NO: 75677 - protein, 96 aa, Homo sapiens
  Payload ID: 14951
  Gene Symbol:
  Gene Name: RP11-125O5.2
  ENSP ID: ENSP00000467209
AFLCAVGLTSYSVLVIRIVQPELKALAIGFHSMIMRSLGGILVPIYFGALIDTTCMKWSTNSCGARGACRIYNSTYLGRAFFGLKYLLGMRHYSWN

SEQ ID NO: 75678 - protein, 89 aa, Homo sapiens
  Payload ID: 14951
  Gene Symbol:
  Gene Name: RP11-125O5.2
  ENSP ID: ENSP00000467594
FLCAVGLTSYSVLVIRIVQPELKALAIGFHSMIMRSLGGILVPIYFGALIDTTCMKWSTNSCGARGACRIYNSTYLGYETLFLELSIQQ

SEQ ID NO: 75679 - protein, 201 aa, Homo sapiens
  Payload ID: 14952
  Gene Symbol:
  Gene Name: RP11-12J10.3
  ENSP ID: ENSP00000455755
  MOD_RES (1)..(1): Any amino acid
XHWDAVYERELQTFREYGDTGEIWFGEESMNRLIRWMQKHKIPLDASVLDIGTGNGVFLVELAKFGFSNITGIDYSPSAIQLSGSIIEKEGLSNIKLKVEDFLNLSTQLSGFHICIDKGTFDAISLNPDNAIEKRKQYVKSLSRVLKVKGFFLITSCNWTKEELLNEFSEGFELLEELPTPKFSFGGRSGNSVAALVFQKM

SEQ ID NO: 75680 - protein, 106 aa, Homo sapiens
  Payload ID: 14953
  Gene Symbol:
  Gene Name: RP11-136C24.3
  ENSP ID: ENSP00000414848
MMTAVSLTTRPQESVAFEDVAVYFTTKEWAIMVPAERALYRDVMLENYEAVAFVVPPTSKPALVSHLEQGKESCFTQPQGVLSRNDWRAGWIGPRPLGSLLLWLRA

SEQ ID NO: 75681 - protein, 101 aa, Homo sapiens
  Payload ID: 14953
  Gene Symbol:
  Gene Name: RP11-136C24.3
  ENSP ID: ENSP00000477043
MMTAVSLTTRPQESVAFEDVAVYFTTKEWAIMVPAERALYRDVMLENYEAVAFVVPPTSKPALVSHLEQGKESCFTQPQGVLSRNDWRAGWIGVLAPEKAA

SEQ ID NO: 75682 - protein, 164 aa, Homo sapiens
  Payload ID: 14954
  Gene Symbol:
  Gene Name: RP11-140L24.4
  ENSP ID: ENSP00000457299
MFRNQYDNDVTVWSPQGRIHQIEYAMEAVKQGSATVGLKSKTHAVLVALKRAQSELAAHQKKILHVDNHIGISIAGLTADARLLCNFMRQECLDSRFVFDRPLPVSRLVSLIGSSILFMIWALTFSKPVHLLTILTAEPCPLEPVPNQLVLTWRDICLNLWSVI

SEQ ID NO: 75683 - protein, 272 aa, Homo sapiens; identical to SEQ ID NO: 13960
  Payload ID: 14955
  Gene Symbol:
  Gene Name: RP11-141O19.1
  ENSP ID: ENSP00000489328

SEQ ID NO: 75684 - protein, 143 aa, Homo sapiens
  Payload ID: 14956
  Gene Symbol:
  Gene Name: RP11-145E5.5
  ENSP ID: ENSP00000385916
MASGTTTTAVKIGIIGGTGLDDPEILEGRTEKYVDTPFGKPSDALILGKIKNVDCVLLARHGRQHTIMPSKVNYQANIWALKEEGCTHVIVTTACGSLREEIQPGDIVIIDQFIDRTICHDISKDSKREYWCPCCDDSSAPLI

SEQ ID NO: 75685 - protein, 813 aa, Homo sapiens; identical to SEQ ID NO: 47735
  Payload ID: 14957
  Gene Symbol:
  Gene Name: RP11-146B14.1
  ENSP ID: ENSP00000440656

SEQ ID NO: 75686 - protein, 85 aa, Homo sapiens
  Payload ID: 14958
  Gene Symbol:
  Gene Name: RP11-14J7.7
  ENSP ID: ENSP00000338288
KKEHVFIHERPRKINGICISPKKVACQNLSAIFCFQSETKFKMTVCQLIEGTRYPACRYHYSPTEGFVLVTCDDLRPDSFLGYVK

SEQ ID NO: 75687 - protein, 96 aa, Homo sapiens
  Payload ID: 14958
  Gene Symbol:
  Gene Name: RP11-14J7.7
  ENSP ID: ENSP00000477006
MIIMVIIFLVLLFWENEVNDEAVMSTLEHLHVDYPQNDVPVPARRDYTTSEMETFPLLLLSLGLVLAEASESTMKIIKEEFTDEEMQYDMAKSGQE

SEQ ID NO: 75688 - protein, 293 aa, Homo sapiens
  Payload ID: 14959
  Gene Symbol:
  Gene Name: RP11-152F13.10
  ENSP ID: ENSP00000454786
  MOD_RES (1)..(1): Any amino acid
XEAPKDPFSIEREARLHRQAAAVNEATCTWSGQLPPRNYKNPIYSCKVFLGGVPWDITEAGLVNTFRVFGSLSVEWPGKDGKHPRCPPKGYVYLVFELEKSVRSLLQACSHDPLSPDGLSEYYFKMSSRRMRCKEVQVIPWVLADSNFVRSPSQRLDPSRTVFVGALHGMLNAEALAAILNDLFGGVVYAGIDTDKHKYPIGSGRVTFNNQRSYLKAVSAAFVEIKTTKFTKKVQIDPYLEDSLCHICSSQPGPFFCRDQGRVRTKTVKKAARVIIEKYYTRLGNDFHTNKRV

SEQ ID NO: 75689 - protein, 293 aa, Homo sapiens; identical to SEQ ID NO: 75688
  Payload ID: 14959
  Gene Symbol:
  Gene Name: RP11-152F13.10
  ENSP ID: ENSP00000488785
  MOD_RES (1)..(1): Any amino acid

SEQ ID NO: 75690 - protein, 232 aa, Homo sapiens
  Payload ID: 14960
  Gene Symbol:
  Gene Name: RP11-156P1.2
  ENSP ID: ENSP00000461460
MDPLFQQTHKQVHEIQSCMGRLETADKQSVHIVENEIQASIDQIFSRLERLEILSSKEPPNKRQNARLRVDQLKYDVQHLQTALRNFQHRRHAREQQERQREELLSRTFTTNDSDTTIPMDESLQFNSSLQKVHNGMDDLILDGHNILDGLRTQRLTLKGTQKKILDIANMLGLSNTVMRLIEKRAFQDKYFMIETRSHHVAQNGPELLSSRDPPASASRSAGIIEFSEKIT

SEQ ID NO: 75691 - protein, 62 aa, Homo sapiens
  Payload ID: 14961
  Gene Symbol:
  Gene Name: RP11-159D12.5
  ENSP ID: ENSP00000463235
MEAMADRFPDVLPASATDPNCRTSHSSPRPPGSIQWGISSKRNQTNVFQPLHSVASLCVRKG

SEQ ID NO: 75692 - protein, 225 aa, Homo sapiens
  Payload ID: 14962
  Gene Symbol:
  Gene Name: RP11-15K19.2
  ENSP ID: ENSP00000390331
MEEEEMNDGSQMVRSQESLTFQDVAVDFTREEWDQLYPAQKNLYRDVMLENYRNLVALGYQLCKPEVIAQLELEEEWVIERDSLLDTHPGDQSHVMSVVRSSVHARWIVGKVIGTKMQKTAKVRVTRLVLDPYLLKYFNKRKTYFAHDALQQCTVGDIVLLRALPVPRAKHVKHELAEIVFKVGKVIDPVTGKPCAGTTYLESPLSSETTQLSKNLEELNISSAQ

SEQ ID NO: 75693 - protein, 259 aa, Homo sapiens
  Payload ID: 14963
  Gene Symbol:
  Gene Name: RP11-162P23.2
  ENSP ID: ENSP00000450353
MDLAGNKAAALDIAMIKMVAPSMASRVIDRAIQIFINNEWHDAVSRKTFPTVNPSTGEVICQVAEGDKEDVDKAVKAARAAFQLGSPWRRMDASHRGRLLNRLADLIERDRTYLAALETLDNGKPYVISYLVDLDMVLKCLRYYAGWADKYHGKTIPIDGDFFSYTRHEPVGVCGQIIPWNFPLLMQAWKLGPALATGNVVVMKVAEQTPLTALYVANLIKEAGFPPGVVNIVPGFGPTAGAAIASHEDVDKVAFTGST

SEQ ID NO: 75694 - protein, 68 aa, Homo sapiens
  Payload ID: 14964
  Gene Symbol:
  Gene Name: RP11-166N6.3
  ENSP ID: ENSP00000455583
  MOD_RES (1)..(1): Any amino acid
XAIPVSIHVNVILFSAILIVLTMVGTAFFMYNAFGKPFETLHGPLGLYLLSFISEAAADPVWKHSPCL

SEQ ID NO: 75695 - protein, 49 aa, Homo sapiens
  Payload ID: 14964
  Gene Symbol:
  Gene Name: RP11-166N6.3
  ENSP ID: ENSP00000457487
  MOD_RES (1)..(1): Any amino acid
XLTMVGTAFFMYNAFGKPFETLHGPLGLYLLSFISEAAADPVWKHSPCL

SEQ ID NO: 75696 - protein, 72 aa, Homo sapiens
  Payload ID: 14964
  Gene Symbol:
  Gene Name: RP11-166N6.3
  ENSP ID: ENSP00000457784
  MOD_RES (1)..(1): Any amino acid
XAIPVSIHVNVILFSAILIVLTMVGTAFFMYNAFGKPFETLHGPLGLYLLSFISGRAGTTSGSPWNLQVPGV

SEQ ID NO: 75697 - protein, 67 aa, Homo sapiens
  Payload ID: 14965
  Gene Symbol:
  Gene Name: RP11-176H8.1
  ENSP ID: ENSP00000446654
MAEGSRIPQARALLQQCLHARLQIRPADGDVAAQWVEVQRGLVIYVCFFKGADKELLPKMDLRLWLH

SEQ ID NO: 75698 - protein, 67 aa, Homo sapiens; identical to SEQ ID NO: 75697
  Payload ID: 14965
  Gene Symbol:
  Gene Name: RP11-176H8.1
  ENSP ID: ENSP00000447056

SEQ ID NO: 75699 - protein, 63 aa, Homo sapiens
  Payload ID: 14965
  Gene Symbol:
  Gene Name: RP11-176H8.1
  ENSP ID: ENSP00000449799
  MOD_RES (1)..(1): Any amino acid
XIPQARALLQQCLHARLQIRPADGDVAAQWVEVTSARQLSLSSGVRGGFFRVVSVTRPLCVSL

SEQ ID NO: 75700 - protein, 54 aa, Homo sapiens
  Payload ID: 14966
  Gene Symbol:
  Gene Name: RP11-178C3.1
  ENSP ID: ENSP00000468280
STLSESANQVFLGFTYVAPSVLESVKEKFSFEPKIRSPRRFIGSPRTPVRFLVQ

SEQ ID NO: 75701 - protein, 237 aa, Homo sapiens
  Payload ID: 14967
  Gene Symbol:
  Gene Name: RP11-178L8.4
  ENSP ID: ENSP00000454386
  MOD_RES (1)..(1): Any amino acid
XPAGQQTVEIDLRHRIQLPDLENQRNFNELSRIVLEVRERVRQEQQEGGHEAGEGRGRQGPRESQPSPAQPRAEAPSKGPDGTPGEDGGEPGDAVAAAEQPAQCGQGQPFVLPVGVSSRNEDYPRTCRMWNSTFQTYKKEVCLPRHSMHPGPWAICCECQTRFGGRLPVSRVEAALPYWVPLSLRPRKQHPCWMHAAGTTAGGSAVMSACCPSSSSSRPPTRTSYRLLQRVCCPSAS

SEQ ID NO: 75702 - protein, 44 aa, Homo sapiens
  Payload ID: 14968
  Gene Symbol:
  Gene Name: RP11-190A12.7
  ENSP ID: ENSP00000454324
LKEEAQKRRERIDEIKRKKLEELSTAVCCADQRGWTGGPVPGRR

SEQ ID NO: 75703 - protein, 57 aa, Homo sapiens
  Payload ID: 14968
  Gene Symbol:
  Gene Name: RP11-190A12.7
  ENSP ID: ENSP00000455924
VQNRIATFEEGRRLKEEAQKRRERIDEIKRKKLEELSTAVCCADQRGWTGGPVPGRR

SEQ ID NO: 75704 - protein, 61 aa, Homo sapiens
  Payload ID: 14968
  Gene Symbol:
  Gene Name: RP11-190A12.7
  ENSP ID: ENSP00000456698
LKEEAQKRRERIDEIKRKKLEELSSLVTRTRGSTMAAFPICSRGSALQPQTQASTMPPSTS

SEQ ID NO: 75705 - protein, 336 aa, Homo sapiens
  Payload ID: 14969
  Gene Symbol:
  Gene Name: RP11-192H23.4
  ENSP ID: ENSP00000431165
MGAVSCRQGQHTQQGEHTRVAVPHKQGGNIRGPWARGWKSLWTGLGTIRSDLEELWELRGHHYLHQESLKPAPVLVEKPLPEWPVPQFINLFLPEFPIRPIRGQQQLKILGLVAKGSFGTVLKVLDCTQKAVFAVKVVPKVKVLQRDTVRQCKEEVSIQVCTESWKGLWEELGHRWQKEEMALKHMQAELQQQQAVLAKEVRDLKETLEFADQENQVAHLELGQVECQLKTTLEVLRERSLQCENLKDTVENLTAKLASTIADNQEQDLEKTRQYSQKLGLLTEQLQSLTLFLQTKLKEKTEQETLLLSTACPPTQEHPLPNDRTFLGSILTAVAD

SEQ ID NO: 75706 - protein, 171 aa, Homo sapiens
  Payload ID: 14969
  Gene Symbol:
  Gene Name: RP11-192H23.4
  ENSP ID: ENSP00000436369
MGAVSCRQGQHTQQGEHTRVAVPHKQGGNIRGPWARGWKSLWTGLGTIRSDLEELWELRGHHYLHQESLKPAPVLVEKPLPEWPVPQFINLFLPEFPIRPIRGQQQLKILGLVAKGSFGTVLKVLDCTQKAVFAVKVVPKVKVLQRDTVRQCKEEVSIQVISMTWASCIEM

SEQ ID NO: 75707 - protein, 122 aa, Homo sapiens
  Payload ID: 14969
  Gene Symbol:
  Gene Name: RP11-192H23.4
  ENSP ID: ENSP00000462934
MGAVSCRQGQHTQQGEHTRVAVPHKGGNIRGPWARGWKSLWTGLGTIRSDLEELWELRGHHYLHQESLKPAPVLVEKPLPEWPVPQFINLFLPEFPIRPIRGQQQLKLDCAAAISAHCNLPA

SEQ ID NO: 75708 - protein, 171 aa, Homo sapiens; identical to SEQ ID NO: 75706
  Payload ID: 14969
  Gene Symbol:
  Gene Name: RP11-192H23.4
  ENSP ID: ENSP00000464466

SEQ ID NO: 75709 - protein, 280 aa, Homo sapiens
  Payload ID: 14970
  Gene Symbol:
  Gene Name: RP11-195F19.29
  ENSP ID: ENSP00000451792
MSRSGTDPQQRQQASEADAAAATFRANDHQHIRYNPLQDEWVLVSAHRMKRPWQGQVEPQLLKTVPRHDPLNPLCPGAIRANGEIFENKGAMMGCSNPHPHCQVWASSFLPDIAQREERSQQAYKSQHGEPLLMEYSRQELLRKMSSSCSGLSRVLVAVATALVSASSPCPQAWGPPGVQYGQPGRSVKLCCPGVTAGDPVSWFRDGEPKLLQGPDSGLGHELVLAQADSTDEGTYICQTLDGALGGTVTLQLGYPPARPVVSCQAADYENFSCTWSPSQ

SEQ ID NO: 75710 - protein, 87 aa, Homo sapiens
  Payload ID: 14971
  Gene Symbol:
  Gene Name: RP11-195F19.5
  ENSP ID: ENSP00000452132
MSGMRRYEVALEAEEEIYWGCFYFFPWLRMWRRERSSAHPGEQKLEPLRGLMSCLSSGLGPTPQRSGRGFPRRSPTAAAQPASALKI

SEQ ID NO: 75711 - protein, 36 aa, Homo sapiens
  Payload ID: 14971
  Gene Symbol:
  Gene Name: RP11-195F19.5
  ENSP ID: ENSP00000454254
MSGMRRYEVALEAEEEIYWGCFYFFPWLRMWRRERR

SEQ ID NO: 75712 - protein, 36 aa, Homo sapiens; identical to SEQ ID NO: 75711
  Payload ID: 14971
  Gene Symbol:
  Gene Name: RP11-195F19.5
  ENSP ID: ENSP00000455581

SEQ ID NO: 75713 - protein, 87 aa, Homo sapiens; identical to SEQ ID NO: 75710
  Payload ID: 14971
  Gene Symbol:
  Gene Name: RP11-195F19.5
  ENSP ID: ENSP00000457701

SEQ ID NO: 75714 - protein, 166 aa, Homo sapiens
  Payload ID: 14972
  Gene Symbol:
  Gene Name: RP11-196G11.1
  ENSP ID: ENSP00000431371
MGSTWGSPGWVRLALCLTGLVLSLYALHVKAARARDRDYRALCDVGTAISCSRVFSSRWGRGFGLVEHVLGQDSILNQSNSIFGCIFYTLQLLLGLQAAQRACGQRGPGPPKPQEGNTVPGEWPWQASVRRQGAHICSGSLVADTWVLTAAHCFEKAAATELNSWS

SEQ ID NO: 75715 - protein, 121 aa, Homo sapiens
  Payload ID: 14972
  Gene Symbol:
  Gene Name: RP11-196G11.1
  ENSP ID: ENSP00000433035
  MOD_RES (1)..(1): Any amino acid
XDVGTAISCSRVFSSRWGRGFGLVEHVLGQDSILNQSNSIFGCIFYTLQLLLGCLRTRWASVLMLLSSLVSLAGSVYLAWILFFVLYDFCIVCITTYAINVSLMWLSFRKVQEPQGKAKRH

SEQ ID NO: 75716 - protein, 104 aa, Homo sapiens
  Payload ID: 14972
  Gene Symbol:
  Gene Name: RP11-196G11.1
  ENSP ID: ENSP00000460316
MGSTWGSPGWVRLALCLTGLVLSLYALHVKAARARDRDYRALCDVGTAISCSRVFSSRAAATELNSWSVVLGSLQREGLSPGAEEVGVAALQLPRAYNHYSQGS

SEQ ID NO: 75717 - protein, 28 aa, Homo sapiens
  Payload ID: 14973
  Gene Symbol:
  Gene Name: RP11-201K10.3
  ENSP ID: ENSP00000477381
  MOD_RES (1)..(1): Any amino acid
XGAMCPLAVPIVAPMRRVAADAPGTRKA

SEQ ID NO: 75718 - protein, 376 aa, Homo sapiens
  Payload ID: 14974
  Gene Symbol:
  Gene Name: RP11-20I23.1
  ENSP ID: ENSP00000455547
MDSPGYNCFVDKDKMDAAIQDLGPKELSCTELQELKQLARQGYWAQSHALRGKVYQRLIRDIPCRTVTPDASVYSDIVGKIVGKHSSSCLPLPEFVDNTQVPSYCLNARGEGAVRKILLCLANQFPDISFCPALPAVVALLLHYSIDEAECFEKACRILACNDPGRRLIDQSFLAFESSCMTFGDLVNKYCQAAHKLMVAVSEDVLQVYADWQRWLFGELPLCYFARVFDVFLVEGYKVLYRVALAILKFFHKVRAGQPLESDSVKQDIRTFVRDIAKTVSPEKLLEKAFAIRLFSRKEIQLLQMANEKALKQKGITVKQKSPGRCLWHSQERYRHCGHVCHAAGADHEVHHPSGHGWHHRHLRPGGGSPHRQLPE

SEQ ID NO: 75719 - protein, 152 aa, Homo sapiens
  Payload ID: 14975
  Gene Symbol:
  Gene Name: RP11-20I23.3
  ENSP ID: ENSP00000455561
MSESKSGPEYASFFAVMGASAAMVFSGGFGVDFSQATEDVGSGVALVARRILSHGVTSFCPTLVTSPPEVYHKVVPQIPVKSGGPHGAGVLGLHLEGPFISREKRGAHPEAHLRSFEADAFQDLLATYGPLDNVRIVTLAPELGRSHEVIRA

SEQ ID NO: 75720 - protein, 148 aa, Homo sapiens
  Payload ID: 14976
  Gene Symbol:
  Gene Name: RP11-212D19.4
  ENSP ID: ENSP00000461728
  MOD_RES (1)..(1): Any amino acid
XAAEADRTLFVGNLETKVTEELLFELFHQAGPVIKVKIPKDKDGKPKQFAFVNFKHEVSVPYAMNLLNGIKLYGRPIKIQFRSGSSHAPQDVSLSYPQHHVGNSSPTSTSPSSRYERTMDNMTSSAQIIQRSFSSPENFQRQAVITLV

SEQ ID NO: 75721 - protein, 130 aa, Homo sapiens
  Payload ID: 14977
  Gene Symbol:
  Gene Name: RP11-214K3.25
  ENSP ID: ENSP00000480330
  MOD_RES (1)..(1): Any amino acid
XAPSAEGCCRRTPPLFDHNKGRILTQQDPKAFVVLQPLWALPLPVLLECLGGFDPVTVIGVAGSRSRSFLDNPPHDWKTTKKPSSFFAVWIQTPGAQACTWAAAPCTWPDIWNMEPRCLGVRELPSRICM

SEQ ID NO: 75722 - protein, 98 aa, Homo sapiens
  Payload ID: 14978
  Gene Symbol:
  Gene Name: RP11-215A19.2
  ENSP ID: ENSP00000422449
  MOD_RES (1)..(1): Any amino acid
XPVLRGDGARPSWLASALACVLIFTIVVDILGNLLVILSVYRNKKLRNAGCQHEDTGCGIRRRCIQLSLQSQDKPAPTHYWLNLTNRYSFVFCFFKCI

SEQ ID NO: 75723 - protein, 153 aa, Homo sapiens
  Payload ID: 14979
  Gene Symbol:
  Gene Name: RP11-216L13.16
  ENSP ID: ENSP00000399627
ALVSVPRAQAVWLGRLDPEQLLGPWYVLAVASREKGFAMEKDMKNVVGVVVTLTPENNLRTLSSQHGLGGCDQSVMDLIKRNSGWVFENPSIGVLELWVLATNFRDYAIIFTQLEFGDEPFNTVELYSLTETASQEAMGLFTKWSRSLGFLSQ

SEQ ID NO: 75724 - protein, 40 aa, Homo sapiens
  Payload ID: 14980
  Gene Symbol:
  Gene Name: RP11-216L13.17
  ENSP ID: ENSP00000476927
  MOD_RES (1)..(1): Any amino acid
XLGLSRVDDAVAAKHPAPAWPLACRCSFRGSFHTLCSGAS

SEQ ID NO: 75725 - protein, 725 aa, Homo sapiens [sequence omitted]

SEQ ID NO: 75726 - protein, 1425 aa, Homo sapiens; identical to SEQ ID NO: 18368
  Payload ID: 14981
  Gene Symbol:
  Gene Name: RP11-219A15.1
  ENSP ID: ENSP00000440655

SEQ ID NO: 75727 - protein, 108 aa, Homo sapiens
  Payload ID: 14982
  Gene Symbol:
  Gene Name: RP11-229P13.27
  ENSP ID: ENSP00000485208
TNGNRCCAWSGIKSHPRSWTRPPRMRRMRTETSRCTSARAWPRLESPSAAGWRKGPWAQPIVSGVYGHGSGRGKGQSSLHPQFIPGPGPCRGTSGGCRDLRISGLLAD

SEQ ID NO: 75728 - protein, 77 aa, Homo sapiens
  Payload ID: 14982
  Gene Symbol:
  Gene Name: RP11-229P13.27
  ENSP ID: ENSP00000485275
  MOD_RES (1)..(1): Any amino acid
XLGTSGWHRARRCTTTSTNGNRCCAWSGIKSHPRSWTRPPRMRRMRTETSRCTSARAWPRGTSGGCRDLRISGLLAD

SEQ ID NO: 75729 - protein, 420 aa, Homo sapiens [sequence omitted]

SEQ ID NO: 75730 - protein, 595 aa, Homo sapiens
  Payload ID: 14983
  Gene Symbol:
  Gene Name: RP11-231C14.4
  ENSP ID: ENSP00000447597
MVKLSIVLTPQFLSHDQGQLTKELQQHVKSVTCPCEYLRKVINTLADHHHRGTDFGGSPWLHVIIAFPTSYKVVITLWIVYLWVSLLKTIFWSRNGHDGSTDVQQRAWRSNRRRQEGLRSICMHTKKRVSSFRGNKIGLKDVITLRRHVETKVRAKIRKRKVTTKINHHDKINGKRKTARKQKMFQRAQELRRRAEDYHKCKIPPSARKALCNWVRMAAAEHRHSSGLPYWPYLTAETLKNRMGHQPPPPTQQHSITDNSLSLKTPPECVLTPLPPSADDNLKTPPECVLTPLPPSADDNLKTPPECLLTPLPPSADDNLKTPPECLLTPLPPSADDNLKTPPECLLTPLPPSAPPSAPPSADDNLKTRAECLLHPLPPSADDNLKTPSERQLTPLPPSAPPSADDNIKTPAERLRGPLPPSADDNLKTPSERQLTPLPPSAPPSADDNIKTPAFHPQRMIISRHLPSVSSLPFHPQLHSQQMIISRYLLSVCGFRFHHQPMIISRHLPSVSSLPFHPQLHPQQMIISRHLPSVCGGRFHPQRMIISRHLPSVSSLPFHPQLHPQQMIISRHLPSVCGGRFHPQRMIISRHLPSV

SEQ ID NO: 75731 - protein, 24 aa, Homo sapiens
  Payload ID: 14983
  Gene Symbol:
  Gene Name: RP11-231C14.4
  ENSP ID: ENSP00000449585
  MOD_RES (1)..(1): Any amino acid
XHVKSVTCPCEYLRKVDGRMATWM

SEQ ID NO: 75732 - protein, 49 aa, Homo sapiens; identical to SEQ ID NO: 58201
  Payload ID: 14983
  Gene Symbol:
  Gene Name: RP11-231C14.4
  ENSP ID: ENSP00000449726

SEQ ID NO: 75733 - protein, 40 aa, Homo sapiens; identical to SEQ ID NO: 58208
  Payload ID: 14983
  Gene Symbol:
  Gene Name: RP11-231C14.4
  ENSP ID: ENSP00000449771

SEQ ID NO: 75734 - protein, 78 aa, Homo sapiens
  Payload ID: 14983
  Gene Symbol:
  Gene Name: RP11-231C14.4
  ENSP ID: ENSP00000449864
  MOD_RES (1)..(1): Any amino acid
XLRSICMHTKKRVSSFRGNKIGLKDVITLRRHVETKVRAKIRKRKVTTKINHHDKINGKRKTARKQINHILQKDYACL

SEQ ID NO: 75735 - protein, 68 aa, Homo sapiens; identical to SEQ ID NO: 58228
  Payload ID: 14983
  Gene Symbol:
  Gene Name: RP11-231C14.4
  ENSP ID: ENSP00000449873

SEQ ID NO: 75736 - protein, 250 aa, Homo sapiens [sequence omitted]

SEQ ID NO: 75737 - protein, 849 aa, Homo sapiens
  Payload ID: 14984
  Gene Symbol:
  Gene Name: RP11-231C18.3
  ENSP ID: ENSP00000423325
MSAGEVERLVSELSGGTGGDEEEEWLYGGPWDVHVHSDLAKDLDENEVERPEEENASANPPSGIEDETAENGVPKPKVTETEDDSDSDSDDDEDDVHVTIGDIKTGAPQYGSYGTAPVNLNIKTGGRVYGTTGTKVKGVDLDAPGSINGVPLLEVDLDSFEDKPWRKPGADLSDYFNYGFNEDTWKAYCEKQKRIRMGLEVIPVTSTTNKITAEDCTMEVTPGAEIQDGRFNLFKVQQGRTGNSEKETALPSTKAEFTSPPSLFKTGLPPSRNSTSSQSQTSTASRKANSSVGKWQDRYGRAESPDLRRLPGAIDVIGQTITISRVEGRRRANENSNIQLPYDSRWEFPRDGLVLGRVLGSGAFGKVVEGTAYGLSRSQPVMKVAVKMLKPTARSSEKQALMSELKIMTHLGPHLNIVNLLGACTKSGPIYIITEYCFYGDLVNYLHKNRDSFLSHHPEKPKKELDIFGLNPADESTRSYVILSFENNGDYMDMKQADTTQYVPMLERKEVSKYSDIQRSLYDRPASYKKKSMLDSEVKNLLSDDNSEGLTLLDLLSFTYQVARGMEFLASKNCVHRDLAARNVLLAQGKIVKICDFGLARDIMHDSNYVSKGSTFLPVKWMAPESIFDNLYTTLSDVWSYGILLWEIFSLGGTPYPGMMVDSTFYNKIKSGYRMAKPDHATSEVYEIMVKCWNSEPEKRPSFYHLSEIVENLLPGQYKKSYEKIHLDFLKSDHPAVARMRVDSDNAYIGVTYKNEEDKLKDWEGGLDEQRLSADSGYIIPLPDIDPVPEEEDLGKRNRHSSQTSEESAIETGSSSSTFIKREDETIEDIDMMDDIGIDSSDLVEDSFL

SEQ ID NO: 75738 - protein, 83 aa, Homo sapiens
  Payload ID: 14985
  Gene Symbol:
  Gene Name: RP11-234B24.6
  ENSP ID: ENSP00000456318
VVDVSKGIVNAVKDPDANGKSFAFVGPSRYLLFHLVKYIFAVAHRLFLPFPLPLFAYRWVARVFEISPFEPWITRDKVERKKV

SEQ ID NO: 75739 - protein, 478 aa, Homo sapiens
  Payload ID: 14986
  Gene Symbol:
  Gene Name: RP11-235E17.2
  ENSP ID: ENSP00000461416
MAARPITLGIDLGTTSVKAALLRAAPDDPSGFAVLASCARAARAEAAVESAVAGPQGREQDVSRILQALHECLAALPRPQLRSVVGIGVSGQMHGVVFWKTGQGCEWTEGGITPVFEPRAVSHLVTWQDGRCSSEFLASLPQPKSHLSVATGFGCATIFWLLKYRPEFLKSYDAAGTIHDYVVAMLCGLPRPLMSDQNAASWGYFNTQSQSWNVETLRSSGFPVHLLPDIAEPGSVAGRTSHMWFEIPKGTQVGVALGDLQASVYSCMAQRTDAVLNISTSVQLAASMPSGFQPAQTPDPTAPVAYFPYFNRTYLGVAASLNGGNVLATFVHMLVQWMADLGLEVEESTVYSRMIQAAVQQRDTHLTITPTVLGERHLPDQLASVTRISSSDLSLGHVTRALCRGIVQNLHSMLPIQQLQEWGVERVMGSGSALSRNDVLKQEVQRAFPLPMSFGQDVDAAVGAALVMLRRHLNQKES

SEQ ID NO: 75740 - protein, 689 aa, Homo sapiens
  Payload ID: 14987
  Gene Symbol:
  Gene Name: RP11-240B13.2
  ENSP ID: ENSP00000262283
MKFGAVTRIGGPPLGNQSPSSCSLLHEKDPPTTSGPQTDQPKKHLTNFKSATRRVARTQWLTADRQTWASISSVPWAQTISEKKPGGSLWETRSSPPTTAGTEEAMNTTSLLAPAAEIMATPGSPSQASPTLGAFTHGTQTPSPTKATAPRYPQTGDLSAEWPFTAGEEPVLVPRPHQVSRVRSSCCLSPILCSPAMIAFLLTSVLMIPHAGGHPLDTPHLPQELPPGLPNNINITFFSGMFKNVESVAEIFDCLGPHFTWLQAVFTNFPVLIQFVNGMKCVAGLCPRDFEDYGCTCRFEMEGLPVDESDSCCFQHRRCYEEAAEMDCLQDPAKLSTEVNCVSKKIICESKDNCEHLLCTCDKAAIECLARSSLNSSLNLLDTSFCLAQTPETTIKEDLTTLLPRVVPVEPTDTSLTALSGEVAAETEADRLITLSKKKAGHDQEGVGAARATSPPGSAEIVATRVTAKIVTLVPAGIKSLGLAVSSVENDPEETTEKACDRFTFLHLGSGDNMQVMPQLGEMLFCLTSRCPEEFESYGCYCGQEGRGEPRDDLDRCCLSHHCCLEQVRRLGCLLERLPWSPVVCVDHTPKCGGQSLCEKLLCACDQTAAECMTSASFNQSLKSPSRLGCPGQPAACEDSLHPVPAAPTLGSSSEEDSEEDPPQEDLGRAKRFLRKSLGPLGIGPLHGR

SEQ ID NO: 75741 - protein, 723 aa, Homo sapiens
  Payload ID: 14988
  Gene Symbol:
  Gene Name: RP11-244H3.4
  ENSP ID: ENSP00000421752
MKEPLDGECGKAVVPQQELLDKIKEEPDNAQEYGCVQQPKTQESKLKIGGVSSVNERPIAQQLNPGFQLSFASSGPSVLLPSVPAVAIKVFCSGCKKMLYKGQTAYHKTGSTQLFCSTRCITRHSSPACLPPPPKKTCTNCSKDILNPKDVITTRFENSYPSKDFCSQSCLSSYELKKKPVVTIYTKSISTKCSMCQKNADTRFEVKYQNVVHGLCSDACFSKFHSTNNLTMNCCENCGSYCYSSSGPCQSQKVFSSTSVTAYKQNSAQIPPYALGKSLRPSAEMIETTNDSGKTELFCSINCLSAYRVKTVTSSGVQVSCHSCKTSAIPQYHLAMSNGTIYSFCSSSCVVAFQNVFSKPKGTNSSAVPLSQGQVVVSPPSSRSAVSIGGGNTSAVSPSSIRGSAAASLQPLAEQSQQVALTHTVVKLKCQHCNHLFATKPELLFYKGKMFLFCGKNCSDEYKKKNKVVAMCDYCKLQKIIKETVRFSGVDKPFCSEVCKFLSARDFGERWGNYCKMCSYCSQTSPNLVENRLEGKLEEFCCEDCMSKFTVLFYQMAKCDGCKRQGKLSESIKWRGNIKHFCNLFCVLEFCHQQIMNDCLPQNKVNISKAKTAVTELPSARTDTTPVITSVMSLAKIPATLSTGNTNSVLKGAVTKEAAKIIQDESTQEDAMKFPSSQSSQPSRLLKNKGISCKPVTQTKATSCKPHTQHKECQTECPVRAVC

SEQ ID NO: 75742 - protein, 66 aa, Homo sapiens
  Payload ID: 14989
  Gene Symbol:
  Gene Name: RP11-248J23.7
  ENSP ID: ENSP00000473305
  MOD_RES (1)..(1): Any amino acid
XMKKFCAQPWEEIKTSYAGVKEKYLSEYCFSGTYILSLLLQGYHFTADSWEHIHFIGKKVEIKGPS

SEQ ID NO: 75743 - protein, 46 aa, Homo sapiens
  Payload ID: 14990
  Gene Symbol:
  Gene Name: RP11-249C24.12
  ENSP ID: ENSP00000477850
MDPNCSCSTTPANAESANAPPARRAAAPAAPWAVPSVPRDVFAKGH

SEQ ID NO: 75744 - protein, 171 aa, Homo sapiens
  Payload ID: 14991
  Gene Symbol:
  Gene Name: RP11-257K9.8
  ENSP ID: ENSP00000457270
MDMGTSALSKKPWWTLPQNFHAPMVFHMEEDQEELIFGHGDTYLRCIEVHSHTLIQLESWFTATGQTRVTVVGPHRARQWLLHMFCCVGSQDSYHHARGGSTAWPWERVLSARSRGGPCPKTFILQWCSTWKRTRRSSSSDLMTRTFAALSCTATPLFSWRGVSQLQARHV

SEQ ID NO: 75745 - protein, 278 aa, Homo sapiens
  Payload ID: 14992
  Gene Symbol:
  Gene Name: RP11-26J3.4
  ENSP ID: ENSP00000430858
MDCREMDLYEDYQSPFDFDAGVNKSYLYLSPSGNSSPPGSPTLQKFGLLRTDPVPEEGEDVAATISATETLSEEEQEELRRELAKVEEEIQTLSQVLAAKEKHLAEIKRKLGINSLQELKQNIAKGWQDVTATSAYKKTSETLSQAGQKASAAFSSVGSVITKKLEDVKNSPTFKSFEEKVENLKGSPKNVESFASMLRHSPLTQMGPAKDKLVIGRIFHIVENDLYIDFGGKFHCVCRRPEVDGESPISWYAVWRRFSQVMITCFSSNSDFGKHRKR

SEQ ID NO: 75746 - protein, 240 aa, Homo sapiens
  Payload ID: 14993
  Gene Symbol:
  Gene Name: RP11-277P12.6
  ENSP ID: ENSP00000437563
MNKQRGTFSEVSLAQDPKRQQRKPKGNKSSISGTEQEIFQVELNLQNPSLNHQGIDKIYDCQGLLPPPEKLTAEVLGIICIVLMATVLKTIVLIPFLEQNNFSPNTRTQKARHCGHCPEEWITYSNSCYYIGKERRTWEESLQACASKNSSSLLCIDNEEEMKFLASILPSSWIGVFRNSSHHPWVTINGLAFKHEIKDSDHAERNCAMLHVRGLISDQCGSSRIIRRGFIMLTRLVLNS

SEQ ID NO: 75747 - protein, 154 aa, Homo sapiens
  Payload ID: 14994
  Gene Symbol:
  Gene Name: RP11-286N22.8
  ENSP ID: ENSP00000440219
MLALSRHSLLSPLLSVTSFRRFYRGDSPTDSQKDMIEIPLPPWQERTDESIETKRARLLYESRKRGMLENCILLSLFAKEHLQHMTEKQLNLYDRLINEPSNDWDIYYWATEAKPAPEIFENEVMALLRDFAKNKNKEQRLRAPDLEYLFEKPR

SEQ ID NO: 75748 - protein, 133 aa, Homo sapiens
  Payload ID: 14994
  Gene Symbol:
  Gene Name: RP11-286N22.8
  ENSP ID: ENSP00000440939
MAVSTVFSTSSLMLALSRHSLLSPLLSVTSFRRFYRGDSPTDSQKDMIEIPLPPWQERTDESIETKRARLLYESRKRGMLENCILLSLFAKEHLQHMTEKQLNLYDRLINEPSNDWDIYYWATGPLGPCPTAS

SEQ ID NO: 75749 - protein, 133 aa, Homo sapiens; identical to SEQ ID NO: 75748
  Payload ID: 14994
  Gene Symbol:
  Gene Name: RP11-286N22.8
  ENSP ID: ENSP00000442581

SEQ ID NO: 75750 - protein, 163 aa, Homo sapiens
  Payload ID: 14994
  Gene Symbol:
  Gene Name: RP11-286N22.8
  ENSP ID: ENSP00000443130
MAVSTVFSTSSLMLALSRHSLLSPLLSVTSFRRFYRGDSPTDSQKDMIEIPLPPWQERTDESIETKRARLLYESRKRGMLENCILLSLFAKEHLQHMTEKQLNLYDRLINEPSNDWDIYYWATGTGEKVLYKKMAHSEVELNRPPGALPHSIMMGKLPLGVVS

SEQ ID NO: 75751 - protein, 191 aa, Homo sapiens
  Payload ID: 14995
  Gene Symbol:
  Gene Name: RP11-287D1.3
  ENSP ID: ENSP00000416453
KDSPLLLQQISAMRLHISQLQHENSILKGAQMKASLASLPPLHVAKLSHEGPGSELPAGALYRKTSQLLETLNQLSTHTHVVDITRTSPAAKSPSAQLMEQVAQLKSLSDTVEKLKDEVLKETVSQRPGATVPTDFATFPSSAFLRAKEEQQDDTVYMGKVTFSCAAGFGQRHRLVLTQEQLHQLHSRLIS

SEQ ID NO: 75752 - protein, 787 aa, Homo sapiens
  Payload ID: 14996
  Gene Symbol:
  Gene Name: RP11-290H9.2
  ENSP ID: ENSP00000456711
  MOD_RES (1)..(1): Any amino acid
XTVLALGALAGVGVGGPNICTTRGVSSCQQCLAVSPMCAWCSDEALPLGSPRCDLKENLLKDNCAPESIEFPVSEARVLEDRPLSDKGSGDSSQVTQVSPQRIALRLRPDDSKNFSIQVRQVEDYPVDIYYLMDLSYSMKDDLWSIQNLGTKLATQMRKLTSNLRIGFGAFVDKPVSPYMYISPPEALENPCYDMKTTCLPMFGYKHVLTLTDQVTRFNEEVKKQSVSRNRDAPEGGFDAIMQATVCDEKIGWRNDASHLLVFTTDAKTHIALDGRLAGIVQPNDGQCHVGSDNHYSASTTMDYPSLGLMTEKLSQKNINLIFAVTENVVNLYQNYSELIPGTTVGVLSMDSSNVLQLIVDAYGKIRSKVELEVRDLPEELSLSFNATCLNNEVIPGLKSCMGLKIGDTVSFSIEAKVRGCPQEKEKSFTIKPVGFKDSLIVQVTFDCDCACQAQAEPNSHRCNNGNGTFECGVCRCGPGWLGSQCECSEEDYRPSQQDECSPREGQPVCSQRGECLCGQCVCHSSDFGKITGKYCECDDFSCVRYKGEMCSGHGQCSCGDCLCDSDWTGYYCNCTTRTDTCMSSNGLLCSGRGKCECGSCVCIQPGSYGDTCEKCPTCPDACTFKKECVECKKFDRGALHDENTCNRYCRDEIESVKELKDTGKDAVNCTYKNEDDCVVRFQYYEDSSGKSILYVVEEPECPKGPDILVVLLSVMGAILLIGLAALLIWKLLITIHDRKEFAKFEEERARAKWDTEILLYYCSFILVHQSLESLRTEFTSKQKDGN

SEQ ID NO: 75753 - protein, 84 aa, Homo sapiens
  Payload ID: 14997
  Gene Symbol:
  Gene Name: RP11-293I14.2
  ENSP ID: ENSP00000454911
FPLDPKRRKEWVRLVRRKNFVPGKHTFLCSKHFEASCFDLTGQTRRLKMDAVPTIFDFCTHIKSMVTYDLFLRGVGCFLLLFLF

SEQ ID NO: 75754 - protein, 313 aa, Homo sapiens; identical to SEQ ID NO: 1183
  Payload ID: 14998
  Gene Symbol:
  Gene Name: RP11-294C11.1
  ENSP ID: ENSP00000479657

SEQ ID NO: 75755 - protein, 117 aa, Homo sapiens
  Payload ID: 14999
  Gene Symbol:
  Gene Name: RP11-294C11.2
  ENSP ID: ENSP00000479937
MKHLWFFLLLVAAPRWVLSQVQLQESGPGLVKPSETLSLTCVVSGGSISSSNWWSWVRQPPGKGLEWIGEIYHSGSPNYNPSLKSRVTISVDKSKNQFSLKLSSVTAADTAVYYCAR

SEQ ID NO: 75756 - protein, 316 aa, Homo sapiens
  Payload ID: 15000
  Gene Symbol:
  Gene Name: RP11-294C11.3
  ENSP ID: ENSP00000485668
MKIANNTVVTEFILLGLTQSQDIQLLVFVLILIFYLIILPGNFLIIFTIRSDPGLTAPLYLFLGNLAFLDASYSFIVAPRMLVDFLSEKKVISYRGCITQLFFLHFLGGGEGLLLVVMAFDRYIAICRPLHCSTVMNPRACYAMMLALWLGGFVHSIIQVVLILRLPFCGPNQLDNFFCDVRQVIKLACTDMFVVELLMVFNSGLMTLLCFLGLLASYAVILCHVRRAASEGKNKAMSTCTTRVIIILLMFGPAIFIYICPFRALPADKMVSLFHTVIFPLMNPMIYTLRNQEVKTSMKRLLSRHVVCQVDFIIRN

SEQ ID NO: 75757 - protein, 211 aa, Homo sapiens
  Payload ID: 15000
  Gene Symbol:
  Gene Name: RP11-294C11.3
  ENSP ID: ENSP00000487127
  MOD_RES (1)..(1): Any amino acid
XLLGLTQSQDIQLLVFVLILIFYLIILPGNFLIIFTIRSDPGLTAPLYLFLGNLAFLDASYSFIVAPRMLVDFLSEKKVIKLACTDMFVVELLMVFNSGLMTLLCFLGLLASYAVILCHVRRAASEGKNKAMSTCTTRVIIILLMFGPAIFIYICPFRALPADKMVSLFHTVIFPLMNPMIYTLRNQEVKTSMKRLLSRHVVCQVDFIIRN

SEQ ID NO: 75758 - protein, 117 aa, Homo sapiens; identical to SEQ ID NO: 39678
  Payload ID: 15001
  Gene Symbol:
  Gene Name: RP11-294C11.4
  ENSP ID: ENSP00000486959

SEQ ID NO: 75759 - protein, 261 aa, Homo sapiens
  Payload ID: 15002
  Gene Symbol:
  Gene Name: RP11-295K3.1
  ENSP ID: ENSP00000415840
MAYPRISVNNVLPVFDNLMQQKLVDQNIFSFYLSRDPDAQPGGELMLGGTDSKYYKGSLSYLNVTRKAYWQVHLDQVEVASGLTLCKEGCEAIVDTGTSLMVGPVDEVRELQKAIGAVPLIQGEYMIPCEKVSTLPAITLKLGGKGYKLSPEDYTLKAQGPGQCPAPLGDPASTTDGAQEARVPLDGAFWIPRPPAGSPKGCFACVSKPPALQAPAAPAPEPSASPPMAPTLFPMESKSSKTDSVRAAGAPPACKHLAEKK

SEQ ID NO: 75760 - protein, 34 aa, Homo sapiens
  Payload ID: 15003
  Gene Symbol:
  Gene Name: RP11-295P9.13
  ENSP ID: ENSP00000469146
  MOD_RES (1)..(1): Any amino acid
XTQRKYIQGLKRLMTICQKHFPTDPSKCVEYNAL

SEQ ID NO: 75761 - protein, 18 aa, Homo sapiens
  Payload ID: 15003
  Gene Symbol:
  Gene Name: RP11-295P9.13
  ENSP ID: ENSP00000469443
CQKHFPTDPSKCVEYNAL

SEQ ID NO: 75762 - protein, 203 aa, Homo sapiens
  Payload ID: 15003
  Gene Symbol:
  Gene Name: RP11-295P9.13
  ENSP ID: ENSP00000473200
  MOD_RES (1)..(1): Any amino acid
XNDLKAALDKIDQQYLNEIVGGQEPGEEDTQNDLKVHEENTTIEELEALGESLGKGDDHKDMDIITKFLKFLLGVWAKELNAREDYVKRSVQGKLNSATQKQTESYLRPLFRKLRKRNLPADIKESITDIIKFMLQREYVKANDAYLQMAIGNAPWPIGVTMVGIHARTGREKIFSKHVAHVLNDETQRKYIQDLNVYDTLSS

SEQ ID NO: 75763 - protein, 109 aa, Homo sapiens
  Payload ID: 15004
  Gene Symbol:
  Gene Name: RP11-296A16.1
  ENSP ID: ENSP00000415219
  MOD_RES (1)..(1): Any amino acid
XMPSGLCAHLFGLSDCPVLSGSGAVYRVCAGTATFHLLQAVLLVHLHSPTSPRAQLHNSMALHWHLWRLCIHPTAVGAYYSFCPFLEQELSNPALASYKLLSSAAISCI

SEQ ID NO: 75764 - protein, 193 aa, Homo sapiens
  Payload ID: 15005
  Gene Symbol:
  Gene Name: RP11-298I3.5
  ENSP ID: ENSP00000450856
  MOD_RES (1)..(1): Any amino acid
XLGEKASRLLEKFGRRKDADSETVKAAKVWKLAEVLVGEQQQCQDAKSQQKEQMLLLEKKSAAYSQVLLRCLTLLQRLLQEHRLKTQSELDRINAQYLEVKCGAMILKLRMEELKILSDTYTVEKVEVHRLIRDRLEGAIHLQEQDMENSRQVLNSYEVLGEEFDRLVKEYTVLKQATENKRWALQEFSKVYR

SEQ ID NO: 75765 - protein, 3053 aa, Homo sapiens
  Payload ID: 15006
  Gene Symbol:
  Gene Name: RP11-2C24.9
  ENSP ID: ENSP00000369719
VSDGMTGSNPVSPASSSSPASSGAGGISPQHIAQDSSLDGPPGPPDGATVPLEGFSLSQAADLANKGPKWEKSHAEIAEQAKHEAEIETRIAELRKEGFWSLKRLPKVPEPPRPKGHWDYLCEEMQWLSADFAQERRWKRGVARKVVRMVIRHHEEQRQKEERARREEQAKLRRIASTMAKDVRQFWSNVEKVVQFKQQSRLEEKRKKALDLHLDFIVGQTEKYSDLLSQSLNQPLTSSKAGSSPCLGSSSAASSPPPPASRLDDEDGDFQPQEDEEEDDEETIEVEEQQEGNDAEAQRREIELLRREGELPLEELLRSLPPQLLEGPSSPSQTPSSHDSDTRDGPEEGAEEEPPQVLEIKPPPSAVTQRNKQPWHPDEDDEEFTANEEEAEDEEDTIAAEEQLEGEVDHAMELSELAREGELSMEELLQQYAGAYAPGSGSSEDEDEDEVDANSSDCEPEGPVEAEEPPQEDSSSQSDSVEDRSEDEEDEHSEEEETSGSSASEESESEESEDAQSQSQADEEEEDDDFGVEYLLARDEEQSEADAGSGPPTPGPTTLGPKKEITDIAAAAESLQPKGYTLATTQVKTPIPLLLRGQLREYQHIGLDWLVTMYEKKLNGILADEMGLGKTIQTISLLAHLACEKGNWGPHLIIVPTSVMLNWEMELKRWCPSFKILTYYGAQKERKLKRQGWTKPNAFHVCITSYKLVLQDHQAFRRKNWRYLILDEAQNIKNFKSQRWQSLLNFNSQRRLLLTGTPLQNSLMELWSLMHFLMPHVFQSHREFKEWFSNPLTGMIEGSQEYNEGLVKRLHKVLRPFLLRRVKVDVEKQMPKKYEHVIRCRLSKRQRCLYDDFMAQTTTKETLATGHFMSVINILMQLRKVCNHPNLFDPRPVTSPFITPGICFSTASLVLRATDVHPLQRIDMGRFDLIGLEGRVSRYEADTFLPRHRLSRRVLLEVATAPDPPPRPKPVKMKVNRMLQPVPKQEGRTVVVVNNPRAPLGPVPVRPPPGPELSAQPTPGPVPQVLPASLMVSASPAGPPLIPASRPPGPVLLPPLQPNSGSLPQAGEVVSIGQLASLAQRPVANAGGSKPLTFQIQGNKLTLTGAQVRQLAVGQPRPLQMPPTMVNNTGVVKIVVRQAPRDGLTPVPPLAPAPRPPSSGLPAVLNPRPTLTPGRLPTPTLGTARAPMPTPTLVRPLLKLVHSPSPEVSASAPGAAPLTISSPLHVPSSLPGPASSPMPIPNSSPLASPVSSTVSVPLSSSLPISVPTTLPAPASAPLTIPISAPLTVSASGPALLTSVTPPLAPVVPAAPGPPSLAPSGASPSASALTLGLATAPSLSSSQTPGHPLLLAPTSSHVPGLNSTVAPACSPVLVPASALASPFPSAPNPAPAQASLLAPASSASQALATPLAPMAAPQTAILAPSPAPPLAPLPVLAPSPGAAPVLASSQTPVPVMAPSSTPGTSLASASPVPAPTPVLAPSSTQTMLPAPVPSPLPSPASTQTLALAPALAPTLGGSSPSQTLSLGTGNPQGPFPTQTLSLTPASSLVPTPAQTLSLAPGPPLGPTQTLSLAPAPPLAPASPVGPAPAHTLTLAPASSSASLLAPASVQTLTLSPAPVPTLGPAAAQTLALAPASTQSPASQASSLVVSASGAAPLPVTMVSRLPVSKDEPDTLTLRSGPPSPPSTATSFGGPRPRRQPPPPPRSPFYLDSLEEKRKRQRSERLERIFQLSEAHGALAPVYGTEVLDFCTLPQPVASPIGPRSPGPSHPTFWTYTEAAHRAVLFPQQRLDQLSEIIERFIFVMPPVEAPPPSLHACHPPPWLAPRQAAFQEQLASELWPRARPLHRIVCNMRTQFPDLRLIQYDCGKLQTLAVLLRQLKAEGHRVLIFTQMTRMLDVLEQFLTYHGHLYLRLDGSTRVEQRQALMERFNADKRIFCFILSTRSGGVGVNLTGADTVVFYDSDWNPTMDAQAQDRCHRIGQTRDVHIYRLISERTVEENILKKANQKRMLGDMAIEGGNFTTAYFKQQTIRELFDMPLEEPSSSSVPSAPEEEEETVASKQTHILEQALCRAEDEEDIRAATQAKAEQVAELAEFNENDGFPAGEGEEAGRPGAEDEEMSRAEQEIAALVEQLTPIERYAMKFLEASLEEVSREELKQAEEQVEAARKDLDQAKEEVFRLPQEEEEGPGAGDESSCGTGGGTHRRSKKAKAPERPGTRVSERLRGARAETQGANHTPVISAHQTRSTTTPPRCSPARERVPRPAPRPRPTPASAPAAIPALVPVPVSAPVPISAPNPITILPVHILPSPPPPSQIPPCSSPACTPPPACTPPPAHTPPPAQTCLVTPSSPLLLGPPSVPISASVTNLPLGLRPEAELCAQALASPESLELASVASSETSSLSLVPPKDLLPVAVEILPVSEKNLSLTPSAPSLTLEAGSIPNGQEQEAPDSAEGTTLTVLPEGEELPLCVSESNGLELPPSAASDEPLQEPLEADRTSEELTEAKTPTSSPEKPQELVTAEVAAPSTSSSATSSPEGPSPARPPRRRTSADVEIRGQGTGRPGQPPGPKVLRKLPGRLVTVVEEKELVRRRRQQRGAASTLVPGVSETSASPGSPSVRSMSGPESSPPIGGPCEAAPSSSLPTPPQQPFIARRHIELGVTGGGSPENGDGALLAITPPAVKRRRGRPPKKNRSPADAGRGVDEAPSSTLKGKTNGADPVPGPETLIVADPVLEPQLIPGPQPLGPQPVHRPNPLLSPVEKRRRGRPPKARDLPIPGTISSAGDGNSESRTQPPPHPSPLTPLPPLLVCPTATVANTVTTVTISTSPPKRKRGRPPKNPPSPRPSQLPVLDRDSTSVLESCGLGRRRQPQGQGESEGSSSDEDGSRPLTRLARLRLEAEGMRGRKSGGSMVVAVIQDDLDLADSGPGGLELTPPVVSLTPKLRSTRLRPGSLVPPLETEKLPRKRAGAPVGGSPGLAKRGRLQPPSPLGPEGSVEESEAEASGEEEEGDGTPRRRPGPRRLVGTTNQGDQRILRSSAPPSLAGPAVSHRGRKAKT

SEQ ID NO: 75766 - protein, 210 aa, Homo sapiens
  Payload ID: 15007
  Gene Symbol:
  Gene Name: RP11-302B13.5
  ENSP ID: ENSP00000438507
MGNIFGNLLKSLIGKKEMRILMVGLDAAGKTTILYKLKLGEIVTTIPTIGFNVETVEYKNISFTVWDVGGQDKIRPLWRHYFQNTQGLIFVVDSNDRERVNEAREELMRMLAEDELRDAVLLVFANKQDGHDLGSLQPPPPGFKQFSCLSLPSVHFYKPSSEPLGSPRSSKREPRSLSGTSLTDMSKLSVTGGNPEVLTTGFVEGSRVRS

SEQ ID NO: 75767 - protein, 52 aa, Homo sapiens
  Payload ID: 15008
  Gene Symbol:
  Gene Name: RP11-302M6.4
  ENSP ID: ENSP00000359482
MIPVTEFRQFSEQQPAFRVLKPWWDVFTDYLSVAMLMIGVFGCTLQEVHGCL

SEQ ID NO: 75768 - protein, 1105 aa, Homo sapiens
  Payload ID: 15009
  Gene Symbol:
  Gene Name: RP11-307N16.6
  ENSP ID: ENSP00000371576
MTQAAVRPWAPCLENMTTAPNGLGPGPAAPCAGSDLKDAKMVTSLACGNGVCGCSPGGDTDTQEAKLSPAKLVRLFSTSRKRTGAHPERPHSMVLVGNSSTWNTLASFRKMGSFKKLKSSVLKGIQSREGSNACSKGEASEHGLGKSIPNGAVPGAQASRGSPLAPGPACGALRPAEWGTLDGSDLEDTDDAFQRSTHRSRSLRRAYGLGRICLLDAPQNHATPTIATGQVPAVCEILVRDPENNSMGYRRSKSTDNLAFLKKSSFKRKSTSNLADLRTAHDARVPQRTLSSSSTDSQKLGSGRTKRWRSPIRAKDFDRVFKLVSNVTEAAWRRESPRSGAPSPGEASLRLQAHSRLHDDYSRRVSRSTEQDSRRGGAVMHGTTATCTVAPGFGSATSKGPHLDADTAVFPLETKSSWAVESDSSCTCSSLPSPIVQDVLSKDSCDPNAGSQLTFDPEQPPTPLRPTTPKPQSPQSPQSPGAGSASCHSNHSALSANSEESEGRAEEPAQREPGPVSLQDPLEATHGDEGSKDLLVNIGVAAGPEEKEKEEPASRPPMPAHQVPPYKAVSARFRPFTFSQSTPIGLDRVGRRRQMRASNVSSDGGTEPSALVDDNGSEEDFSYEDLCQASPRYLQPGGEQLAINELISDGNVVCAEALWDHVTMDDQELGFKAGDVIQVLEASNKDWWWGRSEDKEAWFPASFVRLRVNQEELSENSSSTPSEEQDEEASQSRHRHCENKQQMRTNVIREIMDTERVYIKHLRDICEGYIRQCRKHTGMFTVAQLATIFGNIEDIYKFQRKFLKDLEKQYNKEEPHLSEIGSCFLQNQEGFAIYSEYCNNHPGACLELANLMKQGKYRHFFEACRLLQQMIDIAIDGFLLTPVQKICKYPLQLAELLKYTTQEHGDYSNIKAAYEAMKNVACLINERKRKLESIDKIARWQVSIVGWEGLDILDRSSELIHSGELTKITKQGKSQQRTFFLFDHQLVSCKKDLLRRDMLYYKGRLDMDEMELVDLGDGRDKDCNLSVKNAFKLVSRTTDEVYLFCAKKQEDKARWLQACADERRRVQEDKEMGMEISENQKKLAMLNAQKAGHGKSKVQSLSSEP

SEQ ID NO: 75769 - protein, 243 aa, Homo sapiens
  Payload ID: 15010
  Gene Symbol:
  Gene Name: RP1-130H16.18
  ENSP ID: ENSP00000331267
ELDMSPGDPKWLDVIERDLHRQFPFHEMFVSRGGHGQQDLFRVLKAYTLYRPEEGYCQAQAPIAAVLLMHMPAEQAFWCLVQICEKYLPGYYSEKLEAIQLDGEILFSLLQKVSPVAHKHLSRQKIDPLLYMTEWFMCAFSRTLPWSSVLRVWDMFFCEGVKIIFRVGLVLLKHALGSPEKVKACQGQYETIERLRSLSPKIMQEAFLVQEVVELPVTERQIEREHLIQLRRWQETRGASSSA

SEQ ID NO: 75770 - protein, 233 aa, Homo sapiens
  Payload ID: 15010
  Gene Symbol:
  Gene Name: RP1-130H16.18
  ENSP ID: ENSP00000400319
GKVKLQQNPGKFDELDMSPGDPKWLDVIERDLHRQFPFHEMFVSRGGHGQQDLFRVLKAYTLYRPEEGYCQAQAPIAAVLLMHMPAEQAFWCLVQICEKYLPGYYSEKLEAIQLDGEILFSLLQKVSPVAHKHLSRQKIDPLLYMTEWFMCAFSRTLPWSSVLRVWDMFFCEGVKIIFRVGLVLLKHALGSPEKVKACQGQYETIERLRSLSPKIMQEAFLVQESCPHLSSCK

SEQ ID NO: 75771 - protein, 480 aa, Homo sapiens
  Payload ID: 15010
  Gene Symbol:
  Gene Name: RP1-130H16.18
  ENSP ID: ENSP00000401535
GKVKLQQNPGKFDELDMSPGDPKWLDVIERDLHRQFPFHEMFVSRGGHGQQDLFRVLKAYTLYRPEEGYCQAQAPIAAVLLMHMPAEQAFWCLVQICEKYLPGYYSEKLEAIQLDGEILFSLLQKVSPVAHKHLSRQKIDPLLYMTEWFMCAFSRTLPWSSVLRVWDMFFCEGVKIIFRVGLVLLKHALGSPEKVKACQGQYETIERLRSLSPKIMQEAFLVQEVVELPVTERQIEREHLIQLRRWQETRELPPSEFLQVAEATWLVLNVSSHSGAAVQAAGVTKIARSVIAPLAEHHVSVLMLSTYQTDFILVREQDLSVVIHTLAQEFDIYREVGGEPVPVTRDDSSNGFPRTQHGPSPTVHPIQSPQNRFCVLTLDPETLPAIATTLIDVLFYSHRFPSDLLLTSSSGELWRMVRIGGQPLGFDECGIVAQIAGPLAAADISAYYISTFNFDHALVPEDGIGSVIEVLQRRQEGLAS

SEQ ID NO: 75772 - protein, 233 aa, Homo sapiens; identical to SEQ ID NO: 75770
  Payload ID: 15010
  Gene Symbol:
  Gene Name: RP1-130H16.18
  ENSP ID: ENSP00000406516

SEQ ID NO: 75773 - protein, 232 aa, Homo sapiens
  Payload ID: 15010
  Gene Symbol:
  Gene Name: RP1-130H16.18
  ENSP ID: ENSP00000415854
VKLQQNPGKFDELDMSPGDPKWLDVIERDLHRQFPFHEMFVSRGGHGQQDLFRVLKAYTLYRPEEGYCQAQAPIAAVLLMHMPAEQAFWCLVQICEKYLPGYYSEKLEAIQLDGEILFSLLQKVSPVAHKHLSRQKIDPLLYMTEWFMCAFSRTLPWSSVLRVWDMFFCEGVKIIFRVGLVLLKHALGSPEKVKACQGQYETIERLRSLSPKIMQEAFLVQEVQVLQPDGDP

SEQ ID NO: 75774 - protein, 208 aa, Homo sapiens
  Payload ID: 15011
  Gene Symbol:
  Gene Name: RP11-310N16.1
  ENSP ID: ENSP00000473498
MKQRFSALQLLKLLLLLQPPLPRALREALCPEPCNCVPDGALRCPGPTAGLTRLSLAYLPVKVIPSQAFRGLNEVIKILIQNTKNLRYIEPGAFINLPRLKYLSICNTGIRKFPDVTKVFSSESNFILEICDNLHITTIPGNAFQGMNNESVTLKLYGNGFEEVQSHAFNGTTLTSLELKENVHLEKMHNGAFRGATGPKTLPCRAMA

SEQ ID NO: 75775 - protein, 116 aa, Homo sapiens
  Payload ID: 15012
  Gene Symbol:
  Gene Name: RP11-314N13.10
  ENSP ID: ENSP00000479180
MGVQVETISPGDGRTFPKRGQTCVVHYTGCGQFWPSCSRISSTFLFQIMETWRDPSIEGNDFHWKEEKGVLRISHVIPVPISRGPKSGPSHSGPGQSLTQDASPASPGNSHFPTTR

SEQ ID NO: 75776 - protein, 92 aa, Homo sapiens
  Payload ID: 15013
  Gene Symbol:
  Gene Name: RP11-315D16.2
  ENSP ID: ENSP00000456336
MEATRRRQHLGATGGPGAQLGASFLQARRKWRAGFLHFSDHYAHANKTRRPKERNSSSHVDGGQGEERLRHGVRPAVKTHESGGEAHPQGSG

SEQ ID NO: 75777 - protein, 100 aa, Homo sapiens
  Payload ID: 15014
  Gene Symbol:
  Gene Name: RP11-318A15.7
  ENSP ID: ENSP00000466829
IGAGVSLPGILAAKCGAEVILSDSSELPHCLEVCRQSCQMNNLPHLQVVGLTWGHISWDLLALPPQDIILASDVFFEPEGLSVASPRGELTALGCCLRQS

SEQ ID NO: 75778 - protein, 97 aa, Homo sapiens
  Payload ID: 15015
  Gene Symbol:
  Gene Name: RP11-321N4.5
  ENSP ID: ENSP00000426494
  MOD_RES (1)..(1): Any amino acid
XYYDYYGYDYHNYRGGYEDPYYGYEDFQVGARGRGGRGARGAAPSRGRGAAPPRGRAGYSQRGGPGSARGVRGARGGAQQQRGRGGKGVEAGPDLLQ

SEQ ID NO: 75779 - protein, 123 aa, Homo sapiens
  Payload ID: 15016
  Gene Symbol:
  Gene Name: RP11-322E11.6
  ENSP ID: ENSP00000467041
MAAQIPIVATTSTPGIVRNSKKRPASPSHNGSSGGGYGASKKKKASASSFAQVPGLGEPGGEGTDYLKITWRRSLIQAQAPRKGHARTQGEGQLSVSQKEPSLETKSARTFILDFPAFRDVKK

SEQ ID NO: 75780 - protein, 95 aa, Homo sapiens
  Payload ID: 15017
  Gene Symbol:
  Gene Name: RP11-322N21.2
  ENSP ID: ENSP00000480059
MGPSRLVRGPRPQGMRSPYRRPGMGWPRPRFPRMFKCSRRRYQQGLRGRTASSAAINPATRAMGINNTHTDTTIVWIFPPQVLRHLRQPGIFLIL

SEQ ID NO: 75781 - protein, 1186 aa, Homo sapiens
  Payload ID: 15018
  Gene Symbol:
  Gene Name: RP11-330H6.5
  ENSP ID: ENSP00000417517
  MOD_RES (1)..(1): Any amino acid
XCAAPAPLTSAERELQQIRINEVKTEISVESKHQTLQGLAFPLQPEAQRALQQLKQKMVNYIQMKLDLERETIELVHTEPTDVAQLPSRVPRDAARYHFFLYKHTHEGDPLESVVFIYSMPGYKCSIKERMLYSSCKSRLLDSVEQDFHLEIAKKGFCRSALHPLSLLVQAIMLAMTLALGTLPAFLPCELQPHGLVNCNWLFLKSVPHFSMAAPRGNVTSLSLSSNRIHHLHDSDFAHLPSLRHLNLKWNCPPVGLSPMHFPCHMTIEPSTFLAVPTLEELNLSYNNIMTVPALPKSLISLSLSHTNILMLDSASLAGLHALRFLFMDGNCYYKNPCRQALEVAPGALLGLGNLTHLSLKYNNLTVVPRNLPSSLEYLLLSYNRIVKLAPEDLANLTALRVLDVGGNCRRCDHAPNPCMECPRHFPQLHPDTFSHLSRLEGLVLKDSSLSWLNASWFRGLGNLRVLDLSENFLYKCITKTKAFQGLTQLRKLNLSFNYQKRVSFAHLSLAPSFGSLVALKELDMHGIFFRSLDETTLRPLARLPMLQTLRLQMNFINQAQLGIFRAFPGLRYVDLSDNRISGASELTATMGEADGGEKVWLQPGDLAPAPVDTPSSEDFRPNCSTLNFTLDLSRNNLVTVQPEMFAQLSHLQCLRLSHNCISQAVNGSQFLPLTGLQVLDLSHNKLDLYHEHSFTELPRLEALDLSYNSQPFGMQGVGHNFSFVAHLRTLRHLSLAHNNIHSQVSQQLCSTSLRALDFSGNALGHMWAEGDLYLHFFQGLSGLIWLDLSQNRLHTLLPQTLRNLPKSLQVLRLRDNYLAFFKWWSLHFLPKLEVLDLAGNQLKALTNGSLPAGTRLRRLDVSCNSISFVAPGFFSKAKELRELNLSANALKTVDHSWFGPLASALQILDVSANPLHCACGAAFMDFLLEVQAAVPGLPSRVKCGSPGQLQGLSIFAQDLRLCLDEALSWDCFALSLLAVALGLGVPMLHHLCGWDLWYCFHLCLAWLPWRGRQSGRDEDALPYDAFVVFDKTQSAVADWVYNELRGQLEECRGRWALRLCLEERDWLPGKTLFENLWASVYGSRKTLFVLAHTDRVSGLLRASFLLAQQRLLEDRKDVVVLVILSPDGRRSRYVRLRQRLCRQSVLLWPHQPSGQRSFWAQLGMALTRDNHHFYNRNFCQGPTAE

SEQ ID NO: 75782 - protein, 55 aa, Homo sapiens
  Payload ID: 15018
  Gene Symbol:
  Gene Name: RP11-330H6.5
  ENSP ID: ENSP00000419980
  MOD_RES (1)..(1): Any amino acid
XSMPGYKCSIKERMLYSSCKSRLLDSVEQDFHLEIAKKPLLPLWEGTSSVKHPSL

SEQ ID NO: 75783 - protein, 103 aa, Homo sapiens
  Payload ID: 15019
  Gene Symbol:
  Gene Name: RP11-33O4.2
  ENSP ID: ENSP00000320919
MSRSPLNPSQLRSVGSQDALAPLPPPAPQNPSTHSWDPLCGSLPWGLSCLLALQHVLVMASLLCVSHLLLLCSLSPGGLSYSPSQLLASSFFSCGCLLSRLHP

SEQ ID NO: 75784 - protein, 428 aa, Homo sapiens
  Payload ID: 15020
  Gene Symbol:
  Gene Name: RP11-343C2.11
  ENSP ID: ENSP00000461295
LYRYPFERLKMSADDGIRNLYLDFGGPEGELKAIDLVTKATEEDKAKNYEEALRLYQHAVEYFLHAIKYEAHSDKAKESIRAKCVQYLDRAEKLKDYLRSKEKHGKKPVKENQSEGKGSDSDSEGDNPEKKKLQEQLMGAVVMEKPNIRWNDVAGLEGAKEALKEAVILPIKFPHLFTGKRTPWRGILLFGPPGTGKSYLAKAVATEANNSTFFSVSSSDLMSKWLGESEKLVKNLFELARQHKPSIIFIDEVDSLCGSRNENESEAARRIKTEFLVQMQGVGNNNDGTLVLGATNIPWVLDSAIRRRFEKRIYIPLPEEAARAQMFRLHLGSTPHNLTDANIHELARKTEGYSGADISIIVRDSLMQPVRKVQSATHFKKVCGPSRTNPSMMIDDLLTPCSPGDPGAMEMTWMDVPGDKLLEPVVCM

SEQ ID NO: 75785 - protein, 164 aa, Homo sapiens
  Payload ID: 15021
  Gene Symbol:
  Gene Name: RP11-343C2.12
  ENSP ID: ENSP00000457718
SFSRVGADFRGQLAPVFQRVAISTFQKAIQETVEKFQEEMNSYMLISAPAILGTSNMPAAVPATQPGTLQPPMVLLDFPPLACFLNNILVAFNDLRLCCPVALAQDVTGALEDALAKGWTPMENRWCGRRAGGQPASSSTRWTTCRAACLLTKWTAGRSQTSIG

SEQ ID NO: 75786 - protein, 172 aa, Homo sapiens
  Payload ID: 15022
  Gene Symbol:
  Gene Name: RP11-343C2.7
  ENSP ID: ENSP00000462747
  MOD_RES (1)..(1): Any amino acid
XGLVVLNLVTSARSQKTEPLSGSGDQPLFRGADRYDFAIMIPPGGTECFWQFAHQTGYFYFSYEVQRTVGMSHDRHVAATAHNPQGFLIDTSQGVRGQINFSTQETGFYQLCLSNQHNHFGSVQVYLNFGVFYEGPETDHKQKERKQLNDTLDAIEELCEGSRGDQLQPPDE

SEQ ID NO: 75787 - protein, 108 aa, Homo sapiens
  Payload ID: 15022
  Gene Symbol:
  Gene Name: RP11-343C2.7
  ENSP ID: ENSP00000464417
GLVVLNLVTSARSQKTEPLSGSGDQPLFRGADRYDFAIMIPPGGTECFWQFAHQTGYFYFSYEVQRTVGMSHDRHVAATAHNPQGFLIDTSQGVRGQINFSTQETGTL

SEQ ID NO: 75788 - protein, 156 aa, Homo sapiens
  Payload ID: 15023
  Gene Symbol:
  Gene Name: RP11-343C2.9
  ENSP ID: ENSP00000454500
MNFVKEAEEISSNRRMNSLTLNRHTEILEILEIPQLMDTCVRNSYYEEALELAAYVRRLERKYSSIPVIQGIVNEVRQSMQLMLSQLIQQLRTNIQLPACLRVIGYLRRMDVFTEAELRVKFLQARDAWLRSILTAIPNDDPYFHITKTIEASRVH

SEQ ID NO: 75789 - protein, 132 aa, Homo sapiens
  Payload ID: 15024
  Gene Symbol:
  Gene Name: RP11-345J4.3
  ENSP ID: ENSP00000446698
  MOD_RES (1)..(1): Any amino acid
XLLSHRRTGSSLPASAEPWPRNCLKARPLHLPTSGPASSPVAKIAGLYNDLEPPRKTMRRGVLMTLLQQSAMTLPLWIGKPGDKPPPLCGAIPASGDYVARPGDKVAARVKAVDGDEQWILAEVVSYSHATN

SEQ ID NO: 75790 - protein, 143 aa, Homo sapiens
  Payload ID: 15024
  Gene Symbol:
  Gene Name: RP11-345J4.3
  ENSP ID: ENSP00000447361
RPRRMGSRARRAQSPWGGQQECSCEPRRALPPAQPSIAGPLLSHRRTGSSLPASAEPWPRNCLKARPLHLPTSGPASSPVAKIAGLYNDLEPPRKTMRRGVLMTLLQQSAMTLPLWIGKPGDKRLRGQTWRQGGCPGEGRGWG

SEQ ID NO: 75791 - protein, 439 aa, Homo sapiens
  Payload ID: 15024
  Gene Symbol:
  Gene Name: RP11-345J4.3
  ENSP ID: ENSP00000449334
MRAAPRQFSTQRQGLAVSPRLECNGVIIAHFSLQLLGSSDPPTSASPVAGTTGICHHARLLRAAILNWEPGKTSLWRWQVIKTEDVEKNLPVKGKRQVLLCSGMARSTIIHPHLRDVDRAATVSGRFLAPQQQDPKSSGGCAALLGADLPWSAPPLERADAQGAHSPLGPRDRLRLRLGVSKGTCAAPWGGGGPTVSGQCRAADGGRGATGPGGAPRAGVPGPLQPRRGWSQGGSGRGSDPKSRPQAAARSSSLPEGRPRRMGSRARRAQSPWGGQQECSCEPRRALPPAQPSIAGPLLSHRRTGSSLPASAEPWPRNCLKARPLHLPTSGPASSPVAKIAGLYNDLEPPRKTMRRGVLMTLLQQSAMTLPLWIGKPGDKPPPLCGAIPASGDYVARPGDKPQEDYSILFEDTSYADGYSPHLSVAQRYLVASKEPKKK

SEQ ID NO: 75792 - protein, 89 aa, Homo sapiens
  Payload ID: 15025
  Gene Symbol:
  Gene Name: RP11-345J4.5
  ENSP ID: ENSP00000457350
  MOD_RES (1)..(1): Any amino acid
XFPAEVAPVRQQGSVAGARAGVVSLLGCRSSWTAAMELSAEYLREKLQRDLEAEHVEVEDTTLNRCSCSFRVLVVSAKFEGKPLLQRHR

SEQ ID NO: 75793 - protein, 124 aa, Homo sapiens
  Payload ID: 15025
  Gene Symbol:
  Gene Name: RP11-345J4.5
  ENSP ID: ENSP00000457792
MASAKSLDRWKARLLEGGSTALTYALVRAEVSFPAEVAPVRQQGSVAGARAGVVSLLGCRSSWTAAMELSAEYLREKLQRDLEAEHVEVEDTTLNRCSCSFRVLVVSAKFEGKPLLQRHRFCTE

SEQ ID NO: 75794 - protein, 249 aa, Homo sapiens
  Payload ID: 15025
  Gene Symbol:
  Gene Name: RP11-345J4.5
  ENSP ID: ENSP00000458075
  MOD_RES (1)..(1): Any amino acid
XEVAPVRQQGSVAGARAGVVSLLGCRSSWTAAMELSAEYLREKLQRDLEAEHVEVEDTTLNRCSCSFRVLVVSAKFEGKPLLQRHSLDPSMTIHCDMVITYGLDQLENCQTCGTDYIISVLNLLTLIVEQINTKLPSSFVEKLFIPSSKLLFLRYHKEKEVVAVAHAVYQAMLSLKNIPVLETAYKLILGEMTCALNNLLHSLQLPEACSEIKHEAFKNHVFNVDNAKFVVKFDLSALTTIGNAKNSSL

SEQ ID NO: 75795 - protein, 143 aa, Homo sapiens
  Payload ID: 15026
  Gene Symbol:
  Gene Name: RP11-347C12.3
  ENSP ID: ENSP00000447453
RPRRMGSRARRAQSPWGGEQECSCEPRRALPPAQPSIAGPLLSHRRTGSSLPASAEPWPRNCLKARPLHLPTSGPASSPVAKIAGLYNDLEPPRKTMRRGVLMTLLQQSAMTLPLWIGKPGDKRLRGQTWRQGGCPGEGRGWG

SEQ ID NO: 75796 - protein, 439 aa, Homo sapiens
  Payload ID: 15026
  Gene Symbol:
  Gene Name: RP11-347C12.3
  ENSP ID: ENSP00000449223
MRAAPRQFSTQRQGLAVSPRLECNGVIIAHFSLQLLGSSDPPTSASPVAGTTGICHHARLLRAAILNWEPGKTSLWRWQVIKTEDVEKNLPVKGKRQVLLCSGMARSTIIHPHLRDVDRAATVSGRFLAPQQQDPKSSGGCAALLGADLPWSAPPLERADAQGAHSPLGPRDRLRLRLGVSKGTCAAPWGGGGPTVSGQCRAADGGRGATGPGGAPRAGVPGPLQPRRGWSQGGSGRGSDPKSRPQAAARSSSLPEGRPRRMGSRARRAQSPWGGEQECSCEPRRALPPAQPSIAGPLLSHRRTGSSLPASAEPWPRNCLKARPLHLPTSGPASSPVAKIAGLYNDLEPPRKTMRRGVLMTLLQQSAMTLPLWIGKPGDKPPPLCGAIPASGDYVARPGDKPQEDYSILFEDTSYADGYSPHLSVAQRYLVASKEPKKK

SEQ ID NO: 75797 - protein, 154 aa, Homo sapiens
  Payload ID: 15026
  Gene Symbol:
  Gene Name: RP11-347C12.3
  ENSP ID: ENSP00000454904
  MOD_RES (1)..(1): Any amino acid
XLLSHRRTGSSLPASAEPWPRNCLKARPLHLPTSGPASSPVAKIAGLYNDLEPPRKTMRRGVLMTLLQQSAMTLPLWIGKPGDKPPPLCGAIPASGDYVARPGDKVAARVKAVDGDEQWILAEVVSYSHATNKHLLCRRLLPSSQCGPEVPGSF

SEQ ID NO: 75798 - protein, 33 aa, Homo sapiens
  Payload ID: 15027
  Gene Symbol:
  Gene Name: RP11-350O14.18
  ENSP ID: ENSP00000480768
  MOD_RES (1)..(1): Any amino acid
XLGLTYLSLLLIPAAGASSCPRTPLPAMAPLPQ

SEQ ID NO: 75799 - protein, 90 aa, Homo sapiens
  Payload ID: 15028
  Gene Symbol:
  Gene Name: RP11-371E8.4
  ENSP ID: ENSP00000451352
MMNFRQRMGWIGVGLYLLASAAAFYYVFEISETYNRLALEHIQQHPEEPLEGTTWTHSLKAQLLSLPFWVWTVIFLKSESFLATSSFHYI

SEQ ID NO: 75800 - protein, 166 aa, Homo sapiens
  Payload ID: 15028
  Gene Symbol:
  Gene Name: RP11-371E8.4
  ENSP ID: ENSP00000451369
MMNFRQRMGWIGVGLYLLASAAAFYYVFEISETYNRLALEHIQQHPEEPLEGTTWTHSLKAQLLSLPFWGSVKRQALYACSTCTPEGEEPAGICLACSYECHGSHKLFELYTKRNFRCDCGNSKFKNLECKLLPDKAKVNSGNKYNDNFFGLYCICKRPYPDPEDE

SEQ ID NO: 75801 - protein, 90 aa, Homo sapiens; identical to SEQ ID NO: 75799
  Payload ID: 15028
  Gene Symbol:
  Gene Name: RP11-371E8.4
  ENSP ID: ENSP00000486673

SEQ ID NO: 75802 - protein, 166 aa, Homo sapiens; identical to SEQ ID NO: 75800
  Payload ID: 15028
  Gene Symbol:
  Gene Name: RP11-371E8.4
  ENSP ID: ENSP00000486968

SEQ ID NO: 75803 - protein, 953 aa, Homo sapiens
  Payload ID: 15029
  Gene Symbol:
  Gene Name: RP11-385D13.1
  ENSP ID: ENSP00000402644
MAELDLMAPGPLPRATAQPPAPLSPDSGSPSPDSGSASPVEEEDVGSSEKLGRETEEQDSDSAEQGDPAGEGKEVLCDFCLDDTRRVKAVKSCLTCMVNYCEEHLQPHQVNIKLQSHLLTEPVKDHNWRYCPAHHSPLSAFCCPDQQCICQDCCQEHSGHTIVSLDAARRDKEAELQCTQLDLERKLKLNENAISRLQANQKSVLVSVSEVKAVAEMQFGELLAAVRKAQANVMLFLEEKEQAALSQANGIKAHLEYRSAEMEKSKQELERMAAISNTVQFLEEYCKFKNTEDITFPSVYVGLKDKLSGIRKVITESTVHLIQLLENYKKKLQEFSKEEEYDIRTQVSAVVQRKYWTSKPEPSTREQFLQYAYDITFDPDTAHKYLRLQEENRKVTNTTPWEHPYPDLPSRFLHWRQVLSQQSLYLHRVLLRFRRPSLGTGFCLVSLSDLLPGFPPSLQPLPPFQGPPLQPQMKDGRKGLNQDITDVCFSPEKDHSSKSATSQVYWTAKTQHTSLPLSKAPENEHFLGAASNPEEPWRNSLRCISEMNRLFSGKADITKPGYDPCNLLVDLDDIRDLSSGFSKYRDFIRYLPIHLSKYILRMLDRHTLNKCASVSQHWAAMAQQVKMDLSAHGFIQNQITFLQGSYTRGIDPNYANKVSIPVPKMVDDGKSMRVKHPKWKLRTKNEYNLWTAYQNEETQQVLMEERNVFCGTYNVRILSDTWDQNRVIHYSGGDLIAVSSNRKIHLLDIIQVKAIPVEFRGHAGSVRALFLCEEENFLLSGSYDLSIRYWDLKSGVCTRIFGGHQGTITCMDLCKNRLVSGGRDCQVKVWDVDTGKCLKTFRHKDPILATRINDTYIVSSCERGLVKVWHIAMAQLVKTLSGHEGAVKCLFFDQWHLLSGSTDGLVMAWSMVGKYERCLMAFKHPKLELNNQSKCLAHSQGSTALPCTSARSL

SEQ ID NO: 75804 - protein, 235 aa, Homo sapiens; identical to SEQ ID NO: 65458
  Payload ID: 15030
  Gene Symbol:
  Gene Name: RP11-385J1.3
  ENSP ID: ENSP00000483415

SEQ ID NO: 75805 - protein, 75 aa, Homo sapiens
  Payload ID: 15031
  Gene Symbol:
  Gene Name: RP1-138B7.6
  ENSP ID: ENSP00000480114
HQSLFMSALSAHPDRSLSVCWEQHCKLLPGVAGISASTVAKWTIDEVFGFVQTLTGCEDQARLFKDESCLIIATE

SEQ ID NO: 75806 - protein, 131 aa, Homo sapiens
  Payload ID: 15032
  Gene Symbol:
  Gene Name: RP11-38C17.1
  ENSP ID: ENSP00000387111
MAGILRLVVQWPPGRLQTVTKGVESLICTDWIRHKFTRSRIPEKVFQASPEDHEKYGGDPQNPHKLHIVTRIKSTRRRPYWEKDIIKMLGLEKAHTPQVHKNIPSVNAKLKVVKHLIRFVVSSQLFLKCIA

SEQ ID NO: 75807 - protein, 127 aa, Homo sapiens
  Payload ID: 15033
  Gene Symbol:
  Gene Name: RP1-139D8.6
  ENSP ID: ENSP00000362054
MGRKEHESPSQPHMCGWEDSQKPSVPSHGPKTPSCKGVKAPHSSRPRAWKQDLEQSLAAAYVPVVVDSKGQNPDKLRFNFYTSQYSNSLNPFYTLQKPTCGYLYRRDTDHTRKRFDVPPANLVLWRS

SEQ ID NO: 75808 - protein, 112 aa, Homo sapiens
  Payload ID: 15033
  Gene Symbol:
  Gene Name: RP1-139D8.6
  ENSP ID: ENSP00000485219
MCKDSQKPSVPSHGPKTPSCKGVKAPHSSRPRAWKQDLEQSLAAAYVPVVVDSKGQNPDKLRFNFYTSQYSNSLNPFYTLQKPTCGYLYRRDTDHTRKRFDVPPANLVLWRS

SEQ ID NO: 75809 - protein, 334 aa, Homo sapiens
  Payload ID: 15034
  Gene Symbol:
  Gene Name: RP11-400G3.5
  ENSP ID: ENSP00000483243
KEIRRFCLMTLRNFGMGKRSIEDRVQEEARCLVEELRKTNASPCDPTFILGCAPCNVICSVIFHDRFDYKDQRFLNLMEKFNENLRILSSPWIQVCNNFPALIDYLPGSHNKIAENFAYIKSYVLERIKEHQESLDMNSARDFIDCFLIKMEQEKHNQQSEFTVESLIATVTDMFGAGTETTSTTLRYGLLLLLKYPEVTAKVQEEIECVVGRNRSPCMQDRSHMPYTDAVVHEIQRYIDLLPTNLPHAVTCDVKFKNYLIPKGTTIITSLTSVLHNDKEFPNPEMFDPGHFLDKSGNFKKSDYFMPFSAALKNLWPCVHSVFWPGTHGGAAWI

SEQ ID NO: 75810 - protein, 73 aa, Homo sapiens
  Payload ID: 15035
  Gene Symbol:
  Gene Name: RP11-403P17.5
  ENSP ID: ENSP00000462196
  MOD_RES (1)..(1): Any amino acid
XNPETCYQRLKKRCREEEKVIPLEYLEAIHHLHEEWLIKGSLFPMAAPVLRSLQRHNKQAGRRDGRPGELHVP

SEQ ID NO: 75811 - protein, 75 aa, Homo sapiens
  Payload ID: 15036
  Gene Symbol:
  Gene Name: RP11-404P21.8
  ENSP ID: ENSP00000450984
MFSPWKISMFLSVREDSVPTTASFRVSVRRPRLKCSGTIIARCSLDLPGLNDSPTSASRVAGTTGHCAWHHPGPL

SEQ ID NO: 75812 - protein, 1339 aa, Homo sapiens
  Payload ID: 15037
  Gene Symbol:
  Gene Name: RP11-407N17.3
  ENSP ID: ENSP00000452252
MAKFGVHRILLLAISLTKCLESTKLLADLKKCGDLECEALINRVSAMRDYRGPDCRYLNFTKGEEISVYVKLAGEREDLWAGSKGKEFGYFPRDAVQIEEVFISEEIQMSTKESDFLCLLGVSYTFDNEDSELNGDYGENIYPYEEDKDEKSSIYESDFQIEPGFYATYESTLFEDQVPALEAPEDIGSTSESKDWEEVVVESMEQDRIPEVHVPPSSAVSGVKEWFGLGGEQAEEKAFESVIEPVQESSFRSRKIAVEDENDLEELNNGEPQTEHQQESESEIDSVPKTQSELASESEHIPKPQSTGWFGGGFTSYLGFGDEDTGLELIAEESNPPLQDFPNSISSDKEATVPCTEILTEKKDTITNDSLSLKPSWFDFGFAILGFAYAKEDKIMLDDRKNEEDGGADEHEHPLTSELDPEKEQEIETIKIIETEDQIDKKPVSEKTDESDTIPYLKKFLYNFDNPWNFQNIPKETELPFPKQILDQNNVIENEETGEFSIDNYPTDNTKVMIFKSSYSLSEDASEFQILKYLFQIDVYDFMNSAFSPIVILTERVVAALPEGMRPDSNLYGFPWELVICAAVVGFFAVLFFLWRSFRSVRSRLYVGREKKLALMLSGLIEEKSKLLEKFSLVQKEYEGYEVESSLKDASFEKEATEAQSLEATCEKLNRSNSELEDEILCLEKELKEEKSKHSEQDELMADISKRIQSLEDESKSLKSQVAEAKMTFKIFQMNEERLKIAIKDALNENSQLQESQKQLLQEAEVWKEQVSELNKQKVTFEDSKVHAEQVLNDKESHIKTLTERLLKMKDWAAMLGEDITDDDNLELEMNSESENGAYLDNPPKGALKKLIHAAKLNASLKTLEGERNQIYIQLSEVDKTKEELTEHIKNLQTEQASLQSENTHFENENQKLQQKLKVMTELYQENEMKLHRKLTVEENYRLEKEEKLSKVDEKISHATEELETYRKRAKDLEEELERTIHSYQGQIISHEKKAHDNWLAARNAERNLNDLRKENAHNRQKLTETELKFELLEKDPYALDVPNTAFGREHSPYGPSPLGWPSSETRAFLSPPTLLEGPLRLSPLLPGGGGRGSRGPGNPLDHQITNERGESSCDRLTDPHRAPSDTGSLSPPWDQDRRMMFPPPGQSYPDSALPPQRQDRFCSNSGRLSGPAELRSFNMPSLDKMDGSMPSEMESSRNDTKDDLGNLNVPDSSLPAENEATGPGFVPPPLAPIRGPLFPVDARGPFLRRGPPFPPPPPGAMFGASRDYFPPGDFPGPPPAPFAMRNVYPPRGFPPYLPPRPGFFPPPPHSEGRSEFPSGLIPPSNEPATEHPEPQQET

SEQ ID NO: 75813 - protein, 347 aa, Homo sapiens
  Payload ID: 15038
  Gene Symbol:
  Gene Name: RP11-407P15.2
  ENSP ID: ENSP00000456868
MVQASGHRRSTRGSKMVSWSVIAKIQEIWCEEDERKMVREFLAEFMSTYVMMVFGLGSVAHMVLNKTYGSYLGVNLGFGFGVTMGVHVAGRISGAHMNAAVTFTNCALGRVPWRKFPVHVLGQFLGSFLAAATIYICVSAAAILHFSGGELMVTGPFATAGIFATYLPDHMTLWRGFLNEEWLTRMLQLCLFTITDQENNPALPGTHALVISILVVIIRVSHGINTGYAINPSRDPPPSIFTFIAGWGKQVFSDGENWWWVPVVAPLLGASLGGIIYLVFIGSTIPREPLKLEDSVAYEDHGITVLPKMGSHEPMISPLTLISVSLANRSSVHSAPPLHESMALEHF

SEQ ID NO: 75814 - protein, 107 aa, Homo sapiens
  Payload ID: 15039
  Gene Symbol:
  Gene Name: RP11-411B6.6
  ENSP ID: ENSP00000455090
MAVARAGVLGVQWLQRASRNVMPLGARTASHMTKDMFPGPYPRTPEERAAAAKKYNMRVEDYEPYPDDGMGYGDYPKLPDRSQHERDPWYSWDQPGLRLNWGEPDRP

SEQ ID NO: 75815 - protein, 159 aa, Homo sapiens
  Payload ID: 15039
  Gene Symbol:
  Gene Name: RP11-411B6.6
  ENSP ID: ENSP00000455597
MAVARAGVLGVQWLQRASRNVMPLGARTASHMTKDMFPGPYPRTPEERAAAAKKYNMRVEDYEPYPDDGMGYGDYPKLPDRSQHERDPWYSWDQPGLRLNWGEPMHWHLDMYNRNRVDTSPTPVSWHVMCMQLFGFLAFMIFMCWVGDVYPVYQPVDRP

SEQ ID NO: 75816 - protein, 71 aa, Homo sapiens; identical to SEQ ID NO: 55143
  Payload ID: 15039
  Gene Symbol:
  Gene Name: RP11-411B6.6
  ENSP ID: ENSP00000456355

SEQ ID NO: 75817 - protein, 71 aa, Homo sapiens; identical to SEQ ID NO: 55143
  Payload ID: 15039
  Gene Symbol:
  Gene Name: RP11-411B6.6
  ENSP ID: ENSP00000456407

SEQ ID NO: 75818 - protein, 172 aa, Homo sapiens; identical to SEQ ID NO: 55141
  Payload ID: 15039
  Gene Symbol:
  Gene Name: RP11-411B6.6
  ENSP ID: ENSP00000456832

SEQ ID NO: 75819 - protein, 248 aa, Homo sapiens
  Payload ID: 15040
  Gene Symbol:
  Gene Name: RP11-426L16.10
  ENSP ID: ENSP00000475703
  MOD_RES (1)..(1): Any amino acid
XEFTHLEFPRRVLPKELGQRMLYRDQNMTGWAYKKIELEDLRFPLVCGEGKKARVMATIGVTRGLGDHSLKVCSSTLPIKPFLSCFPEVRVYDLTQYEHCPDDVLVLGTDGLWDVTTDCEVAATVDRVLSAYEPNDHSSPTMAAIRKKLVIVGDGACGKTCLLIVFSKDQFPEVYVPTVFENYIADIEVDGKQVELALWDTAGQEDYDRLRPLSYPDTDVILMCFSIDSPDSLENIPEKWTPEVKHFC

SEQ ID NO: 75820 - protein, 33 aa, Homo sapiens
  Payload ID: 15040
  Gene Symbol:
  Gene Name: RP11-426L16.10
  ENSP ID: ENSP00000476038
  MOD_RES (1)..(1): Any amino acid
XEFTHLEFPRRVLPKELGQRMLYRDQNMTGWLG

SEQ ID NO: 75821 - protein, 271 aa, Homo sapiens
  Payload ID: 15040
  Gene Symbol:
  Gene Name: RP11-426L16.10
  ENSP ID: ENSP00000476252
  MOD_RES (1)..(1): Any amino acid
XEFTHLEFPRRVLPKELGQRMLYRDQNMTGWAYKKIELEDLRFPLVCGEGKKARVMATIGVTRGLGDHSLKVCSSTLPIKPFLSCFPEVRVYDLTQYEHCPDDVLVLGTDGLWDVTTDCEVAATVDRVLSAYEPNDHSSLDFISAPEPALSSCSLGTSAGWSPTMAAIRKKLVIVGDGACGKTCLLIVFSKDQFPEVYVPTVFENYIADIEVDGKQVELALWDTAGQEDYDRLRPLSYPDTDVILMCFSIDSPDSLENIPEKWTPEVKHFC

SEQ ID NO: 75822 - protein, 948 aa, Homo sapiens
  Payload ID: 15041
  Gene Symbol:
  Gene Name: RP11-432B6.3
  ENSP ID: ENSP00000456272
MHNFEEELTCPICYSIFEDPRVLPCSHTFCRNCLENILQASGNFYIWRPLRIPLKCPNCRSITEIAPTGIESLPVNFALRAIIEKYQQEDHPDIVTCPEHYRQPLNVYCLLDKKLVCGHCLTIGQHHGHPIDDLQSAYLKEKDTPQKLLEQLTDTHWTDLTHLIEKLKEQKSHSEKMIQGDKEAVLQYFKELNDTLEQKKKSFLTALCDVGNLINQEYTPQIERMKEIREQQLELMALTISLQEESPLKFLEKVDDVRQHVQILKQRPLPEVQPVEIYPRVSKILKEEWSRTEIGQIKNVLIPKMKISPKRMSCSWPGTPVYSVAWGPDSEKVLYTAGKQLIIKPLQPNAKVLQWKAHDGIILKVDWNSVNDLILSAGEDCKYKVWDSYGRPLYNSQPHEHPITSVAWAPDGELFAVGSFHTLRLCDKTGWSYALEKPNTGSIFNIAWSIDGTQIAGACGNGHVVFAHVVEQHWEWKNFQVTLTKRRAMQVRNVLNDAVDLLEFRDRVIKASLNYAHLVVSTSLQCYVFSTKNWNTPIIFDLKEGTVSLILQAERHFLLVDGSSIYLYSYEGRFISSPKFPGMRTDILNAQTVSLSNDTIAIRDKADEKIIFLFEASTGKPLGDGKFLSHKNEILEIALDQKGLTNDRKIAFIDKNRDLCITSVKRFGKEEQIIKLGTMVHTLAWNDTCNILCGLQDTRFIVWYYPNTVYVDRDILPKTLYERDASEFSKNPHIVSFVGNQVTIRRADGSLVHISITPYPAILHEYVSSSKWEDAVRLCRFVKEQTMWACLAAMAVANRDMTTAEIAYAAIGEIDKVQYINSIKNLPSKESKMAHILLFSGNIQEAEIVLLQAGLVYQAIQININLYNWERALELAVKYKTHVDTVLAYRQKFLETFGKQETNKRYLHYAEGLQIDWEKIKAKIEMEITKEREQSSSSQSSKSIGLKP

SEQ ID NO: 75823 - protein, 133 aa, Homo sapiens
  Payload ID: 15042
  Gene Symbol:
  Gene Name: RP11-434D12.1
  ENSP ID: ENSP00000476275
  MOD_RES (1)..(1): Any amino acid
XGPAHVVTVIARQRGDQLVPFSTKSGDTLLLLHHGDFSAEEVFHRELRSNSMKTWGLRAAGWMAMFMGLNLMTRILYTLAFFRLLSPQNVTWKTRSQQMTCTSLLSPLLQRGSEGSISKPDSGEGKWPAEKWS

SEQ ID NO: 75824 - protein, 360 aa, Homo sapiens
  Payload ID: 15043
  Gene Symbol:
  Gene Name: RP11-435I10.4
  ENSP ID: ENSP00000454253
MLSAAHDILSHKRTSGNQSHAVLLADILPTLVIKLLAPLGLHLLPYSPRVLVSGICAAGSFVLVAFSHSVGTSLCGVVFASISSGLGEVTFLSLTAFYPRAVISWWSSGTGGAGLLGALSYLGLTQAGLSPQQTLLSMLGIPALLLASYFLLLTSPEAQDPGGEEEAESAARQPLIRTEAPESKPGSSSSLSLRERWTVFKGLLWYIVPLVVVYFAEYFINQGLFELLFFWNTSLSHAQQYRWYQMLYQAGVFASRSSLRCCRIRFTWALALLQCLNLVFLLADVWFGFLPSIYLVFLIILYEGLLGGAAYVNTFHNIALETSDEHREFAMAATCISDTLGISLSGLLALPLHDFLCQLS

SEQ ID NO: 75825 - protein, 127 aa, Homo sapiens
  Payload ID: 15044
  Gene Symbol:
  Gene Name: RP11-437B10.1
  ENSP ID: ENSP00000486623
MMRNKDKSQEEDSSLHSNASSHSASEEASGSDSGSQSESEQGSDPGSGHGSESNSSSESSESQSESESESAGSKSQPVLPEAKEKPASKKERIADVKKMWEEYPDVYGVRRSNRSRQEPSRFNIKEE

SEQ ID NO: 75826 - protein, 111 aa, Homo sapiens
  Payload ID: 15045
  Gene Symbol:
  Gene Name: RP11-438J1.1
  ENSP ID: ENSP00000399689
QKEDDVACSRRLSWGSSRRRNNSSSSFSPHFLGPGVGGAASKGCLIRNTRGFLSSGGSPLRPANASLEEMASLEEEACSLKLKLRVRMIQLRNPTRSRKGRGIDFETRAPQ

SEQ ID NO: 75827 - protein, 665 aa, Homo sapiens
  Payload ID: 15045
  Gene Symbol:
  Gene Name: RP11-438J1.1
  ENSP ID: ENSP00000402783
QKEDDVACSRRLSWGSSRRRNNSSSSFSPHFLGPGVGGAASKGCLIRNTRGFLSSGGSPLRPANASLEEMASLEEEACSLKVDSKDSSHNSTNSEFAAEAEGQNDTIEEPNKVQKRKRDRLRDQGSTMIYLKAIQGILGKSMPKRKGEAATRAKPSAAEHPSHGEGPARSEGPAKTAEGAARSVTVTAAQKEKDATPEVSMEEDKTVPERSSFYDRRVVIDPQEKPSEEPLGDRRTVIDKCSPPLEFLDDSDSHLEIQKHKDREVVMEHPSSGSDWSDVEEISTVRFSQEEPVSLKPSAVPEPSSFTTDYVMYPPHLYSSPWCDYASYWTSSPKPSSYPSTGSSSNDAAQVGKSSRSRMSDYSPNSTGSVQNTSRDMEASEEGWSQNSRSFRFSRSSEEREVKEKRTFQEEMPPRPCGGHASSSLPKSHLEPSLEEGFIDTHCHLDMLYSKLSFQGTFTKFRKIYSSSFPKEFQGCISDFCDPRTLTDCLWEELLKEDLVWGAFGCHPHFARYYSESQERNLLQALRHPKAVAFGEMGLDYSYKCTTPVPEQHKVFERQLQLAVSLKKPLVIHCREADEDLLEIMKKFVPPDYKIHRHCFTGSYPVIEPLLKYFPNMSVGFTAVLTYSSAWEAREALRQIPLERIIVETDAPYFLPRQAVQSPTL

SEQ ID NO: 75828 - protein, 135 aa, Homo sapiens
  Payload ID: 15046
  Gene Symbol:
  Gene Name: RP11-444E17.6
  ENSP ID: ENSP00000424257
  MOD_RES (1)..(1): Any amino acid
XRLTFSSAYQGNSLMYHDSPCSNGYVYIPLAFLLMLYAVYLVECWHCQARHELQHRVDVSSVRERVGRMQQATPCIWWKAISYHYVRRTRQVTRYRNGDAYTTTQVPGCLGSQVVPLRSPWRNAQLDAGSDEEPA

SEQ ID NO: 75829 - protein, 70 aa, Homo sapiens; identical to SEQ ID NO: 21719
  Payload ID: 15047
  Gene Symbol:
  Gene Name: RP11-446E24.4
  ENSP ID: ENSP00000457656

SEQ ID NO: 75830 - protein, 106 aa, Homo sapiens
  Payload ID: 15048
  Gene Symbol:
  Gene Name: RP11-447L10.1
  ENSP ID: ENSP00000405181
MATSIGVSFSVGDGVPEAEKNAGEPENTYILRPVFQQRFRPSVVKDCIHAVLKEELANAEYSPEEMPQLTKHLSENIKDKLKEMGFDRYKMVVQVVIGEQRGEGVF

SEQ ID NO: 75831 - protein, 1027 aa, Homo sapiens
  Payload ID: 15049
  Gene Symbol:
  Gene Name: RP11-449H3.3
  ENSP ID: ENSP00000475384
MLIEDVDALKSWLAKLLEPICDADPSALANYVVALVKKDKPEKELKAFCADQLDVFLQKETSGFVDKLFESLYTKNYLPLLEPVKPEPKPLVQEKEEIKEEVFQEPAEEERDGRKKKYPSPQKTRSESSERRTREKKREDGKWRDYDRYYERNELYREKYDWRRGRSKSRSKSRGLSRSRSRSRGRSKDRDPNRNVEHRERSKFKSERNDLESSYVPVSAPPPNSSEQYSSGAQSIPSTVTVIAPAHHSENTTESWSNYYNNHSSSNSFGRNLPPKRRCRDYDERGFCVLGDLCQFDHGNDPLVVDEVALPSMIPFPPPPPGLPPPPPPGMLMPPMPGPGPGPGPGPGPGPGPGPGPGHSMRLPVPQGHGQPPPSVVLPIPRPPITQSSLINSRDQPGTSAVPNLASVGTRLPPPLPQNLLYTVSEHTYEPDGYNPEAPSITSSGRSQYRQFFSRTQTQRPNLIGLTSGDMDVNPRAANIVIQTEPPVPVSINSNITRVVLEPDSRKRAMSGLEGPLTKKPWLGKQGNNNQNKPGFLRKNQYTNTKLEVKKIPQELNNITKLNEHFSKFGTIVNIQVAFKGDPEAALIQYLTNEEARKAISSTEAVLNNRFIRVLWHRENNEQPTLQSSAQLLLQQQQTLSHLSQQHHHLPQHLHQQQVLVAQSAPSTVHGGIQKMMSKPQTSGAYVLNKVPVKHRLGHAGGNQSDASHLLNQSGGAGEDCQIFSTPGHPKMIYSSSNLKTPSKLCSGSKSHDVQEVLKKKQEAMKLQQDMRKKRQEVLEKQIECQKMLISKLEKNKNMKPEERANIMKTLKELGEKISQLKDELKTSSAVSTPSKVKTKTEAQKELLDTELDLHKRLSSGEDTTELRKKLSQLQVEAARLGILPVGRGKTMSSQGRGRGRGRGGRGRGSLNHMVVDHRPKALTVGGFIEEEKEDLLQHFSMEFCSCCPGWSAMVRSRLTATSASLVQVILLPQPPKQLRLQEREDDGHELQAAFRHAPGAARTQILQSALWLRGHAPSLSPSPAGT

SEQ ID NO: 75832 - protein, 238 aa, Homo sapiens
  Payload ID: 15050
  Gene Symbol:
  Gene Name: RP11-458D21.5
  ENSP ID: ENSP00000483006
MCVTYHNGTGYCKCPEGFLGEYCQHRDPCEKNRCQNGGTCVAQAMLGKATCRCASGFTGEDCQYSTSHPCFVSRPCLNGGTCHMLSRDTYECTCQVGFTGKECQWTDACLSHPCANGSTCTTVANQFSCKCLTGFTGQKCETDVNECDIPGHCQHGGTCLNLPGSYQCQCLQGFTGQYCDSLYVPCAPSPCVNGGTCRQTGDFTFECNCLPDGYLARWPHSASLLSESELLAVLSALS

SEQ ID NO: 75833 - protein, 95 aa, Homo sapiens
  Payload ID: 15051
  Gene Symbol:
  Gene Name: RP11-45M22.4
  ENSP ID: ENSP00000394249
MNAIVALCHFCELHGPRTLFCTEVLHAPLPQGDGNEDSPGQGEQAEEEEAASLQVPPAHEAGPGCPFFPHAGLARSHGEPGDLEKQRRGPRPVSF

SEQ ID NO: 75834 - protein, 57 aa, Homo sapiens
  Payload ID: 15052
  Gene Symbol:
  Gene Name: RP11-463C8.4
  ENSP ID: ENSP00000456507
MERKNPSRESPRRLSAKVGKGTEMKKVARQLGMAAAESDKDSGFSGILPGCLPHQTT

SEQ ID NO: 75835 - protein, 161 aa, Homo sapiens
  Payload ID: 15053
  Gene Symbol:
  Gene Name: RP11-463D19.2
  ENSP ID: ENSP00000454445
MASMQKRLQKELLALQNDPPPGMTLNEKSVQNSITQWIVDMEGAPGTLYEGEKFQLLFKFSSRYPFDSPQVMFTGENIPVHPHVYSNGHICLSILTEDWSPALSVQSVCLSIISMLSSCKEKRRPPDNSFYVRTCNKNPKKTKWWYHEAAYHKDFSLLFKD

SEQ ID NO: 75836 - protein, 815 aa, Homo sapiens
  Payload ID: 15054
  Gene Symbol:
  Gene Name: RP11-468E2.1
  ENSP ID: ENSP00000433967
MSGLGRLFGKGKKEKGPTPEEAIQKLKETEKILIKKQEFLEQKIQQELQTAKKYGTKNKRAALQALRRKKRFEQQLAQTDGTLSTLEFQREAIENATTNAEVLRTMELAAQSMKKAYQDMDIDKVDELMTDITEQQEVAQQISDAISRPMGFGDDVDEDELLEELEELEQEELAQELLNVGDKEEEPSVKLPSVPSTHLPAGPGSTALRMTVVGNPRSWSCQWLPILILLLGTGHGPGVEGVTHYKAGDPVILYVNKVGPYHNPQETYHYYQLPVCCPEKIRHKSLSLGEVLDGDRMAESLYEIRFRENVEKRILCHMQLSSAQVEQLRQAIEELYYFEFVVDDLPIRGFVGYMEESGFLPHSHKIGLWTHLDFHLEFHGDRIIFANVSVRDVKPHSLDGLRPDEFLGLTHTYSVRWSETSVERRSDRRRGDDGGFFPRTLEIHWLSIINSMVLVFLLVGFVAVILMRVLRNDLARYNLDEETTSAGSGDDFDQGDNGWKIIHTDVFRFPPYRGLLCAVLGVGAQFLALGTGIIVMALLGMFNVHRHGAINSAAILLYALTCCISGYVSSHFYRQIGGERWVWNIILTTSLFSVPFFLTWSVVNSVHWANGSTQALPATTILLLLTVWLLVGFPLTVIGGIFGKNNASPFDAPCRTKNIAREIPPQPWYKSTVIHMTVGGFLPFSAISVELYYIFATVWGREQYTLYGILFFVFAILLSVGACISIALTYFQLSGEDYRWWWRSVLSVGSTGLFIFLYSVFYYARRSNMSGAVQTVEFFGYSLLTGYVFFLMLGTISFFSSLKFIRYIYVNLKMD

SEQ ID NO: 75837 - protein, 143 aa, Homo sapiens
  Payload ID: 15055
  Gene Symbol:
  Gene Name: RP11-468E2.2
  ENSP ID: ENSP00000454374
  MOD_RES (1)..(1): Any amino acid
XIHMTVGGFLPFSAISVELYYIFATVWGREQYTLYGILFFVFAILLSVGACISIALTYFQLSGEDYRWWWRSVLSVGSTGLFIFLYSVFYYARRSNMSGAVQTVEFFGYSLLTGYVFFLMLGTISFFSSLKFIRYIYVNLKMD

SEQ ID NO: 75838 - protein, 98 aa, Homo sapiens; identical to SEQ ID NO: 40062
  Payload ID: 15055
  Gene Symbol:
  Gene Name: RP11-468E2.2
  ENSP ID: ENSP00000486380

SEQ ID NO: 75839 - protein, 547 aa, Homo sapiens
  Payload ID: 15056
  Gene Symbol:
  Gene Name: RP11-468E2.4
  ENSP ID: ENSP00000457512
SELPYVLEMVAELAGQQDPGLGAFSCQEARRAWLDRHGNLDEAVEECVRTRRRKVQELQSLGFGPEEGSLQALFQHGGDVSRALTELQRQRLEPFRQRLWDSGPEPTPSWDGPDKQSLVRRLLAVYALPSWGRAELALSLLQETPRNYELGDVVEAVRHSQDRAFLRRLLAQECAVCGWALPHNRMQALTSCECTICPDCFRQHFTIALKEKHITDMVCPACGRPDLTDDTQLLSYFSTLDIQLRESLEPDAYALFHKKLTEGVLMRDPKFLWCAQCSFGFIYEREQLEATCPQCHQTFCVRCKRQWEEQHRGRSCEDFQNWKRMNDPEYQAQGLAMYLQENGIDCPKCKFSYALARGGCMHFHCTQCRHQFCSGCYNAFYAKNKCPEPNCRVKKSLHGHHPRDCLFYLRDWTALRLQKLLQDNNVMFNTEPPAGARAVPGGGCRVIEQKEVPNGLRDEACGKETPAGYAGLCQAHYKEYLVSLINAHSLDPATLYEVEELETATERYLHVRPQPLAGEDPPAYQARLLQKLTEEVPLGQSIPRRRK

SEQ ID NO: 75840 - protein, 283 aa, Homo sapiens
  Payload ID: 15057
  Gene Symbol:
  Gene Name: RP11-468E2.6
  ENSP ID: ENSP00000453089
  MOD_RES (1)..(1): Any amino acid
XWDYRWQQVPKKAWRKLKLPGDSSLMTYRGHGVLHTLIRCRFSPIHSTGQQFIYSGCSTGKVVVYDLLSGHIVKKLTNHKACVRDVSWHPFEEKIVSSSELEHGRSQGHRTNRKGHRLLSGHILPHTRGQDPADVADLHPGPLLPPAPLPHLPAANRALPCVCHTCHCLSLSRGGPISPSSAAQQSKQLVGRGGNMERGPVVGAGLGAGARIQALLGCLLKVLLWVASALLYFGSEQAARLLGSPCLRRLYHAWLAAVVIFGPLLQFHVNPRTIFASHGNFFN

SEQ ID NO: 75841 - protein, 331 aa, Homo sapiens
  Payload ID: 15058
  Gene Symbol:
  Gene Name: RP11-474G23.1
  ENSP ID: ENSP00000384974
MCSHFDADEIKRLGKRFKKLDLDNSGSLSVEEFMSLPELQQNPLVQRVIDIFDTDGNGEVDFKEFIEGVSQFSVKGDKEQKLRFAFRIYDMDKDGYISNGELFQVLKMMVGNNLKDTQLQQIVDKTIINADKDGDGRISFEEFCARGGKTGLFAGLASSVSMRPASPPSPAADSCSACRFFARRPPLRVTWVKPSSALALCVSISDSIPGNLKALPAETRAQLHHAEASLSQPPLQLRPFPKTSQAGDLQDLGPYVCVRKAVGKGDKQIRAVVKEHSVRSQERIWHYPGITTANMPGHLGQNTESGRDKLPMFGVWFPGCRFWGLWVWRLP

SEQ ID NO: 75842 - protein, 182 aa, Homo sapiens
  Payload ID: 15059
  Gene Symbol:
  Gene Name: RP11-475E11.9
  ENSP ID: ENSP00000349968
MTRPRKHAETLGGGKLCDLFCGRPGQVSSSRGRQGIPDMEPIVHIHQELLTGIESEASLSKLSPTSQKGTSSSSSYIFQKISQGKQMCQKLKEQTDQLKTKVQEFSKRIKQDSPYHLQDKKLVLEKLQGHLELLEQNFLATKDKHLTLQQQVHKHESTIVGDFDPERKVEGEIFKLEMLLED

SEQ ID NO: 75843 - protein, 145 aa, Homo sapiens
  Payload ID: 15060
  Gene Symbol:
  Gene Name: RP11-47I22.4
  ENSP ID: ENSP00000452401
  MOD_RES (1)..(1): Any amino acid
XDFGMCKEGICNGVTTATFCGTPDYIAPEILQEMLYGPAVDWWAMGVLLYEMLCGHAPFEAENEDDLFEAILNDEVVYPTWLHEDATGILKSFMTKNPTMRLGSLTQGGEHAILRHPFFKEIDWAQLNHRQIEPPFRPRIWLLEE

SEQ ID NO: 75844 - protein, 68 aa, Homo sapiens
  Payload ID: 15061
  Gene Symbol:
  Gene Name: RP11-484M3.5
  ENSP ID: ENSP00000424708
METQNATTIPPYNPVDARFTSNFQAKDQALFPRLPSISSKLNYTSSQEKTQAIVTKSCCGIALTAECI

SEQ ID NO: 75845 - protein, 82 aa, Homo sapiens; identical to SEQ ID NO: 39556
  Payload ID: 15062
  Gene Symbol:
  Gene Name: RP11-49K24.6
  ENSP ID: ENSP00000465194

SEQ ID NO: 75846 - protein, 40 aa, Homo sapiens
  Payload ID: 15062
  Gene Symbol:
  Gene Name: RP11-49K24.6
  ENSP ID: ENSP00000473358
MAFTLYSLLQAALLCVNAIAVLHEERFLKNRNEGWQHAVH

SEQ ID NO: 75847 - protein, 40 aa, Homo sapiens; identical to SEQ ID NO: 75846
  Payload ID: 15062
  Gene Symbol:
  Gene Name: RP11-49K24.6
  ENSP ID: ENSP00000473502

SEQ ID NO: 75848 - protein, 546 aa, Homo sapiens
  Payload ID: 15063
  Gene Symbol:
  Gene Name: RP11-49K24.9
  ENSP ID: ENSP00000479069
MAAGSTTLRAVGKLQVRLATKTEPKKLEKYLQKLSALPMTADILAETGIRKTVKRLRKHQHVGDFARDLAARWKKLVLVDRNTGPDPQDPEESASRQRFGEALQEREKAWGFPENATAPRSPSHSPEHRRTARRTPPGQQRPHPRSPSREPRAERKRPRMAPADSGPHRDPPTRTAPLPMPEGPEPAVPGEQPGRGHAHAAQGGPLLGQGCQGQPQGEAVGSHSKGHKSSRGASAQKSPPVQESQSERLQAAGADSAGPKTVPSHVFSELWDPSEAWMQANYDLLSAFEAMTSQANPEALCAPALQEEAAFPGRRVNAKMPVYSGSRPACQLQVPTLRQQCLRVPRNNPDALGDVEGVPYSVLEPVLEGWTPDQLYRTEKDNAALARETDELWRIHCLQDFKEEKPQEHESWRELYLRLRDAREQRLRVVTTKIRSARENKPSGRQTKMICFNSVAKTPYDASRRQEKSAGAADPGNGEMEPAPKPAGSSQAPSGLGDGDGGSVSGGGSSNRHAAPADKTRKQAAKKVAPLMAKAIRDYKGRFSRR

SEQ ID NO: 75849 - protein, 177 aa, Homo sapiens
  Payload ID: 15064
  Gene Symbol:
  Gene Name: RP11-49P4.7
  ENSP ID: ENSP00000489149
MPPAEKSEGPPVPAPAERARGRVPGLPSPALCCACGLCALLAGVNVTLAGAFASFLPEHNALLVVGLALLVLALGFFAACCVCSRRGLAPRGRSAAAAGPGQGGGRAGPVALEMESSEPTAQDTTAVQLSPAVSAASSGCSSPGPSPLALEAPAPAAVCALRSEGVQLNPPRARAAP

SEQ ID NO: 75850 - protein, 51 aa, Homo sapiens
  Payload ID: 15065
  Gene Symbol:
  Gene Name: RP11-500M8.7
  ENSP ID: ENSP00000445121
  MOD_RES (1)..(1): Any amino acid
XSPEVILGHPYDVAIDMWSLGCITAELYTGYPLFPGENEVEQLACIMELTN

SEQ ID NO: 75851 - protein, 98 aa, Homo sapiens
  Payload ID: 15066
  Gene Symbol:
  Gene Name: RP11-505K9.4
  ENSP ID: ENSP00000476300
VGPYRRCYFFSHCSTPGEPLVVLHVALTGDISSNIQAIVKEHPPSETEEKNKITAAIFYSISLTQQGLQGVELGTFLIKRVVKELQMESRSVAQAEVQ

SEQ ID NO: 75852 - protein, 91 aa, Homo sapiens
  Payload ID: 15066
  Gene Symbol:
  Gene Name: RP11-505K9.4
  ENSP ID: ENSP00000477143
VGPYRRCYFFSHCSTPGEPLVVLHVALTGDISSNIQAIVKEHPPSETEEKNKITAAIFYSISLTQQGLQGVELGTFLIKRVVKELQYRPLS

SEQ ID NO: 75853 - protein, 175 aa, Homo sapiens
  Payload ID: 15066
  Gene Symbol:
  Gene Name: RP11-505K9.4
  ENSP ID: ENSP00000484042
  MOD_RES (1)..(1): Any amino acid
XAVHPVKNWMDMKRRVGPYRRCYFFSHCSTPGEPLVVLHVALTGDISSNIQAIVKEHPPSETEEKNKITAAIFYSISLTQQGLQGVELGTFLIKRVVKELQFTHSKPLGSHRPGTVGWGSGDREAAAGEICSADKRFLLLSPHQSCFLPGTSPSPSPSPCWQMLRYPGLWLPGCA

SEQ ID NO: 75854 - protein, 70 aa, Homo sapiens
  Payload ID: 15067
  Gene Symbol:
  Gene Name: RP11-506B6.7
  ENSP ID: ENSP00000486440
MAKRLQAELSCPVCLDFFSCSISLSCTHVFCFDCIQRYILENHDFRAMCPLCRDVVKVPALEEWQVSVLT

SEQ ID NO: 75855 - protein, 35 aa, Homo sapiens
  Payload ID: 15067
  Gene Symbol:
  Gene Name: RP11-506B6.7
  ENSP ID: ENSP00000486934
MAKRLQAELSCPVCLDFFSCSISLSCTHVFCFDCI

SEQ ID NO: 75856 - protein, 128 aa, Homo sapiens
  Payload ID: 15067
  Gene Symbol:
  Gene Name: RP11-506B6.7
  ENSP ID: ENSP00000487146
MAKRLQAELSCPVCLDFFSCSISLSCTHVFCFDCIQRYILENHDFRAMCPLCRDVVKVPALEEWQVSVLTLMTKQHNSRLEQSLHVREELRHFREDVTLDAATASSLLVFSNDLRSAQCKKIHHDLTK

SEQ ID NO: 75857 - protein, 212 aa, Homo sapiens
  Payload ID: 15068
  Gene Symbol:
  Gene Name: RP11-507M3.1
  ENSP ID: ENSP00000483650
MEVLAKEDTEAAIQSILYKENSVIKGNAFIEHYDPKEYDPFYMSKKDPNFLKVTIPPFHDPLKKAQYDKDNEKRTLLQCETGKIYSIKEFKEVEKVQLHSRFPQISNSRHFITPNEWLKLPTRYIESEFCRRRRNKGSSFLEREPLCYQEGNNPSAKEAISEGYFSSLSLSQEREEDQDGSCSVSQLEWIQAWLASASTSRTQVILPPQLPE

SEQ ID NO: 75858 - protein, 203 aa, Homo sapiens
  Payload ID: 15069
  Gene Symbol:
  Gene Name: RP11-511P7.5
  ENSP ID: ENSP00000489013
MTELASSGGGSPAGDGEEGLGDERGLVIHHPAEEQPYRCPLCGQTFSQQPSLVRHQKAHAGAGRAAAFVCPECGKAFSVKHNLEVHQRTHTGERPFPCPECGRCFSLKQNLLTHQRIHSGEKPHQCAQCGRCFREPRFLLNHQRTHARMPAPHPRRPGVFGERRPYFCPRCGKSFAREGSLKTHQRSHGHGPEGQAAHLGRVL

SEQ ID NO: 75859 - protein, 94 aa, Homo sapiens
  Payload ID: 15069
  Gene Symbol:
  Gene Name: RP11-511P7.5
  ENSP ID: ENSP00000489247
MTELASSGGGSPAGDGEEGLGDERGLVIHHPAEEQPYRCPLCGQTFSQQPSLVRHQKAHAGAGRAAAFVCPECGKAFSVKHNLELQSGQDLKTR

SEQ ID NO: 75860 - protein, 203 aa, Homo sapiens; identical to SEQ ID NO: 75858
  Payload ID: 15069
  Gene Symbol:
  Gene Name: RP11-511P7.5
  ENSP ID: ENSP00000489517

SEQ ID NO: 75861 - protein, 538 aa, Homo sapiens
  Payload ID: 15070
  Gene Symbol:
  Gene Name: RP11-512M8.5
  ENSP ID: ENSP00000454454
MAAHLSYGRVNLNVLREAVRRELREFLDKCAGSKAIVWDEYLTGPFGLIAQYSLLKEHEVEKMFTLKGNRLPAADVKNIIFFVRPRLELMDIIAENVLSEDRRGPTRDFHILFVPRRSLLCEQRLKDLGVLGSFIHREEYSLDLIPFDGDLLSMESEGAFKQVANMMIRMKREFTGSQNSIFPVFDNLLLLDRNVDLLTPLATQLTYEGLIDEIYGIQNSYVKLPPEKFAPKKQGDGGKDLPTEAKKLQLNSAEELYAEIRDKNFNAVGSVLSKKAKIISAAFEERHNAKTVGEIKQFVSQLPHMQAARGSLANHTSIAELIKDVTTSEDFFDKLTVEQEFMSGIDTDKVNNYIEDCIAQKHSLIKVLRLVCLQSVCNSGLKQKVLDYYKREILQTYGYEHILTLHNLEKAGLLKPQTGGRNNYPTIRKTLRLWMDDVNEQNPTDISYVYSGYAPLSVRLAQLLSRPGWRSIEEVLRILPGPHFEERQPLPTGLQKKRQPGENRVTLIFFLGGVTFAEIAALRFLSQLEDGEIRASFP

SEQ ID NO: 75862 - protein, 185 aa, Homo sapiens
  Payload ID: 15071
  Gene Symbol:
  Gene Name: RP11-514O12.4
  ENSP ID: ENSP00000426906
  MOD_RES (1)..(1): Any amino acid
XLGGADKRLRDNHEWKKLIMVQHWPETVCEKIQNDCRDPPDYWTIHGLWPDKSEGCNRSWPFNLEEIKDLLPEMRAYWPDVIHSFPNRSRFWKHEWEKHGTCAAQVDALNSQKKYFGRSLELYRELDLNSVLLKLGIKPSINYYQTTEEDLNLDVEPTTEDTAEEVTIHVLLHSALFGEIGPRRW

SEQ ID NO: 75863 - protein, 296 aa, Homo sapiens
  Payload ID: 15072
  Gene Symbol:
  Gene Name: RP11-514P8.6
  ENSP ID: ENSP00000429397
MDNSWRLGPAIGLSAGQSQLLVSLLLLLTRVQPGTDVAAPEHISYVPQLSNDTLAGRLTLSTFTLEQPLGQFSSHNISDLDTIWLVVALSNATQSFTAPRTNQDIPAPANFSQRGYYLTLRANRVLYQTRGQLHVLRVGNDTHCQPTKIGCNHPLPGPGPYRVKFLVMNDEGPVAETKWSSDTRLQQAQALRAVPGPQSPGTVVIIAILSILLAVLLTVLLAVLIYTCPSSSPSSPAQVPPLPGSPLGPSPVSVGAVCPWLLPESIAEIWTQDSGLPALGWQHWQQRPLLHREGGQ

SEQ ID NO: 75864 - protein, 276 aa, Homo sapiens
  Payload ID: 15073
  Gene Symbol:
  Gene Name: RP11-514P8.7
  ENSP ID: ENSP00000423309
MSSSFKKLYFSLTTEALSFAKTPSSKCVNELNQWLSALRKVSINNTGLLGSYHPGVFRGDKWSCCHQKEKTGQGCDKTRSRVTLQEWNDPLDHDLEAQLIYRHLLGVEAMLWITINKDTKVPNACLFTINKEDHTLGNIIKSRACFPFAFCRDCQFPEASPATLPVQPAELLAWKSPCATGKDINKHQEVSKSTRSHRHHVDIHLPVFPGKILLNCAALAKRAAPEHISYVPQLSNDTLAGRLTLSTFTLEQPLGQFSSHNISDLDTIWLVVALSN

SEQ ID NO: 75865 - protein, 54 aa, Homo sapiens
  Payload ID: 15074
  Gene Symbol:
  Gene Name: RP11-51F16.8
  ENSP ID: ENSP00000464100
  MOD_RES (1)..(1): Any amino acid
XADKNRARVEENFLKLTHVQRQEAAQSRREEKKRAEKERIMNEEDPEKQRRLEV

SEQ ID NO: 75866 - protein, 69 aa, Homo sapiens
  Payload ID: 15075
  Gene Symbol:
  Gene Name: RP11-51L5.7
  ENSP ID: ENSP00000473468
MFILTTNGDLPRPIFIPNGMPNTVVPCGTEKNFTNGMVNGHMPSLPDSPFTGYIIAVHRKMDGRGRGRG

SEQ ID NO: 75867 - protein, 138 aa, Homo sapiens
  Payload ID: 15076
  Gene Symbol:
  Gene Name: RP11-520P18.5
  ENSP ID: ENSP00000455811
MERLVLTLCTLPLAVASAGCATTPARNLSCYQCFKVSSWTECPPTWCSPLDQVCISNEVVVSFKWSVRVLLSKRCAPRCPNDNMKFEWSPAPMVQGVITRRCCSWALCNRALTPQEGRWALRGGLLLQVGLSLLRALL

SEQ ID NO: 75868 - protein, 138 aa, Homo sapiens; identical to SEQ ID NO: 75867
  Payload ID: 15076
  Gene Symbol:
  Gene Name: RP11-520P18.5
  ENSP ID: ENSP00000487842

SEQ ID NO: 75869 - protein, 479 aa, Homo sapiens
  Payload ID: 15077
  Gene Symbol:
  Gene Name: RP11-529K1.3
  ENSP ID: ENSP00000399208
MATDSWALAVDEQEAAAESLSNLHLKEEKIKPDTNGAVVKTNANAEKTDEEEKEDRAAQSLLNKLIRSNLVDNTNQVEVLQRDPNSPLYSVKSFEELRLKPQLLQGVYAMGFNRPSKIQENALPMMLAEPPQNLIAQSQSGTGKTAAFVLAMLSRVEPSDRYPQCLCLSPTYELALQTGKVIEQMGKFYPELKLAYAVRGNKLERGQKISEQIVIGTPGTVLDWCSKLKFIDPKKIKVFVLDEADVMIATQGHQDQSIRIQRMLPRNCQMLLFSATFEDSVWKFAQKVVPDPNVIKLKREEETLDTIKQYYVLCSSRDEKFQALCNLYGAITIAQAMIFCHTRKTASWLAAELSKEGHQVALLSGEMMVEQRAAVIERFREGKEKVLVTTNVCARGIDVEQVSVVINFDLPVDKDGNPDNETYLHRIGRTGRFGKRGLAVNMVDSKHSMNILNRIQEHFNKKIERLDTDDLDEIEKIAN

SEQ ID NO: 75870 - protein, 261 aa, Homo sapiens
  Payload ID: 15077
  Gene Symbol:
  Gene Name: RP11-529K1.3
  ENSP ID: ENSP00000454699
MATDSWALAVDEQEAAAESLSNLHLKEEKIKPDTNGAVVKTNANAEKTDEEEKEDRAAQSLLNKLIRSNLVDNTNQVEVLQRDPNSPLYSVKSFEELRLKPQLLQGVYAMGFNRPSKIQENALPLMLAEPPQNLIAQSQSGTGKTAAFVLAMLSQVEPANKYPQCLCLSPTYELALQTGKVIEQMGKFYPELKLAYAVRGNKLERGQKISEQIVIGTPGTVLDWCSKLKFIDPKKIKVFVLDEADVMIATQGHQDQSIRIQ

SEQ ID NO: 75871 - protein, 30 aa, Homo sapiens; identical to SEQ ID NO: 22815
  Payload ID: 15077
  Gene Symbol:
  Gene Name: RP11-529K1.3
  ENSP ID: ENSP00000455483

SEQ ID NO: 75872 - protein, 233 aa, Homo sapiens
  Payload ID: 15078
  Gene Symbol:
  Gene Name: RP11-540D14.8
  ENSP ID: ENSP00000426741
MRLLPLLRTVLWAAFLGSPLRGGSSLRHVVYWNSSNPSLRREGYTVQVNVNDYLDIYCPHYNSSGVGPGAGPGPGGGAEQYVLYMVSRNGYRTCNASQGFKRWECNRPHAPHSPIKFSEKFQRYSAFSLGYEFHAGHEYYYISTPTHNLHWKCLRMKVFVCCASTSHSGEKPVPTLPQFTMGPNVKINVLEDFEGENPQVPKLEKSISGTSPKREHLPLAVGIAFFLMTFLAS

SEQ ID NO: 75873 - protein, 331 aa, Homo sapiens
  Payload ID: 15079
  Gene Symbol:
  Gene Name: RP11-542C16.2
  ENSP ID: ENSP00000468744
  MOD_RES (1)..(1): Any amino acid
XGVFHNGLKICEKFGPNLDTCPEGTILGLRLDSSGGLHLHVNGVDQGVAVPDVPQPCHALVDLYGQCEQVTIVNPEPGAASGKSAGTQGDMEKADMVDGIKESVCWGPPPAASPLKSCEYHALCSRFQELLLLPEDYFMPPPKRSLCYCESCRKLRGDEAHRRRGEPPREYALPFGWCRFNLRVNPRLEAGTLTKKWHMAYHGSNVAAVRRVLDRGELGAGTASILSCRPLKGEPGVGFEEPGENCAPPREEQPPPVLLSPSLQYAGAETLASKVQFRDPKSQRTHQAQVAFQEPINTVSEPPPRPLSRAPLSGARVPWGATRWAREIKES

SEQ ID NO: 75874 - protein, 405 aa, Homo sapiens
  Payload ID: 15079
  Gene Symbol:
  Gene Name: RP11-542C16.2
  ENSP ID: ENSP00000468772
  MOD_RES (1)..(1): Any amino acid
XSLVLGVITCAPERLNFPASACALKRAAWLLRGRGVFHNGLKICEKFGPNLDTCPEGTILGLRLDSSGGLHLHVNGVDQGVAVPDVPQPCHALVDLYGQCEQVTIVNPEPGAASGKSAGTQGDMEKADMVDGIKESVCWGPPPAASPLKSCEYHALCSRFQELLLLPEDYFMPPPKRSLCYCESCRKLRGDEAHRRRGEPPREYALPFGWCRFNLRVNPRLEAGTLTKKWHMAYHGSNVAAVRRVLDRGELGAGTASILSCRPLKGEPGVGFEEPGENCAPPREEQPPPVLLSPSLQYAGAETLASKVQFRDPKSQRTHQAQVAFQRSLSLCPHEAAFSGATGREWGRVGARKMGASVQLLLTLISKEPINTVSEPPPRPLSRAPLSGARVPWGATRWAREIKES

SEQ ID NO: 75875 - protein, 61 aa, Homo sapiens
  Payload ID: 15080
  Gene Symbol:
  Gene Name: RP11-544M22.13
  ENSP ID: ENSP00000289779
MAGDGVSLLMPSRLECNGAISAHCNLLLPEVLLSPLAPTENPASQEVATSGTPTNQGAVTC

SEQ ID NO: 75876 - protein, 35 aa, Homo sapiens
  Payload ID: 15080
  Gene Symbol:
  Gene Name: RP11-544M22.13
  ENSP ID: ENSP00000473373
MAGEVLLSPLAPTENPASQEVATSGTPTNQGAVTC

SEQ ID NO: 75877 - protein, 687 aa, Homo sapiens
  Payload ID: 15081
  Gene Symbol:
  Gene Name: RP11-545J16.1
  ENSP ID: ENSP00000370952
MDQHQHLNKTAESASSEKKKTRRCNGFKMFLAALSFSYIAKALGGIIMKISITQIERRFDISSSLAGLIDGSFEIGNLLVIVFVSYFGSKLHRPKLIGIGCLLMGTGSILTSLPHFFMGYYRYSKETNIDPSENSTSNLPNCLINQMLSLNRTPSEIIERGCVKESGSHMWIYVFMGNMLRGIGETPIVPLGISYIDDFAKEGHSSLYLGTVNVMGMTGLVFAFMLGSLFAKMYVDIGYVDLSTIRITPKDSRWVGAWWLGFLVSGIVSIISSIPFFFLPLNPNKPQKERKVSLFLHVLKTNDKRNQIANLTNRRKYITKNVTGFFQSLKSILTNPLYVIFVIFTLLHMSSYIASLTYIIKMVEQQYGWSASKTNFLLGVLALPAVAIGMFSGGYIIKKFKLSLVGLAKLAFCSATVHLLSQVLYFFLICESKSVAGLTLTYDGNSPVRSHVDVPLSYCNSECNCDESQWEPVCGNNGITYLSPCLAGCKSSSGNKEPIVFYNCSCVEVIGLQNKNYSAHLGECPRDDACTRKSYVYFVIQVLDAFLCAVGLTSYSVLVIRIVQPELKALAIGFHSMIMRSLGGILVPIYFGALIDTTCMKWSTNSCGARGACRIYNSTYLGRAFFGLKVALIFPVLVLLTVFIFVVRKKSHGKDTKVLENERQVMDEANLEFLNDSEHFVPSAEEQ

SEQ ID NO: 75878 - protein, 748 aa, Homo sapiens
  Payload ID: 15081
  Gene Symbol:
  Gene Name: RP11-545J16.1
  ENSP ID: ENSP00000441269
MDQHQHLNKTAESASSEKKKTRRCNGFKMFLAALSFSYIAKALGGIIMKISITQIERRFDISSSLAGLIDGSFEIGNLLVIVFVSYFGSKLHRPKLIGIGCLLMGTGSILTSLPHFFMGYYRYSKETHINPSENSTSSLSTCLINQTLSFNGTSPEIVEKDCVKESGSHMWIYVFMGNMLRGIGETPIVPLGISYIDDFAKEGHSSLYLGSLNAIGMIGPVIGFALGSLFAKMYVDIGYVDLSTIRITPKDSRWVGAWWLGFLVSGLFSIISSIPFFFLPKNPNKPQKERKISLSLHVLKTNDDRNQTANLTNQGKNVTKNVTGFFQSLKSILTNPLYVIFLLLTLLQVSSFIGSFTYVFKYMEQQYGQSASHANFLLGIITIPTVATGMFLGGFIIKKFKLSLVGIAKFSFLTSMISFLFQLLYFPLICESKSVAGLTLTYDGNNSVASHVDVPLSYCNSECNCDESQWEPVCGNNGITYLSPCLAGCKSSSGIKKHTVFYNCSCVEVTGLQNRNYSAHLGECPRDNTCTRKFFIYVAIQVINSLFSATGGTTFILLTVKIVQPELKALAMGFQSMVIRTLGGILAPIYFGALIDKTCMKWSTNSCGAQGACRIYNSVFFGIVQPELKALAIGFHSMIMRSLGGILVPIYFGALIDTTCMKWSTNSCGARGACRIYNSTYLGRAFFGLKVALIFPVLVLLTVFIFVVRKKSHGKDTKVLENERQVMDEANLEFLNDSEHFVPSAEEQ

SEQ ID NO: 75879 - protein, 91 aa, Homo sapiens
  Payload ID: 15082
  Gene Symbol:
  Gene Name: RP11-546B8.6
  ENSP ID: ENSP00000477989
MTPTRVGRIRPRPGFGRGLAATLETLPGSGQADRGVTRRCPRVPAAAGLGTRGRPVGSGDLTLVIRCRMEGGCGRAWEPARGSAGLGTSGS

SEQ ID NO: 75880 - protein, 449 aa, Homo sapiens
  Payload ID: 15083
  Gene Symbol:
  Gene Name: RP11-548K23.11
  ENSP ID: ENSP00000359683
MLGPQVWSSVRQGLSRSLSRNVGVWASGEGKKVDIAGIYPPVTTPFTATAEVDYGKLEENLHKLGTFPFRGAVGGVCALANVLGAQVCQLERLCCTGQWEDAQKLQHRLIEPNAARIIAVFKPKNEEPYGHLNPKWTKWLQKLCCPCCFGRDCLVLNQGYLSEAGASLVDQKLELNIVPRTKVVYLASETFNYSAIDRVKSRGKRLALEKVPKVGQRFNRIGLPPKVGSFQLFVEGYKDADYWLRRFEAEPLPENTNRQLLLQFERLVVLDYIIRNTDRGNDNWLIKYDCPMDSSSSRDTDWVVVKEPVIKVAAIDNGLAFPLKHPDSWRAYPFYWAWLPQAKVPFSQEIKDLILPKISDPNFVKDLEEDLYELFKKDPGFDRGQFHKQIAVMRGQILNLTQALKDNKSPLHLVQMPPVIVETARSHQRSSSESYTQSFQSRKPFFSWW

SEQ ID NO: 75881 - protein, 75 aa, Homo sapiens
  Payload ID: 15084
  Gene Symbol:
  Gene Name: RP11-552F3.12
  ENSP ID: ENSP00000464919
KMFPVICWTSPKEQADVLIKRSAYKIGQDQAPLATCLSPPAPAVCGGTWQLDHSQEKGTISPASNMQKLRPGEIK

SEQ ID NO: 75882 - protein, 123 aa, Homo sapiens
  Payload ID: 15084
  Gene Symbol:
  Gene Name: RP11-552F3.12
  ENSP ID: ENSP00000467180
QGPAASSQSALMPPAPTTRWCSQPPTGLDPSPLHLHARLALLRHMAEQKMFPVICWTSPKEQADVLIKRSAYKIGQDQAPLATCLSPPAPAVCGGTWQLDHSQEKGTISPASNMQKLRPGEIK

SEQ ID NO: 75883 - protein, 583 aa, Homo sapiens; identical to SEQ ID NO: 43356
  Payload ID: 15085
  Gene Symbol:
  Gene Name: RP11-561B11.2
  ENSP ID: ENSP00000454657

SEQ ID NO: 75884 - protein, 51 aa, Homo sapiens
  Payload ID: 15086
  Gene Symbol:
  Gene Name: RP11-565P22.6
  ENSP ID: ENSP00000356909
KFRESGIASEYESNTDESEERDSWSQEELPRLLNVLQRQELGDGLDDEIAV

SEQ ID NO: 75885 - protein, 150 aa, Homo sapiens
  Payload ID: 15086
  Gene Symbol:
  Gene Name: RP11-565P22.6
  ENSP ID: ENSP00000405676
MLQHISLLVKQVQELELKLSGQNAMGSQDSLLEITFRSGALPVLCDPTTPKPEDLHSPPLGAGLADFAHPAGSPLVDHGMFENLNTALTPKLQASRSFPHLSKPVAPGSAPLGSGEPGGPGLWVGSSQHLKNLGKAMGAKVNDFLRRKEP

SEQ ID NO: 75886 - protein, 797 aa, Homo sapiens
  Payload ID: 15087
  Gene Symbol:
  Gene Name: RP11-566K11.2
  ENSP ID: ENSP00000451560
MAVQGSQRRLLGSLNSTPTAIPQLGLAANQTGARCLEVSISDGLFLSLGLVSLVENALVVATIAKNRNLHSPMYCFICCLALSDLLVSGSNVLETAVILLLEAGALVARAAVLQQLDNVIDVITCSSMLSSLCFLGAIAVDRYISIFYALRYHSIVTLPRARRAVAAIWVASVVFSTLFIAYYDHVAVLLCLVVFFLAMLVLMAVLYVHMLARACQHAQGIARLHKRQRPVHQGFGLKGAVTLTILLGIFFLCWGPFFLHLTLIVLCPEHPTCGCIFKNFNLFLALIICNAIIDPLIYAFHSQELRRTLKEVLTCSCSQDRALVSWDVKSLGGSVCQELLPQQPQEKGLCDQKASSTALQRLLQKEFWEVISDEHGIDPSGNYVGDSDLQLERISVYYNEASSHKYVPRAILVDLEPGTMDSVRSGAFGHLFRPDNFIFGQSGAGNNWAKGHYTEGAELVDSVLDVVRKECENCDCLQGFQLTHSLGGGTGSGMGTLLISKVREEYPDRIMNTFSVVPSPKVSDTVVEPYNATLSIHQLVENTDETYCIDNEALYDICFRTLKLATPTYGDLNHLVSATMSGVTTSLRFPGQLNADLRKLAVNMVPFPRLHFFMPGFAPLTARGSQQYRALTVPELTQQMFDAKNMMAACDPRHGRYLTVATVFRGRMSMKEVDEQMLAIQSKNSSYFVEWIPNNVKVAVCDIPPRGLKMSSTFIGNSTAIQELFKRISEQFTAMFRRKAFLHWYTGEGMDEMEFTEAESNMNDLVSEYQQYQDATAEEEGEMYEDDEEESEAQGPK

SEQ ID NO: 75887 - protein, 161 aa, Homo sapiens
  Payload ID: 15088
  Gene Symbol:
  Gene Name: RP11-571M6.15
  ENSP ID: ENSP00000449309
  MOD_RES (1)..(1): Any amino acid
XCNYFESQNVDFRGKKVIELGAGTGIVGILAALQGWVSSASVAPAKAHILCWAPSVCLGLQQGAPHEAAAENRLLLCKLQESSGDLWRGPQTDGVLLCGPGRRAMSCVVFACTVMRLLIGRYILRNGVVRRFWLMHIIEYLHKPRWYIVLQPGLYGIASCS

SEQ ID NO: 75888 - protein, 124 aa, Homo sapiens
  Payload ID: 15088
  Gene Symbol:
  Gene Name: RP11-571M6.15
  ENSP ID: ENSP00000449544
VDFRGKKVIELGAGTGIVGILAALQGWVSSASVAPAKAHILCWAPSVCLGLQQGAPHEAAAENRLLLCKLQESSGDLWRGPQTDGVLLCGPGRRAMAEIWLHKEAQKEGWSKAAKLQGRKTKEG

SEQ ID NO: 75889 - protein, 304 aa, Homo sapiens
  Payload ID: 15089
  Gene Symbol:
  Gene Name: RP11-574F21.3
  ENSP ID: ENSP00000450870
ETLSGLAKNATDLQNSSMSEEELTKAMEGLGMDEGDGEGNILPIMQSIMQNLLSKDVLYPSLKEITEKYPEWLQSHRESLPPEQFEKYQEQHSVMCKICEQFEAETPTDSETTQKARFEMVLDLMQQLQDLGHPPKELAGEMLTWLFFCGSQWVYGPWLTYVETGFTMLAWFQTSFELLTSSDPPTSASQSARITGMSHRARPDLTFLKSTLAALCLTVMAIMEVDKRGSLSSSPEEMSGAEEGRETSSGIEVEASDLSLSLTGDDGGPNRTSTESRGTDTESSGEDKDSDSMEDTGHYSINDE

SEQ ID NO: 75890 - protein, 751 aa, Homo sapiens
  Payload ID: 15089
  Gene Symbol:
  Gene Name: RP11-574F21.3
  ENSP ID: ENSP00000451235
MSEEELTKAMEGLGMDEGDGEGNILPIMQSIMQNLLSKDVLYPSLKEITEKYPEWLQSHRESLPPEQFEKYQEQHSVMCKICEQFEAETPTDSETTQKARFEMVLDLMQQLQDLGHPPKELAGEMLTWLFFCGSQWVYGPWLTYVGWLQQTSFKMSSKGSSTDGRTDLANGSLSSSPEEMSGAEEGRETSSGIEVEASDLSLSLTGDDGGPNRTSTESRGTDTESSGEDKDSDSMEDTGHYSINDENRVHDRSEEEEEEEEEEEEEQPRRRVQRKRANRDQDSSDDERALEDWVSSETSALPRPRWQALPALRERELGSSARFVYEACGARVFVQRFRLQHGLEGHTGCVNTLHFNQRGTWLASGSDDLKVVVWDWVRRQPVLDFESGHKSNVFQAKFLPNSGDSTLAMCARDGQVRVAELSATQCCKNTKRVAQHKGASHKLALEPDSPCTFLSAGEDAVVFTIDLRQDRPASKLVVTKEKEKKVGLYTIYVNPANTHQFAVGGRDQFVRIYDQRKIDENENNGVLKKFCPHHLVNSESKANITCLVYSHDGTELLASYNDEDIYLFNSSHSDGAQYVKRYKGHRNNATVKGVNFYGPKSEFVVSGSDCGHIFLWEKSSCQIIQFMEGDKGGVVNCLEPHPHLPVLATSGLDHDVKIWAPTAEASTELTGLKDVIKKNKRERDEDSLHQTDLFDSHMLWFLMHHLRQRRHHRRWREPGVGATDADSDESPSSSDTSDEEEGPDRVQCMPS

SEQ ID NO: 75891 - protein, 815 aa, Homo sapiens
  Payload ID: 15090
  Gene Symbol:
  Gene Name: RP11-574K11.31
  ENSP ID: ENSP00000475031
MLQLWKVVRPARQLELHRLILLLIAFSLGSMGFLAYYVSTSPKAKEPLPLPLGDCSSGGAAGPGPARPPVPPRPPRPPETARTEPVVLVFVESAYSQLGQEIVAILESSRFRYSTELAPGRGDMPTLTDNTHGRYVLVIYENLLKYVNLDAWSRELLDRYCVEYGVGIIGFFRAHEHSLLSAQLKGFPLFLHSNLGLRDYQVNPSAPLLHLTRPSRLEPGPLPGDDWTIFQSNHSTYEPVLLASLRPAEPAVPGPVLRRARLPTVVQDLGLHDGIQRVLFGHGLSFWLHKLIFVDAVAYLTGKRLCLDLDRYILVDIDDIFVGKEGTRMKVADVEALLTTQNKLRTLVPNFTFNLGFSGKFYHTGTEEEDAGDDMLLKHRKEFWWFPHMWSHMQPHLFHNRSVLADQMRLNKQFALEHGIPTDLGYAVAPHHSGVYPIHTQLYEAWKSVWGIQVTSTEEYPHLRPARYRRGFIHNGIMVLPRQTCGLFTHTIFYNEYPGGSRELDRSIRGGELFLTVLLNPISIFMTHLSNYGNDRLGLYTFESLVRFLQCWTRLRLQTLPPVPLAQKYFELFPQERSPLWQNPCDDKRHKDIWSKEKTCDRLPKFLIVGPQKTGTTAIHFFLSLHPAVTSSFPSPSTFEEIQFFNSPNYHKGIDWYMDFFPVPSNASTDFLFEKSATYFDSEVVPRRGAALLPRAKIITVLTNPADRAYSWYQHQRAHGDPVALNYTFYQVISASSQTPLALRSLQNRCLVPGYYSTHLQRWLTYYPSGQLLIVDGQELRTNPAASMESIQKFLGLMMIRDFGARDLKVVRLAV

SEQ ID NO: 75892 - protein, 43 aa, Homo sapiens
  Payload ID: 15090
  Gene Symbol:
  Gene Name: RP11-574K11.31
  ENSP ID: ENSP00000476336
  MOD_RES (1)..(1): Any amino acid
XIVDGQELRTNPAASMESIQKFLGLMMIRDFGARDLKVVRLAV

SEQ ID NO: 75893 - protein, 53 aa, Homo sapiens
  Payload ID: 15091
  Gene Symbol:
  Gene Name: RP11-58C22.1
  ENSP ID: ENSP00000455258
VTGHVTESSCMAQPGTDATSRERTHSFADHSGTIDDREPLANAIKSDSAVIGG

SEQ ID NO: 75894 - protein, 32 aa, Homo sapiens
  Payload ID: 15092
  Gene Symbol:
  Gene Name: RP11-598P20.5
  ENSP ID: ENSP00000435061
  MOD_RES (1)..(1): Any amino acid
XWRGRGKRPAAEDHTQATCSRPQQGTEQNGLI

SEQ ID NO: 75895 - protein, 121 aa, Homo sapiens
  Payload ID: 15093
  Gene Symbol:
  Gene Name: RP11-599B13.6
  ENSP ID: ENSP00000464383
MSATAATAPPAAPAGEGGPPAPPPNLTSNRRLQQTQAQVDEVVDIMRVNVDKVLERDQKLSELDDRADALQAGASQFETSAAKLKRKYWWKNLKMMIILGVICAIILIIIIGTGCDRTSQP

SEQ ID NO: 75896 - protein, 145 aa, Homo sapiens
  Payload ID: 15094
  Gene Symbol:
  Gene Name: RP11-5A19.5
  ENSP ID: ENSP00000464271
  MOD_RES (1)..(1): Any amino acid
XDARASPLPNEAWVALRRRHPGLAVELELEPALPAESVTRVLQPAVPVAALRLNLSGDTVGPVRFAAHHYAATLCALEVRAAASAELNAALEELAARCAALREVHCFCVVSHSVLDAFRAHCPRLRTYTLKLTREPHPWRPTLVA

SEQ ID NO: 75897 - protein, 37 aa, Homo sapiens
  Payload ID: 15094
  Gene Symbol:
  Gene Name: RP11-5A19.5
  ENSP ID: ENSP00000476527
  MOD_RES (1)..(1): Any amino acid
XVSHSVLDAFRAHCPRLRTYTLKLTREPHPWRPTLVA

SEQ ID NO: 75898 - protein, 45 aa, Homo sapiens
  Payload ID: 15094
  Gene Symbol:
  Gene Name: RP11-5A19.5
  ENSP ID: ENSP00000476658
  MOD_RES (1)..(1): Any amino acid
XREVHCFCVVSHSVLDAFRAHCPRLRTYTLKLTREPHPWRPTLVA

SEQ ID NO: 75899 - protein, 160 aa, Homo sapiens
  Payload ID: 15095
  Gene Symbol:
  Gene Name: RP11-603J24.9
  ENSP ID: ENSP00000449770
MPDTHLKGVLRSLVEASSSGVSVLSLCEKGDAMIMEETGKIFKKEKEMKKGIAFPTSISVNNCVCHFSPLKSDQDYILKEGDLVKIDLGVHVDGFIANVAHTFVVDVAQGTQVTGRKADVIKAAHLCAEAALRLVKPGNQNTQVTEAWNKVAHSFNCTPI

SEQ ID NO: 75900 - protein, 64 aa, Homo sapiens
  Payload ID: 15096
  Gene Symbol:
  Gene Name: RP11-613M10.8
  ENSP ID: ENSP00000457849
EDVISSIRNFLIYVALLRVSECLPGCDCETSGELTDGHPLTLRGHRGLRTELNAPFILKKLDSI

SEQ ID NO: 75901 - protein, 297 aa, Homo sapiens
  Payload ID: 15097
  Gene Symbol:
  Gene Name: RP11-613M10.9
  ENSP ID: ENSP00000457548
MAKWLNKYFSLGNSKTKSPPQPPRPDYREQRRRGERPSQPPQAVPQASSAASASCGPATASCFSASSGSLPDDSGSTSDLIRAYRAQKERDFEDPYNGPGSSLRKLRAMCRLDYCGGSGEPGGVQRAFSASSASGAAGCCCASSGAGAAASSSSSSGSPHLYRSSSERRPATPAEVRYISPKHRLIKVESAAGGGAGDPLGGACAGGRTWSPTACGGKKLLNKCAASAAEESGAGKKDKVTIADDYSDPFDAKNDLKSKAGKGESAGYMEPYEAQRIMTGLQEAWRHSPSGCFPVGP

SEQ ID NO: 75902 - protein, 209 aa, Homo sapiens
  Payload ID: 15098
  Gene Symbol:
  Gene Name: RP11-618P17.4
  ENSP ID: ENSP00000468690
  MOD_RES (1)..(1): Any amino acid
XNGKYITKSGTRVDHQTGPIVWGEPGTNGQHAFYQLIHQGTKMIPCDFLIPVQTQHPIRKGLHHKDALPTVAAPRPVCQRCGQPLALVVQVYCPLEGSPFHRLLHVFACACPGCSTGGARSWKVFRSQCLQVPEREAQDAQKQGNSLAAEDWCEGADDWGSDTEEGPSPQFTLDFGNDASSAKDVDWTARLQDLRLQDAVLGAAHPVPP

SEQ ID NO: 75903 - protein, 132 aa, Homo sapiens
  Payload ID: 15098
  Gene Symbol:
  Gene Name: RP11-618P17.4
  ENSP ID: ENSP00000475682
MVLKTALRLCLFRVNSWTRPRMTAISWQDAQDALPTVAAPRPVCQRCGQPLALVVQVYCPLEGSPFHRLLHVFACACPGCSTGGARSWKVFRSQCLQVPEREAQDAQKQGNSLAAEDWCEGADDWGSDTEEG

SEQ ID NO: 75904 - protein, 88 aa, Homo sapiens
  Payload ID: 15099
  Gene Symbol:
  Gene Name: RP11-619A10.1
  ENSP ID: ENSP00000478090
MGNIFEKLFKSLLGKKKMRILILSLDTAGKTTILYKLKLGETVPAVPTVGFCVETVEYKNNTFGVWDVGSHFKIRPLWQHFFQNTKGS

SEQ ID NO: 75905 - protein, 177 aa, Homo sapiens
  Payload ID: 15099
  Gene Symbol:
  Gene Name: RP11-619A10.1
  ENSP ID: ENSP00000479272
MGNIFEKLFKSLLGKKKMRILILSLDTAGKTTILYKLKLGETVPAVPTVGFCVETVEYKNNTFGVWDVGSHFKIRPLWQHFFQNTKGARSPGSTHQGSLASGVLPIKCSHVEFGMWKGGRSHPFLPHSSRCAGSGGQLDSILPHQSPAWGPWGCKDLSSGFPSFLTSSILWKSAVVK

SEQ ID NO: 75906 - protein, 87 aa, Homo sapiens
  Payload ID: 15099
  Gene Symbol:
  Gene Name: RP11-619A10.1
  ENSP ID: ENSP00000480600
MGNIFEKLFKSLLGKKKMRILILSLDTAGKTTILYKLKLGETVPAVPTVGFCVETVEYKNNTFGVWDVGSHFKIRPLWQHFFQNTKA

SEQ ID NO: 75907 - protein, 125 aa, Homo sapiens
  Payload ID: 15099
  Gene Symbol:
  Gene Name: RP11-619A10.1
  ENSP ID: ENSP00000482014
MGNIFEKLFKSLLGKKKMRILILSLDTAGKTTILYKLKLGETVPAVPTVGFCVETVEYKNNTFGVWDVGSHFKIRPLWQHFFQNTKELSASQFAQFIKKLCGVTGTNDEASPGSLTSYPSHLLDR

SEQ ID NO: 75908 - protein, 95 aa, Homo sapiens
  Payload ID: 15099
  Gene Symbol:
  Gene Name: RP11-619A10.1
  ENSP ID: ENSP00000486600
MGNIFEKLFKSLLGKKKMRILILSLDTAGKTTILYKLKLGETVPAVPTVGFCVETVEYKNNTFGVWDVGSHFKIRPLWQHFFQNTKAAHSQSLTS

SEQ ID NO: 75909 - protein, 42 aa, Homo sapiens
  Payload ID: 15100
  Gene Symbol:
  Gene Name: RP11-637O19.3
  ENSP ID: ENSP00000417929
MEKPLFPLVPLHWFGFGYTALVVSGGIVGYVKTEKQRCFAAY

SEQ ID NO: 75910 - protein, 114 aa, Homo sapiens
  Payload ID: 15101
  Gene Symbol:
  Gene Name: RP11-644F5.10
  ENSP ID: ENSP00000257899
  MOD_RES (1)..(1): Any amino acid
XSSFRSRRGPGVPSPQPDVTMLSRLLKEHQAKQNERKELQEKRRREAITAATCLTEALVDHLNVGVAQAYMNQRKLDHEVKTLQVQAAQFAKQTGQWIGMVENFNQALKGFLVW

SEQ ID NO: 75911 - protein, 44 aa, Homo sapiens
  Payload ID: 15101
  Gene Symbol:
  Gene Name: RP11-644F5.10
  ENSP ID: ENSP00000447621
MNQRKLDHEVKTLQVQAAQFAKQTGQWIGMVENFNQALKGFLVW

SEQ ID NO: 75912 - protein, 122 aa, Homo sapiens
  Payload ID: 15101
  Gene Symbol:
  Gene Name: RP11-644F5.10
  ENSP ID: ENSP00000447650
MAPGSRGERSSFRSRRGPGVPSPQPDVTMLSRLLKEHQAKQNERKELQEKRRREAITAATCLTEALVDHLNVGVAQAYMNQRKLDHEVKTLQVQAAQFAKQTGQWIGMVENFNQALKGFLVW

SEQ ID NO: 75913 - protein, 54 aa, Homo sapiens
  Payload ID: 15101
  Gene Symbol:
  Gene Name: RP11-644F5.10
  ENSP ID: ENSP00000450201
MAPGSRGERSSFRSRRGPGVPSPQPDVTMLSRLLKEHQAKQNERKELQVWPRPT

SEQ ID NO: 75914 - protein, 157 aa, Homo sapiens
  Payload ID: 15102
  Gene Symbol:
  Gene Name: RP11-65B7.2
  ENSP ID: ENSP00000486083
  MOD_RES (1)..(1): Any amino acid
XGRKEPDSYDGITTNQRGVTIAALGADCIPIVFADPVKKACGVAHAGWKGTLLGVAMATVNAMIAEYGCSLEDIVVVLGPSVGPCCFTLPRESAEAFHNLHPACVQLFDSPNPCIDIRKATRYIFPGTFSCQHPYFFSYCFGYWENKLLLSFEKYFS

SEQ ID NO: 75915 - protein, 18 aa, Homo sapiens
  Payload ID: 15103
  Gene Symbol:
  Gene Name: RP11-691N7.6
  ENSP ID: ENSP00000457993
  MOD_RES (1)..(1): Any amino acid
XKFPEPQEVVEELKKYLS

SEQ ID NO: 75916 - protein, 104 aa, Homo sapiens
  Payload ID: 15104
  Gene Symbol:
  Gene Name: RP11-697E2.12
  ENSP ID: ENSP00000479373
  MOD_RES (1)..(1): Any amino acid
XFQKIRRQMEAPGAPPRTLTWEAMEQIRWHFSTPLEPVPRRSKGCAASPWLTQWPRPRRSQKQQPQPQGLGESTSPHMGARGQCQRCGTGRRRRSSGWPRTGRR

SEQ ID NO: 75917 - protein, 217 aa, Homo sapiens
  Payload ID: 15105
  Gene Symbol:
  Gene Name: RP11-697E2.6
  ENSP ID: ENSP00000456615
MEPSTCRTMESEEDYVEEKESEKCVKEGVTNPSNSSQQALLKADYKALKNGVPSPIMATKIPKKVIAPVDTGDLEAGRRKRRRKRRSLAINLTNCKYESVRRAAQMCGLKEVGEDEEWTLYWTDCAVSLERVMDMKRFQPLLIDGFKFDMRVYVLITSCDPLRIFTYEEGLARFATTPYMEPSHNNLDNVCMHLTNYAINKHNENFVRDGAVGSKSI

SEQ ID NO: 75918 - protein, 385 aa, Homo sapiens
  Payload ID: 15106
  Gene Symbol:
  Gene Name: RP11-717K11.2
  ENSP ID: ENSP00000423373
MNAFLDDPEFADIMLRAEQAIEVGIFPERISQGSSGSYFVKDPKRKIIGVFKPKSEEPYGQLNPKWTKYVHKVCCPCCFGRGCLIPNQGYLSEAGAYLVDNKLHLSIVPKTKVVWLVSETFNYNAIDRAKSRGKKYALEKVPKVGRKFHRIGLPPKIGSFQLFVEGYKEAEYWLRKFEADPLPENIRKQFQSQFERLVILDYIIRNTDRGNDNWLVRYEKQKCEKEIDHKESKWIDDEEFLIKIAAIDNGLAFPFKHPDEWRAYPFHWAWLPQAKVPFSEEIRNLILPYISDMNFVQDLCEDLYELFKTDKGFDKATFESQMSVMRGQILNLTQALRDGKSPFQLVQIPCVIVERSQGGSQGRIVHLSNSFTQTVNCRKPFFSSW

SEQ ID NO: 75919 - protein, 45 aa, Homo sapiens
  Payload ID: 15107
  Gene Symbol:
  Gene Name: RP11-722G7.1
  ENSP ID: ENSP00000472749
MSDKPDLSEVEKFDRSKLKKTNTEEKNTLPSKETIQQEKECVQTS

SEQ ID NO: 75920 - protein, 80 aa, Homo sapiens
  Payload ID: 15107
  Gene Symbol:
  Gene Name: RP11-722G7.1
  ENSP ID: ENSP00000484052
MSDKPDLSEVEKFDRSKLKKTNTEEKNTLPSKEKGVSLCRQAGVQRHDFGSLQTSLPEFKQFSCLSLPSSWDLRHITKPG

SEQ ID NO: 75921 - protein, 544 aa, Homo sapiens
  Payload ID: 15108
  Gene Symbol:
  Gene Name: RP11-724O16.1
  ENSP ID: ENSP00000424363
MSVLDALWEDRDVRFDLSAQQMKTRPGEVLIDCLDSIEDTKGNNGDRGRLLVTNLRILWHSLALSRVNVSVGYNCILNITTRTANSKLRGQTEALYILTKCNSTRFEFIFTNLVPGSPRLFTSVMAVHRAYETSKMYRDFKLRSALIQNKQLRLLPQEHVYDKINGVWNLSSDQGNLGTFFITNVRIVWHANMNDSFNVSIPYLQIRSIKIRDSKFGLALVIESSQQSGGYVLGFKIDPVEKLQESVKEINSLHKVYSASPIFGVDYEMEEKPQPLEALTVEQIQDDVEIDSDGHTDAFVAYFADGNKLDSIASEWVGLPPLPSARCLFGLGEVDDKIYVVAGKDLQTEASLDSVLCYDPVAAKWNEVKKLPIKVYGHNVISHKGMIYCLGGKTDDKKCTNRVFIFNPKKGDWKDLAPMKIPRSMFGVAVHKGKIVIAGGVTEDGLSASVEAFDLTTNKWDVMTEFPQERSSISLVSLAGSLYAIGGFAMIQLESKEFAPTEVNDIWKYEDDKKEWAGMLKEIRYASGASCLATRLNLFKLSKL

SEQ ID NO: 75922 - protein, 86 aa, Homo sapiens
  Payload ID: 15109
  Gene Symbol:
  Gene Name: RP11-729L2.2
  ENSP ID: ENSP00000465737
MSMDVTFLGTGAAYPSPTRGASAVVLRCEGECWLFDCGEGTQTQLMKSQLKAGYPEYMSNNFPCNVSCCFSLFPKDQNCFRNWRHI

SEQ ID NO: 75923 - protein, 108 aa, Homo sapiens
  Payload ID: 15110
  Gene Symbol:
  Gene Name: RP11-736N17.11
  ENSP ID: ENSP00000489570
MSTPRPAPPQPGAAEGAGGPEGKAVAGAWEKGPRLGQRLPSIVVEPSEADPVESGELRWPLESAQRGPSQSRAAAAPSPSLPGEPGKAADNAGSECACSEDPAAPARG

SEQ ID NO: 75924 - protein, 732 aa, Homo sapiens
  Payload ID: 15111
  Gene Symbol:
  Gene Name: RP11-73M18.2
  ENSP ID: ENSP00000439065
MLPCAAGARGRGAMVVLRAGKKTFLPPLCRAFACRGCQLAPERGAERRDTAPSGVSRFCPPRKSCHDWIGPPDKYSNLRPVHFYIPENESPLEQKLRKLRQETQEWNQQFWANQNLTFSKEKEEFIHSRLKTKGLGLRTESGQKATLNAEEMADFYKEFLSKNFQKHMYYNRMYDNMSTMVYIKEDKLEKLTQDEIISKTKQVIQGLEALKNEHNSILQSLLETLKCLKKDDESNLVEEKSNMIRKSLEMLELGLSEAQVMMALSNHLNAVESEKQKLRAQVRRLCQENQWLRDELANTQQKLQKSEQSVAQLEEEKKHLEFMNQLKKYDDDISPSEDKDTDSTKEPLDDLFPNDEDDPGQGIQQQHSSAAAAAQQGGYEIPARLRTLHNLVIQYASQGRYEVAVPLCKQALEDLEKTSGHDHPDVATMLNILALVYRDQNKYKDAANLLNDALAIREKTLGKDHPAVAATLNNLAVLYGKRGKYKEAEPLCKRALEIREKVLGKDHPDVAKQLNNLALLCQNQGKYEEVEYYYQRALEIYQTKLGPDDPNVAKTKNNLASCYLKQGKFKQAETLYKEILTRAHEREFGSVDDENKPIWMHAEEREECKGKQKDGTSFGEYGGWYKACKVDSPTVTTTLKNLGALYRRQGKFEAAETLEEAAMRSRKQGLDNVHKQRVAEVLNDPENMEKRRSRESLNVDVVKYESGPDGGEEVSMSVEWNGMRKMKLGLVN

SEQ ID NO: 75925 - protein, 168 aa, Homo sapiens
  Payload ID: 15112
  Gene Symbol:
  Gene Name: RP11-745O10.4
  ENSP ID: ENSP00000454670
MADPDPRYPRSSIEDDFNYGSSVASATVHIRMAFLRKVYSILSLQVLLTTVTSTVFLYFESVRTFVHESPALILLFALGSLGLIFALILNRHKYPLNLYLLFGFTLLEALTVAVVVTFYDVYIILQAFILTTTVFFGLTVYTLQSKKDFSKFGAGRCRSPSFLWIHHL

SEQ ID NO: 75926 - protein, 43 aa, Homo sapiens
  Payload ID: 15113
  Gene Symbol:
  Gene Name: RP11-761B3.1
  ENSP ID: ENSP00000476793
  MOD_RES (1)..(1): Any amino acid
XSEWRERAEWLCGRVSETGSACSMADQLTEEQIAETSPKDFLF

SEQ ID NO: 75927 - protein, 523 aa, Homo sapiens
  Payload ID: 15114
  Gene Symbol:
  Gene Name: RP11-762I7.5
  ENSP ID: ENSP00000447000
  MOD_RES (1)..(1): Any amino acid
XPALQRCLTLLRDSRPWQRLVRIVQWGWLELPWVKQNINRQGNAPVASGRYCQPEEEVARLLTMAGVPEDELNPFHVLGVEATASDVELKKAYRQLAVMVHPDKNHHPRAEEAFKVLRAAWDIVSNAEKRKEYEMKRMAENELSRSVNEFLSKLQDDLKEAMNTMMCSRCQGKHRRFEMDREPKSARYCAECNRLHPAEEGDFWAESSMLGLKITYFALMDGKVYDITEWAGCQRVGISPDTHRVPYHISFGSRIPGTRGRQRATPDAPPADLQDFLSRIFQVPPGQMPNGNFFAAPQPAPGAAAASKPNSTVPKGEAKPKRRKKLAELKQECLARGLETKGIKQDLIHRLQAYLEEHAEEEANEEDVLGDETEEEETKPIELPVKEEEPPEKTVDVAAEKKVVKITSEIPQTERMQKRAERFNVPVSLESKKAARAARFGISSVPTKGLSSDNKPMVNLDKLKERAQRFGLNVSSISRKSEDDEKLKKRKERFGIVTSSAGTGTTEDTEAKKRKRAERFGIA

SEQ ID NO: 75928 - protein, 111 aa, Homo sapiens
  Payload ID: 15114
  Gene Symbol:
  Gene Name: RP11-762I7.5
  ENSP ID: ENSP00000447077
EGDFWAESSMLGLKITYFALMDGKVYDITEWAGCQRVGISPDTHRVPYHISFGSRIPGTRGRQRATPDAPPADLQDFLSRIFQSLQLLPASSDPRPAMGAAPATTPEVSRK

SEQ ID NO: 75929 - protein, 172 aa, Homo sapiens
  Payload ID: 15114
  Gene Symbol:
  Gene Name: RP11-762I7.5
  ENSP ID: ENSP00000447649
  MOD_RES (1)..(1): Any amino acid
XLHPAEEGDFWAESSMLGLKITYFALMDGKVYDITEWAGCQRVGISPDTHRVPYHISFGSRIPGTRGRQRATPDAPPADLQDFLSRIFQVPPGQMPNGNFFAAPQPAPGAAAASKPNSTVPKGEAKPKRRKKSSVSVPSPCPWSCPKTHPSVFVDAKDTNPMELGQLRQQYT

SEQ ID NO: 75930 - protein, 121 aa, Homo sapiens
  Payload ID: 15114
  Gene Symbol:
  Gene Name: RP11-762I7.5
  ENSP ID: ENSP00000449809
AECNRLHPAEEGDFWAESSMLGLKITYFALMDGKVYDITEWAGCQRVGISPDTHRVPYHISFGSRIPGTRGRQRATPDAPPADLQDFLSRIFQSLQLLPASSDPRPAMGAAPATTPEVSRK

SEQ ID NO: 75931 - protein, 1793 aa, Homo sapiens
  Payload ID: 15115
  Gene Symbol:
  Gene Name: RP11-766F14.2
  ENSP ID: ENSP00000427555
MLSFHFWKSRGQPTDAASSVADGIQTPRCCRRCQANNWTGQLSYRTLATVSAGAAAPQPQTTSTASSRSLPTSLRLAAAPPQGLKNWEVVAAVAAVPTALGPVQIRGTLLRATLQPLRGQRRTQDFPSDHHCLFLSLKPGQGLIMEAAPPELNSKARQAEVGDGVSSAQDSQELKQQLWPLPKPSASSQREAKYVDMCASAEVQRESPQTMKLTLGHCPGGQRASRSPKEKAQDEPSSKTPSPQNNPASSQLSRSQHSASEEGGNFSSSSSSSPMNKAEEDGLSKMEDSTTSTGALATSSSSLGFESESGESEGCQAVGGEGEKISGGGGGGKGGGGGGAGDGTECRDIIAKSQGSRDPPKVEEAHYITTHEIQLSEVEQDMDFDVGLASRWDFEDNNVIYSFVDYASFGGSDETPGDITSLTEEDDDNSCYLSTTPSTNTTRTPSPTSSDLARPNAGRSGRDTSSTEVGSGPSDSGPTPPPTGPGTAPLTEPLPETPEAASGAAAAAASSCGSAASQILLSIKPASRAINEPSNVRAKQNIIYAAKHEGDMSLRVSTAAEHNSSSLKQNPAAAVAQDHAKKFIAVPARLQTRCGAIRAKELVDYSSGASSAVSELDDADKEVRNLTSRAFRSLAYPYFEALNISSRESSTTLSEVGFGRWSTFLDLKCGGVGARVEQSLLRSSAASVAAGLRKGSGARATADQLYIQSKKSQTKALEFVVSKVEGEIKHVETPLCFQKQVQTGSRVVTLLEPLNVRSESKASSAPGPGRATKGPGKGPGSAYTDDGSETSEGSKPTSRADGPQKSKFASSLLKNVISKKMQREHEFKMERGEVMDTSHHLSGTSKETEGARGSERQRERGLQRQSSRHSEAGSEYTVVSMSDAGGEGSVAGSKSPVFKASTPRERNAGPGRNFTDGHTEVCEIKKSASETVKGIFLRSQNSAFRSWKEKEAEKREEQAPIGKLKLPKGGDWRADLGEISASKNTIMSRLFVPNIQQTPKDKQPRKQATKYPAAQATSTAVIRPKAPEIKIRLGSVQQPSSDFNIAKLLTPKLAGGSASNLFKTIEDNSRAQQKLFRGDNLEKVPHFQVRDIRDKSKAQGPLHQVRDVRKLIKGSGDSSDKGSVTPEQGLTGPKPRQLSAAAGGSGSLSPMVITCQAVVNQREDSMDREPRESMGKGGGSRVLNSSSPEGTVLVHRASGRLPVATIAPNKPEQGSYLPVLKIVSKASTQKTPEKLKEEEVKEEGKATKPARNALEKLTAAVRSMEELYSFNRNEWKRKSDPLPMMMDSHVLSLIASEEREGVVVADGDHDKLSKRLGEVEERGTGNKAGVVLRGAPIERLQRRNSNPSAESVSARAAAFENLARERPRSLYIPPVHKDVERTQPLQPLPPLPSNRNVFTVSASSIQKTGGVAGKFPQGPSPESPSAAKGIKSQGLRSLKISPATRAPPDEVTNRKSGSNLEKSNSDCENYLTIPLKGSSAAGELLSRPGASREGPPNSSAATLCSLPPLSARSQVPSSSKGSQVSGTSRPAWRTKPDNPRETVAAPPGPQSPEHPPTTIYHQPPLPFTLQGAQPQVLCFSPPSMPAPAPAASAPVPTDPFQQAQPQQTQRKMLLDVTTGQYYLVDTPVQPMTRRLFDPETGQYVDVPMTSQQQAVAPMSISVPPLALSPGAYGPTYMIYPGFLPTVLPTNALQPTPIARAPRGSELSPMVAEPSSKEAAATFTEAPYFMASGQSPASSTSSAPAATSQLLGAKAFAQLHGKPVISITSQPLGPRIIAPPSFDGTTMSFVVEHR

SEQ ID NO: 75932 - protein, 141 aa, Homo sapiens
  Payload ID: 15116
  Gene Symbol:
  Gene Name: RP11-77K12.1
  ENSP ID: ENSP00000457654
MEREGSGGSGGSAGLLQQILSLKVVPRVGNGTLCPNSTSLCSFPEMWYGVFLWALVSSLFFHVPAGLLALFTLRHHKYGGEYSEDDVNELVKEDEVDGEEQTQKTQGKKRKAQSIPARKRRQGGLSLEEEEEEDANSESEG

SEQ ID NO: 75933 - protein, 84 aa, Homo sapiens
  Payload ID: 15116
  Gene Symbol:
  Gene Name: RP11-77K12.1
  ENSP ID: ENSP00000457824
QQILSLKVVPRVGNGTLCPNSTSLCSFPGGEYSEDDVNELVKEDEVDGEEQTQKTQGKKRKAQSIPARKRRQGGLSLEEEEEED

SEQ ID NO: 75934 - protein, 57 aa, Homo sapiens
  Payload ID: 15117
  Gene Symbol:
  Gene Name: RP11-77K12.7
  ENSP ID: ENSP00000457544
  MOD_RES (1)..(1): Any amino acid
XLYVNGDLRLQQKQPLSCGGLDARYNISVINGTSPFAYDYDLTHIVAAYQERNESSQ

SEQ ID NO: 75935 - protein, 463 aa, Homo sapiens
  Payload ID: 15118
  Gene Symbol:
  Gene Name: RP11-793H13.10
  ENSP ID: ENSP00000466174
MGDDRPFVCNAPGCGQRFTNEDHLAVHKHKHEMTLKFGPARTDSVIIADQTPTPTRFLKNCEEVGLFNELASSFEHEFKKAADEDEKKAAAGPLDMSLPSTPDIKIKEEEPVEVDSSPPDSPASSPCSPPLKEKEVTPKPVLISTPTPTIVRPGSLPLHLGYDPLHPTLPSPTSVITQAPPSNRQMGSPTGSLPLVMHLANGQTMPVLPGPPVQMPSVISLARPVSMVPNIPGIPGPPVNSSGSISPSGHPIPSEAKMRLKATLTHQVSSINGGCGMVVGTASTMVTARPEQSQILIQHPDAPSPAQPQVSPAQPTPSTGGRRRRTVDEDPDERRQRFLERNRAAASRCRQKRKLWVSSLEKKAEELTSQNIQLSNEVTLLRNEVAQLKQLLLAHKDCPVTALQKKTQGYLGGRQRTPPTTGCPDLWVTVALPAPGNGETWPEPSLPVSAPEVWQKYPGILEE

SEQ ID NO: 75936 - protein, 57 aa, Homo sapiens
  Payload ID: 15119
  Gene Symbol:
  Gene Name: RP11-795F19.5
  ENSP ID: ENSP00000464803
MWAAAGGLWRSRAGLRALFRSRDAALFPGCERGLHCSAVSCKNWLKKFASKTKWMKT

SEQ ID NO: 75937 - protein, 57 aa, Homo sapiens
  Payload ID: 15119
  Gene Symbol:
  Gene Name: RP11-795F19.5
  ENSP ID: ENSP00000464868
KEDHARLRALNGLLYKALTDLLCTPEVSQELYDLNVELSKVDEDLIIEVHQLFFSRM

SEQ ID NO: 75938 - protein, 57 aa, Homo sapiens; identical to SEQ ID NO: 75936
  Payload ID: 15119
  Gene Symbol:
  Gene Name: RP11-795F19.5
  ENSP ID: ENSP00000468252

SEQ ID NO: 75939 - protein, 310 aa, Homo sapiens
  Payload ID: 15120
  Gene Symbol:
  Gene Name: RP1-179P9.3
  ENSP ID: ENSP00000487717
NQLEAEIHLHRHKTVIRACRGRNDLKRPMQAPPGHDQDSLKKSQGVGPIRKVLLLKEDHEGLGISITGGKEHGVPILISEIHPGQPADRCGGLHVGDAILAVNGVNLRDTKHKEAVTILSQQRGEIEFEVVYVAPEVDSDDENVEYEDESGHRYRLYLDELEGGGNPGASCKDTSGEIKVLQVWHRRLKNQKSAKEGVTVLINEDKELAELRGLAAGVGLANACYAIQYVALAIIMEHLGKGTLPTQEEIENLPAFPREKLTLRLLLGSGAFGEVYEGTAVDILGVGSGEIKVAVKTLKKGSTDQEKIEF

SEQ ID NO: 75940 - protein, 116 aa, Homo sapiens
  Payload ID: 15121
  Gene Symbol:
  Gene Name: RP11-812E19.9
  ENSP ID: ENSP00000474135
MEFGLNWVFLVAIIKGAQCEVQLVESGGGLVQPGGSLRLSCPDSGFTFSNHYMSWVRQAPGKGLEWISYISGDSGYTNYADSVKGRFTISRDNANNSPYLQMNSLRAEDTAVYYCV

SEQ ID NO: 75941 - protein, 99 aa, Homo sapiens
  Payload ID: 15122
  Gene Symbol:
  Gene Name: RP11-831H9.11
  ENSP ID: ENSP00000435188
MGAPGGKINRPRTELKKKLFKRRRVLNRERRLRHRVVGAVIDQGLITRHHLKKRASSARANITLSGKKRRKLLQQIRLAQKEKTAMEVLRSCPRKSRLF

SEQ ID NO: 75942 - protein, 126 aa, Homo sapiens
  Payload ID: 15123
  Gene Symbol:
  Gene Name: RP11-834C11.12
  ENSP ID: ENSP00000476742
VSFPETPKSDSQTPSPNEIKTEQSLAGPKGSPSESEKERAKAADSSPDTSDNEAKETDGKRSRTSYTRYQTLELEKEFHFNRYLTRRRRIEIANNLCLNERQIKIWFQNRRMKWKKDSKMKSKEAL

SEQ ID NO: 75943 - protein, 107 aa, Homo sapiens
  Payload ID: 15124
  Gene Symbol:
  Gene Name: RP11-849F2.7
  ENSP ID: ENSP00000463847
MKFNPFVTSDRSKNRKRHFNAPSHIRRKIMSSPLSKELRQKYNVRSMPIRKDDEVQVVRGHYKGQQIGKVVQVYRKKYVIYIERVQREKANGTTVHVGIHPSKVVYI

SEQ ID NO: 75944 - protein, 525 aa, Homo sapiens
  Payload ID: 15125
  Gene Symbol:
  Gene Name: RP11-864I4.1
  ENSP ID: ENSP00000456163
MAAVDSDVESLPRGGFRCCLCHVTTANRPSLDAHLGGRKHRHLVELRAARKAQGLRSVFVSGFPRDVDSAQLSEYFLAFGPVASVVMDKDKGVFAIVEMGDVGAREAVLSQSQHSLGGHRLRVRPREQKEFQSPASKSPKGAAPDSHQLAKALAEAADVGAQMIKLVGLRELSEAERQLRSLVVALMQEVFTEFFPGCVVHPFGSSINSFDVHGCDLDLFLDLGDLEEPQPVPKAPESPSLDSALASPLDPQALACTPASPPDSQPPASPQDSEALDFETPSSSLAPQTPDSALASETLASPQSLPPASPLLEDREEGDLGKASELAETPKEEKAEGAAMLELVGSILRGCVPGVYRVQTVPSARRPVVKFCHRPSGLHGDVSLSNRLALHNSRFLSLCSELDGRVRPLVYTLRCWAQGRGLSGSGPLLSNYALTLLVIYFLQTRDPPVLPTVSQLTQKAGEGEQVEVDGWDCSFPRDASRLEPSINVEPLIRTARGECGGSTARGTWHPRRVPEWQSGGWLQQY

SEQ ID NO: 75945 - protein, 29 aa, Homo sapiens
  Payload ID: 15126
  Gene Symbol:
  Gene Name: RP11-872D17.8
  ENSP ID: ENSP00000431480
  MOD_RES (1)..(1): Any amino acid
XLAILLTFFHPFLVYRECRTWKESPSAIA

SEQ ID NO: 75946 - protein, 227 aa, Homo sapiens
  Payload ID: 15126
  Gene Symbol:
  Gene Name: RP11-872D17.8
  ENSP ID: ENSP00000431536
TLAVALCSTVPSLALTSLLCLGFALCASVPILPLQYLTFILQVISRSFLYGSNAAFLTLAFPSEHFGKLFGLVMALSAVVSLLQFPIFTLIKGSLQNDPFYDKAKMKLPLLLALLFGAVSALHLRSETSTFETPLGAKTLPEDEETPEQEMEETPCRELEEEEEWGSGSEDASKKDGAVESISVPDMVDKNLTCPEEEDTVKVVGIPGCQTCRYLLVRSLQTFSQAW

SEQ ID NO: 75947 - protein, 85 aa, Homo sapiens; identical to SEQ ID NO: 67808
  Payload ID: 15127
  Gene Symbol:
  Gene Name: RP11-87C12.2
  ENSP ID: ENSP00000477146

SEQ ID NO: 75948 - protein, 171 aa, Homo sapiens
  Payload ID: 15128
  Gene Symbol:
  Gene Name: RP11-886H22.1
  ENSP ID: ENSP00000467396
ILQVFKQLFYMINAVTLNNLLLRKDVCSWSTGMQLRYNISQLEEWLRGRNLHQSGAVQTMEPLIQAAQLLQLKKKTQEDAEAICSLCTSLSTQQIVKILNLYTPLNEFEERVTVAFIRTIQAQLQERNDPQQLLLDAKHMFPVLFPFNPSSLTMDSIHIPACLNLEFLNEV

SEQ ID NO: 75949 - protein, 123 aa, Homo sapiens
  Payload ID: 15129
  Gene Symbol:
  Gene Name: RP11-894J14.5
  ENSP ID: ENSP00000475819
  MOD_RES (1)..(1): Any amino acid
XLLLAINGVTECFTFAAMSKEEVDRYNFVMLALSSSFLVLSYLLTRWCGSVGFILANCFNMGIRITQSLCFIHRYYRRSPHRPLAGLHLSPVLLGTFALSGGVTAVSERPRKPWRSSGPWCPC

SEQ ID NO: 75950 - protein, 25 aa, Homo sapiens
  Payload ID: 15129
  Gene Symbol:
  Gene Name: RP11-894J14.5
  ENSP ID: ENSP00000475866
  MOD_RES (1)..(1): Any amino acid
XLLLAINGVTECFTFAAMSKEEVDR

SEQ ID NO: 75951 - protein, 33 aa, Homo sapiens
  Payload ID: 15129
  Gene Symbol:
  Gene Name: RP11-894J14.5
  ENSP ID: ENSP00000475958
  MOD_RES (1)..(1): Any amino acid
XLLLAINGVTECFTFAAMSKEEVDRLFPALSML

SEQ ID NO: 75952 - protein, 31 aa, Homo sapiens
  Payload ID: 15130
  Gene Symbol:
  Gene Name: RP11-903H12.5
  ENSP ID: ENSP00000477037
MVMGLGVLLLVFVLGLGLTPPTLAQDNSRHL

SEQ ID NO: 75953 - protein, 256 aa, Homo sapiens
  Payload ID: 15131
  Gene Symbol:
  Gene Name: RP11-934B9.3
  ENSP ID: ENSP00000450730
MDGFRRTIENQHSRNDVMVSEWLNKLNLEEPPSSVPKKCPSLTKRSRAQEEQVPQAWTAGTSSDSMAQPPQTPETSTFRNQMPSPTSTGTPSPGPRGNQGAERQGMNWSCRTPEPNPVTGADLRPELPDHCAVRAGRLLAAAGPRFPGAATAALDASPVRLGMGRAASARPRLPVHRGRGERLGPGVLFSLRHLHGVCHAALGHAGRRRRGPRLLTLASAGPRAVSWATAGLTACTAAAGEHASSTGCAQDGSATC

SEQ ID NO: 75954 - protein, 63 aa, Homo sapiens
  Payload ID: 15132
  Gene Symbol:
  Gene Name: RP11-96L14.7
  ENSP ID: ENSP00000489065
MRFRRLTPGYFRVLQMQVAGELKAEPRSLLAGVVATVLAVLGLGGSCYAVWKMVGQRRVPRAP

SEQ ID NO: 75955 - protein, 63 aa, Homo sapiens; identical to SEQ ID NO: 75954
  Payload ID: 15132
  Gene Symbol:
  Gene Name: RP11-96L14.7
  ENSP ID: ENSP00000489416

SEQ ID NO: 75956 - protein, 63 aa, Homo sapiens; identical to SEQ ID NO: 75954
  Payload ID: 15132
  Gene Symbol:
  Gene Name: RP11-96L14.7
  ENSP ID: ENSP00000489429

SEQ ID NO: 75957 - protein, 118 aa, Homo sapiens
  Payload ID: 15133
  Gene Symbol:
  Gene Name: RP11-96L14.8
  ENSP ID: ENSP00000489126
MNQAFWKTYKSKVLQTLSGESEEDLAEERENPALVGSETAEPTEETFNPMSQLARRVQGVGVKGWLTMSSLFNKEDEDKLLPSEPCADQYVRVCLWWFWKGPEVPLLPGPFLLVCLSF

SEQ ID NO: 75958 - protein, 186 aa, Homo sapiens
  Payload ID: 15133
  Gene Symbol:
  Gene Name: RP11-96L14.8
  ENSP ID: ENSP00000489320
MNQAFWKTYKSKVLQTLSGESEEDLAEERENPALVGSETAEPTEETFNPMSQLARRVQGVGVKGWLTMSSLFNKEDEDKLLPSEPCADHPLAARPPSQAAAAAEARGPGFWDAFASRWQQQQAAAASMLRGTEPTPEPDPEPADEAAEEAAERPESQEAEPVAGFKWGFLTHKLAEMRVKAAPKGD

SEQ ID NO: 75959 - protein, 289 aa, Homo sapiens
  Payload ID: 15134
  Gene Symbol:
  Gene Name: RP11-96O20.4
  ENSP ID: ENSP00000455047
MVPLVAVVSGPRAQLFACLLRLGTQQVGPLQLHTGASHAARNHYEVLVLGGGSGGITMAARMKRKVGAENVAIVEPSERHFYQPIWTLVGAGAKQLSSSGRPTASVIPSGVEWIKARVTELNPDKNCIHTDDDEKISYRYLIIALGIQLDYEKIKGLPEGFAHPKIGSNYSVKTVEKTWKALQDFKEGNAIFTFPNTPVKCAGAPQKIMYLSEAYFRKTGKRSKANIIFNTSLGAIFGVKKYADALQEIIQERNLTVNYKKNLIEVRADKQEAVFENLDKPGETQVISV

SEQ ID NO: 75960 - protein, 105 aa, Homo sapiens
  Payload ID: 15135
  Gene Symbol:
  Gene Name: RP11-977G19.10
  ENSP ID: ENSP00000446506
MKGWGWLALLLGALLGTAWARRSQDLHCGACRALVDELEWEIAQVDPKKTIQMGSFRINPDGSQSVVENASCLVLAARHASASSTNLKDILADLIPKEQARIKTF

SEQ ID NO: 75961 - protein, 263 aa, Homo sapiens
  Payload ID: 15135
  Gene Symbol:
  Gene Name: RP11-977G19.10
  ENSP ID: ENSP00000446743
MKGWGWLALLLGALLGTAWARRSQDLHCGACRALVDELEWEIAQVDPKKTIQMGSFRINPDGSQSVVEVPYARSEAHLTELLEEICDRMKEYGEQIDPSTHRKNYVRVVGRNGESSELDLQGIRIDSDISGTLKFACESIVEEYEDELIEFFSREADNVKDKLCSKRTDGGTSKNRDRKGKMDVTNSAEKSRRSPAMALLTAAARLLGTKNASCLVLAARHASASSTNLKDILADLIPKEQARIKTFRQQHGKTVVGQITVDM

SEQ ID NO: 75962 - protein, 82 aa, Homo sapiens
  Payload ID: 15135
  Gene Symbol:
  Gene Name: RP11-977G19.10
  ENSP ID: ENSP00000447042
MKGWGWLALLLGALLGTAWARRSQDLHCGACRALVDELEWEIAQVDPKKTIQMGSFRINPDGSQSVVEIPEIARHGFTYCGR

SEQ ID NO: 75963 - protein, 316 aa, Homo sapiens; identical to SEQ ID NO: 1182
  Payload ID: 15136
  Gene Symbol:
  Gene Name: RP11-983G14.2
  ENSP ID: ENSP00000481382

SEQ ID NO: 75964 - protein, 211 aa, Homo sapiens
  Payload ID: 15136
  Gene Symbol:
  Gene Name: RP11-983G14.2
  ENSP ID: ENSP00000485766
  MOD_RES (1)..(1): Any amino acid
XLLGLTQSQDIQLLVFVLILIFYLIILPGNFLIIFTIRSDPGLTAPLYFFLGNLAFLDASYSFIVAPRMLVDFFSEKKVIKLACTDMFVVELLMVFNSGLMTLLCFLGLLASYAVILCHVRRAASEGKNKAMSMCTTRVIIILLMFGPAIFIYMCPFRALPADKMVSLFHTVIFPLMNPMIYTLRNQEVKTSMKRLLSRHVVCQVDFIIRN

SEQ ID NO: 75965 - protein, 512 aa, Homo sapiens
  Payload ID: 15137
  Gene Symbol:
  Gene Name: RP1-27O5.3
  ENSP ID: ENSP00000455300
MEMQSYYAKLLGELNEQRKRDFFCDCSIIVEGRIFKAHRNILFANSGYFRALLIHYIQDSGRHSTASLDIVTSDAFSIILDFLYSGKLDLCGENVIEVMSAASYLQMNDVVNFCKTYIRSSLDICRKMEKEAAVAAAVAAAAAAAAAAAAAAAHQVDSESPSSGREGTSCGTKSLVSSPAEGEKSVECLRESPCGDCGDCHPLELVVRDSLGGGSADSNLSTPPKRIEPKVEFDADEVEVDVGEQLQQYAAPLNLAHVEEALPSGQAVDLAYSNYHVKQFLEALLRNSAAPSKDDADHHFSRSLEGRPEGAGVAMSSMMDVQADWYGEDSGDVLVVPIKLHKCPFCPYTAKQKGILKRHIRSHTGERPYPCETCGKRFTRQEHLRSHALSVHRSNRPIICKGCRRTFTSHLSQGLRRFGLCDSCTCVTDTPDDDDDLMPINLSLVEASSESQEKSDTDNDWPIYVESEIGSHYVAQASLELLALSQPPASASQSAGITDGVSLCCPGRSTVA

SEQ ID NO: 75966 - protein, 140 aa, Homo sapiens
  Payload ID: 15138
  Gene Symbol:
  Gene Name: RP1-309K20.6
  ENSP ID: ENSP00000395201
  MOD_RES (1)..(1): Any amino acid
XGESLLMALKDVALSSGSACTSASLEPSYVLRAIGTDEDLAHSSIRFGIGRFTTEEEVDYTVEKCIQHVKRLREMSLKVGFNWLPTGLTWPLLLVKEIHLLFYQVCVVSAQHGCGHPFARSPNCGGDHGHSPLLLWIDHS

SEQ ID NO: 75967 - protein, 58 aa, Homo sapiens
  Payload ID: 15138
  Gene Symbol:
  Gene Name: RP1-309K20.6
  ENSP ID: ENSP00000411232
  MOD_RES (1)..(1): Any amino acid
XGESLLMALKDVALSSGSALFYQVWNWPLHYRGGSGLHSGEMHSACEASSRNESKSWF

SEQ ID NO: 75968 - protein, 161 aa, Homo sapiens
  Payload ID: 15138
  Gene Symbol:
  Gene Name: RP1-309K20.6
  ENSP ID: ENSP00000443983
  MOD_RES (1)..(1): Any amino acid
XMNGDPKHHYPGCINLSFAYVEGESLLMALKDVALSSGSACTSASLEPSYVLRAIGTDEDLAHSSIRFGIGRFTTEEEVDYTVEKCIQHVKRLREMSLKVGFNWLPTGLTWPLLLVKEIHLLFYQVCVVSAQHGCGHPFARSPNCGGDHGHSPLLLWIDHS

SEQ ID NO: 75969 - protein, 442 aa, Homo sapiens
  Payload ID: 15139
  Gene Symbol:
  Gene Name: RP13-1032I1.10
  ENSP ID: ENSP00000461324
MLPAAARPLWGPCLGLRAAAFRLARRQVPCVCAVRHMRSSGHQRCEALAGAPLDNAPKEYPPKIQQLVQDIASLTLLEISDLNELLKKTLKIQDVGLVPMGGVMSGAVPAAAAQEAVEEDIPIAKERTHFTVRLTEAKPVDKVKLIKEIKNYIQGINLVQAKKLVESLPQEIKANVAKAEAEKIKAALEATQQEVKLRMTGMALRVVRTDGILALYSGLSASLCRQMTYSLTRFAIYETVRDRVAKGSQGPLPFHEKVLLGSVSGLAGGFVGTPADLVNVRMQNDVKLPQGQRRNYAHALDGLYRVAREEGLRRLFSGATMASSRGALVTVGQLSCYDQAKQLVLSTGYLSDNIFTHFVASFIAGGCATFLCQPLDVLKTRLMNSKGEYQGVFHCAVETAKLGPLAFYKGLVPAGIRLIPHTVLTFVFLEQLRKNFGIKVPS

SEQ ID NO: 75970 - protein, 43 aa, Homo sapiens
  Payload ID: 15140
  Gene Symbol:
  Gene Name: RP1-317E23.6
  ENSP ID: ENSP00000457066
KELEELQNNQENSSHQKLAGLHLEKYSFPVEMMICLPNGTVMA

SEQ ID NO: 75971 - protein, 41 aa, Homo sapiens
  Payload ID: 15141
  Gene Symbol:
  Gene Name: RP1-321E8.5
  ENSP ID: ENSP00000480507
  MOD_RES (1)..(1): Any amino acid
XVTKSQPEKWDEEAQDAAGEEEKEQEKEKDAENKVKNSKGT

SEQ ID NO: 75972 - protein, 296 aa, Homo sapiens
  Payload ID: 15142
  Gene Symbol:
  Gene Name: RP13-279N23.2
  ENSP ID: ENSP00000455952
  MOD_RES (1)..(1): Any amino acid
XWEEELAKRMNLQTMVDTLQEAAQEADAIQEEMNEKIERLKAELVVFKGLMSDPMTDLDTKIQEKAMKVDMDICRRIDITAKLCDVAQQRNSEDVSKIFQVVPKKKERKVASDDDISEQDGEVNRFSDDEVGSMNITDEMKRMFNQLRETFDFDDDCDSLTWEENEDTLLLWEDFTNCNPTIDLQGEQEENLGNLIHETESFFKTRDKEYQETIGQIELELATAKSDMNRHLHEYMEMCSMKRGLDVQMETCRRLIKGSADRNSPSPSSVASSDSGSTDEIQDEFEREADVEPMVS

SEQ ID NO: 75973 - protein, 324 aa, Homo sapiens
  Payload ID: 15143
  Gene Symbol:
  Gene Name: RP13-347D8.7
  ENSP ID: ENSP00000488984
MSATGDQDLIQEDQEAPVNQEGAQAEAVGDREGGDSGPDSGNTVAGVAGPMRGLGEEEGEQAAGLAAAPGGGNAEEDSEIRIVVEMVEEEEDEEEEEEEEEEERNEADNFDLVAAARRYPIRGFRMEFLDMVHSLLLRIYHNDHILIRMRGGRLMRRRRTAAPSGSEEPRLLLVHERLGVGAAGPEGEGLGLLQEAALVPEPEVPADLAEMAREPAEEPAEEASEKPTEEAAEEPAEEASEKPTEEAAEEELAEEAAEEPAKEEPAAEEESAEEPATEEAAAPEEVTKYQHEKWDEEAQDAAGKEEKEEKEKDAENKVKNSKGT

SEQ ID NO: 75974 - protein, 169 aa, Homo sapiens
  Payload ID: 15144
  Gene Symbol:
  Gene Name: RP1-34B20.21
  ENSP ID: ENSP00000489311
MSGRGKQGGKARAKAKTRSSRAGLQFPVGRVHRLLRKGNYSERVGAGAPVYLAAVLEYLTAEILELAGNAARDNKKTRIIPRHLQLAIRNDEELNKLLGKVTIAQGGVLPNIQAVLLPKKTESHHKAKGFRSSQWLVPSRLLASPRVGKRHASSWPPRLLERALQPPAA

SEQ ID NO: 75975 - protein, 170 aa, Homo sapiens
  Payload ID: 15144
  Gene Symbol:
  Gene Name: RP1-34B20.21
  ENSP ID: ENSP00000489536
MSGRGKQGGKARAKAKTRSSRAGLQFPVGRVHRLLRKGNYSERVGAGAPVYLAAVLEYLTAEILELAGNAARDNKKTRIIPRHLQLAIRNDEELNKLLGKVTIAQGGVLPNIQAVLLPKKTESHHKAKAGFRSSQWLVPSRLLASPRVGKRHASSWPPRLLERALQPPAA

SEQ ID NO: 75976 - protein, 34 aa, Homo sapiens
  Payload ID: 15145
  Gene Symbol:
  Gene Name: RP13-512J5.1
  ENSP ID: ENSP00000440272
LTQGMDIQWMHVPGHSGFIGNEEADRLAREGASL

SEQ ID NO: 75977 - protein, 199 aa, Homo sapiens
  Payload ID: 15146
  Gene Symbol:
  Gene Name: RP13-582O9.6
  ENSP ID: ENSP00000428966
MMEKPAGRKKKTPTPREEADVQKSALREEKVSGDRKPPERPTVPRKPRTEPCLSPEDEEHVFDAFDASFKDDFEGVPVFIPFQRKKPYECSECGRIFKHKTDHIRHQRVHTGEKPFKCAQCGKAFRHSSDVTKHQRTHTGEKPFKCGECGKAFNCGSNLLKHQKTHTGEKPYECTHCGKAFAYSSCLIRHQKRHPRKKP

SEQ ID NO: 75978 - protein, 121 aa, Homo sapiens
  Payload ID: 15147
  Gene Symbol:
  Gene Name: RP13-672B3.2
  ENSP ID: ENSP00000442747
MPFTGERRLSLRRQDEGGLLAGAEDELAGVDATTVHQHQLRPSEVPGALRQPGSSVLVCLPGLLGEVTTAGRTSGALWTWVWGSHPPSESRTNPVRMSLTLNQARTTVSDQRAEEERGIWG

SEQ ID NO: 75979 - protein, 206 aa, Homo sapiens
  Payload ID: 15148
  Gene Symbol:
  Gene Name: RP1-37E16.12
  ENSP ID: ENSP00000477208
KRDGDDRRPRLVLSFDEEKRREYLTGFHKRKVERKKAAIEEIKQRLKEEQRKLREERHQEYLKMLAEREEALEEADELDRLVTAKTESVQYDHPNHTVTVTTISDLDLSGARLLGLTPPEGGAGDRSEEEASSTEKPTKALPRKSRDPLLSQRISSLTASLHAHSRKKVKRKHPRRAQDSKKPPRAPRTSKAQRRRLTGKARHSGE

SEQ ID NO: 75980 - protein, 83 aa, Homo sapiens
  Payload ID: 15149
  Gene Symbol:
  Gene Name: RP1-4G17.5
  ENSP ID: ENSP00000460571
MANSGLQLLGFSMALLGWVGLVACTAIPQWQMSSYAGDNIITAQAMYKGLWMDCVTQSTGMMSCKMYDSVLALSGNSVPNCSI

SEQ ID NO: 75981 - protein, 159 aa, Homo sapiens
  Payload ID: 15150
  Gene Symbol:
  Gene Name: RP1-66C13.4
  ENSP ID: ENSP00000462879
MAPLPGAELVRRPLQLYRYLLRCCQQLPTKGIQQHYKHAVRQSFRVHSDEDNPERIQQIIKRAIEDADWIMNKNSPAASIIRRGQECGLLGGQGQEEGSRAGPGSRRRLANLQEGASPGPCRQALWGGYQKLTVCPGLKAVCCVTLPHSEEHLSSNPDK

SEQ ID NO: 75982 - protein, 60 aa, Homo sapiens
  Payload ID: 15151
  Gene Symbol:
  Gene Name: RP3-369A17.6
  ENSP ID: ENSP00000455145
SIKMLVTLCQSDTEEIRNVASETLLSLGEDGRLAYEQLDKFPRDCVKVGGRHGTEVATAF

SEQ ID NO: 75983 - protein, 217 aa, Homo sapiens
  Payload ID: 15152
  Gene Symbol:
  Gene Name: RP3-461F17.3
  ENSP ID: ENSP00000476966
GFKPRERSGGEQAQDWDALPPKRPRLGAGNKIGGRRLIVVLEGASLETVKVGKTYELLNCDKHKSILLKNGRDPGEARPDITHQSLLMLMDSPLNRAGLLQVYIHTQKNVLIEVNPQTRIPRTFDRFCGLMVQLLHKLSVRAADGPQKLLKVIKNPVSDHFPVGCMKVGTSFSIPVVSDVRELVPSSDPIVFVVGAFAHGKRCDLLCCPDLSAVAQS

SEQ ID NO: 75984 - protein, 223 aa, Homo sapiens
  Payload ID: 15152
  Gene Symbol:
  Gene Name: RP3-461F17.3
  ENSP ID: ENSP00000480420
KMAAPSDGFKPRERSGGEQAQDWDALPPKRPRLGAGNKIGGRRLIVVLEGASLETVKVGKTYELLNCDKHKSILLKNGRDPGEARPDITHQSLLMLMDSPLNRAGLLQVYIHTQKNVLIEVNPQTRIPRTFDRFCGLMVQLLHKLSVRAADGPQKLLKVIKNPVSDHFPVGCMKVGTSFSIPVVSDVRELVPSSDPIVFVVGAFAHGKVSGSYLFQSKVMMAL

SEQ ID NO: 75985 - protein, 19 aa, Homo sapiens
  Payload ID: 15153
  Gene Symbol:
  Gene Name: RP3-468K18.5
  ENSP ID: ENSP00000456586
  MOD_RES (1)..(1): Any amino acid
XTEMEVHEESRQFTRFHRP

SEQ ID NO: 75986 - protein, 140 aa, Homo sapiens
  Payload ID: 15154
  Gene Symbol:
  Gene Name: RP3-468K18.7
  ENSP ID: ENSP00000400756
MDIQKSENEDDSEWEDVDDEKGDSNDDYDSAGLLSDEDCMSVPGKTHRAIADHLFWSEETKSRFTEYSMTSSVMRRNEQLTLHDERFEKFYEQYDDDEIGALDNAELEGSIQVDSNRLQEVLNDYYKEKAEKWQSGIVSL

SEQ ID NO: 75987 - protein, 144 aa, Homo sapiens
  Payload ID: 15155
  Gene Symbol:
  Gene Name: RP4-539M6.19
  ENSP ID: ENSP00000400753
  MOD_RES (1)..(1): Any amino acid
XVEAYGEFLCMFEENYPETLKRLFVVKAPKLFPVAYNLIKPFLSEDTRKKIMVLGGRWISSWTPACASSTQQWGSPAPPDHTLVPGLCIGLLLHVNLLLLPGNVDTWLPGVQRPWHLGGFELDRSLETKASRSSGCRESQKGRT

SEQ ID NO: 75988 - protein, 338 aa, Homo sapiens
  Payload ID: 15155
  Gene Symbol:
  Gene Name: RP4-539M6.19
  ENSP ID: ENSP00000415178
AVEAYGEFLCMFEENYPETLKRLFVVKAPKLFPVAYNLIKPFLSEDTRKKIMVLGANWKEVLLKHISPDQVPVEYGGTMTDPDGNPKCKSKINYGGDIPRKYYVRDQVKQQYEHSVQISRGSSHQVEYEILFPGCVLRWQFMSDGADVGFGIFLKTKMGERQRAGEMTEVLPNQRYNSHLVPEDGTLTCSDPGICYANEVGEAFRSLVPAAVVWLSYGVASSYVLADAIDKGKKAGEVPSPEAGRSARVTVAVVDTFVWQALASVAIPGFTINRVCAASLYVLGTATRWPLAVRKWTTTALGLLTIPIIIHPIDRSVDFLLDSSLRKLYPTVGKPSSS

SEQ ID NO: 75989 - protein, 74 aa, Homo sapiens
  Payload ID: 15155
  Gene Symbol:
  Gene Name: RP4-539M6.19
  ENSP ID: ENSP00000416788
  MOD_RES (1)..(1): Any amino acid
XKPAVEAYGEFLCMFEENYPETLKRLFVVKAPKLFPVAYNLIKPFLSEDTRKKIMVLGGGSLCQMERMLVLGFS

SEQ ID NO: 75990 - protein, 359 aa, Homo sapiens
  Payload ID: 15156
  Gene Symbol:
  Gene Name: RP4-559A3.7
  ENSP ID: ENSP00000414068
MSVGFIGAGQLAYALARGFTAAGILSAHKIIASSPEMNLPTVSALRKMGVNLTRSNKETVKHSDVLFLAVKPHIIPFILDEIGADVQARHIVVSCAAGVTISSVEKAFMALDALADGGVKMGLPRRLAIQLGAQALLGAAKMLLDSEQHPCQLKDNVCSPGGATIHALHFLESGGFRSLLINAVEASCIRTRGGRQVPGVGGQHTPAGVRHGAAAAAQQRAGAGRAAALPGAGPQGRAAQARAAVPAQRPGPGDRRVAARPRRRLQPHLPHRLQAGVRPRERLEGLRRDRGRELLAAAEPAPAAAAATGVGAEGASGPAGVRRPQAGPLCLAGGASRAWGAPAGAAHPGPWGLWSSGRL

SEQ ID NO: 75991 - protein, 177 aa, Homo sapiens
  Payload ID: 15157
  Gene Symbol:
  Gene Name: RP4-576H24.4
  ENSP ID: ENSP00000454437
MPVPASWPHPPCPFLLLTLLLGLTGVAGEDELQVIQPEKSVSVAAGESATLRCAMTSLIPVGPIMWFRGAGAGRELIYNQKEGHFPRVTTVSELTKRNNLDFSISISNITPADAGTYYCVKFRKGSPDDVEFKSGAGTELSVRGVTHVFHVQQTEMSQTVSTGESIILSCSVPNTLP

SEQ ID NO: 75992 - protein, 140 aa, Homo sapiens
  Payload ID: 15157
  Gene Symbol:
  Gene Name: RP4-576H24.4
  ENSP ID: ENSP00000457551
  MOD_RES (1)..(1): Any amino acid
XLIYNQKEGHFPRVTTVSDLTKRNNMDFSIRISNITPADAGTYYCVKFRKGSPDHVEFKSGAGTELSVREARTVFSARSTESRASPGQAFRQSKLQVSPQCPSLPPHSTHLCLPYCCICCLNWQSLTVLEARSLKSASLD

SEQ ID NO: 75993 - protein, 172 aa, Homo sapiens
  Payload ID: 15157
  Gene Symbol:
  Gene Name: RP4-576H24.4
  ENSP ID: ENSP00000457944
MPVPASWPHLPSPFLLMTLLLGRLTGVAGEDELQVIQPEKSVSVAAGESATLRCAMTSLIPVGPIMWFRGAGAGRELIYNQKEGHFPRVTTVSELTKRNNLDFSISISNITPADAGTYYCVKFRKGSPDDVEFKSGAGTELSVRAFFQESHMCSMCNKRRCHRLYQLGSQSS

SEQ ID NO: 75994 - protein, 84 aa, Homo sapiens
  Payload ID: 15158
  Gene Symbol:
  Gene Name: RP4-583P15.14
  ENSP ID: ENSP00000477118
  MOD_RES (1)..(1): Any amino acid
XFPHQELPRALPAAAATAGCAGLEATYSNVGLAALPGVSLAASPVVAEYARVQKRKGTHRSPQEPQQGKTEVTPAAQGSSVGGG

SEQ ID NO: 75995 - protein, 417 aa, Homo sapiens
  Payload ID: 15159
  Gene Symbol:
  Gene Name: RP4-583P15.15
  ENSP ID: ENSP00000476393
  MOD_RES (1)..(1): Any amino acid
XARGSGSETVPKAEAGPESAAGGQEEEEGEDEEELSGTKVSAPYYSSWGTLEYHNAMVVGTEEAEDGSAGVRVLYLYPTHKSLKPCPFFLEGKCRFKENCRFSHGQVVSLDELRPFQDPDLSSLQAGSACLAKHQDGLWHAARITDVDNGYYTVKFDSLLLREAVVEGDGILPPLRTEATESDSDSDGTGDSSYARVVGSDAVDSGTCSSAFAGWEVHTRGIGSRLLTKMGYEFGKGLGRHAEGRVEPIHAVVLPRGKSLDQCVETLQKQTRVGKAGTNKPPRCRGRGARPGGRPAPRNVFDFLNEKLQGQAPGALEAGAAPAGRRSKDMYHASKSAKRALSLRLFQTEEKIERTQRDIRSIQEALARNAGRHSVASAQLQEKLAGAQRQLGQLRAQEAGLQQEQRKADTHKKMTEF

SEQ ID NO: 75996 - protein, 169 aa, Homo sapiens
  Payload ID: 15159
  Gene Symbol:
  Gene Name: RP4-583P15.15
  ENSP ID: ENSP00000477596
  MOD_RES (1)..(1): Any amino acid
XRALSLRLFQTEEKIERTQRDIRSIQEALARNAGRKRARRQRARLQGSATAAEASLLRRTHLCSLSKSDTRLHELHRGPRSSRALRPASMDLLRPHWLEVSRDITGPQAAPSAFPHQELPRALPAAAATAGCAGLEATYSNVGLAALPGVSLAASPVVAEYARVQKRKG

SEQ ID NO: 75997 - protein, 290 aa, Homo sapiens
  Payload ID: 15159
  Gene Symbol:
  Gene Name: RP4-583P15.15
  ENSP ID: ENSP00000488802
  MOD_RES (1)..(1): Any amino acid
XFSHGQVVSLDELRPFQDPDLSSLQAGSACLAKHQDGLWHAARITDVDNGYYTVKFDSLLLREAVVEGDGILPPLRTEATESDSDSDGTGDSSYARGMAAAAEPRSQEGPRLHRMGLPVSWAPPALWVLGCCALLLSLWALCTACRRPEDAVAPRKRARRQRARLQGSATAAEAQVGHQTARAAPGPAQQQGPAACQHGSPAPTLAGGVQGHHRTAGSPLCLPTPGAAPGSAGSCSHRRVRWPRGHLFQRGAGGPSRGQPGGQPCGGRVCPRPEAQRDPSQSPRATAGED

SEQ ID NO: 75998 - protein, 83 aa, Homo sapiens
  Payload ID: 15160
  Gene Symbol:
  Gene Name: RP4-613B23.5
  ENSP ID: ENSP00000406044
MSTDTGVSLPSYEEDQGSKLIRKAKEAPFVPVGIAGFAAIVAYGLYKLKSRGNTKMSIHLIHMRVAAQGFVVGAMTVGQDGSR

SEQ ID NO: 75999 - protein, 110 aa, Homo sapiens
  Payload ID: 15161
  Gene Symbol:
  Gene Name: RP4-614O4.11
  ENSP ID: ENSP00000489186
GSYCVFSNQGGLVHPKTSIEDQDELSSLLQVPLVAGTVNRGSEVIAAGMVVNDWCAFCGLDTTSTELSVVESVFKLNEAQPSTIATSMRDSLIDRLGNSRRPWSTLRISV

SEQ ID NO: 76000 - protein, 61 aa, Homo sapiens
  Payload ID: 15162
  Gene Symbol:
  Gene Name: RP4-635E18.9
  ENSP ID: ENSP00000478249
  MOD_RES (1)..(1): Any amino acid
XEDLIIKGISVHISNAEPKHNSNRQLERSGRFGGNPALALLLSSSNMVTLKMVLGDLQRLN

SEQ ID NO: 76001 - protein, 16 aa, Homo sapiens
  Payload ID: 15162
  Gene Symbol:
  Gene Name: RP4-635E18.9
  ENSP ID: ENSP00000480398
LISNVYGRSTSLKVVL

SEQ ID NO: 76002 - protein, 89 aa, Homo sapiens
  Payload ID: 15162
  Gene Symbol:
  Gene Name: RP4-635E18.9
  ENSP ID: ENSP00000481737
  MOD_RES (1)..(1): Any amino acid
XREFFSQYGDVMDVFIPKPFRAFAFVTFADDQIAQSLCGEDLIIKGISVHISNAEPKHNSNRQLERSGRFGVHLISNVYGRSTSLKVVL

SEQ ID NO: 76003 - protein, 298 aa, Homo sapiens
  Payload ID: 15162
  Gene Symbol:
  Gene Name: RP4-635E18.9
  ENSP ID: ENSP00000481867
MSEYIRVTEDENDEPIEIPSEDDGTVLLSTVTAQFPGACGLRYRNPVSQCMRGVRLVEGILHAPDAGWGNLVYVVNYPKDNKRKMDETDASSAVKVKRAVQKTSDLIVLGLPWKTTEQDLKEYFSTFGEVLMVQVKKDLKTGHSKGFGFVRFTEYETQVKVMSQRHMIDGRWCDCKLPNSKQSQDEPLRSRKVFVGRCTEDMTEDELREFFSQYGDVMDVFIPKPFRAFAFVTFADDQIAQSLCGEDLIIKGISVHISNAEPKHNSNRQLERSGRFGGNPVHLISNVYGRSTSLKVVL

SEQ ID NO: 76004 - protein, 113 aa, Homo sapiens
  Payload ID: 15163
  Gene Symbol:
  Gene Name: RP4-734P14.4
  ENSP ID: ENSP00000456213
MMLPYPSALGDQYWEEILLPKNGENVETMKKLTQNHKAKGLPSNDTDCPQKKEGKAQIVVPVTFRDVTVIFTEAEWKRLSPEQRNLYKEVMLENYRNLLSLDGGQEQQDAAAY

SEQ ID NO: 76005 - protein, 103 aa, Homo sapiens
  Payload ID: 15164
  Gene Symbol:
  Gene Name: RP4-777O23.3
  ENSP ID: ENSP00000470615
MNKSNLNSLDEQEGVKSGMYVVIEVKVATQEGKEITCRSYLMTNYESAPPSPQYKKIICMGAKENGLPLEYQEKLKAIEPNDYTGKVSEEIEDIIKKGETQTL

SEQ ID NO: 76006 - protein, 287 aa, Homo sapiens
  Payload ID: 15165
  Gene Symbol:
  Gene Name: RP5-1021I20.4
  ENSP ID: ENSP00000451484
MIVQRVVLNSRPGKNGNPVAENFRMEEVYLPDNINEGQVQVRTLYLSVDPYMRCRMNEDTGTDYITPWQLSQVVDGGGIGIIEESKHTNLTKGDFVTSFYWPWQTKVILDGNSLEKVDPQLVDGHLSYFLGAIGMPGLTSLIGIQEKGHITAGSNKTMVVSGAAGACGSVAGQMNENSHIILCGQISQYNKDVPYPPPLSPAIEAIQKERNITRERFLVLNYKDKFEPGILQLSQWFKEGKLKIKETVINGLENMGAAFQSMMTGGYIDYPPSTTSYGKSIVFPRGI

SEQ ID NO: 76007 - protein, 57 aa, Homo sapiens
  Payload ID: 15166
  Gene Symbol:
  Gene Name: RP5-1042K10.14
  ENSP ID: ENSP00000476535
  MOD_RES (1)..(1): Any amino acid
XFTGRASQQVQRFLEEEVYPLLKPYESVMKVVTRFKMKKVQNEYEVKVSLPPSSPNM

SEQ ID NO: 76008 - protein, 56 aa, Homo sapiens
  Payload ID: 15166
  Gene Symbol:
  Gene Name: RP5-1042K10.14
  ENSP ID: ENSP00000485211
IERIQVDAYFSPIHSQLDHLLDPSSFTGRASQQVQRFLEEEVYPLLKPYESVMKGR

SEQ ID NO: 76009 - protein, 303 aa, Homo sapiens
  Payload ID: 15167
  Gene Symbol:
  Gene Name: RP5-1052I5.2
  ENSP ID: ENSP00000359579
MLFIKFIHLEVFSMPERAIARHEVREIEQRHTMDGPRQDATLDEEEDMVIIYNRVPKTASTSFTNIAYDLCAKNKYHVLHINTTKNNPVMSLQDQVRFVKNITSWKEMKPGFYHGHVSYLDFAKFGVKKKPIYINVIRDPIERLVSYYYFLRFGDDYRPGLRRRKQGDKKTFDECVAEGGSDCAPEKLWLQIPFFCGHSSECWNVGSRWAMDQAKYNLINEYFLVGVTEELEDFIMLLEAALPRFFRGATELYRTAPDTATPSHRHGPICGSKSISSLLVKVSPVCKDSHCLGKCSRNGLSAV

SEQ ID NO: 76010 - protein, 94 aa, Homo sapiens
  Payload ID: 15168
  Gene Symbol:
  Gene Name: RP5-850E9.3
  ENSP ID: ENSP00000474279
MPRSFLVKKIKGDGFQCSGVPAPTYHPLETAYVLPGARGPPGDNDGVQKVSATGGRQSRNSWLPPSSPVFSSWQGGPRQRAPHRCPLDQRGPGR

SEQ ID NO: 76011 - protein, 254 aa, Homo sapiens
  Payload ID: 15169
  Gene Symbol:
  Gene Name: RP5-860F19.8
  ENSP ID: ENSP00000369967
MTRLCLPRPEAREDPIPVPPRGLGAGEGSGSPVRPPVSTWGPSWAQLLDSVLWLGALGLTIQAVFSTTGPALLLLLVSFLTFDLLHRCTRHDAAAASGDRYHRGWRGATAGSALVSLGHEAWLGALVGEPHAPELDPVVEHLELAATAAAPAVGSGGDTLPAAGTDVVPCTLHHWLPPAELLVACRGRGVAPPATGSPAAGAQCSACPPLHGLLPAALLHTAEPCGPPHLHDSPRRHSGFGSIEGQPHPTACVC

SEQ ID NO: 76012 - protein, 514 aa, Homo sapiens
  Payload ID: 15170
  Gene Symbol:
  Gene Name: RP5-864K19.6
  ENSP ID: ENSP00000406846
MGDWNLLGDTLEEVHIHSTMIGKIWLTILFIFRMLVLGVAAEDVWNDEQSGFICNTEQPGCRNVCYDQAFPISLIRYWVLQVIFVSSPSLVYMGHALYRLRVLEEERQRMKAQLRVELEEVEFEMPRDRRRLEQELCQLEKRKLNKAPLRGTLLCTYVIHIFTRSVVEVGFMIGQYLLYGFHLEPLFKCHGHPCPNIIDCFVSRPTEKTIFLLFMQSIATISLFLNILEIFHLGFKKIKRGLWGKYKLKKEHNEFHANKAKQNVAKYQSTSANSLKRLPSAPDYNLLVEKQTHTAVYPSLNSSSVFQPNPDNHSVNDEKCILDEQETVLSNEISTLSTSCSHFQHISSNNNKDTHKIFGKELNGNQLMEKRETEGKDSKRNYYSRGHRSIPGVAIDGENNMRQSPQTVFSLPANCDWKPRWLRATWGSSTEHENRGSPPKVPGSKATASSLLLILQRPTSSQPRLKETPKIKAEAKIYDSKHPPRLLQSTVSTFSGREPRSPAPMGHHSFRGPR

SEQ ID NO: 76013 - protein, 110 aa, Homo sapiens
  Payload ID: 15170
  Gene Symbol:
  Gene Name: RP5-864K19.6
  ENSP ID: ENSP00000479064
MVCFSDLPKLRKAADSKREQFRRYLEKSGVLDTLTKVLVALYEEPEKPNSALDFLKHHLGAATPENPEIELLRLELAEMKEKYEAIVEENKKLKAKLAQYEPPQEEKRAE

SEQ ID NO: 76014 - protein, 84 aa, Homo sapiens
  Payload ID: 15171
  Gene Symbol:
  Gene Name: RP5-874C20.8
  ENSP ID: ENSP00000481142
MATALDPDQPKKQKILVEEMAPLKGVQEQQVRHECEVTKPEKEKASDDPEDRHLPLCWFSIEMMYINLGRACTVRMGLGSGGGE

SEQ ID NO: 76015 - protein, 449 aa, Homo sapiens
  Payload ID: 15172
  Gene Symbol:
  Gene Name: RP5-877J2.1
  ENSP ID: ENSP00000421315
  MOD_RES (1)..(1): Any amino acid
XETLTLHSLTCYEDLVTFLQQSIHQFEVGPYGCILLTLSAILSRSTELIRQDFDVPTSHLIGAHGYCTQELVNLLLTGKAVSNVFNDVVELDSGDGNITLLRGIAARSDIGFLSLFEHYNMCQVGCFLKTPRFPIWVVCSESHFSILFSLQPGLLRDWRTERLFDLYYYDGLANQQEQIRLTIDTTQTISEDTDNDLVPPLELCIRTNIGSALGFKYPVGNNQTAVQDNVKVSLAFGLSIATLAQSVGHISGAHLNPAVTLGLLLSCQISIFRALMYIIAQCVGAIVATAILSGITSSLTGNSLGRNDLADGVNSGQGLGIEIIGTLQLVLCVLATTDRRRRDLGGSAPLAIGLSVALGHLLAIDYTGCGINPARSFGSAVITHNFSNHWIFWVGPFIGGALAVLIYDFILAPRSSDLTDRVKVWTSGQVEEYDLDADDINSRVEMKPK

SEQ ID NO: 76016 - protein, 96 aa, Homo sapiens
  Payload ID: 15173
  Gene Symbol:
  Gene Name: RP5-966M1.6
  ENSP ID: ENSP00000422253
MSQAGAQEAPIKKKRPPVKDEDLKGARGNLTKNQEIKSKTYQVMRECEQAGSAAPSVFSRTRTERFLSPAVSGAATLPHSPGPSAKGSAPAPWKHQ

SEQ ID NO: 76017 - protein, 279 aa, Homo sapiens
  Payload ID: 15174
  Gene Symbol:
  Gene Name: RP5-972B16.2
  ENSP ID: ENSP00000417050
MGRVFLTGEKANSILKRYPRANGFFEEIRQGNIERECKEEFCTFEEAREAFENNEKTITGVILLAVGVWGKLTLGTYISLIAENSTNAPYVLIGTGTTIVVFGLFGCFATCRGSPWMLKLYAMFLSLVFLAELVAGISGFVFRHEIKDTFLRTYTDAMQTYNGNDERSRAVDHVQRSLSCCGVQNYTNWSTSPYFLEHGIPPSCCMNETDCNPQDLHNLTVAATKVNQKGCYDLVTSFMETNMGIIAGVAFGIAFSQLIGMLLACCLSRFITANQYEMV

SEQ ID NO: 76018 - protein, 37 aa, Homo sapiens
  Payload ID: 15175
  Gene Symbol:
  Gene Name: RP6-24A23.6
  ENSP ID: ENSP00000457111
RRVPRPPEREDSDNDDDTHVRMDFARRDNQFDSPKRE

SEQ ID NO: 76019 - protein, 148 aa, Homo sapiens
  Payload ID: 15176
  Gene Symbol: RPAIN
  Gene Name: RPA interacting protein
  ENSP ID: ENSP00000315069
MAESLRSPRRSLYKLVGSPPWKEAFRQRCLERMRNSRDRLLNRYRQAGSSGPGNSQNSFLVQEVMEEEWNALQSVENCPEDLAQLEELIDMAVLEEIQQELINQEQSIISEYEKSLQFDEKCLSIMLAEWEANPLICPVCTKPVILGL

SEQ ID NO: 76020 - protein, 172 aa, Homo sapiens
  Payload ID: 15176
  Gene Symbol: RPAIN
  Gene Name: RPA interacting protein
  ENSP ID: ENSP00000370605
MAESLRSPRRSLYKLVGSPPWKEAFRQRCLERMRNSRDRLLNRYRQAGSSGPGNSQNSFLVQEVMEEEWNALQSVENCPEDLAQLEELIDMAVLEEIQQELINQEQSIISEYEKSLQFDEKCLSIMLAEWEANPLICPVCTKYNLRITSGVVVCQCGLSIPSHACDTWAVIL

SEQ ID NO: 76021 - protein, 219 aa, Homo sapiens
  Payload ID: 15176
  Gene Symbol: RPAIN
  Gene Name: RPA interacting protein
  ENSP ID: ENSP00000370606
MAESLRSPRRSLYKLVGSPPWKEAFRQRCLERMRNSRDRLLNRYRQAGSSGPGNSQNSFLVQEVMEEEWNALQSVENCPEDLAQLEELIDMAVLEEIQQELINQEQSIISEYEKSLQFDEKCLSIMLAEWEANPLICPVCTKYNLRITSGVVVCQCGLSIPSHSSELTEQKLRACLEGSINEHSAHCPHTPEFSVTGGTEEKSSLLMSCLACDTWAVIL

SEQ ID NO: 76022 - protein, 231 aa, Homo sapiens
  Payload ID: 15176
  Gene Symbol: RPAIN
  Gene Name: RPA interacting protein
  ENSP ID: ENSP00000385814
MAESLRSPRRSLYKLVGSPPWKEAFRQRCLERMRNSRDRLLNRYRQAGSSGPGNSQNSFLVQEVMEEEWNALQSVENCPEDLAQLEELIDMAVLEEIQQELINQEQSIISEYEKSLQFDEKCLSIMLAEWEANPLICPVCTKYNLRITSGVVVCQCGLSIPSHSSELTEQKLRACLEGSINEHSAHCPHTPEFSVTGGTEEKSSLLMSCLVSVSWDPLCGKRDLWLVLFPP

SEQ ID NO: 76023 - protein, 106 aa, Homo sapiens
  Payload ID: 15176
  Gene Symbol: RPAIN
  Gene Name: RPA interacting protein
  Uniprot ID: Q86UA6
  ENSP ID: ENSP00000439939
MAESLRSPRRSLYKLVGSPPWKEAFRQRCLERMRNSRDRLLNRYRQAGSSGPGNSQNSFLVQEVMEEEWNALQSVENCPEDLAQLEELIDMAVLEEIQQELINQGL

SEQ ID NO: 76024 - protein, 145 aa, Homo sapiens
  Payload ID: 15176
  Gene Symbol: RPAIN
  Gene Name: RPA interacting protein
  Uniprot ID: Q86UA6
  ENSP ID: ENSP00000446453
MAESLRSPRRSLYKLVGSPPWKEAFRQRCLERMRNSRDRLLNRYRQAGSSGPGNSQNSFLVQEVMEEEWNALQSVENCPEDLAQLEELIDMAVLEEIQQELINQEQSIISEYEKSLQFDEKCLSIMLAEWEANPLICPVCTNLLS

SEQ ID NO: 76025 - protein, 106 aa, Homo sapiens
  Payload ID: 15176
  Gene Symbol: RPAIN
  Gene Name: RPA interacting protein
  ENSP ID: ENSP00000458218
MAESLRSPRRSLYKLVGSPPWKEAFRQRCLERMRNSRDRLLNRYRQAGSSGPGNSQNSFLVQEVMEEEWNALQSVENCPEDLAQLEELIDMAVLEEIQQELINQVF

SEQ ID NO: 76026 - protein, 107 aa, Homo sapiens
  Payload ID: 15176
  Gene Symbol: RPAIN
  Gene Name: RPA interacting protein
  ENSP ID: ENSP00000458699
MAESLRSPRRSLYKLVGSPPWKEAFRQRCLERMRNSRDRLLNRYRQAGSSGPGNSQNSFLVQEVMEEEWNALQSVENCPEDLAQLEELIDMAVLEEIQQELINQGTT

SEQ ID NO: 76027 - protein, 107 aa, Homo sapiens; identical to SEQ ID NO: 76026
  Payload ID: 15176
  Gene Symbol: RPAIN
  Gene Name: RPA interacting protein
  ENSP ID: ENSP00000460162

SEQ ID NO: 76028 - protein, 107 aa, Homo sapiens; identical to SEQ ID NO: 76026
  Payload ID: 15176
  Gene Symbol: RPAIN
  Gene Name: RPA interacting protein
  ENSP ID: ENSP00000460354

SEQ ID NO: 76029 - protein, 106 aa, Homo sapiens; identical to SEQ ID NO: 76025
  Payload ID: 15176
  Gene Symbol: RPAIN
  Gene Name: RPA interacting protein
  ENSP ID: ENSP00000467178

SEQ ID NO: 76030 - protein, 1235 aa, Homo sapiens
  Payload ID: 15177
  Gene Symbol: RPGRIP1L
  Gene Name: RPGRIP1-like
  Uniprot ID: Q68CZ1
  ENSP ID: ENSP00000262135
MSGPTDETAGDLPVKDTGLNLFGMGGLQETSTTRTMKSRQAVSRVSREELEDRFLRLHDENILLKQHARKQEDKIKRMATKLIRLVNDKKRYERVGGGPKRLGRDVEMEEMIEQLQEKVHELEKQNETLKNRLISAKQQLQTQGYRQTPYNNVQSRINTGRRKANENAGLQECPRKGIKFQDADVAETPHPMFTKYGNSLLEEARGEIRNLENVIQSQRGQIEELEHLAEILKTQLRRKENEIELSLLQLREQQATDQRSNIRDNVEMIKLHKQLVEKSNALSAMEGKFIQLQEKQRTLRISHDALMANGDELNMQLKEQRLKCCSLEKQLHSMKFSERRIEELQDRINDLEKERELLKENYDKLYDSAFSAAHEEQWKLKEQQLKVQIAQLETALKSDLTDKTEILDRLKTERDQNEKLVQENRELQLQYLEQKQQLDELKKRIKLYNQENDINADELSEALLLIKAQKEQKNGDLSFLVKVDSEINKDLERSMRELQATHAETVQELEKTRNMLIMQHKINKDYQMEVEAVTRKMENLQQDYELKVEQYVHLLDIRAARIHKLEAQLKDIAYGTKQYKFKPEIMPDDSVDEFDETIHLERGENLFEIHINKVTFSSEVLQASGDKEPVTFCTYAFYDFELQTTPVVRGLHPEYNFTSQYLVHVNDLFLQYIQKNTITLEVHQAYSTEYETIAACQLKFHEILEKSGRIFCTASLIGTKGDIPNFGTVEYWFRLRVPMDQAIRLYRERAKALGYITSNFKGPEHMQSLSQQAPKTAQLSSTDSTDGNLNELHITIRCCNHLQSRASHLQPHPYVVYKFFDFADHDTAIIPSSNDPQFDDHMYFPVPMNMDLDRYLKSESLSFYVFDDSDTQENIYIGKVNVPLISLAHDRCISGIFELTDHQKHPAGTIHVILKWKFAYLPPSGSITTEDLGNFIRSEEPEVVQRLPPASSVSTLVLAPRPKPRQRLTPVDKKVSFVDIMPHQSDVSQEGSVDEVKENTEKMQQGKDDVSLLSEGQLAEQSLASSEDETEITEDLEPEVEEDMSASDSDDCIIPGPISKNIKQPSEKIRIEIIALSLNDSQVTMDDTIQRLFVECRFYSLPAEETPVSLPKPKSGQWVYYNYSNVIYVDKENNKAKRDILKAILQKQEMPNRSLRFTVVSDPPEDEQDLECEDIGVAHVDLADMFQEGRDLIEQNIDVFDARADGEGIGKLRVTVEALHALQSVYKQYRDDLEA

SEQ ID NO: 76031 - protein, 1315 aa, Homo sapiens
  Payload ID: 15177
  Gene Symbol: RPGRIP1L
  Gene Name: RPGRIP1-like
  Uniprot ID: Q68CZ1
  ENSP ID: ENSP00000369257
MSGPTDETAGDLPVKDTGLNLFGMGGLQETSTTRTMKSRQAVSRVSREELEDRFLRLHDENILLKQHARKQEDKIKRMATKLIRLVNDKKRYERVGGGPKRLGRDVEMEEMIEQLQEKVHELEKQNETLKNRLISAKQQLQTQGYRQTPYNNVQSRINTGRRKANENAGLQECPRKGIKFQDADVAETPHPMFTKYGNSLLEEARGEIRNLENVIQSQRGQIEELEHLAEILKTQLRRKENEIELSLLQLREQQATDQRSNIRDNVEMIKLHKQLVEKSNALSAMEGKFIQLQEKQRTLRISHDALMANGDELNMQLKEQRLKCCSLEKQLHSMKFSERRIEELQDRINDLEKERELLKENYDKLYDSAFSAAHEEQWKLKEQQLKVQIAQLETALKSDLTDKTEILDRLKTERDQNEKLVQENRELQLQYLEQKQQLDELKKRIKLYNQENDINADELSEALLLIKAQKEQKNGDLSFLVKVDSEINKDLERSMRELQATHAETVQELEKTRNMLIMQHKINKDYQMEVEAVTRKMENLQQDYELKVEQYVHLLDIRAARIHKLEAQLKDIAYGTKQYKFKPEIMPDDSVDEFDETIHLERGENLFEIHINKVTFSSEVLQASGDKEPVTFCTYAFYDFELQTTPVVRGLHPEYNFTSQYLVHVNDLFLQYIQKNTITLEVHQAYSTEYETIAACQLKFHEILEKSGRIFCTASLIGTKGDIPNFGTVEYWFRLRVPMDQAIRLYRERAKALGYITSNFKGPEHMQSLSQQAPKTAQLSSTDSTDGNLNELHITIRCCNHLQSRASHLQPHPYVVYKFFDFADHDTAIIPSSNDPQFDDHMYFPVPMNMDLDRYLKSESLSFYVFDDSDTQENIYIGKVNVPLISLAHDRCISGIFELTDHQKHPAGTIHVILKWKFAYLPPSGSITTEDLGNFIRSEEPEVVQRLPPASSVSTLVLAPRPKPRQRLTPVDKKVSFVDIMPHQSDETSPPPEDRKEISPEVEHIPEIEINMLTVPHVPKVSQEGSVDEVKENTEKMQQGKDDVSLLSEGQLAEQSLASSEDETEITEDLEPEVEEDMSASDSDDCIIPGPISKNIKQSLALSPGLGCSSAISAHCNFRLPGSSDFPASASQVDGITGACHHTQPSEKIRIEIIALSLNDSQVTMDDTIQRLFVECRFYSLPAEETPVSLPKPKSGQWVYYNYSNVIYVDKENNKAKRDILKAILQKQEMPNRSLRFTVVSDPPEDEQDLECEDIGVAHVDLADMFQEGRDLIEQNIDVFDARADGEGIGKLRVTVEALHALQSVYKQYRDDLEA

SEQ ID NO: 76032 - protein, 354 aa, Homo sapiens
  Payload ID: 15177
  Gene Symbol: RPGRIP1L
  Gene Name: RPGRIP1-like
  ENSP ID: ENSP00000455295
MSGPTDETAGDLPVKDTGLNLFGMGGLQETSTTRTMKSRQAVSRVSREELEDRFLRLHDENILLKQHARKQEDKIKRMATKLIRLVNDKKRYERVGGGPKRLGRDVEMEEMIEQLQEKVHELEKQNETLKNRLISAKQQLQTQGYRQTPYNNVQSRINTGRRKANENAGLQECPRKGIKFQDADVAETPHPMFTKYGNSLLEEARGEIRNLENVIQSQRGQIEELEHLAEILKTQLRRKENEIELSLLQLREQQATDQRSNIRDNVEMIKLHKQLVEKSNALSAMEGKFIQLQEKQRTLRISHDALMANGDELNMQLKEQRLKCCSLEKQLHSMKFSERRIEELQDRINDLEKE

SEQ ID NO: 76033 - protein, 125 aa, Homo sapiens
  Payload ID: 15177
  Gene Symbol: RPGRIP1L
  Gene Name: RPGRIP1-like
  ENSP ID: ENSP00000455451
MSGPTDETAGDLPVKDTGLNLFGMGGLQETSTTRTMKSRQAVSRVSREELEDRFLRLHDENILLKQHARKQEDKIKRFKEKVRQPLKNENRVFLLRIHPKEVVPVQFLLCGLQQPTGMLCAGLLL

SEQ ID NO: 76034 - protein, 1253 aa, Homo sapiens
  Payload ID: 15177
  Gene Symbol: RPGRIP1L
  Gene Name: RPGRIP1-like
  ENSP ID: ENSP00000456534
MSGPTDETAGDLPVKDTGLNLFGMGGLQETSTTRTMKSRQAVSRVSREELEDRFLRLHDENILLKQHARKQEDKIKRMATKLIRLVNDKKRYERVGGGPKRLGRDVEMEEMIEQLQEKVHELEKQNETLKNRLISAKQQLQTQGYRQTPYNNVQSRINTGRRKANENAGLQECPRKGIKFQDADVAETPHPMFTKYGNSLLEEARGEIRNLENVIQSQRGQIEELEHLAEILKTQLRRKENEIELSLLQLREQQATDQRSNIRDNVEMIKLHKQLVEKSNALSAMEGKFIQLQEKQRTLRISHDALMANGDELNMQLKEQRLKCCSLEKQLHSMKFSERRIEELQDRINDLEKERELLKENYDKLYDSAFSAAHEEQWKLKEQQLKVQIAQLETALKSDLTDKTEILDRLKTERDQNEKLVQENRELQLQYLEQKQQLDELKKRIKLYNQENDINADELSEALLLIKAQKEQKNGDLSFLVKVDSEINKDLERSMRELQATHAETVQELEKTRNMLIMQHKINKDYQMEVEAVTRKMENLQQDYELKVEQYVHLLDIRAARIHKLEAQLKDIAYGTKQYKFKPEIMPDDSVDEFDETIHLERGENLFEIHINKVTFSSEVLQASGDKEPVTFCTYAFYDFELQTTPVVRGLHPEYNFTSQYLVHVNDLFLQYIQKNTITLEVHQAYSTEYETIAACQLKFHEILEKSGRIFCTASLIGTKGDIPNFGTVEYWFRLRVPMDQAIRLYRERAKALGYITSNFKGPEHMQSLSQQAPKTAQLSSTDSTDGNLNELHITIRCCNHLQSRASHLQPHPYVVYKFFDFADHDTAIIPSSNDPQFDDHMYFPVPMNMDLDRYLKSESLSFYVFDDSDTQENIYIGKVNVPLISLAHDRCISGIFELTDHQKHPAGTIHVILKWKFAYLPPSGSITTEDLGNFIRSEEPEVVQRLPPASSVSTLVLAPRPKPRQRLTPVDKKVSFVDIMPHQSDETSPPPEDRKEISPEVEHIPEIEINMLTVPHVPKVSQEGSVDEVKENTEKMQQGKDDVSLLSEGQLAEQSLASSEDETEITEDLEPEVEEDMSASDSDDCIIPGPISKNIKQPSEKIRIEIIALSLNDSQVTMDDTIQRLFVECRFYSLPAEETPVSLPKPKSGQWVYYNYSNVIYVDKENNKAKRDILKAILQKQEMPNRSLRFTVVSDPPEDEQDLECEDIGVAHVDLADMFQEGRDLIEQNIDGMGESVAQFVQPTIAELQTLY

SEQ ID NO: 76035 - protein, 1281 aa, Homo sapiens
  Payload ID: 15177
  Gene Symbol: RPGRIP1L
  Gene Name: RPGRIP1-like
  ENSP ID: ENSP00000457889
MSGPTDETAGDLPVKDTGLNLFGMGGLQETSTTRTMKSRQAVSRVSREELEDRFLRLHDENILLKQHARKQEDKIKRMATKLIRLVNDKKRYERVGGGPKRLGRDVEMEEMIEQLQEKVHELEKQNETLKNRLISAKQQLQTQGYRQTPYNNVQSRINTGRRKANENAGLQECPRKGIKFQDADVAETPHPMFTKYGNSLLEEARGEIRNLENVIQSQRGQIEELEHLAEILKTQLRRKENEIELSLLQLREQQATDQRSNIRDNVEMIKLHKQLVEKSNALSAMEGKFIQLQEKQRTLRISHDALMANGDELNMQLKEQRLKCCSLEKQLHSMKFSERRIEELQDRINDLEKERELLKENYDKLYDSAFSAAHEEQWKLKEQQLKVQIAQLETALKSDLTDKTEILDRLKTERDQNEKLVQENRELQLQYLEQKQQLDELKKRIKLYNQENDINADELSEALLLIKAQKEQKNGDLSFLVKVDSEINKDLERSMRELQATHAETVQELEKTRNMLIMQHKINKDYQMEVEAVTRKMENLQQDYELKVEQYVHLLDIRAARIHKLEAQLKDIAYGTKQYKFKPEIMPDDSVDEFDETIHLERGENLFEIHINKVTFSSEVLQASGDKEPVTFCTYAFYDFELQTTPVVRGLHPEYNFTSQYLVHVNDLFLQYIQKNTITLEVHQAYSTEYETIAACQLKFHEILEKSGRIFCTASLIGTKGDIPNFGTVEYWFRLRVPMDQAIRLYRERAKALGYITSNFKGPEHMQSLSQQAPKTAQLSSTDSTDGNLNELHITIRCCNHLQSRASHLQPHPYVVYKFFDFADHDTAIIPSSNDPQFDDHMYFPVPMNMDLDRYLKSESLSFYVFDDSDTQENIYIGKVNVPLISLAHDRCISGIFELTDHQKHPAGTIHVILKWKFAYLPPSGSITTEDLGNFIRSEEPEVVQRLPPASSVSTLVLAPRPKPRQRLTPVDKKVSFVDIMPHQSDVSQEGSVDEVKENTEKMQQGKDDVSLLSEGQLAEQSLASSEDETEITEDLEPEVEEDMSASDSDDCIIPGPISKNIKQSLALSPGLGCSSAISAHCNFRLPGSSDFPASASQVDGITGACHHTQPSEKIRIEIIALSLNDSQVTMDDTIQRLFVECRFYSLPAEETPVSLPKPKSGQWVYYNYSNVIYVDKENNKAKRDILKAILQKQEMPNRSLRFTVVSDPPEDEQDLECEDIGVAHVDLADMFQEGRDLIEQNIDVFDARADGEGIGKLRVTVEALHALQSVYKQYRDDLEA

SEQ ID NO: 76036 - protein, 78 aa, Homo sapiens
  Payload ID: 15177
  Gene Symbol: RPGRIP1L
  Gene Name: RPGRIP1-like
  ENSP ID: ENSP00000458705
MSGPTDETAGDLPVKDTGLNLFGMGGLQETSTTRTMKSRQAVSRVSREELEDRFLRLHDENILLKQHARKQEDKIKRL

SEQ ID NO: 76037 - protein, 122 aa, Homo sapiens
  Payload ID: 15177
  Gene Symbol: RPGRIP1L
  Gene Name: RPGRIP1-like
  ENSP ID: ENSP00000459817
MSGPTDETAGDLPVKDTGLNLFGMGGLQETSTTRTMKSRQAVSRVSREELEDRFLRLHDENILLKQHARKQEDKIKRMATKLIRLVNDKKRYERVGGGPKRLGRDVEMEEMIEQLQEKVHEL

SEQ ID NO: 76038 - protein, 56 aa, Homo sapiens
  Payload ID: 15177
  Gene Symbol: RPGRIP1L
  Gene Name: RPGRIP1-like
  ENSP ID: ENSP00000463678
MSGPTDETAGDLPVKDTGLNLFGMGGLQETSTTRTMKSRQAVSRVSREELEDRFLR

SEQ ID NO: 76039 - protein, 1269 aa, Homo sapiens
  Payload ID: 15177
  Gene Symbol: RPGRIP1L
  Gene Name: RPGRIP1-like
  ENSP ID: ENSP00000480698
MSGPTDETAGDLPVKDTGLNLFGMGGLQETSTTRTMKSRQAVSRVSREELEDRFLRLHDENILLKQHARKQEDKIKRMATKLIRLVNDKKRYERVGGGPKRLGRDVEMEEMIEQLQEKVHELEKQNETLKNRLISAKQQLQTQGYRQTPYNNVQSRINTGRRKANENAGLQECPRKGIKFQDADVAETPHPMFTKYGNSLLEEARGEIRNLENVIQSQRGQIEELEHLAEILKTQLRRKENEIELSLLQLREQQATDQRSNIRDNVEMIKLHKQLVEKSNALSAMEGKFIQLQEKQRTLRISHDALMANGDELNMQLKEQRLKCCSLEKQLHSMKFSERRIEELQDRINDLEKERELLKENYDKLYDSAFSAAHEEQWKLKEQQLKVQIAQLETALKSDLTDKTEILDRLKTERDQNEKLVQENRELQLQYLEQKQQLDELKKRIKLYNQENDINADELSEALLLIKAQKEQKNGDLSFLVKVDSEINKDLERSMRELQATHAETVQELEKTRNMLIMQHKINKDYQMEVEAVTRKMENLQQDYELKVEQYVHLLDIRAARIHKLEAQLKDIAYGTKQYKFKPEIMPDDSVDEFDETIHLERGENLFEIHINKVTFSSEVLQASGDKEPVTFCTYAFYDFELQTTPVVRGLHPEYNFTSQYLVHVNDLFLQYIQKNTITLEVHQAYSTEYETIAACQLKFHEILEKSGRIFCTASLIGTKGDIPNFGTVEYWFRLRVPMDQAIRLYRERAKALGYITSNFKGPEHMQSLSQQAPKTAQLSSTDSTDGNLNELHITIRCCNHLQSRASHLQPHPYVVYKFFDFADHDTAIIPSSNDPQFDDHMYFPVPMNMDLDRYLKSESLSFYVFDDSDTQENIYIGKVNVPLISLAHDRCISGIFELTDHQKHPAGTIHVILKWKFAYLPPSGSITTEDLGNFIRSEEPEVVQRLPPASSVSTLVLAPRPKPRQRLTPVDKKVSFVDIMPHQSDETSPPPEDRKEISPEVEHIPEIEINMLTVPHVPKVSQEGSVDEVKENTEKMQQGKDDVSLLSEGQLAEQSLASSEDETEITEDLEPEVEEDMSASDSDDCIIPGPISKNIKQPSEKIRIEIIALSLNDSQVTMDDTIQRLFVECRFYSLPAEETPVSLPKPKSGQWVYYNYSNVIYVDKENNKAKRDILKAILQKQEMPNRSLRFTVVSDPPEDEQDLECEDIGVAHVDLADMFQEGRDLIEQNIDVFDARADGEGIGKLRVTVEALHALQSVYKQYRDDLEA

SEQ ID NO: 76040 - protein, 190 aa, Homo sapiens
  Payload ID: 15178
  Gene Symbol: RPL17-C18orf32
  Gene Name: RPL17-C18orf32 readthrough
  ENSP ID: ENSP00000352143
MHIRKATKYLKDVTLQKQCVPFRRYNGGVGRCAQAKQWGWTQGRWPKKSAEFLLHMLKNAESNAELKGLDVDSLVIEHIQVNKAPKMRRRTYRAHGRINPYMSSPCHIEMILTEKEQIVPKPEEEVAQKKKLRSSSLGKWCAFLVSSFQFCSGSTKNSWSHIYTLWFPPSLVVYGLRKQYKNPMIQTKAK

SEQ ID NO: 76041 - protein, 184 aa, Homo sapiens [sequence omitted]

SEQ ID NO: 76042 - protein, 228 aa, Homo sapiens
  Payload ID: 15178
  Gene Symbol: RPL17-C18orf32
  Gene Name: RPL17-C18orf32 readthrough
  ENSP ID: ENSP00000463379
MVRYSLDPENPTKSCKSRGSNLRVHFKNTRETAQAIKGMHIRKATKYLKDVTLQKQCVPFRRYNGGVGRCAQAKQWGWTQGRWPKKSAEFLLHMLKNAESNAELKGLDVDSLVIEHIQVNKAPKMRRRTYRAHGRINPYMSSPCHIEMILTEKEQIVPKPEEEVAQKKKLRSSSLGKWCAFLVSSFQFCSGSTKNSWSHIYTLWFPPSLVVYGLRKQYKNPMIQTKAK

SEQ ID NO: 76043 - protein, 118 aa, Homo sapiens
  Payload ID: 15179
  Gene Symbol: RPL36A-HNRNPH2
  Gene Name: RPL36A-HNRNPH2 readthrough
  ENSP ID: ENSP00000386655
MVNVPKTRRTFCKKCGKHQPHKVTQYKKGKDSLYAQGKRRYDRKQSGYGGQTKPIFRKKAKTTKKIVLRLECVEPNCRSKRMLAIKRCKHFELGGDKKRKLHQNCIEPNLPPRAQQSP

SEQ ID NO: 76044 - protein, 77 aa, Homo sapiens
  Payload ID: 15179
  Gene Symbol: RPL36A-HNRNPH2
  Gene Name: RPL36A-HNRNPH2 readthrough
  ENSP ID: ENSP00000386974
MVNVPKTRRTFCKKCGKHQPHKVTQYKKGKDSLYAQGKRRYDRKQSGYGGQTKPIFRKKLHQNCIEPNLPPRAQQSP

SEQ ID NO: 76045 - protein, 286 aa, Homo sapiens
  Payload ID: 15180
  Gene Symbol: RPS10-NUDT3
  Gene Name: RPS10-NUDT3 readthrough
  ENSP ID: ENSP00000475027
MLMPKKNRIAIYELLFKEGVMVAKKDVHMPKHPELADKNVPNLHVMKAMQSLKSRGYVKEQFAWRHFYWYLTNEGIQYLRDYLHLPPEIVPATLRRSRPETGRPRPKGLEGERPARLTRGEADRDTYRRSAVPPGADKKAEAGAGSATEFQFVLLVSSSRHPDRWIVPGGGMEPEEEPSVAAVREVCEEAGVKGTLGRLVGIFENQERKHRTYVYVLIVTEVLEDWEDSVNIGRKREWFKIEDAIKVLQYHKPVQASYFETLRQGYSANNGTPVVATTYSVSAQSS

SEQ ID NO: 76046 - protein, 1732 aa, Homo sapiens
  Payload ID: 15181
  Gene Symbol: RICTOR
  Gene Name: RPTOR independent companion of MTOR, complex 2
  Uniprot ID: Q6R327
  ENSP ID: ENSP00000296782
MAAIGRGRSLKNLRVRGRNDSGEENVPLDLTREPSDNLREILQNVARLQGVSNMRKLGHLNNFTKLLCDIGHSEEKLGFHYEDIIICLRLALLNEAKEVRAAGLRALRYLIQDSSILQKVLKLKVDYLIARCIDIQQSNEVERTQALRLVRKMITVNASLFPSSVTNSLIAVGNDGLQERDRMVRACIAIICELALQNPEVVALRGGLNTILKNVIDCQLSRINEALITTILHLLNHPKTRQYVRADVELERILAPYTDFHYRHSPDTAEGQLKEDREARFLASKMGIIATFRSWAGIINLCKPGNSGIQSLIGVLCIPNMEIRRGLLEVLYDIFRLPLPVVTEEFIEALLSVDPGRFQDSWRLSDGFVAAEAKTILPHRARSRPDLMDNYLALILSAFIRNGLLEGLVEVITNSDDHISVRATILLGELLHMANTILPHSHSHHLHCLPTLMNMAASFDIPKEKRLRASAALNCLKRFHEMKKRGPKPYSLHLDHIIQKAIATHQKRDQYLRVQKDIFILKDTEEALLINLRDSQVLQHKENLEWNWNLIGTILKWPNVNLRNYKDEQLHRFVRRLLYFYKPSSKLYANLDLDFAKAKQLTVVGCQFTEFLLESEEDGQGYLEDLVKDIVQWLNASSGMKPERSLQNNGLLTTLSQHYFLFIGTLSCHPHGVKMLEKCSVFQCLLNLCSLKNQDHLLKLTVSSLDYSRDGLARVILSKILTAATDACRLYATKHLRVLLRANVEFFNNWGIELLVTQLHDKNKTISSEALDILDEACEDKANLHALIQMKPALSHLGDKGLLLLLRFLSIPKGFSYLNERGYVAKQLEKWHREYNSKYVDLIEEQLNEALTTYRKPVDGDNYVRRSNQRLQRPHVYLPIHLYGQLVHHKTGCHLLEVQNIITELCRNVRTPDLDKWEEIKKLKASLWALGNIGSSNWGLNLLQEENVIPDILKLAKQCEVLSIRGTCVYVLGLIAKTKQGCDILKCHNWDAVRHSRKHLWPVVPDDVEQLCNELSSIPSTLSLNSESTSSRHNSESESVPSSMFILEDDRFGSSSTSTFFLDINEDTEPTFYDRSGPIKDKNSFPFFASSKLVKNRILNSLTLPNKKHRSSSDPKGGKLSSESKTSNRRIRTLTEPSVDFNHSDDFTPISTVQKTLQLETSFMGNKHIEDTGSTPSIGENDLKFTKNFGTENHRENTSRERLVVESSTSSHMKIRSQSFNTDTTTSGISSMSSSPSRETVGVDATTMDTDCGSMSTVVSTKTIKTSHYLTPQSNHLSLSKSNSVSLVPPGSSHTLPRRAQSLKAPSIATIKSLADCNFSYTSSRDAFGYATLKRLQQQRMHPSLSHSEALASPAKDVLFTDTITMKANSFESRLTPSRIDFKKKHVGGIRSLRPTITNNLFRFMKALSYASLDKEDLLSPINQNTLQRSSSVRSMVSSATYGGSDDYIGLALPVDINDIFQVKDIPYFQTKNIPPHDDRGARAFAHDAGGLPSGTGGLVKNSFHLLRQQMSLTEIMNSIHSDASLFLESTEDTGLQEHTDDNCLYCVCIEILGFQPSNQLSAICSHSDFQDIPYSDWCEQTIHNPLEVVPSKFSGISGCSDGVSQEGSASSTKSTELLLGVKTIPDDTPMCRILLRKEVLRLVINLSSSVSTKCHETGLLTIKEKYPQTFDDICLYSEVSHLLSHCTFRLPCRRFIQELFQDVQFLQMHEEAEAVLATPPKQPIVDTSAES

SEQ ID NO: 76047 - protein, 1708 aa, Homo sapiens
  Payload ID: 15181
  Gene Symbol: RICTOR
  Gene Name: RPTOR independent companion of MTOR, complex 2
  Uniprot ID: Q6R327
  ENSP ID: ENSP00000349959
MAAIGRGRSLKNLRVRGRNDSGEENVPLDLTREPSDNLREILQNVARLQGVSNMRKLGHLNNFTKLLCDIGHSEEKLGFHYEDIIICLRLALLNEAKEVRAAGLRALRYLIQDSSILQKVLKLKVDYLIARCIDIQQSNEVERTQALRLVRKMITVNASLFPSSVTNSLIAVGNDGLQERDRMVRACIAIICELALQNPEVVALRGGLNTILKNVIDCQLSRINEALITTILHLLNHPKTRQYVRADVELERILAPYTDFHYRHSPDTAEGQLKEDREARFLASKMGIIATFRSWAGIINLCKPGNSGIQSLIGVLCIPNMEIRRGLLEVLYDIFRLPLPVVTEEFIEALLSVDPGRFQDSWRLSDGFVAAEAKTILPHRARSRPDLMDNYLALILSAFIRNGLLEGLVEVITNSDDHISVRATILLGELLHMANTILPHSHSHHLHCLPTLMNMAASFDIPKEKRLRASAALNCLKRFHEMKKRGPKPYSLHLDHIIQKAIATHQKRDQYLRVQKDIFILKDTEEALLINLRDSQVLQHKENLEWNWNLIGTILKWPNVNLRNYKDEQLHRFVRRLLYFYKPSSKLYANLDLDFAKAKQLTVVGCQFTEFLLESEEDGQGYLEDLVKDIVQWLNASSGMKPERSLQNNGLLTTLSQHYFLFIGTLSCHPHGVKMLEKCSVFQCLLNLCSLKNQDHLLKLTVSSLDYSRDGLARVILSKILTAATDACRLYATKHLRVLLRANVEFFNNWGIELLVTQLHDKNKTISSEALDILDEACEDKANLHALIQMKPALSHLGDKGLLLLLRFLSIPKGFSYLNERGYVAKQLEKWHREYNSKYVDLIEEQLNEALTTYRKPVDGDNYVRRSNQRLQRPHVYLPIHLYGQLVHHKTGCHLLEVQNIITELCRNVRTPDLDKWEEIKKLKASLWALGNIGSSNWGLNLLQEENVIPDILKLAKQCEVLSIRGTCVYVLGLIAKTKQGCDILKCHNWDAVRHSRKHLWPVVPDDVEQLCNELSSIPSTLSLNSESTSSRHNSESESVPSSMFILEDDRFGSSSTSTFFLDINEDTEPTFYDRSGPIKDKNSFPFFASSKLVKNRILNSLTLPNKKHRSSSDPKGGKLSSESKTSNRRIRTLTEPSVDFNHSDDFTPISTVQKTLQLETSFMGNKHIEDTGSTPSIGENDLKFTKNFGTENHRENTSRERLVVESSTSSHMKIRSQSFNTDTTTSGISSMSSSPSRETVGVDATTMDTDCGSMSTVVSTKTIKTSHYLTPQSNHLSLSKSNSVSLVPPGSSHTLPRRAQSLKAPSIATIKSLADCNFSYTSSRDAFGYATLKRLQQQRMHPSLSHSEALASPAKDVLFTDTITMKANSFESRLTPSRFMKALSYASLDKEDLLSPINQNTLQRSSSVRSMVSSATYGGSDDYIGLALPVDINDIFQVKDIPYFQTKNIPPHDDRGARAFAHDAGGLPSGTGGLVKNSFHLLRQQMSLTEIMNSIHSDASLFLESTEDTGLQEHTDDNCLYCVCIEILGFQPSNQLSAICSHSDFQDIPYSDWCEQTIHNPLEVVPSKFSGISGCSDGVSQEGSASSTKSTELLLGVKTIPDDTPMCRILLRKEVLRLVINLSSSVSTKCHETGLLTIKEKYPQTFDDICLYSEVSHLLSHCTFRLPCRRFIQELFQDVQFLQMHEEAEAVLATPPKQPIVDTSAES

SEQ ID NO: 76048 - protein, 257 aa, Homo sapiens
  Payload ID: 15181
  Gene Symbol: RICTOR
  Gene Name: RPTOR independent companion of MTOR, complex 2
  Uniprot ID: Q6R327
  ENSP ID: ENSP00000423019
MAAIGRGRSLKNLRVRGRNDSGEENVPLDLTREPSDNLREILQNVARLQGVSNMRKLGHLNNFTKLLCDIGHSEEKLGFHYEDIIICLRLALLNEAKEVRAAGLRALRYLIQDSSILQKVLKLKVDYLIARCIDIQQSNEVERTQALRLVRKMITVNASLFPSSVTNSLIAVGNDGLQERDRMVRACIAIICELALQNPEVVALRGGLNTILKNVIDCQLSRINEALITTILHLLNHPKTRQYVRADVELENFSTLY

SEQ ID NO: 76049 - protein, 224 aa, Homo sapiens
  Payload ID: 15181
  Gene Symbol: RICTOR
  Gene Name: RPTOR independent companion of MTOR, complex 2
  ENSP ID: ENSP00000423162
MAAIGRGRSLKNLRVREPSDNLREILQNVARLQGVSNMRKLGHLNNFTKLLCDIGHSEEKLGFHYEDIIICLRLALLNEAKEVRAAGLRALRYLIQDSSILQKVLKLKVDYLIARCIDIQQSNEVERTQALRLVRKMITVNASLFPSSVTNSLIAVGNDGLQERDRMVRACIAIICELALQNPEVVALRGGLNTILKNVIDCQLSRINEALITTILHLLNHPKT

SEQ ID NO: 76050 - protein, 651 aa, Homo sapiens
  Payload ID: 15182
  Gene Symbol: RRN3
  Gene Name: RRN3 homolog, RNA polymerase I transcription factor
  Uniprot ID: Q9NYV6
  ENSP ID: ENSP00000198767
MAAPLLHTRLPGDAAASSSAVKKLGASRTGISNMRALENDFFNSPPRKTVRFGGTVTEVLLKYKKGETNDFELLKNQLLDPDIKDDQIINWLLEFRSSIMYLTKDFEQLISIILRLPWLNRSQTVVEEYLAFLGNLVSAQTVFLRPCLSMIASHFVPPRVIIKEGDVDVSDSDDEDDNLPANFDTCHRALQIIARYVPSTPWFLMPILVEKFPFVRKSERTLECYVHNLLRISVYFPTLRHEILELIIEKLLKLDVNASRQGIEDAEETATQTCGGTDSTEGLFNMDEDEETEHETKAGPERLDQMVHPVAERLDILMSLVLSYMKDVCYVDGKVDNGKTKDLYRDLINIFDKLLLPTHASCHVQFFMFYLCSFKLGFAEAFLEHLWKKLQDPSNPAIIRQAAGNYIGSFLARAKFIPLITVKSCLDLLVNWLHIYLNNQDSGTKAFCDVALHGPFYSACQAVFYTFVFRHKQLLSGNLKEGLQYLQSLNFERIVMSQLNPLKICLPSVVNFFAAITNKYQLVFCYTIIERNNRQMLPVIRSTAGGDSVQICTNPLDTFFPFDPCVLKRSKKFIDPIYQVWEDMSAEELQEFKKPMKKDIVEDEDDDFLKGEVPQNDTVIGITPSSFDTHFRSPSSSVGSPPVLYMQPSPL

SEQ ID NO: 76051 - protein, 618 aa, Homo sapiens
  Payload ID: 15182
  Gene Symbol: RRN3
  Gene Name: RRN3 homolog, RNA polymerase I transcription factor
  Uniprot ID: Q9NYV6
  ENSP ID: ENSP00000318484
MRALENDFFNSPPRKTVRFGGTVTEVLLKYKKGETNDFELLKNQLLDPDIKDDQIINWLLEFRSSIMYLTKDFEQLISIILRLPWLNRSQTVVEEYLAFLGNLVSAQTVFLRPCLSMIASHFVPPRVIIKEGDVDVSDSDDEDDNLPANFDTCHRALQIIARYVPSTPWFLMPILVEKFPFVRKSERTLECYVHNLLRISVYFPTLRHEILELIIEKLLKLDVNASRQGIEDAEETATQTCGGTDSTEGLFNMDEDEETEHETKAGPERLDQMVHPVAERLDILMSLVLSYMKDVCYVDGKVDNGKTKDLYRDLINIFDKLLLPTHASCHVQFFMFYLCSFKLGFAEAFLEHLWKKLQDPSNPAIIRQAAGNYIGSFLARAKFIPLITVKSCLDLLVNWLHIYLNNQDSGTKAFCDVALHGPFYSACQAVFYTFVFRHKQLLSGNLKEGLQYLQSLNFERIVMSQLNPLKICLPSVVNFFAAITNKYQLVFCYTIIERNNRQMLPVIRSTAGGDSVQICTNPLDTFFPFDPCVLKRSKKFIDPIYQVWEDMSAEELQEFKKPMKKDIVEDEDDDFLKGEVPQNDTVIGITPSSFDTHFRSPSSSVGSPPVLYMQPSPL

SEQ ID NO: 76052 - protein, 621 aa, Homo sapiens
  Payload ID: 15182
  Gene Symbol: RRN3
  Gene Name: RRN3 homolog, RNA polymerase I transcription factor
  ENSP ID: ENSP00000402027
MAAPLLHTRLPGDAAASSSAVKKLGASRTGISNMRALENDFFNSPPRKTVRFGGTVTEVLLKYKKGETNDFELLKNQLLDPDIKRLPWLNRSQTVVEEYLAFLGNLVSAQTVFLRPCLSMIASHFVPPRVIIKEGDVDVSDSDDEDDNLPANFDTCHRALQIIARYVPSTPWFLMPILVEKFPFVRKSERTLECYVHNLLRISVYFPTLRHEILELIIEKLLKLDVNASRQGIEDAEETATQTCGGTDSTEGLFNMDEDEETEHETKAGPERLDQMVHPVAERLDILMSLVLSYMKDVCYVDGKVDNGKTKDLYRDLINIFDKLLLPTHASCHVQFFMFYLCSFKLGFAEAFLEHLWKKLQDPSNPAIIRQAAGNYIGSFLARAKFIPLITVKSCLDLLVNWLHIYLNNQDSGTKAFCDVALHGPFYSACQAVFYTFVFRHKQLLSGNLKEGLQYLQSLNFERIVMSQLNPLKICLPSVVNFFAAITNKYQLVFCYTIIERNNRQMLPVIRSTAGGDSVQICTNPLDTFFPFDPCVLKRSKKFIDPIYQVWEDMSAEELQEFKKPMKKDIVEDEDDDFLKGEVPQNDTVIGITPSSFDTHFRSPSSSVGSPPVLYMQPSPL

SEQ ID NO: 76053 - protein, 305 aa, Homo sapiens
  Payload ID: 15182
  Gene Symbol: RRN3
  Gene Name: RRN3 homolog, RNA polymerase I transcription factor
  Uniprot ID: Q9NYV6
  ENSP ID: ENSP00000454238
MAAPLLHTRLPGDAAASSSAVKKLGASRTGISNMRALENDFFNSPPRKTVRFGGTVTEVLLKYKKGETNDFELLKNQLLDPDIKDDQIINWLLEFRSSIMYLTKDFEQLISIILRLPWLNRSQTVVEEYLAFLGNLVSAQTVFLRPCLSMIASHFVPPRVIIKEGDVDVSDSDDEDDNLPANFDTCHRALQIIARYVPSTPWFLMPILVEKFPFVRKSERTLECYVHNLLRISVYFPTLRHEILELIIEKLLKLDVNASRQGIEDAEETATQTCGGTDSTEGLFNMVSSLLMKVEMKFIIKGGNS

SEQ ID NO: 76054 - protein, 638 aa, Homo sapiens
  Payload ID: 15182
  Gene Symbol: RRN3
  Gene Name: RRN3 homolog, RNA polymerase I transcription factor
  ENSP ID: ENSP00000454530
MAAPLLHTRLPGDAAASSSAVKKLGASRTGISNMRALENDFFNSPPRKTVRFGGTVTEVLLKYKKGETNDFELLKNQLLDPDIKDDQIINWLLEFRSSIMYLTKDFEQLISIILRLPWLNRSQTVVEEYLAFLGNLVSAQTVFLRPCLSMIASHFVPPRVIIKEGDVDVSDSDDEDDNLPANFDTCHRALQIIARYVPSTPWFLMPILVEKFPFVRKSERTLECYVHNLLRISVYFPTLRHEILELIIEKLLKLDVNASRQGIEDAEETATQTCGGTDSTEGLFNMDEDEETEHETKAGPERLDQMVHPVAERLDILMSLVLSYMKDVCYVDGKVDNGKTKDLYRDLINIFDKLLLPTHASCHVQFFMFYLCSFKLGFAEAFLEHLWKKLQDPSNPAIIRQAAGNYIGSFLARAKFIPLITVKSCLDLLVNWLHIYLNNQDSGTKAFCDVALHGPFYSACQAVFYTFVFRHKQLLSGNLKEGLQYLQSLNFERIVMSQLNPLKICLPSVVNFFAAITNKYQLVFCYTIIERNNRQMLPVIRSTAGGDSVQICTNPLDTFFPFDPCVLKRSKKFIDPIYQVWEDMSAEELQEFKKPMKKDIVEDEDDDFLKGEVPQNDTVIGITPSSFDTHFRSPSSSF

SEQ ID NO: 76055 - protein, 651 aa, Homo sapiens; identical to SEQ ID NO: 76050
  Payload ID: 15182
  Gene Symbol: RRN3
  Gene Name: RRN3 homolog, RNA polymerase I transcription factor
  Uniprot ID: Q9NYV6
  ENSP ID: ENSP00000480743

SEQ ID NO: 76056 - protein, 638 aa, Homo sapiens; identical to SEQ ID NO: 76054
  Payload ID: 15182
  Gene Symbol: RRN3
  Gene Name: RRN3 homolog, RNA polymerase I transcription factor
  ENSP ID: ENSP00000487746

SEQ ID NO: 76057 - protein, 305 aa, Homo sapiens; identical to SEQ ID NO: 76053
  Payload ID: 15182
  Gene Symbol: RRN3
  Gene Name: RRN3 homolog, RNA polymerase I transcription factor
  Uniprot ID: Q9NYV6
  ENSP ID: ENSP00000487821

SEQ ID NO: 76058 - protein, 621 aa, Homo sapiens; identical to SEQ ID NO: 76052
  Payload ID: 15182
  Gene Symbol: RRN3
  Gene Name: RRN3 homolog, RNA polymerase I transcription factor
  ENSP ID: ENSP00000487970

SEQ ID NO: 76059 - protein, 618 aa, Homo sapiens; identical to SEQ ID NO: 76051
  Payload ID: 15182
  Gene Symbol: RRN3
  Gene Name: RRN3 homolog, RNA polymerase I transcription factor
  Uniprot ID: Q9NYV6
  ENSP ID: ENSP00000488651

SEQ ID NO: 76060 - protein, 263 aa, Homo sapiens
  Payload ID: 15183
  Gene Symbol: RSPO1
  Gene Name: R-spondin 1
  Uniprot ID: Q2MKA7
  ENSP ID: ENSP00000348944
MRLGLCVVALVLSWTHLTISSRGIKGKRQRRISAEGSQACAKGCELCSEVNGCLKCSPKLFILLERNDIRQVGVCLPSCPPGYFDARNPDMNKCIKCKIEHCEACFSHNFCTKCKEGLYLHKGRCYPACPEGSSAANGTMECSSPAQCEMSEWSPWGPCSKKQQLCGFRRGSEERTRRVLHAPVGDHAACSDTKETRRCTVRRVPCPEGQKRRKGGQGRRENANRNLARKESKEAGAGSRRRKGQQQQQQQGTVGPLTSAGPA

SEQ ID NO: 76061 - protein, 263 aa, Homo sapiens; identical to SEQ ID NO: 76060
  Payload ID: 15183
  Gene Symbol: RSPO1
  Gene Name: R-spondin 1
  Uniprot ID: Q2MKA7
  ENSP ID: ENSP00000383846

SEQ ID NO: 76062 - protein, 200 aa, Homo sapiens
  Payload ID: 15183
  Gene Symbol: RSPO1
  Gene Name: R-spondin 1
  Uniprot ID: Q2MKA7
  ENSP ID: ENSP00000479832
MRLGLCVVALVLSWTHLTISSRGIKGKRQRRISAEGSQACAKGCELCSEVNGCLKCSPKLFILLERNDIRQVGVCLPSCPPGYFDARNPDMNKCIKCKIEHCEACFSHNFCTKCKEGLYLHKGRCYPACPEGSSAANGTMECSSPGQKRRKGGQGRRENANRNLARKESKEAGAGSRRRKGQQQQQQQGTVGPLTSAGPA

SEQ ID NO: 76063 - protein, 236 aa, Homo sapiens
  Payload ID: 15183
  Gene Symbol: RSPO1
  Gene Name: R-spondin 1
  Uniprot ID: Q2MKA7
  ENSP ID: ENSP00000481178
MIFRVSAEGSQACAKGCELCSEVNGCLKCSPKLFILLERNDIRQVGVCLPSCPPGYFDARNPDMNKCIKCKIEHCEACFSHNFCTKCKEGLYLHKGRCYPACPEGSSAANGTMECSSPAQCEMSEWSPWGPCSKKQQLCGFRRGSEERTRRVLHAPVGDHAACSDTKETRRCTVRRVPCPEGQKRRKGGQGRRENANRNLARKESKEAGAGSRRRKGQQQQQQQGTVGPLTSAGPA

SEQ ID NO: 76064 - protein, 243 aa, Homo sapiens
  Payload ID: 15184
  Gene Symbol: RSPO2
  Gene Name: R-spondin 2
  Uniprot ID: Q6UXX9
  ENSP ID: ENSP00000276659
MQFRLFSFALIILNCMDYSHCQGNRWRRSKRASYVSNPICKGCLSCSKDNGCSRCQQKLFFFLRREGMRQYGECLHSCPSGYYGHRAPDMNRCARCRIENCDSCFSKDFCTKCKVGFYLHRGRCFDECPDGFAPLEETMECVEGCEVGHWSEWGTCSRNNRTCGFKWGLETRTRQIVKKPVKDTILCPTIAESRRCKMTMRHCPGGKRTPKAKEKRNKKKKRKLIERAQEQHSVFLATDRANQ

SEQ ID NO: 76065 - protein, 179 aa, Homo sapiens
  Payload ID: 15184
  Gene Symbol: RSPO2
  Gene Name: R-spondin 2
  Uniprot ID: Q6UXX9
  ENSP ID: ENSP00000427937
MQFRLFSFALIILNCMDYSHCQGNRWRRSKRGCRIENCDSCFSKDFCTKCKVGFYLHRGRCFDECPDGFAPLEETMECVGCEVGHWSEWGTCSRNNRTCGFKWGLETRTRQIVKKPVKDTILCPTIAESRRCKMTMRHCPGGKRTPKAKEKRNKKKKRKLIERAQEQHSVFLATDRANQ

SEQ ID NO: 76066 - protein, 168 aa, Homo sapiens
  Payload ID: 15184
  Gene Symbol: RSPO2
  Gene Name: R-spondin 2
  ENSP ID: ENSP00000428614
MRQYGECLHSCPSGYYGHRAPDMNRCARCRIENCDSCFSKDFCTKCKVGFYLHRGRCFDECPDGFAPLEETMECVEGCEVGHWSEWGTCSRNNRTCGFKWGLETRTRQIVKKPVKDTILCPTIAESRRCKMTMRHCPGGKRTPKAKEKRNKKKKRKLIERAQEQHSVF

SEQ ID NO: 76067 - protein, 176 aa, Homo sapiens
  Payload ID: 15184
  Gene Symbol: RSPO2
  Gene Name: R-spondin 2
  Uniprot ID: Q6UXX9
  ENSP ID: ENSP00000428940
MRQYGECLHSCPSGYYGHRAPDMNRCARCRIENCDSCFSKDFCTKCKVGFYLHRGRCFDECPDGFAPLEETMECVEGCEVGHWSEWGTCSRNNRTCGFKWGLETRTRQIVKKPVKDTILCPTIAESRRCKMTMRHCPGGKRTPKAKEKRNKKKKRKLIERAQEQHSVFLATDRANQ

SEQ ID NO: 76068 - protein, 89 aa, Homo sapiens
  Payload ID: 15184
  Gene Symbol: RSPO2
  Gene Name: R-spondin 2
  ENSP ID: ENSP00000429159
MDLASYVSNPICKGCLSCSKDNGCSRCQQKLFFFLRREGMRQYGECLHSCPSGYYGHRAPDMNRCARCRIENCDSCFSKDFCTKCKVGF

SEQ ID NO: 76069 - protein, 121 aa, Homo sapiens
  Payload ID: 15184
  Gene Symbol: RSPO2
  Gene Name: R-spondin 2
  ENSP ID: ENSP00000430010
MQFRLFSFALIILNCMDYSHCQGNRWRRSKRASYVSNPICKGCLSCSKDNGCSRCQQKLFFFLRREGMRQYGECLHSCPSGYYGHRAPDMNRCARCRIENCDSCFSKDFCTKCKVGFYLHR

SEQ ID NO: 76070 - protein, 89 aa, Homo sapiens
  Payload ID: 15184
  Gene Symbol: RSPO2
  Gene Name: R-spondin 2
  ENSP ID: ENSP00000430485
MRQYGECLHSCPSGYYGHRAPDMNRCARCRIENCDSCFSKDFCTKCKVGFYLHRGRCFDECPDGFAPLEETMECVEGCEVGHWSEWGTC

SEQ ID NO: 76071 - protein, 76 aa, Homo sapiens
  Payload ID: 15184
  Gene Symbol: RSPO2
  Gene Name: R-spondin 2
  ENSP ID: ENSP00000430973
MQFRLFSFALIILNCMDYSHCQGNRWRRSKRASYVSNPICKGCLSCSKDNGCSRCQQKLFFFLRREGMRQYGECLH

SEQ ID NO: 76072 - protein, 272 aa, Homo sapiens
  Payload ID: 15185
  Gene Symbol: RSPO3
  Gene Name: R-spondin 3
  Uniprot ID: Q9BXY4
  ENSP ID: ENSP00000349131
MHLRLISWLFIILNFMEYIGSQNASRGRRQRRMHPNVSQGCQGGCATCSDYNGCLSCKPRLFFALERIGMKQIGVCLSSCPSGYYGTRYPDINKCTKCKADCDTCFNKNFCTKCKSGFYLHLGKCLDNCPEGLEANNHTMECVSIVHCEVSEWNPWSPCTKKGKTCGFKRGTETRVREIIQHPSAKGNLCPPTNETRKCTVQRKKCQKGERGKKGRERKRKKPNKGESKEAIPDSKSLESSKEIPEQRENKQQQKKRKVQDKQKSVSVSTVH

SEQ ID NO: 76073 - protein, 292 aa, Homo sapiens
  Payload ID: 15185
  Gene Symbol: RSPO3
  Gene Name: R-spondin 3
  Uniprot ID: Q9BXY4
  ENSP ID: ENSP00000357300
MHLRLISWLFIILNFMEYIGSQNASRGRRQRRMHPNVSQGCQGGCATCSDYNGCLSCKPRLFFALERIGMKQIGVCLSSCPSGYYGTRYPDINKCTKCKADCDTCFNKNFCTKCKSGFYLHLGKCLDNCPEGLEANNHTMECVSIVHCEVSEWNPWSPCTKKGKTCGFKRGTETRVREIIQHPSAKGNLCPPTNETRKCTVQRKKCQKGERGKKGRERKRKKPNKGESKEAIPDSKSLESSKEIPEQRENKQQQKKRKVQDKQKSGIEVTLAEGLTSVSQRTQPTPCRRRYL

SEQ ID NO: 76074 - protein, 234 aa, Homo sapiens
  Payload ID: 15186
  Gene Symbol: RSPO4
  Gene Name: R-spondin 4
  Uniprot ID: Q2I0M5
  ENSP ID: ENSP00000217260
MRAPLCLLLLVAHAVDMLALNRRKKQVGTGLGGNCTGCIICSEENGCSTCQQRLFLFIRREGIRQYGKCLHDCPPGYFGIRGQEVNRCKKCGATCESCFSQDFCIRCKRQFYLYKGKCLPTCPPGTLAHQNTRECQGECELGPWGGWSPCTHNGKTCGSAWGLESRVREAGRAGHEEAATCQVLSESRKCPIQRPCPGERSPGQKKGRKDRRPRKDRKLDRRLDVRPRQPGLQP

SEQ ID NO: 76075 - protein, 172 aa, Homo sapiens
  Payload ID: 15186
  Gene Symbol: RSPO4
  Gene Name: R-spondin 4
  Uniprot ID: Q2I0M5
  ENSP ID: ENSP00000383475
MRAPLCLLLLVAHAVDMLALNRRKKQVGTGLGGNCTGCIICSEENGCSTCQQRLFLFIRREGIRQYGKCLHDCPPGYFGIRGQEVNRCKKCGATCESCFSQDFCIRCKRQFYLYKGKCLPTCPPGTLAHQNTRECQERSPGQKKGRKDRRPRKDRKLDRRLDVRPRQPGLQP

SEQ ID NO: 76076 - protein, 785 aa, Homo sapiens
  Payload ID: 15187
  Gene Symbol: RTEL1-TNFRSF6B
  Gene Name: RTEL1-TNFRSF6B readthrough (NMD candidate)
  ENSP ID: ENSP00000457428
MPKIVLNGVTVDFPFQPYKCQQEYMTKVLECLQQKVNGILESPTGTGKTLCLLCTTLAWREHLRDGISARKIAERAQGELFPDRALSSWGNAAAAAGDPIACYTDIPKIIYASRTHSQLTQVINELRNTSYRPKVCVLGSREQLCIHPEVKKQESNHLQIHLCRKKVASRSCHFYNNVEEKSLEQELASPILDIEDLVKSGSKHRVCPYYLSRNLKQQADIIFMPYNYLLDAKSRRAHNIDLKGTVVIFDEAHNVEKMCEESASFDLTPHDLASGLDVIDQVLEEQTKAAQQGEPHPEFSADSPSPGLNMELEDIAKLKSKCCPPRLLAAGWGLLLARRWVTPPRPTVILLRLEGAIDAVELPGDDSGVTKPGSYIFELFAEAQITFQTKGCILDSLDQIIQHLAGRAGVFTNTAGLQKLADIIQIVFSVDPSEGSPGSPAGLGALQSYKVHIHPDAGHRRTAQRSDAWSTTAARKRGKVLSYWCFSPGHSMHELVRQGVRSLILTSGTLAPVSSFALEMQIPFPVCLENPHIIDKHQIWVGVVPRGPDGAQLSSAFDRRFSEECLSSLGKALGNIARVVPYGLLIFFPSYPVMEKSLEFWRARDLARKMEALKPLFVEPRSKGSFSETISAYYARVAAPGSTGATFLAVCRGKASEGLDFSDTNGRGVIVTGLPYPPRMDPRVVLKMQFLDEMKGQGGAGGQFLSGQEWYRQQASRAVNQAIGRVIRHRQDYGAVFLCDHRCQRRPPGLQHPVCVEKMLSARPSRLAPSSPPGKLRVWTCMSPA

SEQ ID NO: 76077 - protein, 1400 aa, Homo sapiens
  Payload ID: 15187
  Gene Symbol: RTEL1-TNFRSF6B
  Gene Name: RTEL1-TNFRSF6B readthrough (NMD candidate)
  ENSP ID: ENSP00000457868
MPKIVLNGVTVDFPFQPYKCQQEYMTKVLECLQQKVNGILESPTGTGKTLCLLCTTLAWREHLRDGISARKIAERAQGELFPDRALSSWGNAAAAAGDPIACYTDIPKIIYASRTHSQLTQVINELRNTSYRPKVCVLGSREQLCIHPEVKKQESNHLQIHLCRKKVASRSCHFYNNVEEKSLEQELASPILDIEDLVKSGSKHRVCPYYLSRNLKQQADIIFMPYNYLLDAKSRRAHNIDLKGTVVIFDEAHNVEKMCEESASFDLTPHDLASGLDVIDQVLEEQTKAAQQGEPHPEFSADSPSPGLNMELEDIAKLKMILLRLEGAIDAVELPGDDSGVTKPGSYIFELFAEAQITFQTKGCILDSLDQIIQHLAGRAGVFTNTAGLQKLADIIQIVFSVDPSEGSPGSPAGLGALQSYKVHIHPDAGHRRTAQRSDAWSTTAARKRGKVLSYWCFSPGHSMHELVRQGVRSLILTSGTLAPVSSFALEMQIPFPVCLENPHIIDKHQIWVGVVPRGPDGAQLSSAFDRRFSEECLSSLGKALGNIARVVPYGLLIFFPSYPVMEKSLEFWRARDLARKMEALKPLFVEPRSKGSFSETISAYYARVAAPGSTGATFLAVCRGKASEGLDFSDTNGRGVIVTGLPYPPRMDPRVVLKMQFLDEMKGQGGAGGQFLSGQEWYRQQASRAVNQAIGRVIRHRQDYGAVFLCDHRFAFADARAQLPSWVRPHVRVYDNFGHVIRDVAQFFRVAERTMPAPAPRATAPSVRGEDAVSEAKSPGPFFSTRKAKSLDLHVPSLKQRSSGSPAAGDPESSLCVEYEQEPVPARQRPRGLLAALEHSEQRAGSPGEEQAHSCSTLSLLSEKRPAEEPRGGRKKIRLVSHPEEPVAGAQTDRAKLFMVAVKQELSQANFATFTQALQDYKGSDDFAALAACLGPLFAEDPKKHNLLQGFYQFVRPHHKQQFEEVCIQLTGRGCGYRPEHSIPRRQRAQPVLDPTGRTAPDPKLTVSTAAAQQLDPQEHLNQGRPHLSPRPPPTGDPGSQPQWGSGVPRAGKQGQHAVSAYLADARRALGSAGCSQLLAALTAYKQDDDLDKVLAVLAALTTAKPEDFPLLHRFSMFVRPHHKQRFSQTCTDLTGRPYPGMEPPGPQEERLAVPPVLTHRAPQPGPSRSEKTGKTQSKISSFLRQRPAGTVGAGGEDAGPSQSSGPPHGPAASEWGEPHGRDIAGQQATGAPGGPLSAGCVCQGCGAEDVVPFQCPACDFQRCQACWQRHLQASRMCPACHTASRKQSVMQVFWPEPHKDHEGAGGARPVAAVPGVGAACPAAGAGCTRSGRNTHLPLAGRRDRGAAGVRPVPPRHLCAAAVPPRQPHDVWPVSTAPLHAVLELPRALPLLQRPLRGA

SEQ ID NO: 76078 - protein, 710 aa, Homo sapiens
  Payload ID: 15188
  Gene Symbol: RTF1
  Gene Name: RTF1 homolog, Paf1/RNA polymerase II complex component
  Uniprot ID: Q92541
  ENSP ID: ENSP00000374280
MRGRLCVGRAAAAAAAVAVPLAGGQEGSPGGGRRGSRGTTMVKKRKGRVVIDSDTEDSGSDENLDQELLSLAKRKRSDSEEKEPPVSQPAASSDSETSDSDDEWTFGSNKNKKKGKARKIEKKGTMKKQANKTASSGSSDKDSSAESSAPEEGEVSDSDSNSSSSSSDSDSSSEDEEFHDGYGEDLMGDEEDRARLEQMTEKEREQELFNRIEKREVLKRRFEIKKKLKTAKKKEKKEKKKKQEEEQEKKKLTQIQESQVTSHNKERRSKRDEKLDKKSQAMEELKAEREKRKNRTAELLAKKQPLKTSEVYSDDEEEEEDDKSSEKSDRSSRTSSSDEEEEKEEIPPKSQPVSLPEELNRVRLSRHKLERWCHMPFFAKTVTGCFVRIGIGNHNSKPVYRVAEITGVVETAKVYQLGGTRTNKGLQLRHGNDQRVFRLEFVSNQEFTESEFMKWKEAMFSAGMQLPTLDEINKKELSIKEALNYKFNDQDIEEIVKEKERFRKAPPNYAMKKTQLLKEKAMAEDLGDQDKAKQIQDQLNELEERAEALDRQRTKNISAISYINQRNREWNIVESEKALVAESHNMKNQQMDPFTRRQCKPTIVSNSRDPAVQAAILAQLNAKYGSGVLPDAPKEMSKGQGKDKDLNSKSASDLSEDLFKVHDFDVKIDLQVPSSESKALAITSKAPPAKDGAPRRSLNLEDYKKRRGLI

SEQ ID NO: 76079 - protein, 171 aa, Homo sapiens
  Payload ID: 15188
  Gene Symbol: RTF1
  Gene Name: RTF1 homolog, Paf1/RNA polymerase II complex component
  ENSP ID: ENSP00000452973
  MOD_RES (1)..(1): Any amino acid
XGTRTNKGLQLRHGNDQRVFRLEFVSNQEFTESEFMKWKEAMFSAGMQLPTLDEINKKELSIKEALNYKFNDQDIEEIVKEKERFRKAPPNYAMKKTQLLKEKAMAEDLGDQDKAKQIQDQLNELEERAEALDRQRTKNISAISYINQRNREWNIVESEKALVVRKLYLNH

SEQ ID NO: 76080 - protein, 708 aa, Homo sapiens
  Payload ID: 15189
  Gene Symbol: RUFY1
  Gene Name: RUN and FYVE domain containing 1
  Uniprot ID: Q96T51
  ENSP ID: ENSP00000325594
MADREGGCAAGRGRELEPELEPGPGPGSALEPGEEFEIVDRSQLPGPGDLRSATRPRAAEGWSAPILTLARRATGNLSASCGSALRAAAGLGGGDSGDGTARAASKCQMMEERANLMHMMKLSIKVLLQSALSLGRSLDADHAPLQQFFVVMEHCLKHGLKVKKSFIGQNKSFFGPLELVEKLCPEASDIATSVRNLPELKTAVGRGRAWLYLALMQKKLADYLKVLIDNKHLLSEFYEPEALMMEEEGMVIVGLLVGLNVLDANLCLKGEDLDSQVGVIDFSLYLKDVQDLDGGKEHERITDVLDQKNYVEELNRHLSCTVGDLQTKIDGLEKTNSKLQEELSAATDRICSLQEEQQQLREQNELIRERSEKSVEITKQDTKVELETYKQTRQGLDEMYSDVWKQLKEEKKVRLELEKELELQIGMKTEMEIAMKLLEKDTHEKQDTLVALRQQLEEVKAINLQMFHKAQNAESSLQQKNEAITSFEGKTNQVMSSMKQMEERLQHSERARQGAEERSHKLQQELGGRIGALQLQLSQLHEQCSSLEKELKSEKEQRQALQRELQHEKDTSSLLRMELQQVEGLKKELRELQDEKAELQKICEEQEQALQEMGLHLSQSKLKMEDIKEVNQALKGHAWLKDDEATHCRQCEKEFSISRRKHHCRNCGHIFCNTCSSNELALPSYPKPVRVCDSCHTLLLQRCSSTAS

SEQ ID NO: 76081 - protein, 600 aa, Homo sapiens
  Payload ID: 15189
  Gene Symbol: RUFY1
  Gene Name: RUN and FYVE domain containing 1
  Uniprot ID: Q96T51
  ENSP ID: ENSP00000377087
MMEERANLMHMMKLSIKVLLQSALSLGRSLDADHAPLQQFFVVMEHCLKHGLKVKKSFIGQNKSFFGPLELVEKLCPEASDIATSVRNLPELKTAVGRGRAWLYLALMQKKLADYLKVLIDNKHLLSEFYEPEALMMEEEGMVIVGLLVGLNVLDANLCLKGEDLDSQVGVIDFSLYLKDVQDLDGGKEHERITDVLDQKNYVEELNRHLSCTVGDLQTKIDGLEKTNSKLQEELSAATDRICSLQEEQQQLREQNELIRERSEKSVEITKQDTKVELETYKQTRQGLDEMYSDVWKQLKEEKKVRLELEKELELQIGMKTEMEIAMKLLEKDTHEKQDTLVALRQQLEEVKAINLQMFHKAQNAESSLQQKNEAITSFEGKTNQVMSSMKQMEERLQHSERARQGAEERSHKLQQELGGRIGALQLQLSQLHEQCSSLEKELKSEKEQRQALQRELQHEKDTSSLLRMELQQVEGLKKELRELQDEKAELQKICEEQEQALQEMGLHLSQSKLKMEDIKEVNQALKGHAWLKDDEATHCRQCEKEFSISRRKHHCRNCGHIFCNTCSSNELALPSYPKPVRVCDSCHTLLLQRCSSTAS

SEQ ID NO: 76082 - protein, 324 aa, Homo sapiens
  Payload ID: 15189
  Gene Symbol: RUFY1
  Gene Name: RUN and FYVE domain containing 1
  ENSP ID: ENSP00000377094
  MOD_RES (1)..(1): Any amino acid
XGLGGGDSGDGTARAASKCQMMEERANLMHMMKLSIKVLLQSALSLGRSLDADHAPLQQFFVVMEHCLKHGLKVKKSFIGQNKSFFGPLELVEKLCPEASDIATSVRNLPELKTAVGRGRAWLYLALMQKKLADYLKVLIDNKHLLSEFYEPEALMMEEEGMVIVGLLVGLNVLDANLCLKGEDLDSQVGVIDFSLYLKDVQDLDGGKEHERITDVLDQKNYVEELNRHLSCTVGDLQTKIDGLEKTNSKLQEEEERMKGQDKGGLSRGRELAASCPAVSLLDTSCLLLAGGGCSALLRLSTAFSCNRPNLLTSRRTAAVKRTK

SEQ ID NO: 76083 - protein, 600 aa, Homo sapiens; identical to SEQ ID NO: 76081
  Payload ID: 15189
  Gene Symbol: RUFY1
  Gene Name: RUN and FYVE domain containing 1
  Uniprot ID: Q96T51
  ENSP ID: ENSP00000390025

SEQ ID NO: 76084 - protein, 219 aa, Homo sapiens
  Payload ID: 15189
  Gene Symbol: RUFY1
  Gene Name: RUN and FYVE domain containing 1
  ENSP ID: ENSP00000425533
  MOD_RES (1)..(1): Any amino acid
XLGGGDSGDGTARAAGVLLVTQAGVQWRDLGSRQPPPPRFKRFSCLSLPSSWDYKHAPPRPASKCQMMEERANLMHMMKLSIKVLLQSALSLGRSLDADHAPLQQFFVVMEHCLKHGLKVKKSFIGQNKSFFGPLELVEKLCPEASDIATSVRNLPELKTAVGRGRAWLYLALMQKKLADYLKVLIDNKHLLSEFYEPEALMMEEEGMVIVGLLVGLNV

SEQ ID NO: 76085 - protein, 328 aa, Homo sapiens
  Payload ID: 15189
  Gene Symbol: RUFY1
  Gene Name: RUN and FYVE domain containing 1
  ENSP ID: ENSP00000426117
  MOD_RES (1)..(1): Any amino acid
XQDLDGGKEHERITDVLDQKNYVEELNRHLSCTVGDLQTKIDGLEKTNSKLQEEITKQDTKVELETYKQTRQGLDEMYSDVWKQLKEEKKVRLELEKELELQIGMKTEMEIAMKLLEKDTHEKQDTLVALRQQLEEVKAINLQMFHKAQNAESSLQQKNEAITSFEGKTNQVMSSMKQMEERLQHSERARQGAEERSHKLQQELGGRIGALQLQLSQLHEQCSSLEKELKSEKEQRQALQRELQHEKDTSSLLRMELQQVEGLKKELRELQDEKAELQKICEEQEQALQEMGLHLSQSKLKMEDIKEVNQALKGHAWLKDDEATHCRQ

SEQ ID NO: 76086 - protein, 271 aa, Homo sapiens
  Payload ID: 15189
  Gene Symbol: RUFY1
  Gene Name: RUN and FYVE domain containing 1
  ENSP ID: ENSP00000426701
  MOD_RES (1)..(1): Any amino acid
XATSVRNLPELKTAVGRGRAWLYLALMQKKLADYLKVLIDNKHLLSEFYEPEALMMEEEGMVIVGLLVGLNVLDANLCLKGEDLDSQVGVIDFSLYLKDVQDLDGGKDCTVGDLQTKIDGLEKTNSKLQEELSAATDRICSLQEEQQQLREQNELIRERSEKSVEITKQDTKVELETYKQTRQGLDEMYSDVWKQLKEEKKVRLELEKELELQIGMKTEMEIAMKLLEKDTHEKQDTLVALRQQLEEVKAINLQMFHKAQNAESSLQQKNE

SEQ ID NO: 76087 - protein, 196 aa, Homo sapiens
  Payload ID: 15190
  Gene Symbol: RUFY2
  Gene Name: RUN and FYVE domain containing 2
  ENSP ID: ENSP00000265865
MEAEDEDEKYLQECLSKSDSLQKQISQKEKQLVQLETDLKIEKEWRQTLQEDLQKEKDALSHLRNETQQIISLKKEFLNLQDENQQLKKIYHEQEQALQELGNKLSESKLKIEDIKEANKALQGLVWLKDKEATHCKLCEKEFSLSKRKHHCRNCGEIFCNACSDNELPLPSSPKPVRVCDSCHALLIQRCSSNLP

SEQ ID NO: 76088 - protein, 232 aa, Homo sapiens
  Payload ID: 15190
  Gene Symbol: RUFY2
  Gene Name: RUN and FYVE domain containing 2
  ENSP ID: ENSP00000341727
MATKDPTAVERANLLNMAKLSIKGLIESALSFGRTLDSDYPPLQQFFVVMEHCLKHGLKVRKSFLSYNKTIWGPLELVEKLYPEAEEIGASVRDLPGLKTPLGRARAWLRLALMQKKMADYLRCLIIQRDLLSEFYEYHALMMEEEGAVIVGLLVGLNVIDANLCVKGEDLDSQVGVIDFSMYLKNEEDIGNKERYDFHKLFHILGFLYSSLQIIIRSIYLQCGFILLFSPL

SEQ ID NO: 76089 - protein, 641 aa, Homo sapiens
  Payload ID: 15190
  Gene Symbol: RUFY2
  Gene Name: RUN and FYVE domain containing 2
  Uniprot ID: Q8WXA3
  ENSP ID: ENSP00000373420
MTFQVWGWRREDASQVLAWVPDAEGGRRGMLTRRSLATKDPTAVERANLLNMAKLSIKGLIESALSFGRTLDSDYPPLQQFFVVMEHCLKHGLKVRKSFLSYNKTIWGPLELVEKLYPEAEEIGASVRDLPGLKTPLGRARAWLRLALMQKKMADYLRCLIIQRDLLSEFYEYHALMMEEEGAVIVGLLVGLNVIDANLCVKGEDLDSQVGVIDFSMYLKNEEDIGNKERNVQIAAILDQKNYVEELNRQLNSTVSSLHSRVDSLEKSNTKLIEELAIAKNNIIKLQEENHQLRSENKLILMKTQQHLEVTKVDVETELQTYKHSRQGLDEMYNEARRQLRDESQLRQDVENELAVQVSMKHEIELAMKLLEKDIHEKQDTLIGLRQQLEEVKAINIEMYQKLQGSEDGLKEKNEIIARLEEKTNKITAAMRQLEQRLQQAEKAQMEAEDEDEKYLQECLSKSDSLQKQISQKEKQLVQLETDLKIEKEWRQTLQEDLQKEKDALSHLRNETQQIISLKKEFLNLQDENQQLKKIYHEQEQALQELGNKLSESKLKIEDIKEANKALQGLVWLKDKEATHCKLCEKEFSLSKRKHHCRNCGEIFCNACSDNELPLPSSPKPVRVCDSCHALLIQRCSSNLP

SEQ ID NO: 76090 - protein, 403 aa, Homo sapiens
  Payload ID: 15190
  Gene Symbol: RUFY2
  Gene Name: RUN and FYVE domain containing 2
  Uniprot ID: Q8WXA3
  ENSP ID: ENSP00000382151
MATKDPTAVERANLLNMAKLSIKGLIESALSFGRTLDSDYPPLQQFFVVMEHCLKHGLKVRKSFLSYNKTIWGPLELVEKLYPEAEEIGASVRDLPGLNEFYEYHALMMEEEGAVIVGLLVGLNVIDANLCVKGEDLDSQVGVIDFSMYLKNEEDIGNKERNVQIAAILDQKNYVEELNRQLNSTVSSLHSRVDSLEKSNTKLIEELAIAKNNIIKLQEENHQLRSENKLILMKTQQHLEVTKVDVETELQTYKHSRQGLDEMYNEARRQLRDESQLRQDVENELAVQVSMKHEIELAMKLLEKDIHEKQDTLIGLRQQLEEVKAINIEMYQKLQGSEDGLKEKNEIIARLEEKTNKITAAMRQLEQSDNDLLTQTRTIAMSLVKCASSDTQDQYKLVKDISF

SEQ ID NO: 76091 - protein, 379 aa, Homo sapiens
  Payload ID: 15190
  Gene Symbol: RUFY2
  Gene Name: RUN and FYVE domain containing 2
  Uniprot ID: Q8WXA3
  ENSP ID: ENSP00000404986
MVRKSFLSYNKTIWGPLELVEKLYPEAEEIGASVRDLPGLKTPLGRARAWLRLALMQKKMADYLRCLIIQRDLLSEFYEYHALMMEEEGAVIVGLLVGLNVIDANLCVKGEDLDSQVGVIDFSMYLKNEEDIGNKERNVQIAAILDQKNYVEELNRQLNSTVSSLHSRVDSLEKSNTKLIEELAIAKNNIIKLQEENHQLRSENKLILMKTQQHLEVTKVDVETELQTYKHSRQGLDEMYNEARRQLRDESQLRQDVENELAVQVSMKHEIELAMKLLEKDIHEKQDTLIGLRQQLEEVKAINIEMYQKLQGSEDGLKEKNEIIARLEEKTNKITAAMRQLEQSDNDLLTQTRTIAMSLVKCASSDTQDQYKLVKDISF

SEQ ID NO: 76092 - protein, 620 aa, Homo sapiens
  Payload ID: 15190
  Gene Symbol: RUFY2
  Gene Name: RUN and FYVE domain containing 2
  ENSP ID: ENSP00000433197
  MOD_RES (1)..(1): Any amino acid
XGLEVPRRPGARTGPATKDPTAVERANLLNMAKLSIKGLIESALSFGRTLDSDYPPLQQFFVVMEHCLKHGLKVRKSFLSYNKTIWGPLELVEKLYPEAEEIGASVRDLPGLKTPLGRARAWLRLALMQKKMADYLRCLIIQRDLLSEFYEYHALMMEEEGAVIVGLLVGLNVIDANLCVKGEDLDSQVGVIDFSMYLKNEEDIGNKERNVQIAAILDQKNYVEELNRQLNSTVSSLHSRVDSLEKSNTKLIEELAIAKNNIIKLQEENHQLRSENKLILMKTQQHLEVTKVDVETELQTYKHSRQGLDEMYNEARRQLRDESQLRQDVENELAVQVSMKHEIELAMKLLEKDIHEKQDTLIGLRQQLEEVKAINIEMYQKLQGSEDGLKEKNEIIARLEEKTNKITAAMRQLEQRLQQAEKAQMEAEDEDEKYLQECLSKSDSLQKQISQKEKQLVQLETDLKIEKEWRQTLQEDLQKEKDALSHLRNETQQIISLKKEFLNLQDENQQLKKIYHEQEQALQELGNKLSESKLKIEDIKEANKALQGLVWLKDKEATHCKLCEKEFSLSKRKHHCRNCGEIFCNACSDNELPLPSSPKPVRVCDSCHALLIQRCSSNLP

SEQ ID NO: 76093 - protein, 606 aa, Homo sapiens
  Payload ID: 15190
  Gene Symbol: RUFY2
  Gene Name: RUN and FYVE domain containing 2
  Uniprot ID: Q8WXA3
  ENSP ID: ENSP00000473462
MATKDPTAVERANLLNMAKLSIKGLIESALSFGRTLDSDYPPLQQFFVVMEHCLKHGLKVRKSFLSYNKTIWGPLELVEKLYPEAEEIGASVRDLPGLKTPLGRARAWLRLALMQKKMADYLRCLIIQRDLLSEFYEYHALMMEEEGAVIVGLLVGLNVIDANLCVKGEDLDSQVGVIDFSMYLKNEEDIGNKERNVQIAAILDQKNYVEELNRQLNSTVSSLHSRVDSLEKSNTKLIEELAIAKNNIIKLQEENHQLRSENKLILMKTQQHLEVTKVDVETELQTYKHSRQGLDEMYNEARRQLRDESQLRQDVENELAVQVSMKHEIELAMKLLEKDIHEKQDTLIGLRQQLEEVKAINIEMYQKLQGSEDGLKEKNEIIARLEEKTNKITAAMRQLEQRLQQAEKAQMEAEDEDEKYLQECLSKSDSLQKQISQKEKQLVQLETDLKIEKEWRQTLQEDLQKEKDALSHLRNETQQIISLKKEFLNLQDENQQLKKIYHEQEQALQELGNKLSESKLKIEDIKEANKALQGLVWLKDKEATHCKLCEKEFSLSKRKHHCRNCGEIFCNACSDNELPLPSSPKPVRVCDSCHALLIQRCSSNLP

SEQ ID NO: 76094 - protein, 130 aa, Homo sapiens
  Payload ID: 15190
  Gene Symbol: RUFY2
  Gene Name: RUN and FYVE domain containing 2
  ENSP ID: ENSP00000474574
  MOD_RES (1)..(1): Any amino acid
XSHLRNETQQIISLKKEFLNLQDENQQLKKIYHEQEQALQELGNKLSESKLKIEDIKEANKALQGLVWLKDKEATHCKLCEKEFSLSKRKTWQLLHLHVSQTLHLLLLWLCHQLQYQYELVLDLVVRRTK

SEQ ID NO: 76095 - protein, 469 aa, Homo sapiens
  Payload ID: 15191
  Gene Symbol: RUFY3
  Gene Name: RUN and FYVE domain containing 3
  Uniprot ID: Q7L099
  ENSP ID: ENSP00000226328
MSALTPPTDMPTPTTDKITQAAMETIYLCKFRVSMDGEWLCLRELDDISLTPDPEPTHEDPNYLMANERMNLMNMAKLSIKGLIESALNLGRTLDSDYAPLQQFFVVMEHCLKHGLKAKKTFLGQNKSFWGPLELVEKLVPEAAEITASVKDLPGLKTPVGRGRAWLRLALMQKKLSEYMKALINKKELLSEFYEPNALMMEEEGAIIAGLLVGLNVIDANFCMKGEDLDSQVGVIDFSMYLKDGNSSKGTEGDGQITAILDQKNYVEELNRHLNATVNNLQAKVDALEKSNTKLTEELAVANNRIITLQEEMERVKEESSYILESNRKGPKQDRTAEGQALSEARKHLKEETQLRLDVEKELEMQISMRQEMELAMKMLEKDVCEKQDALVSLRQQLDDLRALKHELAFKLQSSDLGVKQKSELNSRLEEKTNQMAATIKQLEQSEKDLVKQAKTLNSAANKLIPKHH

SEQ ID NO: 76096 - protein, 620 aa, Homo sapiens
  Payload ID: 15191
  Gene Symbol: RUFY3
  Gene Name: RUN and FYVE domain containing 3
  Uniprot ID: Q7L099
  ENSP ID: ENSP00000370394
MSALTPPTDMPTPTTDKITQAAMETIYLCKFRVSMDGEWLCLRELDDISLTPDPEPTHEDPNYLMANERMNLMNMAKLSIKGLIESALNLGRTLDSDYAPLQQFFVVMEHCLKHGLKAKKTFLGQNKSFWGPLELVEKLVPEAAEITASVKDLPGLKTPVGRGRAWLRLALMQKKLSEYMKALINKKELLSEFYEPNALMMEEEGAIIAGLLVGLNVIDANFCMKGEDLDSQVGVIDFSMYLKDGNSSKGTEGDGQITAILDQKNYVEELNRHLNATVNNLQAKVDALEKSNTKLTEELAVANNRIITLQEEMERVKEESSYILESNRKGPKQDRTAEGQALSEARKHLKEETQLRLDVEKELEMQISMRQEMELAMKMLEKDVCEKQDALVSLRQQLDDLRALKHELAFKLQSSDLGVKQKSELNSRLEEKTNQMAATIKQLEQRLRQAERSRQSAELDNRLFKQDFGDKINSLQLEVEELTRQRNQLELELKQEKERRLQNDRSIPGRGSQKSESKMDGKHKMQEENVKLKKPLEESHRLQPHPMDEQDQLLLSEKPQLCQLCQEDGSLTKNVCKNCSGTFCDACSTNELPLPSSIKLERVCNPCHKHLMKQYSTSPS

SEQ ID NO: 76097 - protein, 506 aa, Homo sapiens
  Payload ID: 15191
  Gene Symbol: RUFY3
  Gene Name: RUN and FYVE domain containing 3
  Uniprot ID: Q7L099
  ENSP ID: ENSP00000399771
MAETPPPPTAGAESCSEEPARGGEWRPEEPRRAPAGGTDREGEAGPPPASPAGQSEPDSPVAAPFFLLYPGDGGAGFGVRPPPQQQRSWRTPPSPGSPLPFLLLSYPSGGGGSSGSGKHHPNYLMANERMNLMNMAKLSIKGLIESALNLGRTLDSDYAPLQQFFVVMEHCLKHGLKAKKTFLGQNKSFWGPLELVEKLVPEAAEITASVKDLPGLKTPVGRGRAWLRLALMQKKLSEYMKALINKKELLSEFYEPNALMMEEEGAIIAGLLVGLNVIDANFCMKGEDLDSQVGVIDFSMYLKDGNSSKGTEGDGQITAILDQKNYVEELNRHLNATVNNLQAKVDALEKSNTKLTEELAVANNRIITLQEEMERVKEESSYILESNRKGPKQDRTAEGQALSEARKHLKEETQLRLDVEKELEMQISMRQEMELAMKMLEKDVCEKQDALVSLRQQLDDLRALKHELAFKLQSSDLGVKQKSELNSRLEEKTNQMAATIKQLEQR

SEQ ID NO: 76098 - protein, 57 aa, Homo sapiens
  Payload ID: 15191
  Gene Symbol: RUFY3
  Gene Name: RUN and FYVE domain containing 3
  ENSP ID: ENSP00000420980
  MOD_RES (1)..(1): Any amino acid
XALKHELAFKLQSSDLGVKQKSELNSRLEEKTNQMAATIKQLEQRMGSTKCKRKMLN

SEQ ID NO: 76099 - protein, 145 aa, Homo sapiens
  Payload ID: 15191
  Gene Symbol: RUFY3
  Gene Name: RUN and FYVE domain containing 3
  ENSP ID: ENSP00000421120
  MOD_RES (1)..(1): Any amino acid
XQLRLDVEKELEMQISMRQEMELAMKMLEKDVCEKQDALVSLRQQLDDLRALKHELAFKLQSSDLGVKQKSELNSRLEEKTNQMAATIKQLEQSSCGSHPDCARLSEAANLLSWTTGSSNRTLETRSTVCSWKSRSSPGSGTSLS

SEQ ID NO: 76100 - protein, 567 aa, Homo sapiens
  Payload ID: 15191
  Gene Symbol: RUFY3
  Gene Name: RUN and FYVE domain containing 3
  Uniprot ID: Q7L099
  ENSP ID: ENSP00000425400
MRDDTEDPNYLMANERMNLMNMAKLSIKGLIESALNLGRTLDSDYAPLQQFFVVMEHCLKHGLKAKKTFLGQNKSFWGPLELVEKLVPEAAEITASVKDLPGLKTPVGRGRAWLRLALMQKKLSEYMKALINKKELLSEFYEPNALMMEEEGAIIAGLLVGLNVIDANFCMKGEDLDSQVGVIDFSMYLKDGNSSKGTEGDGQITAILDQKNYVEELNRHLNATVNNLQAKVDALEKSNTKLTEELAVANNRIITLQEEMERVKEESSYILESNRKGPKQDRTAEGQALSEARKHLKEETQLRLDVEKELEMQISMRQEMELAMKMLEKDVCEKQDALVSLRQQLDDLRALKHELAFKLQSSDLGVKQKSELNSRLEEKTNQMAATIKQLEQRLRQAERSRQSAELDNRLFKQDFGDKINSLQLEVEELTRQRNQLELELKQEKERRLQNDRSIPGRGSQKSESKMDGKHKMQEENVKLKKPLEESHRLQPHPMDEQDQLLLSEKPQLCQLCQEDGSLTKNVCKNCSGTFCDACSTNELPLPSSIKLERVCNPCHKHLMKQYSTSPS

SEQ ID NO: 76101 - protein, 201 aa, Homo sapiens
  Payload ID: 15191
  Gene Symbol: RUFY3
  Gene Name: RUN and FYVE domain containing 3
  ENSP ID: ENSP00000425574
MANERMNLMNMAKLSIKGLIESALNLGRTLDSDYAPLQQFFVVMEHCLKHGLKAKKTFLGQNKSFWGPLELVEKLVPEAAEITASVKDLPGLKTPVGRGRAWLRLALMQKKLSEYMKALINKKELLSEFYEPNALMMEEEGAIIAGLLVGLNVIDANFCMKGEDLDSQVGVIDFSMYLKDGNSSKGTEGDGQITAILDQKN

SEQ ID NO: 76102 - protein, 98 aa, Homo sapiens
  Payload ID: 15191
  Gene Symbol: RUFY3
  Gene Name: RUN and FYVE domain containing 3
  ENSP ID: ENSP00000426165
MAETPPPPTAGAESCSEEPARGGEWRPEEPRRAPAGGTDREGEAGPPPASPAGQSEPDSPVAAPFFLLYPGDGGAGFGVRPPPQQQRSWRTPPSPGSP

SEQ ID NO: 76103 - protein, 155 aa, Homo sapiens
  Payload ID: 15191
  Gene Symbol: RUFY3
  Gene Name: RUN and FYVE domain containing 3
  ENSP ID: ENSP00000426734
MANERMNLMNMAKLSIKGLIESALNLGRTLDSDYAPLQQFFVVMEHCLKHGLKAKKTFLGQNKSFWGPLELVEKLVPEAAEITASVKDLPGLKTPVGRGRAWLRLALMQKKLSEYMKALINKKELLSEFYEPNALMMEEEGAIIAGLLVGLNVID

SEQ ID NO: 76104 - protein, 571 aa, Homo sapiens
  Payload ID: 15192
  Gene Symbol: RUFY4
  Gene Name: RUN and FYVE domain containing 4
  Uniprot ID: Q6ZNE9
  ENSP ID: ENSP00000345900
MAEEGAILKVTKDLRAAVSAILQGYGDGQGPVTDTSAELHRLCGCLELLLQFDQKEQKSFLGPRKDYWDFLCTALRRQRGNMEPIHFVRSQDKLKTPLGKGRAFIRFCLARGQLAEALQLCLLNSELTREWYGPRSPLLCPERQEDILDSLYALNGVAFELDLQQPDLDGAWPMFSESRCSSSTQTQGRRPRKNKDAPKKIPAAYGGPENVQIEDSHTSQAICLQDAPSGQQLAGLPRSQQQRHLPFFLEKKGESSRKHRYPQSMWEPEGKELQLDQEERAPWIEIFLGNSTPSTQGQGKGAMGTQKEVIGMEAEVTGVLLVAEGQRTTEGTHKKEAEWSHVQRLLMPSPRGAVEGAVSGSRQGSGGSSILGEPWVLQGHATKEDSTVENPQVQTEVTLVARREEQAEVSLQDEIKSLRLGLRKAEEQAQRQEQLLREQEGELQALREQLSRCQEERAELQAQLEQKQQEAERRDAMYQEELGGQRDLVQAMKRRVLELIQEKDRLWQRLQHLSSMAPECCVACSKIFGRFSRRYPCRLCGGLLCHACSMDYKKRDRCCPPCAQGREAQVT

SEQ ID NO: 76105 - protein, 607 aa, Homo sapiens
  Payload ID: 15192
  Gene Symbol: RUFY4
  Gene Name: RUN and FYVE domain containing 4
  ENSP ID: ENSP00000363270
MAEEGAILKVTKDLRAAVSAILQGYGDGQGPVTDTSAELHRLCGCLELLLQFDQKEQKSFLGPRKDYWDFLCTALRRQRGNMEPIHFVRSQDKLKTPLGKGRAFIRFCLARGQLAEALQLCLLNSELTREWYGPRSPLLCPERQEDILDSLYALNGVAFELDLQQPDLDGAWPMFSESRCSSSTQTQGRRPRKNKDAPKKVPLPCLHSELPLPHLLGILKIPAAYGGPENVQIEDSHTSQAICLQDAPSGQQLAGLPRSQQQRHLPFFLEKKGESSRKHRYPQSMWEPEGKELQLDQEERAPWIEIFLGNSTPSTQGQGKGAMGTQKEVIGMEAEVTGVLLVAEGQRTTEGTHKKEAEWSHVQRLLMPSPRGAVEGAVSGSRQGSGGSSILGEPWVLQGHATKEDSTVENPQVQTEVTLVARREEQAEVSLQDEIKSLRLGLRKAEEQAQRQEQLLREQEGELQALREQLSRCQEERAELQAQLEQKQQEAERRDAMYQEELGGQRDLVQAMKRRVLELIQEKDRLWQRLQHLSSMAPECCVACSKIFGRFSRRYPCSARTSLGREESEPPGEAAMWRWRLWRGRASGHPSGEGRPPETNQGHSTGR

SEQ ID NO: 76106 - protein, 172 aa, Homo sapiens
  Payload ID: 15192
  Gene Symbol: RUFY4
  Gene Name: RUN and FYVE domain containing 4
  Uniprot ID: Q6ZNE9
  ENSP ID: ENSP00000410091
MAEEGAILKVTKDLRAAVSAILQGYGDGQGPVTDTSAELHRLCGCLELLLQFDQKEQKSFLGPRKDYWDFLCTALRRQRGNMEPIHFVRSQDKGMVWTPEPSALPRTPRRHPGLSLCSQWGGLRVGPPAARPGWSLAHVLRVTLLQFHPNPGKETQKKQRCPKEDPSRIWRA

SEQ ID NO: 76107 - protein, 433 aa, Homo sapiens
  Payload ID: 15193
  Gene Symbol: RUSC1
  Gene Name: RUN and SH3 domain containing 1
  Uniprot ID: Q9BVN2
  ENSP ID: ENSP00000292254
MAEAQSGTGQLQEQKKGLLIAVSVSVDKIISHFGAARNLVQKAQLGDSRLSPDVGHLVLTTLCPALHALVADGLKPFRKDLITGQRRSSPWSVVEASVKPGSSTRSLGTLYSQVSRLAPLSSSRSRFHAFILGLLNTKQLELWFSSLQEDAGLLSLLYLPTGFFSLARGGCPSLSTELLLLLQPLSVLTFHLDLLFEHHHHLPLGPPQAPAPPGPPPALQQTMQAMLHFGGRLAQSLRGTSKEAASDPSDSPNLPTPGSWWEQLTQASRVYASGGTEGFPLSRWAPGRHGTAAEEGAQERPLPTDEMAPGRGLWLGRLFGVPGGPAENENGALKSRRPSSWLPPTVSVLALVKRGAPPEMPSPQELEASAPRMVQTHRAVRALCDHTAARPDQLSFRRGEVLRVITTVDEDWLRCGRDGMEGLVPVGYTSLVL

SEQ ID NO: 76108 - protein, 492 aa, Homo sapiens
  Payload ID: 15193
  Gene Symbol: RUSC1
  Gene Name: RUN and SH3 domain containing 1
  Uniprot ID: Q9BVN2
  ENSP ID: ENSP00000357331
MPPTCSPGLRRQDWAPGRCAGLHLPPRAPSSPALQALAGQAGVRSSWSFAGVPGAQRLWMAEAQSGTGQLQEQKKGLLIAVSVSVDKIISHFGAARNLVQKAQLGDSRLSPDVGHLVLTTLCPALHALVADGLKPFRKDLITGQRRSSPWSVVEASVKPGSSTRSLGTLYSQVSRLAPLSSSRSRFHAFILGLLNTKQLELWFSSLQEDAGLLSLLYLPTGFFSLARGGCPSLSTELLLLLQPLSVLTFHLDLLFEHHHHLPLGPPQAPAPPGPPPALQQTMQAMLHFGGRLAQSLRGTSKEAASDPSDSPNLPTPGSWWEQLTQASRVYASGGTEGFPLSRWAPGRHGTAAEEGAQERPLPTDEMAPGRGLWLGRLFGVPGGPAENENGALKSRRPSSWLPPTVSVLALVKRGAPPEMPSPQELEASAPRMVQTHRAVRALCDHTAARPDQLSFRRGEVLRVITTVDEDWLRCGRDGMEGLVPVGYTSLVL

SEQ ID NO: 76109 - protein, 433 aa, Homo sapiens; identical to SEQ ID NO: 76107
  Payload ID: 15193
  Gene Symbol: RUSC1
  Gene Name: RUN and SH3 domain containing 1
  Uniprot ID: Q9BVN2
  ENSP ID: ENSP00000357333

SEQ ID NO: 76110 - protein, 902 aa, Homo sapiens
  Payload ID: 15193
  Gene Symbol: RUSC1
  Gene Name: RUN and SH3 domain containing 1
  Uniprot ID: Q9BVN2
  ENSP ID: ENSP00000357336
MLSPQRALLCNLNHIHLQHVSLGLHLSRRPELQEGPLSTPPPPGDTGGKESRGPCSGTLVDANSNSPAVPCRCCQEHGPGLENRQDPSQEEEGAASPSDPGCSSSLSSCSDLSPDESPVSVYLRDLPGDEDAHPQPSIIPLEQGSPLASAGPGTCSPDSFCCSPDSCSGASSSPDPGLDSNCNALTTCQDVPSPGLEEEDERAEQDLPTSELLEADDGKIDAGKTEPSWKINPIWKIDTEKTKAEWKTTENNNTGWKNNGNVNSSWKSEPEKFDSGWKTNTRITDSGSKTDAGKIDGGWRSDVSEEPVPHRTITSFHELAQKRKRGPGLPLVPQAKKDRSDWLIVFSPDTELPPSGSPGGSSAPPREVTTFKELRSRSRAPAPPVPPRDPPVGWALVPPRPPPPPVPPRRKKNRPGLQPIAEGQSEEGRAVSPAAGEEAPAAKEPGAQAGLEVRSSWSFAGVPGAQRLWMAEAQSGTGQLQEQKKGLLIAVSVSVDKIISHFGAARNLVQKAQLGDSRLSPDVGHLVLTTLCPALHALVADGLKPFRKDLITGQRRSSPWSVVEASVKPGSSTRSLGTLYSQVSRLAPLSSSRSRFHAFILGLLNTKQLELWFSSLQEDAGLLSLLYLPTGFFSLARGGCPSLSTELLLLLQPLSVLTFHLDLLFEHHHHLPLGPPQAPAPPGPPPALQQTMQAMLHFGGRLAQSLRGTSKEAASDPSDSPNLPTPGSWWEQLTQASRVYASGGTEGFPLSRWAPGRHGTAAEEGAQERPLPTDEMAPGRGLWLGRLFGVPGGPAENENGALKSRRPSSWLPPTVSVLALVKRGAPPEMPSPQELEASAPRMVQTHRAVRALCDHTAARPDQLSFRRGEVLRVITTVDEDWLRCGRDGMEGLVPVGYTSLVL

SEQ ID NO: 76111 - protein, 796 aa, Homo sapiens
  Payload ID: 15193
  Gene Symbol: RUSC1
  Gene Name: RUN and SH3 domain containing 1
  Uniprot ID: Q9BVN2
  ENSP ID: ENSP00000357338
MLSPQRALLCNLNHIHLQHVSLGLHLSRRPELQEGPLSTPPPPGDTGGKESRGPCSGTLVDANSNSPAVPCRCCQEHGPGLENRQDPSQEEEGAASPSDPGCSSSLSSCSDLSPDESPVSVYLRDLPGDEDAHPQPSIIPLEQGSPLASAGPGTCSPDSFCCSPDSCSGASSSPDPGLDSNCNALTTCQDVPSPGLEEEDERAEQDLPTSELLEADDGKIDAGKTEPSWKINPIWKIDTEKTKAEWKTTENNNTGWKNNGNVNSSWKSEPEKFDSGWKTNTRITDSGSKTDAGKIDGGWRSDVSEEPVPHRTITSFHELAQKRKRGPGLPLVPQAKKDRSDWLIVFSPDTELPPSGSPGGSSAPPREVTTFKELRSRSRAPAPPVPPRDPPVGWALVPPRPPPPPVPPRRKKNRPGLQPIAEGQSEEGRAVSPAAGEEAPAAKEPGAQAGLEVRSSWSFAGVPGAQRLWMAEAQSGTGQLQEQKKGLLIAVSVSVDKIISHFGAARNLVQKAQLGDSRLSPDVGHLVLTTLCPALHALVADGLKPFRKDLITGQRRSSPWSVVEASVKPGSSTRSLGTLYSQVSRLAPLSSSRSRFHAFILGLLNTKQLELWFSSLQEDAGSWWEQLTQASRVYASGGTEGFPLSRWAPGRHGTAAEEGAQERPLPTDEMAPGRGLWLGRLFGVPGGPAENENGALKSRRPSSWLPPTVSVLALVKRGAPPEMPSPQELEASAPRMVQTHRAVRALCDHTAARPDQLSFRRGEVLRVITTVDEDWLRCGRDGMEGLVPVGYTSLVL

SEQ ID NO: 76112 - protein, 265 aa, Homo sapiens
  Payload ID: 15193
  Gene Symbol: RUSC1
  Gene Name: RUN and SH3 domain containing 1
  ENSP ID: ENSP00000479495
MAEAQSGTGQLQEQKKGLLIAVSVSVDKIISHFGAARNLVQKAQLGDSRLSPDVGHLVLTTLCPALHALVADGLKPFRKDLITGQRRSSPWSVVEASVKPGSSTRSLGTLYSQVSRLAPLSSSRSRFHAFILGLLNTKQLELWFSSLQEDAGLLSLLYLPTGFFSLARGGCPSLSTELLLLLQPLSVLTFHLDLLFEHHHHLPLGPPQAPAPPGPPPALQQTMQAMLHFGGRLAQSLRGTSKEAASDPSDSPNLPTPGSWWEQLT

SEQ ID NO: 76113 - protein, 301 aa, Homo sapiens
  Payload ID: 15193
  Gene Symbol: RUSC1
  Gene Name: RUN and SH3 domain containing 1
  ENSP ID: ENSP00000479858
MAEAQSGTGQLQEQKKGLLIAVSVSVDKIISHFGAARNLVQKAQLGDSRLSPDVGHLVLTTLCPALHALVADGLKPFRKDLITGQRRSSPWSVVEASVKPGSSTRSLGTLYSQVSRLAPLSSSRSRFHAFILGLLNTKQLELWFSSLQEDAGLLSLLYLPTGFFSLARGGCPSLSTELLLLLQPLSVLTFHLDLLFEHHHHLPLGPPQAPAPPGPPPALQQTMQAMLHFGGRLAQSLRGTSKEAASDPSDSPNLPTPGSWWEQLTQASRVYASGGTEGFPLSRWAPGRHGTAAEEGAQERP

SEQ ID NO: 76114 - protein, 271 aa, Homo sapiens
  Payload ID: 15193
  Gene Symbol: RUSC1
  Gene Name: RUN and SH3 domain containing 1
  ENSP ID: ENSP00000480831
MAEAQSGTGQLQEQKKGLLIAVSVSVDKIISHFGAARNLVQKAQLGDSRLSPDVGHLVLTTLCPALHALVADGLKPFRKDLITGQRRSSPWSVVEASVKPGSSTRSLGTLYSQVSRLAPLSSSRSRFHAFILGLLNTKQLELWFSSLQEDAGSWWEQLTQASRVYASGGTEGFPLSRWAPGRHGTAAEEGAQERPLPTDEMAPGRGLWLGRLFGVPGGPAENENGALKSRRPSSWLPPTVSVLALVKRGAPPEMPSPQELEASAPRMVQTH

SEQ ID NO: 76115 - protein, 225 aa, Homo sapiens
  Payload ID: 15193
  Gene Symbol: RUSC1
  Gene Name: RUN and SH3 domain containing 1
  ENSP ID: ENSP00000481669
  MOD_RES (1)..(1): Any amino acid
XSSTRSLGTLYSQVSRLAPLSSSRSRFHAFILGLLNTKQLELWFSSLQEDAGFFSLARGGCPSLSTELLLLLQPLSVLTFHLDLLFEHHHHLPLGPPQAPAPPGPPPALQQTMQAMLHFGGRLAQSLRGTSKEAASDPSDSPNLPTPGSWWEQLTQASRVYASGGTEGFPLSRWAPGRHGTAAEEGAQERPLPTDEMAPGRGLWLGRLFGVPGGPAENENGALKS

SEQ ID NO: 76116 - protein, 105 aa, Homo sapiens
  Payload ID: 15193
  Gene Symbol: RUSC1
  Gene Name: RUN and SH3 domain containing 1
  ENSP ID: ENSP00000482109
MAEAQSGTGQLQEQKKGLLIAVSVSVDKIISHFGAARNLVQKAQLGDSRLSPDVGHLVLTTLCPALHALVADGLKPFRKDLITGQRRSSPWSVVEASVKPARSAV

SEQ ID NO: 76117 - protein, 127 aa, Homo sapiens
  Payload ID: 15193
  Gene Symbol: RUSC1
  Gene Name: RUN and SH3 domain containing 1
  ENSP ID: ENSP00000482409
MAPGRGLWLGRLFGVPGGPAENENGALKSRRPSSWLPPTVSVLALVKRGAPPEMPSPQELEASAPRMVQTHRAVRALCDHTAARPDQLSFRRGEVLRVITTVDEDWLRCGRDGMEGLVPVGYTSLVL

SEQ ID NO: 76118 - protein, 211 aa, Homo sapiens
  Payload ID: 15193
  Gene Symbol: RUSC1
  Gene Name: RUN and SH3 domain containing 1
  ENSP ID: ENSP00000484026
MQAMLHFGGRLAQSLRGTSKEAASDPSDSPNLPTPGSWWEQLTQASRVYASGGTEGFPLSRWAPGRHGTAAEEGAQERPLPTDEMAPGRGLWLGRLFGVPGGPAENENGALKSRRPSSWLPPTVSVLALVKRGAPPEMPSPQELEASAPRMVQTHRAVRALCDHTAARPDQLSFRRGEVLRVITTVDEDWLRCGRDGMEGLVPVGYTSLVL

SEQ ID NO: 76119 - protein, 1516 aa, Homo sapiens
  Payload ID: 15194
  Gene Symbol: RUSC2
  Gene Name: RUN and SH3 domain containing 2
  Uniprot ID: Q8N2Y8
  ENSP ID: ENSP00000355177
MDSPPKLTGETLIVHHIPLVHCQVPDRQCCGGAGGGGGSTRPNPFCPPELGITQPDQDLGQADSLLFSSLHSTPGGTARSIDSTKSRSRDGRGPGAPKRHNPFLLQEGVGEPGLGDLYDDSIGDSATQQSFHLHGTGQPNFHLSSFQLPPSGPRVGRPWGTTRSRAGVVEGQEQEPVMTLDTQQCGTSHCCRPELEAETMELDECGGPGGSGSGGGASDTSGFSFDQEWKLSSDESPRNPGCSGSGDQHCRCSSTSSQSEAADQSMGYVSDSSCNSSDGVLVTFSTLYNKMHGTPRANLNSAPQSCSDSSFCSHSDPGAFYLDLQPSPFESKMSYESHHPESGGREGGYGCPHASSPELDANCNSYRPHCEPCPAVADLTACFQSQARLVVATQNYYKLVTCDLSSQSSPSPAGSSITSCSEEHTKISPPPGPGPDPGPSQPSEYYLFQKPEVQPEEQEAVSSSTQAAAAVGPTVLEGQVYTNTSPPNLSTGRQRSRSYDRSLQRSPPVRLGSLERMLSCPVRLSEGPAAMAGPGSPPRRVTSFAELAKGRKKTGGSGSPPLRVSVGDSSQEFSPIQEAQQDRGAPLDEGTCCSHSLPPMPLGPGMDLLGPDPSPPWSTQVCQGPHSSEMPPAGLRATGQGPLAQLMDPGPALPGSPANSHTQRDARARADGGGTESRPVLRYSKEQRPTTLPIQPFVFQHHFPKQLAKARALHSLSQLYSLSGCSRTQQPAPLAAPAAQVSVPAPSGEPQASTPRATGRGARKAGSEPETSRPSPLGSYSPIRSVGPFGPSTDSSASTSCSPPPEQPTATESLPPWSHSCPSAVRPATSQQPQKEDQKILTLTEYRLHGTGSLPPLGSWRSGLSRAESLARGGGEGSMATRPSNANHLSPQALKWREYRRKNPLGPPGLSGSLDRRSQEARLARRNPIFEFPGSLSAASHLNCRLNGQAVKPLPLTCPDFQDPFSLTEKPPAEFCLSPDGSSEAISIDLLQKKGLVKAVNIAVDLIVAHFGTSRDPGVKAKLGNSSVSPNVGHLVLKYLCPAVRAVLEDGLKAFVLDVIIGQRKNMPWSVVEASTQLGPSTKVLHGLYNKVSQFPELTSHTMRFNAFILGLLNIRSLEFWFNHLYNHEDIIQTHYQPWGFLSAAHTVCPGLFEELLLLLQPLALLPFSLDLLFQHRLLQSGQQQRQHKELLRVSQDLLLSAHSTLQLARARGQEGPGDVDRAAQGERVKGVGASEGGEEEEEEEETEEVAEAAGGSGRARWARGGQAGWWYQLMQSSQVYIDGSIEGSRFPRGSSNSSSEKKKGAGGGGPPQAPPPREGVVEGAEACPASEEALGRERGWPFWMGSPPDSVLAELRRSREREGPAASPAENEEGASEPSPGGIKWGHLFGSRKAQREARPTNRLPSDWLSLDKSMFQLVAQTVGSRREPEPKESLQEPHSPALPSSPPCEVQALCHHLATGPGQLSFHKGDILRVLGRAGGDWLRCSRGPDSGLVPLAYVTLTPTPSPTPGSSQN

SEQ ID NO: 76120 - protein, 1516 aa, Homo sapiens; identical to SEQ ID NO: 76119
  Payload ID: 15194
  Gene Symbol: RUSC2
  Gene Name: RUN and SH3 domain containing 2
  Uniprot ID: Q8N2Y8
  ENSP ID: ENSP00000393922

SEQ ID NO: 76121 - protein, 927 aa, Homo sapiens
  Payload ID: 15195
  Gene Symbol: RUBCN
  Gene Name: RUN domain and cysteine-rich domain containing, Beclin 1-interacting protein
  Uniprot ID: Q92622
  ENSP ID: ENSP00000273582
MQSILYHGLIRDQACRRQTDYWQFVKDIRWLSPHSALHVEKFISVHENDQSSADGASERAVAELWLQHSLQYHCLSAQLRPLLGDRQYIRKFYTDAAFLLSDAHVTAMLQCLEAVEQNNPRLLAQIDASMFARKHESPLLVTKSQSLTALPSSTYTPPNSYAQHSYFGSFSSLHQSVPNNGSERRSTSFPLSGPPRKPQESRGHVSPAEDQTIQAPPVSVSALARDSPLTPNEMSSSTLTSPIEASWVSSQNDSPGDASEGPEYLAIGNLDPRGRTASCQSHSSNAESSSSNLFSSSSSQKPDSAASSLGDQEGGGESQLSSVLRRSSFSEGQTLTVTSGAKKSHIRSHSDTSIASRGAPGGPRNITIIVEDPIAESCNDKAKLRGPLPYSGQSSEVSTPSSLYMEYEGGRYLCSGEGMFRRPSEGQSLISYLSEQDFGSCADLEKENAHFSISESLIAAIELMKCNMMSQCLEEEEVEEEDSDREIQELKQKIRLRRQQIRTKNLLPMYQEAEHGSFRVTSSSSQFSSRDSAQLSDSGSADEVDEFEIQDADIRRNTASSSKSFVSSQSFSHCFLHSTSAEAVAMGLLKQFEGMQLPAASELEWLVPEHDAPQKLLPIPDSLPISPDDGQHADIYKLRIRVRGNLEWAPPRPQIIFNVHPAPTRKIAVAKQNYRCAGCGIRTDPDYIKRLRYCEYLGKYFCQCCHENAQMAIPSRVLRKWDFSKYYVSNFSKDLLIKIWNDPLFNVQDINSALYRKVKLLNQVRLLRVQLCHMKNMFKTCRLAKELLDSFDTVPGHLTEDLHLYSLNDLTATRKGELGPRLAELTRAGATHVERCMLCQAKGFICEFCQNEDDIIFPFELHKCRTCEECKACYHKACFKSGSCPRCERLQARREALARQSLESYLSDYEEEPAEALALEAAVLEAT

SEQ ID NO: 76122 - protein, 972 aa, Homo sapiens
  Payload ID: 15195
  Gene Symbol: RUBCN
  Gene Name: RUN domain and cysteine-rich domain containing, Beclin 1-interacting protein
  Uniprot ID: Q92622
  ENSP ID: ENSP00000296343
MRPEGAGMELGGGEERLPEESRREHWQLLGNLKTTVEGLVSTNSPNVWSKYGGLERLCRDMQSILYHGLIRDQACRRQTDYWQFVKDIRWLSPHSALHVEKFISVHENDQSSADGASERAVAELWLQHSLQYHCLSAQLRPLLGDRQYIRKFYTDAAFLLSDAHVTAMLQCLEAVEQNNPRLLAQIDASMFARKHESPLLVTKSQSLTALPSSTYTPPNSYAQHSYFGSFSSLHQSVPNNGSERRSTSFPLSGPPRKPQESRGHVSPAEDQTIQAPPVSVSALARDSPLTPNEMSSSTLTSPIEASWVSSQNDSPGDASEGPEYLAIGNLDPRGRTASCQSHSSNAESSSSNLFSSSSSQKPDSAASSLGDQEGGGESQLSSVLRRSSFSEGQTLTVTSGAKKSHIRSHSDTSIASRGAPESCNDKAKLRGPLPYSGQSSEVSTPSSLYMEYEGGRYLCSGEGMFRRPSEGQSLISYLSEQDFGSCADLEKENAHFSISESLIAAIELMKCNMMSQCLEEEEVEEEDSDREIQELKQKIRLRRQQIRTKNLLPMYQEAEHGSFRVTSSSSQFSSRDSAQLSDSGSADEVDEFEIQDADIRRNTASSSKSFVSSQSFSHCFLHSTSAEAVAMGLLKQFEGMQLPAASELEWLVPEHDAPQKLLPIPDSLPISPDDGQHADIYKLRIRVRGNLEWAPPRPQIIFNVHPAPTRKIAVAKQNYRCAGCGIRTDPDYIKRLRYCEYLGKYFCQCCHENAQMAIPSRVLRKWDFSKYYVSNFSKDLLIKIWNDPLFNVQDINSALYRKVKLLNQVRLLRVQLCHMKNMFKTCRLAKELLDSFDTVPGHLTEDLHLYSLNDLTATRKGELGPRLAELTRAGATHVERCMLCQAKGFICEFCQNEDDIIFPFELHKCRTCEECKACYHKACFKSGSCPRCERLQARREALARQSLESYLSDYEEEPAEALALEAAVLEAT

SEQ ID NO: 76123 - protein, 435 aa, Homo sapiens
  Payload ID: 15195
  Gene Symbol: RUBCN
  Gene Name: RUN domain and cysteine-rich domain containing, Beclin 1-interacting protein
  ENSP ID: ENSP00000390962
MRPEGAGMELGGGEERLPEESRREHWQLLGNLKTTVEGLVSTNSPNVWSKYGGLERLCRDMQSILYHGLIRDQACRRQTDYWQFVKDIRWLSPHSALHVEKFISVHENDQSSADGASERAVAELWLQHSLQYHCLSAQLRPLLGDRQYIRKFYTDAAFLLSDAHVTAMLQCLEAVEQNNPRLLAQIDASMFARKHESPLLVTKSQSLTALPSSTYTPPNSYAQHSYFGSFSSLHQSVPNNGSERRSTSFPLSGPPRKPQESRGHVSPAEDQTIQAPPVSVSALARDSPLTPNEMSSSTLTSPIEASWVSSQNDSPGDASEGPEYLAIGNLDPRGRTASCQSHSSNAESSSSNLFSSSSSQKPDSAASSLGDQEGGGESQLSSVLRRSSFSEGQTLTVTSGAKKSHIRSHSDTSIASRGAPGNEEHRLLVSKMTLN

SEQ ID NO: 76124 - protein, 934 aa, Homo sapiens
  Payload ID: 15195
  Gene Symbol: RUBCN
  Gene Name: RUN domain and cysteine-rich domain containing, Beclin 1-interacting protein
  ENSP ID: ENSP00000405115
  MOD_RES (1)..(1): Any amino acid
XREHWQLLGNLKTTVEGLVSTNSPNVWSKYGGLERLCRDMQSILYHGLIRDQACRRQTDYWQFVKDIRWLSPHSALHVEKFISVHENDQSSADGASERAVAELWLQHSLQYHCLSAQLRPLLGDRQYIRKFYTDAAFLLSDAHVTAMLQCLEAVEQNNPRLLAQIDASMFARKHESPLLVTKSQSLTALPSSTYTPPNSYAQHSYFGSFSSLHQSVPNNGSERRSTSFPLSGPPRKPQESRGHVSPAEDQTIQAPPVSVSALARDSPLTPNEMSSSTLTSPIEASWVSSQNDSPGDASEGPEYLAIGNLDPRGRTASCQSHSSNAESSSSNLFSSSSSQKPDSAASSLGDQEGGGESQLSSVLRRSSFSEGQTLTVTSGAKKSHIRSHSDTSIASRGAPGGPRNITIIVEDPIAEGGRYLCSGEGMFRRPSEGQSLISYLSEQDFGSCADLEKENAHFSISESLIAAIELMKCNMMSQCLEEEEVEEEDSDREIQELKQKIRLRRQQIRTKNLLPMYQEAEHGSFRVTSSSSQFSSRDSAQLSDSGSADEVDEFEIQDADIRRNTASSSKSFVSSQSFSHCFLHSTSAEAVAMGLLKQFEGMQLPAASELEWLVPEHDAPQKLLPIPDSLPISPDDGQHADIYKLRIRVRGNLEWAPPRPQIIFNVHPAPTRKIAVAKQNYRCAGCGIRTDPDYIKRLRYCEYLGKYFCQCCHENAQMAIPSRVLRKWDFSKYYVSNFSKDLLIKIWNDPLFNVQDINSALYRKVKLLNQVRLLRVQLCHMKNMFKTCRLAKELLDSFDTVPGHLTEDLHLYSLNDLTATRKGELGPRLAELTRAGATHVERCMLCQAKGFICEFCQNEDDIIFPFELHKCRTCEECKACYHKACFKSGSCPRCERLQARREALARQSLESYLSDYEEEPAEALALEAAVLEAT

SEQ ID NO: 76125 - protein, 680 aa, Homo sapiens
  Payload ID: 15195
  Gene Symbol: RUBCN
  Gene Name: RUN domain and cysteine-rich domain containing, Beclin 1-interacting protein
  ENSP ID: ENSP00000409618
  MOD_RES (1)..(1): Any amino acid
XERRSTSFPLSGPPRKPQESRGHVSPAEDQTIQAPPVSVSALARDSPLTPNEMSSSTLTSPIEASWVSSQNDSPGDASEGPEYLAIGNLDPRGRTASCQSHSSNAESSSSNLFSSSSSQKPDSAASSLGDQEGGGESQLSSVLRRSSFSEGQTLTVTSGAKKSHIRSHSDTSIASRGAPESCNDKAKLRGPLPYSGQSSEVSTPSSLYMEYEGGRYLCSGEGMFRRPSEGQSLISYLSEQDFGSCADLEKENAHFSISESLIAAIELMKCNMMSQCLEEEEVEEEDSDREIQELKQKIRLRRQQIRTKNLLPMYQEAEHGSFRVTSSSSQFSSRDSAQLSDSGSADEVDEFEIQDGSEGSNLTHISKNGLSVSLASMFSDADIRRNTASSSKSFVSSQSFSHCFLHSTSAEAVAMGLLKQFEGMQLPAASELEWLVPEHDAPQKLLPIPDSLPISPDDGQHADIYKLRIRVRGNLEWAPPRPQIIFNVHPAPTRKIAVAKQNYRCAGCGIRTDPDYIKRLRYCEYLGKYFCQCCHENAQMAIPSRVLRKWDFSKYYVSNFSKDLLIKIWNDPLFNVQDINSALYRKVKLLNQVRLLRVQLCHMKNMFKTCRLAKELLDSFDTVPGHLTEDLHLYSLNDLTATRKGELGPRLAELTRAGATHVERCMVRKSHCSMQLSPCF

SEQ ID NO: 76126 - protein, 147 aa, Homo sapiens
  Payload ID: 15195
  Gene Symbol: RUBCN
  Gene Name: RUN domain and cysteine-rich domain containing, Beclin 1-interacting protein
  ENSP ID: ENSP00000411894
LGDQEGGGESQLSSVLRRSSFSEGQTLTVTSGAKKSHIRSHSDTSIASRGAPEGGRYLCSGEGMFRRPSEGQSLISYLSEQDFGSCADLEKENAHFSISESLIAAIELMKCNMMSQCLEEEEVEEEDSDREIQELKQKIRLRRQQIR

SEQ ID NO: 76127 - protein, 24 aa, Homo sapiens
  Payload ID: 15195
  Gene Symbol: RUBCN
  Gene Name: RUN domain and cysteine-rich domain containing, Beclin 1-interacting protein
  ENSP ID: ENSP00000485041
MLQCLEAVEQNNPRLLAQIDASMF

SEQ ID NO: 76128 - protein, 613 aa, Homo sapiens
  Payload ID: 15196
  Gene Symbol: RUNDC1
  Gene Name: RUN domain containing 1
  Uniprot ID: Q96C34
  ENSP ID: ENSP00000354622
MAAVEAAAEPVTVVAAVGPKAKDEEEEEEEPLPPCEAVRWAPVGAVAEARPGATAFLEEATAEEPGAAPGSPPDSPGRTLRRLRAERRRLDSALLALSSHFAQVQFRLRQVVRGAPAEQQRLLRELEDFAFRGCPHVLGYEGPGDPASDEGDGLPGDRPWLRGEDQSEQEKQERLETQREKQKELILQLKTQLDDLETFAYQEGSYDSLPQSVVLERQRVIIDELIKKLDMNLNEDISSLSTEELRQRVDAAVAQIVNPARVKEQLVEQLKTQIRDLEMFINFIQDEVGSPLQTGGGHCECKAGGKTGNGCSRTGSSRTPPGNSKTKAEDVKKVRETGLHLMRRALAVLQIFAVSQFGCATGQIPPTLWQRVQADRDYSPLLKRLEVSVDRVKQLALRQQPHDHVITSANLQDLSLGGKDELTMAVRKELTVAVRDLLAHGLYASSPGMSLVMAPIACLLPAFSSAPEAMHPWELFVKYYHAKNGRAYVESPARKLSQSFALPVTGGTVVTPKQSLLTAIHMVLTEHDPFKRSADSELKALVCMALNEQRLVSWVNLICKSGSLIEPHYQPWSYMAHTGFESALNLLSRLSSLKFSLPVDLAVRQLKNIKDAF

SEQ ID NO: 76129 - protein, 263 aa, Homo sapiens
  Payload ID: 15196
  Gene Symbol: RUNDC1
  Gene Name: RUN domain containing 1
  ENSP ID: ENSP00000467953
  MOD_RES (1)..(1): Any amino acid
XAVEAAAEPVTVVAAVGPKAKDEEEEEEEPLPPCEAVRWAPVGAVAEARPGATAFLEEATAEEPGAAPGSPPDSPGRTLRRLRAERRRLDSALLALSSHFAQVQFRLRQVVRGAPAEQQRLLRELEDFAFRGCPHVLGYEGPGDPASDEGDGLPGDRPWLRGEDQSEQEKQERLETQREKQKELILQLKTQLDDLETFAYQEGSYDSLPQSVVLERQRMKWEAPCRQVVDTVSARPVGRQEMAAAEQAAAERLQETAKQRQRM

SEQ ID NO: 76130 - protein, 405 aa, Homo sapiens
  Payload ID: 15197
  Gene Symbol: RUNDC3A
  Gene Name: RUN domain containing 3A
  Uniprot ID: Q59EK9
  ENSP ID: ENSP00000225441
MEASFVQTTMALGLSSKKASSRNVAVERKNLITVCRFSVKTLLEKYTAEPIDDSSEEFVNFAAILEQILSHRFKACAPAGPVSWFSSDGQRGFWDYIRLACSKVPNNCVSSIENMENISTARAKGRAWIRVALMEKRMSEYITTALRDTRTTRRFYDSGAIMLRDEATILTGMLIGLSAIDFSFCLKGEVLDGKTPVVIDYTPYLKFTQSYDYLTDEEERHSAESSTSEDNSPEHPYLPLVTDEDSWYSKWHKMEQKFRIVYAQKGYLEELVRLRESQLKDLEAENRRLQLQLEEAAAQNQREKRELEGVILELQEQLTGLIPSDHAPLAQGSKELTTPLVNQWPSLGTLNGAEGASNSKLYRRHSFMSTEPLSAEASLSSDSQRLGEGTRDEEPWGPIGSSEPN

SEQ ID NO: 76131 - protein, 446 aa, Homo sapiens
  Payload ID: 15197
  Gene Symbol: RUNDC3A
  Gene Name: RUN domain containing 3A
  Uniprot ID: Q59EK9
  ENSP ID: ENSP00000410862
MEASFVQTTMALGLSSKKASSRNVAVERKNLITVCRFSVKTLLEKYTAEPIDDSSEEFVNFAAILEQILSHRFKACAPAGPVSWFSSDGQRGFWDYIRLACSKVPNNCVSSIENMENISTARAKGRAWIRVALMEKRMSEYITTALRDTRTTRRFYDSGAIMLRDEATILTGMLIGLSAIDFSFCLKGEVLDGKTPVVIDYTPYLKFTQSYDYLTDEEERHSAESSTSEDNSPEHPYLPLVTDEDSWYSKWHKMEQKFRIVYAQKGYLEELVRLRESQLKDLEAENRRLQLQLEEAAAQNQREKRELEGVILELQEQLTGLIPSDHAPLAQGSKELTTPLVNQWPSLGTLNGAEGASNSKLYRRHSFMSTEPLSAEASLSSDSQRLGEGTRDEEPWGPIGKDPTPSMLGLCGSLASIPSCKSLASFKSNECLVSDSPEGSPALSPS

SEQ ID NO: 76132 - protein, 400 aa, Homo sapiens
  Payload ID: 15197
  Gene Symbol: RUNDC3A
  Gene Name: RUN domain containing 3A
  Uniprot ID: Q59EK9
  ENSP ID: ENSP00000468214
MEASFVQTTMALGLSSKKASSRNVAVERKNLITVCRFSVKTLLEKYTAEPIDDSSEEFVNFAAILEQILSHRFKGPVSWFSSDGQRGFWDYIRLACSKVPNNCVSSIENMENISTARAKGRAWIRVALMEKRMSEYITTALRDTRTTRRFYDSGAIMLRDEATILTGMLIGLSAIDFSFCLKGEVLDGKTPVVIDYTPYLKFTQSYDYLTDEEERHSAESSTSEDNSPEHPYLPLVTDEDSWYSKWHKMEQKFRIVYAQKGYLEELVRLRESQLKDLEAENRRLQLQLEEAAAQNQREKRELEGVILELQEQLTGLIPSDHAPLAQGSKELTTPLVNQWPSLGTLNGAEGASNSKLYRRHSFMSTEPLSAEASLSSDSQRLGEGTRDEEPWGPIGSSEPN

SEQ ID NO: 76133 - protein, 404 aa, Homo sapiens
  Payload ID: 15197
  Gene Symbol: RUNDC3A
  Gene Name: RUN domain containing 3A
  ENSP ID: ENSP00000483684
MEASFVQTTMALGLSSKKASSRNVAVERKNLITVCRFSVKTLLEKYTAEPIDDSSEEFVNFAAILEQILSHRFKACAPAGPVSWFSSDGQRGFWDYIRLACSKVPNNCVSSIENMENISTARAKGRAWIRVALMEKRMSEYITTALRDTRTTRRFYDSGAIMLRDEATILTGMLIGLSAIDFSFCLKGEVLDGKTPVVIDYTPYLKFTQSYDYLTDEEERHSAESSTSEDNSPEHPYLPLVTDEDSWYSKWHKMEQKFRIVYAQKGYLEELVRLRESQLKDLEAENRRLQLQLEEAAAQNQREKRELEGVILELQEQLTGLIPSDHAPLAQGSKELTTPLVNQWPSLGTLNGAEGASNSKLYRRHSFMSTEPLSAEASLSSDSQRLGEGTRDEEPWGPIGSSPN

SEQ ID NO: 76134 - protein, 473 aa, Homo sapiens
  Payload ID: 15198
  Gene Symbol: RUNDC3B
  Gene Name: RUN domain containing 3B
  Uniprot ID: Q96NL0
  ENSP ID: ENSP00000337732
MASRSLGGLSGIRGGGGGGGKKSLSARNAAVERRNLITVCRFSVKTLIDRSCFETIDDSSPEFNNFAAILEQILSHRLKEISQSCRWLAHLQIPLQGQVTWFGYESPRSFWDYIRVACRKVSQNCICSIENMENVSSSRAKGRAWIRVALMEKHLSEYISTALRDFKTTRRFYEDGAIVLGEEANMLAGMLLGLNAIDFSFCLKGEGLDGSFPAVIDYTPYLKYIQSSDSISSDEEELRTLGSSGSESSTPENVGPPFLMDENSWFNKCKRVKQKYQLTLEQKGYLEELLRLRENQLSESVSQNKILLQRIEDSDLAHKLEKEQLEYIIVELQDQLTVLKNNDLRSRQELTAHLTNQWPSPGALDVNAVALDTLLYRKHNKQWYEKSYQSLDQLSAEVSLSQTSLDPGQSQEGDGKQDTLNVMSEGKEDTPSLLGLCGSLTSVASYKSLTSLKSNDYLASPTTEMTSPGLTPS

SEQ ID NO: 76135 - protein, 456 aa, Homo sapiens
  Payload ID: 15198
  Gene Symbol: RUNDC3B
  Gene Name: RUN domain containing 3B
  Uniprot ID: Q96NL0
  ENSP ID: ENSP00000378149
MASRSLGGLSGIRGGGGGGGKKSLSARNAAVERRNLITVCRFSVKTLIDRSCFETIDDSSPEFNNFAAILEQILSHRLKGQVTWFGYESPRSFWDYIRVACRKVSQNCICSIENMENVSSSRAKGRAWIRVALMEKHLSEYISTALRDFKTTRRFYEDGAIVLGEEANMLAGMLLGLNAIDFSFCLKGEGLDGSFPAVIDYTPYLKYIQSSDSISSDEEELRTLGSSGSESSTPENVGPPFLMDENSWFNKCKRVKQKYQLTLEQKGYLEELLRLRENQLSESVSQNKILLQRIEDSDLAHKLEKEQLEYIIVELQDQLTVLKNNDLRSRQELTAHLTNQWPSPGALDVNAVALDTLLYRKHNKQWYEKSYQSLDQLSAEVSLSQTSLDPGQSQEGDGKQDTLNVMSEGKEDTPSLLGLCGSLTSVASYKSLTSLKSNDYLASPTTEMTSPGLTPS

SEQ ID NO: 76136 - protein, 407 aa, Homo sapiens
  Payload ID: 15198
  Gene Symbol: RUNDC3B
  Gene Name: RUN domain containing 3B
  Uniprot ID: Q96NL0
  ENSP ID: ENSP00000420394
MASRSLGGLSGIRGGGGGGGKKSLSARNAAVERRNLITVCRFSVKTLIDRSCFETIDDSSPEFNNFAAILEQILSHRLKGQVTWFGYESPRSFWDYIRVACRKVSQNCICSIENMENVSSSRAKGRAWIRVALMEKHLSEYISTALRDFKTTRRFYEDGAIVLGEEANMLAGMLLGLNAIDFSFCLKGEGLDGSFPAVIDYTPYLKYIQSSDSISSDEEELRTLGSSGSESSTPENVGPPFLMDENSWFNKCKRVKQKYQLTLEQKGYLEELLRLRENQLSESVSQNKILLQRIEDSDLAHKLEKEQLEYIIVELQDQLKSYQSLDQLSAEVSLSQTSLDPGQSQEGDGKQDTLNVMSEGKEDTPSLLGLCGSLTSVASYKSLTSLKSNDYLASPTTEMTSPGLTPS

SEQ ID NO: 76137 - protein, 480 aa, Homo sapiens
  Payload ID: 15199
  Gene Symbol: RUNX1
  Gene Name: runt-related transcription factor 1
  Uniprot ID: Q01196
  ENSP ID: ENSP00000300305
MASDSIFESFPSYPQCFMRECILGMNPSRDVHDASTSRRFTPPSTALSPGKMSEALPLGAPDAGAALAGKLRSGDRSMVEVLADHPGELVRTDSPNFLCSVLPTHWRCNKTLPIAFKVVALGDVPDGTLVTVMAGNDENYSAELRNATAAMKNQVARFNDLRFVGRSGRGKSFTLTITVFTNPPQVATYHRAIKITVDGPREPRRHRQKLDDQTKPGSLSFSERLSELEQLRRTAMRVSPHHPAPTPNPRASLNHSTAFNPQPQSQMQDTRQIQPSPPWSYDQSYQYLGSIASPSVHPATPISPGRASGMTTLSAELSSRLSTAPDLTAFSDPRQFPALPSISDPRMHYPGAFTYSPTPVTSGIGIGMSAMGSATRYHTYLPPPYPGSSQAQGGPFQASSPSYHLYYGASAGSYQFSMVGGERSPPRILPPCTNASTGSALLNPSLPNQSDVVEAEGSHSNSPTNMAPSARLEEAVWRPY

SEQ ID NO: 76138 - protein, 453 aa, Homo sapiens
  Payload ID: 15199
  Gene Symbol: RUNX1
  Gene Name: runt-related transcription factor 1
  Uniprot ID: Q01196
  ENSP ID: ENSP00000340690
MRIPVDASTSRRFTPPSTALSPGKMSEALPLGAPDAGAALAGKLRSGDRSMVEVLADHPGELVRTDSPNFLCSVLPTHWRCNKTLPIAFKVVALGDVPDGTLVTVMAGNDENYSAELRNATAAMKNQVARFNDLRFVGRSGRGKSFTLTITVFTNPPQVATYHRAIKITVDGPREPRRHRQKLDDQTKPGSLSFSERLSELEQLRRTAMRVSPHHPAPTPNPRASLNHSTAFNPQPQSQMQDTRQIQPSPPWSYDQSYQYLGSIASPSVHPATPISPGRASGMTTLSAELSSRLSTAPDLTAFSDPRQFPALPSISDPRMHYPGAFTYSPTPVTSGIGIGMSAMGSATRYHTYLPPPYPGSSQAQGGPFQASSPSYHLYYGASAGSYQFSMVGGERSPPRILPPCTNASTGSALLNPSLPNQSDVVEAEGSHSNSPTNMAPSARLEEAVWRPY

SEQ ID NO: 76139 - protein, 250 aa, Homo sapiens
  Payload ID: 15199
  Gene Symbol: RUNX1
  Gene Name: runt-related transcription factor 1
  Uniprot ID: Q01196
  ENSP ID: ENSP00000351123
MRIPVDASTSRRFTPPSTALSPGKMSEALPLGAPDAGAALAGKLRSGDRSMVEVLADHPGELVRTDSPNFLCSVLPTHWRCNKTLPIAFKVVALGDVPDGTLVTVMAGNDENYSAELRNATAAMKNQVARFNDLRFVGRSGRGKSFTLTITVFTNPPQVATYHRAIKITVDGPREPRRHRQKLDDQTKPGSLSFSERLSELEQLRRTAMRVSPHHPAPTPNPRASLNHSTAFNPQPQSQMQEEDTAPWRC

SEQ ID NO: 76140 - protein, 256 aa, Homo sapiens
  Payload ID: 15199
  Gene Symbol: RUNX1
  Gene Name: runt-related transcription factor 1
  ENSP ID: ENSP00000382182
MPAAPRGPAQGEAAARTRSRDASTSRRFTPPSTALSPGKMSEALPLGAPDAGAALAGKLRSGDRSMVEVLADHPGELVRTDSPNFLCSVLPTHWRCNKTLPIAFKVVALGDVPDGTLVTVMAGNDENYSAELRNATAAMKNQVARFNDLRFVGRSGRGKSFTLTITVFTNPPQVATYHRAIKITVDGPREPRRHRQKLDDQTKPGSLSFSERLSELEQLRRTAMRVSPHHPAPTPNPRASLNHSTAFNPQPQSQMQ

SEQ ID NO: 76141 - protein, 389 aa, Homo sapiens
  Payload ID: 15199
  Gene Symbol: RUNX1
  Gene Name: runt-related transcription factor 1
  ENSP ID: ENSP00000382184
MRIPVDASTSRRFTPPSTALSPGKMSEALPLGAPDAGAALAGKLRSGDRSMVEVLADHPGELVRTDSPNFLCSVLPTHWRCNKTLPIAFKVVALGDVPDGTLVTVMAGNDENYSAELRNATAAMKNQVARFNDLRFVGRSGRGKSFTLTITVFTNPPQVATYHRAIKITVDGPREPRNTRQIQPSPPWSYDQSYQYLGSIASPSVHPATPISPGRASGMTTLSAELSSRLSTAPDLTAFSDPRQFPALPSISDPRMHYPGAFTYSPTPVTSGIGIGMSAMGSATRYHTYLPPPYPGSSQAQGGPFQASSPSYHLYYGASAGSYQFSMVGGERSPPRILPPCTNASTGSALLNPSLPNQSDVVEAEGSHSNSPTNMAPSARLEEAVWRPY

SEQ ID NO: 76142 - protein, 140 aa, Homo sapiens
  Payload ID: 15199
  Gene Symbol: RUNX1
  Gene Name: runt-related transcription factor 1
  ENSP ID: ENSP00000388189
MASDSIFESFPSYPQCFMRDASTSRRFTPPSTALSPGKMSEALPLGAPDAGAALAGKLRSGDRSMVEVLADHPGELVRTDSPNFLCSVLPTHWRCNKTLPIAFKVVALGDVPDGTLVTVMAGNDENYSAELRNATAAMKN

SEQ ID NO: 76143 - protein, 32 aa, Homo sapiens
  Payload ID: 15199
  Gene Symbol: RUNX1
  Gene Name: runt-related transcription factor 1
  ENSP ID: ENSP00000405158
MASDSIFESFPSYPQCFMRECILGMNPSRDVH

SEQ ID NO: 76144 - protein, 480 aa, Homo sapiens; identical to SEQ ID NO: 76137
  Payload ID: 15199
  Gene Symbol: RUNX1
  Gene Name: runt-related transcription factor 1
  Uniprot ID: Q01196
  ENSP ID: ENSP00000409227

SEQ ID NO: 76145 - protein, 38 aa, Homo sapiens
  Payload ID: 15199
  Gene Symbol: RUNX1
  Gene Name: runt-related transcription factor 1
  ENSP ID: ENSP00000477067
MASDSIFESFPSYPQCFMRGGGPRGCSRWHSGHCDGWQ

SEQ ID NO: 76146 - protein, 49 aa, Homo sapiens
  Payload ID: 15199
  Gene Symbol: RUNX1
  Gene Name: runt-related transcription factor 1
  ENSP ID: ENSP00000477072
MASDSIFESFPSYPQCFMRECILGMNPSRDVHDASTSRRFTPPSTALSP

SEQ ID NO: 76147 - protein, 604 aa, Homo sapiens
  Payload ID: 15200
  Gene Symbol: RUNX1T1
  Gene Name: runt-related transcription factor 1
  translocated to, 1 (cyclin D-related)
  Uniprot ID: Q06455
  ENSP ID: ENSP00000265814
MISVKRNTWRALSLVIGDCRKKGNFEYCQDRTEKHSTMPDSPVDVKTQSRLTPPTMPPPPTTQGAPRTSSFTPTTLTNGTSHSPTALNGAPSPPNGFSNGPSSSSSSSLANQQLPPACGARQLSKLKRFLTTLQQFGNDISPEIGERVRTLVLGLVNSTLTIEEFHSKLQEATNFPLRPFVIPFLKANLPLLQRELLHCARLAKQNPAQYLAQHEQLLLDASTTSPVDSSELLLDVNENGKRRTPDRTKENGFDREPLHSEHPSKRPCTISPGQRYSPNNGLSYQPNGLPHPTPPPPQHYRLDDMAIAHHYRDSYRHPSHRDLRDRNRPMGLHGTRQEEMIDHRLTDREWAEEWKHLDHLLNCIMDMVEKTRRSLTVLRRCQEADREELNYWIRRYSDAEDLKKGGGSSSSHSRQQSPVNPDPVALDAHREFLHRPASGYVPEEIWKKAEEAVNEVKRQAMTELQKAVSEAERKAHDMITTERAKMERTVAEAKRQAAEDALAVINQQEDSSESCWNCGRKASETCSGCNTARYCGSFCQHKDWEKHHHICGQTLQAQQQGDTPAVSSSVTPNSGAGSPMDTPPAATPRSTTPGTPSTIETTPR

SEQ ID NO: 76148 - protein, 567 aa, Homo sapiens
  Payload ID: 15200
  Gene Symbol: RUNX1T1
  Gene Name: runt-related transcription factor 1
  translocated to, 1 (cyclin D-related)
  Uniprot ID: Q06455
  ENSP ID: ENSP00000353504
MPDSPVDVKTQSRLTPPTMPPPPTTQGAPRTSSFTPTTLTNGTSHSPTALNGAPSPPNGFSNGPSSSSSSSLANQQLPPACGARQLSKLKRFLTTLQQFGNDISPEIGERVRTLVLGLVNSTLTIEEFHSKLQEATNFPLRPFVIPFLKANLPLLQRELLHCARLAKQNPAQYLAQHEQLLLDASTTSPVDSSELLLDVNENGKRRTPDRTKENGFDREPLHSEHPSKRPCTISPGQRYSPNNGLSYQPNGLPHPTPPPPQHYRLDDMAIAHHYRDSYRHPSHRDLRDRNRPMGLHGTRQEEMIDHRLTDREWAEEWKHLDHLLNCIMDMVEKTRRSLTVLRRCQEADREELNYWIRRYSDAEDLKKGGGSSSSHSRQQSPVNPDPVALDAHREFLHRPASGYVPEEIWKKAEEAVNEVKRQAMTELQKAVSEAERKAHDMITTERAKMERTVAEAKRQAAEDALAVINQQEDSSESCWNCGRKASETCSGCNTARYCGSFCQHKDWEKHHHICGQTLQAQQQGDTPAVSSSVTPNSGAGSPMDTPPAATPRSTTPGTPSTIETTPR

SEQ ID NO: 76149 - protein, 577 aa, Homo sapiens
  Payload ID: 15200
  Gene Symbol: RUNX1T1
  Gene Name: runt-related transcription factor 1
  translocated to, 1 (cyclin D-related)
  Uniprot ID: Q06455
  ENSP ID: ENSP00000379520
MPDRTEKHSTMPDSPVDVKTQSRLTPPTMPPPPTTQGAPRTSSFTPTTLTNGTSHSPTALNGAPSPPNGFSNGPSSSSSSSLANQQLPPACGARQLSKLKRFLTTLQQFGNDISPEIGERVRTLVLGLVNSTLTIEEFHSKLQEATNFPLRPFVIPFLKANLPLLQRELLHCARLAKQNPAQYLAQHEQLLLDASTTSPVDSSELLLDVNENGKRRTPDRTKENGFDREPLHSEHPSKRPCTISPGQRYSPNNGLSYQPNGLPHPTPPPPQHYRLDDMAIAHHYRDSYRHPSHRDLRDRNRPMGLHGTRQEEMIDHRLTDREWAEEWKHLDHLLNCIMDMVEKTRRSLTVLRRCQEADREELNYWIRRYSDAEDLKKGGGSSSSHSRQQSPVNPDPVALDAHREFLHRPASGYVPEEIWKKAEEAVNEVKRQAMTELQKAVSEAERKAHDMITTERAKMERTVAEAKRQAAEDALAVINQQEDSSESCWNCGRKASETCSGCNTARYCGSFCQHKDWEKHHHICGQTLQAQQQGDTPAVSSSVTPNSGAGSPMDTPPAATPRSTTPGTPSTIETTPR

SEQ ID NO: 76150 - protein, 567 aa, Homo sapiens; identical to SEQ ID NO: 76148
  Payload ID: 15200
  Gene Symbol: RUNX1T1
  Gene Name: runt-related transcription factor 1
  translocated to, 1 (cyclin D-related)
  Uniprot ID: Q06455
  ENSP ID: ENSP00000390137

SEQ ID NO: 76151 - protein, 663 aa, Homo sapiens
  Payload ID: 15200
  Gene Symbol: RUNX1T1
  Gene Name: runt-related transcription factor 1
  translocated to, 1 (cyclin D-related)
  ENSP ID: ENSP00000402257
MCHPDKAFTSDKLQCVFNEYKAAVWVPPRPRPLSRAPLPEAGGENLHLKISRVRKRNLPFVVWGEEEASTPGLDAISHHLCYPDRTHRDRTEKHSTMPDSPVDVKTQSRLTPPTMPPPPTTQGAPRTSSFTPTTLTNGTSHSPTALNGAPSPPNGFSNGPSSSSSSSLANQQLPPACGARQLSKLKRFLTTLQQFGNDISPEIGERVRTLVLGLVNSTLTIEEFHSKLQEATNFPLRPFVIPFLKANLPLLQRELLHCARLAKQNPAQYLAQHEQLLLDASTTSPVDSSELLLDVNENGKRRTPDRTKENGFDREPLHSEHPSKRPCTISPGQRYSPNNGLSYQPNGLPHPTPPPPQHYRLDDMAIAHHYRDSYRHPSHRDLRDRNRPMGLHGTRQEEMIDHRLTDREWAEEWKHLDHLLNCIMDMVEKTRRSLTVLRRCQEADREELNYWIRRYSDAEDLKKGGGSSSSHSRQQSPVNPDPVALDAHREFLHRPASGYVPEEIWKKAEEAVNEVKRQAMTELQKAVSEAERKAHDMITTERAKMERTVAEAKRQAAEDALAVINQQEDSSESCWNCGRKASETCSGCNTARYCGSFCQHKDWEKHHHICGQTLQAQQQGDTPAVSSSVTPNSGAGSPMDTPPAATPRSTTPGTPSTIETTPR

SEQ ID NO: 76152 - protein, 171 aa, Homo sapiens
  Payload ID: 15200
  Gene Symbol: RUNX1T1
  Gene Name: runt-related transcription factor 1
  translocated to, 1 (cyclin D-related)
  ENSP ID: ENSP00000427763
MPDSPVDVKTQSRLTPPTMPPPPTTQGAPRTSSFTPTTLTNGTSHSPTALNGAPSPPNGFSNGPSSSSSSSLANQQLPPACGARQLSKLKRFLTTLQQFGNDISPEIGERVRTLVLGLVNSTLTIEEFHSKLQEATNFPLRPFVIPFLKANLPLLQRELLHCARLAKQNPA

SEQ ID NO: 76153 - protein, 91 aa, Homo sapiens
  Payload ID: 15200
  Gene Symbol: RUNX1T1
  Gene Name: runt-related transcription factor 1
  translocated to, 1 (cyclin D-related)
  ENSP ID: ENSP00000428100
MPDSPVDVKTQSRLTPPTMPPPPTTQGAPRTSSFTPTTLTNGTSHSPTALNGAPSPPNGFSNGPSSSSSSSLANQQLPPACGARQLSKLKR

SEQ ID NO: 76154 - protein, 58 aa, Homo sapiens
  Payload ID: 15200
  Gene Symbol: RUNX1T1
  Gene Name: runt-related transcription factor 1
  translocated to, 1 (cyclin D-related)
  ENSP ID: ENSP00000428133
MISVKRNTWRALSLVIGDCRKKGNFEYCQGARAQHPASGDAAPAPLMALLSAATHSRT

SEQ ID NO: 76155 - protein, 79 aa, Homo sapiens
  Payload ID: 15200
  Gene Symbol: RUNX1T1
  Gene Name: runt-related transcription factor 1
  translocated to, 1 (cyclin D-related)
  ENSP ID: ENSP00000428475
MPDRTEKHSTMPDSPVDVKTQSRLTPPTMPPPPTTQGAPRTSSFTPTTLTNGTSHSPTALNGAPSPPNGFSNGPSSSSS

SEQ ID NO: 76156 - protein, 604 aa, Homo sapiens; identical to SEQ ID NO: 76147
  Payload ID: 15200
  Gene Symbol: RUNX1T1
  Gene Name: runt-related transcription factor 1
  translocated to, 1 (cyclin D-related)
  Uniprot ID: Q06455
  ENSP ID: ENSP00000428543

SEQ ID NO: 76157 - protein, 615 aa, Homo sapiens
  Payload ID: 15200
  Gene Symbol: RUNX1T1
  Gene Name: runt-related transcription factor 1
  translocated to, 1 (cyclin D-related)
  Uniprot ID: Q06455
  ENSP ID: ENSP00000428742
MCHPDKAFTSDKLQCVFNEYKAAVWVPPRPRPLSRAPLPEDRTEKHSTMPDSPVDVKTQSRLTPPTMPPPPTTQGAPRTSSFTPTTLTNGTSHSPTALNGAPSPPNGFSNGPSSSSSSSLANQQLPPACGARQLSKLKRFLTTLQQFGNDISPEIGERVRTLVLGLVNSTLTIEEFHSKLQEATNFPLRPFVIPFLKANLPLLQRELLHCARLAKQNPAQYLAQHEQLLLDASTTSPVDSSELLLDVNENGKRRTPDRTKENGFDREPLHSEHPSKRPCTISPGQRYSPNNGLSYQPNGLPHPTPPPPQHYRLDDMAIAHHYRDSYRHPSHRDLRDRNRPMGLHGTRQEEMIDHRLTDREWAEEWKHLDHLLNCIMDMVEKTRRSLTVLRRCQEADREELNYWIRRYSDAEDLKKGGGSSSSHSRQQSPVNPDPVALDAHREFLHRPASGYVPEEIWKKAEEAVNEVKRQAMTELQKAVSEAERKAHDMITTERAKMERTVAEAKRQAAEDALAVINQQEDSSESCWNCGRKASETCSGCNTARYCGSFCQHKDWEKHHHICGQTLQAQQQGDTPAVSSSVTPNSGAGSPMDTPPAATPRSTTPGTPSTIETTPR

SEQ ID NO: 76158 - protein, 68 aa, Homo sapiens
  Payload ID: 15200
  Gene Symbol: RUNX1T1
  Gene Name: runt-related transcription factor 1
  translocated to, 1 (cyclin D-related)
  ENSP ID: ENSP00000429034
MISVKRNTWRALSLVIGDCRKKGNFEYCQGARAQHPASGDAAPAPLMALLSAATHSRTGGMSPERACF

SEQ ID NO: 76159 - protein, 69 aa, Homo sapiens
  Payload ID: 15200
  Gene Symbol: RUNX1T1
  Gene Name: runt-related transcription factor 1
  translocated to, 1 (cyclin D-related)
  ENSP ID: ENSP00000429062
MPDRTEKHSTMPDSPVDVKTQSRLTPPTMPPPPTTQGAPRTSSFTPTTLTNGTSHSPTALNGAPSPPNG

SEQ ID NO: 76160 - protein, 30 aa, Homo sapiens
  Payload ID: 15200
  Gene Symbol: RUNX1T1
  Gene Name: runt-related transcription factor 1
  translocated to, 1 (cyclin D-related)
  ENSP ID: ENSP00000429085
  MOD_RES (1)..(1): Any amino acid
XLLRAASRCERKREEANSRQMNKLRSREVK

SEQ ID NO: 76161 - protein, 119 aa, Homo sapiens
  Payload ID: 15200
  Gene Symbol: RUNX1T1
  Gene Name: runt-related transcription factor 1
  translocated to, 1 (cyclin D-related)
  ENSP ID: ENSP00000429118
MISVKRNTWRALSLVIGDCRKKGNFEYCQDRTEKHSTMPDSPVDVKTQSRLTPPTMPPPPTTQGAPRTSSFTPTTLTNGTSHSPTALNGAPSPPNGFSNGPSSSSSSSLANQQLPPACG

SEQ ID NO: 76162 - protein, 88 aa, Homo sapiens
  Payload ID: 15200
  Gene Symbol: RUNX1T1
  Gene Name: runt-related transcription factor 1
  translocated to, 1 (cyclin D-related)
  ENSP ID: ENSP00000429137
MPDSPVDVKTQSRLTPPTMPPPPTTQGAPRTSSFTPTTLTNGTSHSPTALNGAPSPPNGFSNGPSSSSSSSLANQQLPPACGARQLSK

SEQ ID NO: 76163 - protein, 85 aa, Homo sapiens
  Payload ID: 15200
  Gene Symbol: RUNX1T1
  Gene Name: runt-related transcription factor 1
  translocated to, 1 (cyclin D-related)
  ENSP ID: ENSP00000429375
MISVKRNTWRALSLVIGDCRKKGNFEYCQDRTEKHSTMPDSPVDVKTQSRLTPPTMPPPPTTQGAPRTSSFTPTTLTNGTSHSPT

SEQ ID NO: 76164 - protein, 135 aa, Homo sapiens
  Payload ID: 15200
  Gene Symbol: RUNX1T1
  Gene Name: runt-related transcription factor 1
  translocated to, 1 (cyclin D-related)
  ENSP ID: ENSP00000429506
MISVKRNTWRALSLVIGDCRKKGNFEYCQDRTEKHSTMPDSPVDVKTQSRLTPPTMPPPPTTQGAPRTSSFTPTTLTNGTSHSPTALNGAPSPPNGFSNGPSSSSSSSLANQQLPPACGARQLSKLKRFLTTLQQ

SEQ ID NO: 76165 - protein, 156 aa, Homo sapiens
  Payload ID: 15200
  Gene Symbol: RUNX1T1
  Gene Name: runt-related transcription factor 1
  translocated to, 1 (cyclin D-related)
  ENSP ID: ENSP00000429532
MISVKRNTWRALSLVIGDCRKKGNFEYCQDRTEKHSTMPDSPVDVKTQSRLTPPTMPPPPTTQGAPRTSSFTPTTLTNGTSHSPTALNGAPSPPNGFSNGPSSSSSSSLANQQLPPACGARQLSKLKRFLTTLQQFGNDISPEIGERVRTLVLGLV

SEQ ID NO: 76166 - protein, 36 aa, Homo sapiens
  Payload ID: 15200
  Gene Symbol: RUNX1T1
  Gene Name: runt-related transcription factor 1
  translocated to, 1 (cyclin D-related)
  ENSP ID: ENSP00000429587
MISVKRNTWRALSLVIGDCRKKGNFEYCQDKPHLKN

SEQ ID NO: 76167 - protein, 36 aa, Homo sapiens; identical to SEQ ID NO: 76166
  Payload ID: 15200
  Gene Symbol: RUNX1T1
  Gene Name: runt-related transcription factor 1
  translocated to, 1 (cyclin D-related)
  ENSP ID: ENSP00000429653

SEQ ID NO: 76168 - protein, 93 aa, Homo sapiens
  Payload ID: 15200
  Gene Symbol: RUNX1T1
  Gene Name: runt-related transcription factor 1
  translocated to, 1 (cyclin D-related)
  ENSP ID: ENSP00000429666
MISVKRNTWRALSLVIGDCRKKGNFEYCQDRTEKHSTMPDSPVDVKTQSRLTPPTMPPPPTTQGAPRTSSFTPTTLTNGTSHSPTALNGAPSP

SEQ ID NO: 76169 - protein, 210 aa, Homo sapiens
  Payload ID: 15200
  Gene Symbol: RUNX1T1
  Gene Name: runt-related transcription factor 1
  translocated to, 1 (cyclin D-related)
  ENSP ID: ENSP00000429728
MPDSPVDVKTQSRLTPPTMPPPPTTQGAPRTSSFTPTTLTNGTSHSPTALNGAPSPPNGFSNGPSSSSSSSLANQQLPPACGARQLSKLKRFLTTLQQFGNDISPEIGERVRTLVLGLVNSTLTIEEFHSKLQEATNFPLRPFVIPFLKANLPLLQRELLHCARLAKQNPAQYLAQHEQLLLDASTTSPVDSSELLLDVNENGKRRTPDR

SEQ ID NO: 76170 - protein, 48 aa, Homo sapiens
  Payload ID: 15200
  Gene Symbol: RUNX1T1
  Gene Name: runt-related transcription factor 1
  translocated to, 1 (cyclin D-related)
  ENSP ID: ENSP00000429857
MISVKRNTWRALSLVIGDCRKKGNFEYCQDRTEKHSTMPDSPVDVKTQ

SEQ ID NO: 76171 - protein, 46 aa, Homo sapiens
  Payload ID: 15200
  Gene Symbol: RUNX1T1
  Gene Name: runt-related transcription factor 1
  translocated to, 1 (cyclin D-related)
  ENSP ID: ENSP00000429864
MPDSPVDVKTQSRLTPPTMPPPPTTQGAPRTSSFTPTTLTNGTSHS

SEQ ID NO: 76172 - protein, 120 aa, Homo sapiens
  Payload ID: 15200
  Gene Symbol: RUNX1T1
  Gene Name: runt-related transcription factor 1
  translocated to, 1 (cyclin D-related)
  ENSP ID: ENSP00000429940
MPDSPVDVKTQSRLTPPTMPPPPTTQGAPRTSSFTPTTLTNGTSHSPTALNGAPSPPNGFSNGPSSSSSSSLANQQLPPACGARQLSKLKRFLTTLQQFGNDISPEIGERVRTLVLGLVN

SEQ ID NO: 76173 - protein, 120 aa, Homo sapiens
  Payload ID: 15200
  Gene Symbol: RUNX1T1
  Gene Name: runt-related transcription factor 1
  translocated to, 1 (cyclin D-related)
  ENSP ID: ENSP00000430070
MISVKRNTWRALSLVIGDCRKKGNFEYCQDRTEKHSTMPDSPVDVKTQSRLTPPTMPPPPTTQGAPRTSSFTPTTLTNGTSHSPTALNGAPSPPNGFSNGPSSSSSSSLANQQLPPACGA

SEQ ID NO: 76174 - protein, 54 aa, Homo sapiens
  Payload ID: 15200
  Gene Symbol: RUNX1T1
  Gene Name: runt-related transcription factor 1
  translocated to, 1 (cyclin D-related)
  ENSP ID: ENSP00000430080
MISVKRNTWRALSLVIGDCRKKGNFEYCQDRTEKHSTMPDSPVDVKTQSRLTPP

SEQ ID NO: 76175 - protein, 36 aa, Homo sapiens; identical to SEQ ID NO: 76166
  Payload ID: 15200
  Gene Symbol: RUNX1T1
  Gene Name: runt-related transcription factor 1
  translocated to, 1 (cyclin D-related)
  ENSP ID: ENSP00000430084

SEQ ID NO: 76176 - protein, 169 aa, Homo sapiens
  Payload ID: 15200
  Gene Symbol: RUNX1T1
  Gene Name: runt-related transcription factor 1
  translocated to, 1 (cyclin D-related)
  ENSP ID: ENSP00000430204
MISVKRNTWRALSLVIGDCRKKGNFEYCQDRTEKHSTMPDSPVDVKTQSRLTPPTMPPPPTTQGAPRTSSFTPTTLTNGTSHSPTALNGAPSPPNGFSNGPSSSSSSSLANQQLPPACGARQLSKLKRFLTTLQQFGNDISPEIGERVRTLVLGLVNSTLTIEEFHSKL

SEQ ID NO: 76177 - protein, 26 aa, Homo sapiens
  Payload ID: 15200
  Gene Symbol: RUNX1T1
  Gene Name: runt-related transcription factor 1
  translocated to, 1 (cyclin D-related)
  ENSP ID: ENSP00000430334
MPDRTEKHSTMPDSPVDVKTQSRLTP

SEQ ID NO: 76178 - protein, 101 aa, Homo sapiens
  Payload ID: 15200
  Gene Symbol: RUNX1T1
  Gene Name: runt-related transcription factor 1
  translocated to, 1 (cyclin D-related)
  ENSP ID: ENSP00000430637
MPDRTEKHSTMPDSPVDVKTQSRLTPPTMPPPPTTQGAPRTSSFTPTTLTNGTSHSPTALNGAPSPPNGFSNGPSSSSSSSLANQQLPPACGARQLSKLKR

SEQ ID NO: 76179 - protein, 577 aa, Homo sapiens; identical to SEQ ID NO: 76149
  Payload ID: 15200
  Gene Symbol: RUNX1T1
  Gene Name: runt-related transcription factor 1
  translocated to, 1 (cyclin D-related)
  Uniprot ID: Q06455
  ENSP ID: ENSP00000430728

SEQ ID NO: 76180 - protein, 127 aa, Homo sapiens
  Payload ID: 15200
  Gene Symbol: RUNX1T1
  Gene Name: runt-related transcription factor 1
  translocated to, 1 (cyclin D-related)
  ENSP ID: ENSP00000430778
  MOD_RES (1)..(1): Any amino acid
XLDDMAIAHHYRDSYRHPSHRDLRDRNRPMGLHGTRQEEMIDHRLTDREWAEEWKHLDHLLNCIMDMVEKTRRSLTVLRRCQEADREELNYWIRRYSDAEDLKKGGGSSSSHSRQQSPVNPDPVALG

SEQ ID NO: 76181 - protein, 31 aa, Homo sapiens
  Payload ID: 15200
  Gene Symbol: RUNX1T1
  Gene Name: runt-related transcription factor 1
  translocated to, 1 (cyclin D-related)
  ENSP ID: ENSP00000430863
ASRCERKREEANSRQLFSHQLFPSISYLNVL

SEQ ID NO: 76182 - protein, 229 aa, Homo sapiens
  Payload ID: 15200
  Gene Symbol: RUNX1T1
  Gene Name: runt-related transcription factor 1
  translocated to, 1 (cyclin D-related)
  ENSP ID: ENSP00000431094
MISVKRNTWRALSLVIGDCRKKGNFEYCQDRTEKHSTMPDSPVDVKTQSRLTPPTMPPPPTTQGAPRTSSFTPTTLTNGTSHSPTALNGAPSPPNGFSNGPSSSSSSSLANQQLPPACGARQLSKLKRFLTTLQQFGNDISPEIGERVRTLVLGLVNSTLTIEEFHSKLQEATNFPLRPFVIPFLKANLPLLQRELLHCARLAKQNPAQYLAQHEQLLLDASTTSPVDS

SEQ ID NO: 76183 - protein, 577 aa, Homo sapiens; identical to SEQ ID NO: 76149
  Payload ID: 15200
  Gene Symbol: RUNX1T1
  Gene Name: runt-related transcription factor 1
  translocated to, 1 (cyclin D-related)
  Uniprot ID: Q06455
  ENSP ID: ENSP00000478331

SEQ ID NO: 76184 - protein, 584 aa, Homo sapiens
  Payload ID: 15200
  Gene Symbol: RUNX1T1
  Gene Name: runt-related transcription factor 1
  translocated to, 1 (cyclin D-related)
  ENSP ID: ENSP00000480500
MVGLSGPVQYRTEKHSTMPDSPVDVKTQSRLTPPTMPPPPTTQGAPRTSSFTPTTLTNGTSHSPTALNGAPSPPNGFSNGPSSSSSSSLANQQLPPACGARQLSKLKRFLTTLQQFGNDISPEIGERVRTLVLGLVNSTLTIEEFHSKLQEATNFPLRPFVIPFLKANLPLLQRELLHCARLAKQNPAQYLAQHEQLLLDASTTSPVDSSELLLDVNENGKRRTPDRTKENGFDREPLHSEHPSKRPCTISPGQRYSPNNGLSYQPNGLPHPTPPPPQHYRLDDMAIAHHYRDSYRHPSHRDLRDRNRPMGLHGTRQEEMIDHRLTDREWAEEWKHLDHLLNCIMDMVEKTRRSLTVLRRCQEADREELNYWIRRYSDAEDLKKGGGSSSSHSRQQSPVNPDPVALDAHREFLHRPASGYVPEEIWKKAEEAVNEVKRQAMTELQKAVSEAERKAHDMITTERAKMERTVAEAKRQAAEDALAVINQQEDSSESCWNCGRKASETCSGCNTARYCGSFCQHKDWEKHHHICGQTLQAQQQGDTPAVSSSVTPNSGAGSPMDTPPAATPRSTTPGTPSTIETTPR

SEQ ID NO: 76185 - protein, 604 aa, Homo sapiens; identical to SEQ ID NO: 76147
  Payload ID: 15200
  Gene Symbol: RUNX1T1
  Gene Name: runt-related transcription factor 1
  translocated to, 1 (cyclin D-related)
  Uniprot ID: Q06455
  ENSP ID: ENSP00000481112

SEQ ID NO: 76186 - protein, 604 aa, Homo sapiens; identical to SEQ ID NO: 76147
  Payload ID: 15200
  Gene Symbol: RUNX1T1
  Gene Name: runt-related transcription factor 1
  translocated to, 1 (cyclin D-related)
  Uniprot ID: Q06455
  ENSP ID: ENSP00000481315

SEQ ID NO: 76187 - protein, 604 aa, Homo sapiens; identical to SEQ ID NO: 76147
  Payload ID: 15200
  Gene Symbol: RUNX1T1
  Gene Name: runt-related transcription factor 1
  translocated to, 1 (cyclin D-related)
  Uniprot ID: Q06455
  ENSP ID: ENSP00000481799

SEQ ID NO: 76188 - protein, 507 aa, Homo sapiens
  Payload ID: 15201
  Gene Symbol: RUNX2
  Gene Name: runt-related transcription factor 2
  Uniprot ID: Q13950
  ENSP ID: ENSP00000352514
MRIPVDPSTSRRFSPPSSSLQPGKMSDVSPVVAAQQQQQQQQQQQQQQQQQQQQQQQEAAAAAAAAAAAAAAAAAVPRLRPPHDNRTMVEIIADHPAELVRTDSPNFLCSVLPSHWRCNKTLPVAFKVVALGEVPDGTVVTVMAGNDENYSAELRNASAVMKNQVARFNDLRFVGRSGRGKSFTLTITVFTNPPQVATYHRAIKVTVDGPREPRRHRQKLDDSKPSLFSDRLSDLGRIPHPSMRVGVPPQNPRPSLNSAPSPFNPQGQSQITDPRQAQSSPPWSYDQSYPSYLSQMTSPSIHSTTPLSSTRGTGLPAITDVPRRISDDDTATSDFCLWPSTLSKKSQAGASELGPFSDPRQFPSISSLTESRFSNPRMHYPATFTYTPPVTSGMSLGMSATTHYHTYLPPPYPGSSQSQSGPFQTSSTPYLYYGTSSGSYQFPMVPGGDRSPSRMLPPCTTTSNGSTLLNPNLPNQNDGVDADGSHSSSPTVLNSSGRMDESVWRPY

SEQ ID NO: 76189 - protein, 499 aa, Homo sapiens
  Payload ID: 15201
  Gene Symbol: RUNX2
  Gene Name: runt-related transcription factor 2
  Uniprot ID: Q13950
  ENSP ID: ENSP00000360486
MASNSLFSTVTPCQQNFFWDPSTSRRFSPPSSSLQPGKMSDVSPVVAAQQQQQQQQQQQQQQQQQQQQQQQEAAAAAAAAAAAAAAAAAVPRLRPPHDNRTMVEIIADHPAELVRTDSPNFLCSVLPSHWRCNKTLPVAFKVVALGEVPDGTVVTVMAGNDENYSAELRNASAVMKNQVARFNDLRFVGRSGRGKSFTLTITVFTNPPQVATYHRAIKVTVDGPREPRRHRQKLDDSKPSLFSDRLSDLGRIPHPSMRVGVPPQNPRPSLNSAPSPFNPQGQSQITDPRQAQSSPPWSYDQSYPSYLSQMTSPSIHSTTPLSSTRGTGLPAITDVPRRISGASELGPFSDPRQFPSISSLTESRFSNPRMHYPATFTYTPPVTSGMSLGMSATTHYHTYLPPPYPGSSQSQSGPFQTSSTPYLYYGTSSGSYQFPMVPGGDRSPSRMLPPCTTTSNGSTLLNPNLPNQNDGVDADGSHSSSPTVLNSSGRMDESVWRPY

SEQ ID NO: 76190 - protein, 499 aa, Homo sapiens; identical to SEQ ID NO: 76189
  Payload ID: 15201
  Gene Symbol: RUNX2
  Gene Name: runt-related transcription factor 2
  Uniprot ID: Q13950
  ENSP ID: ENSP00000360491

SEQ ID NO: 76191 - protein, 521 aa, Homo sapiens
  Payload ID: 15201
  Gene Symbol: RUNX2
  Gene Name: runt-related transcription factor 2
  Uniprot ID: Q13950
  ENSP ID: ENSP00000360493
MASNSLFSTVTPCQQNFFWDPSTSRRFSPPSSSLQPGKMSDVSPVVAAQQQQQQQQQQQQQQQQQQQQQQQEAAAAAAAAAAAAAAAAAVPRLRPPHDNRTMVEIIADHPAELVRTDSPNFLCSVLPSHWRCNKTLPVAFKVVALGEVPDGTVVTVMAGNDENYSAELRNASAVMKNQVARFNDLRFVGRSGRGKSFTLTITVFTNPPQVATYHRAIKVTVDGPREPRRHRQKLDDSKPSLFSDRLSDLGRIPHPSMRVGVPPQNPRPSLNSAPSPFNPQGQSQITDPRQAQSSPPWSYDQSYPSYLSQMTSPSIHSTTPLSSTRGTGLPAITDVPRRISDDDTATSDFCLWPSTLSKKSQAGASELGPFSDPRQFPSISSLTESRFSNPRMHYPATFTYTPPVTSGMSLGMSATTHYHTYLPPPYPGSSQSQSGPFQTSSTPYLYYGTSSGSYQFPMVPGGDRSPSRMLPPCTTTSNGSTLLNPNLPNQNDGVDADGSHSSSPTVLNSSGRMDESVWRPY

SEQ ID NO: 76192 - protein, 521 aa, Homo sapiens; identical to SEQ ID NO: 76191
  Payload ID: 15201
  Gene Symbol: RUNX2
  Gene Name: runt-related transcription factor 2
  Uniprot ID: Q13950
  ENSP ID: ENSP00000420707

SEQ ID NO: 76193 - protein, 542 aa, Homo sapiens
  Payload ID: 15201
  Gene Symbol: RUNX2
  Gene Name: runt-related transcription factor 2
  ENSP ID: ENSP00000458178
MASNSLFSTVTPCQQNFFWDPSTSRRFSPPSSSLQPGKMSDVSPVVAAQQQQQQQQQQQQQQQQQQQQQQQEAAAAAAAAAAAAAAAAAVPRLRPPHDNRTMVEIIADHPAELVRTDSPNFLCSVLPSHWRCNKTLPVAFKVVALGEVPDGTVVTVMAGNDENYSAELRNASAVMKNQVARFNDLRFVGRSGRGKSFTLTITVFTNPPQVATYHRAIKVTVDGPREPRRHRQKLDDSKPSLFSDRLSDLGRIPHPSMRVGVPPQNPRPSLNSAPSPFNPQGQSQITDPRQAQSSPPWSYDQSYPSYLSQMTSPSIHSTTPLSSTRGTGLPAITDVPRRISDSEPSTLDSQSSTTLFLSSEEPGPSTAALPSPSSSSCEPQAFSPGPPALPPLLPPLPAASAPPGPGASRRTGRYSVVASSPEAAPRLVDWLPGCPSTISPSTRGDDKERPPPVLAPAEGPERSRAPRPSTAGREEGTVDAGTSPPPRARPAAAASLEAHVGDILVELRTMNGHLDSIARALTKLASSLGPQPEPLPDVSDAN

SEQ ID NO: 76194 - protein, 276 aa, Homo sapiens
  Payload ID: 15201
  Gene Symbol: RUNX2
  Gene Name: runt-related transcription factor 2
  ENSP ID: ENSP00000460188
MRIPVDPSTSRRFSPPSSSLQPGKMSDVSPVVAAQQQQQQQQQQQQQQQQQQQQQQQEAAAAAAAAAAAAAAAAAVPRLRPPHDNRTMVEIIADHPAELVRTDSPNFLCSVLPSHWRCNKTLPVAFKVVALGEVPDGTVVTVMAGNDENYSAELRNASAVMKNQVARFNDLRFVGRSGRGKSFTLTITVFTNPPQVATYHRAIKVTVDGPREPRNPRQAQSSPPWSYDQSYPSYLSQMTSPSIHSTTPLSSTRGTGLPAITDVPRRISARSRYSLR

SEQ ID NO: 76195 - protein, 37 aa, Homo sapiens
  Payload ID: 15201
  Gene Symbol: RUNX2
  Gene Name: runt-related transcription factor 2
  ENSP ID: ENSP00000461357
MASNSLFSTVTPCQQNFFWGGSPRRGTRWDCGYCHGG

SEQ ID NO: 76196 - protein, 485 aa, Homo sapiens
  Payload ID: 15201
  Gene Symbol: RUNX2
  Gene Name: runt-related transcription factor 2
  ENSP ID: ENSP00000485863
MRIPVDPSTSRRFSPPSSSLQPGKMSDVSPVVAAQQQQQQQQQQQQQQQQQQQQQQQEAAAAAAAAAAAAAAAAAVPRLRPPHDNRTMVEIIADHPAELVRTDSPNFLCSVLPSHWRCNKTLPVAFKVVALGEVPDGTVVTVMAGNDENYSAELRNASAVMKNQVARFNDLRFVGRSGRGKSFTLTITVFTNPPQVATYHRAIKVTVDGPREPRRHRQKLDDSKPSLFSDRLSDLGRIPHPSMRVGVPPQNPRPSLNSAPSPFNPQGQSQITDPRQAQSSPPWSYDQSYPSYLSQMTSPSIHSTTPLSSTRGTGLPAITDVPRRISGASELGPFSDPRQFPSISSLTESRFSNPRMHYPATFTYTPPVTSGMSLGMSATTHYHTYLPPPYPGSSQSQSGPFQTSSTPYLYYGTSSGSYQFPMVPGGDRSPSRMLPPCTTTSNGSTLLNPNLPNQNDGVDADGSHSSSPTVLNSSGRMDESVWRPY

SEQ ID NO: 76197 - protein, 415 aa, Homo sapiens
  Payload ID: 15202
  Gene Symbol: RUNX3
  Gene Name: runt-related transcription factor 3
  Uniprot ID: Q13761
  ENSP ID: ENSP00000308051
MRIPVDPSTSRRFTPPSPAFPCGGGGGKMGENSGALSAQAAVGPGGRARPEVRSMVDVLADHAGELVRTDSPNFLCSVLPSHWRCNKTLPVAFKVVALGDVPDGTVVTVMAGNDENYSAELRNASAVMKNQVARFNDLRFVGRSGRGKSFTLTITVFTNPTQVATYHRAIKVTVDGPREPRRHRQKLEDQTKPFPDRFGDLERLRMRVTPSTPSPRGSLSTTSHFSSQPQTPIQGTSELNPFSDPRQFDRSFPTLPTLTESRFPDPRMHYPGAMSAAFPYSATPSGTSISSLSVAGMPATSRFHHTYLPPPYPGAPQNQSGPFQANPSPYHLYYGTSSGSYQFSMVAGSSSGGDRSPTRMLASCTSSAASVAAGNLMNPSLGGQSDGVEADGSHSNSPTALSTPGRMDEAVWRPY

SEQ ID NO: 76198 - protein, 429 aa, Homo sapiens
  Payload ID: 15202
  Gene Symbol: RUNX3
  Gene Name: runt-related transcription factor 3
  Uniprot ID: Q13761
  ENSP ID: ENSP00000343477
MASNSIFDSFPTYSPTFIRDPSTSRRFTPPSPAFPCGGGGGKMGENSGALSAQAAVGPGGRARPEVRSMVDVLADHAGELVRTDSPNFLCSVLPSHWRCNKTLPVAFKVVALGDVPDGTVVTVMAGNDENYSAELRNASAVMKNQVARFNDLRFVGRSGRGKSFTLTITVFTNPTQVATYHRAIKVTVDGPREPRRHRQKLEDQTKPFPDRFGDLERLRMRVTPSTPSPRGSLSTTSHFSSQPQTPIQGTSELNPFSDPRQFDRSFPTLPTLTESRFPDPRMHYPGAMSAAFPYSATPSGTSISSLSVAGMPATSRFHHTYLPPPYPGAPQNQSGPFQANPSPYHLYYGTSSGSYQFSMVAGSSSGGDRSPTRMLASCTSSAASVAAGNLMNPSLGGQSDGVEADGSHSNSPTALSTPGRMDEAVWRPY

SEQ ID NO: 76199 - protein, 429 aa, Homo sapiens; identical to SEQ ID NO: 76198
  Payload ID: 15202
  Gene Symbol: RUNX3
  Gene Name: runt-related transcription factor 3
  Uniprot ID: Q13761
  ENSP ID: ENSP00000382800

SEQ ID NO: 76200 - protein, 456 aa, Homo sapiens
  Payload ID: 15203
  Gene Symbol: RUVBL1
  Gene Name: RuvB-like AAA ATPase 1
  Uniprot ID: Q9Y265
  ENSP ID: ENSP00000318297
MKIEEVKSTTKTQRIASHSHVKGLGLDESGLAKQAASGLVGQENAREACGVIVELIKSKKMAGRAVLLAGPPGTGKTALALAIAQELGSKVPFCPMVGSEVYSTEIKKTEVLMENFRRAIGLRIKETKEVYEGEVTELTPCETENPMGGYGKTISHVIIGLKTAKGTKQLKLDPSIFESLQKERVEAGDVIYIEANSGAVKRQGRCDTYATEFDLEAEEYVPLPKGDVHKKKEIIQDVTLHDLDVANARPQGGQDILSMMGQLMKPKKTEITDKLRGEINKVVNKYIDQGIAELVPGVLFVDEVHMLDIECFTYLHRALESSIAPIVIFASNRGNCVIRGTEDITSPHGIPLDLLDRVMIIRTMLYTPQEMKQIIKIRAQTEGINISEEALNHLGEIGTKTTLRYSVQLLTPANLLAKINGKDSIEKEHVEEISELFYDAKSSAKILADQQDKYMK

SEQ ID NO: 76201 - protein, 267 aa, Homo sapiens
  Payload ID: 15203
  Gene Symbol: RUVBL1
  Gene Name: RuvB-like AAA ATPase 1
  ENSP ID: ENSP00000417254
RQGRCDTYATEFDLEAEEYVPLPKGDVHKKKEIIQDVTLHDLDVANARPQGGQDILSMMGQLMKPKKTEITDKLRGEINKVVNKYIDQGIAELVPGVLFVDEVHMLDIECFTYLHRALESSIAPIVIFASNRGNCVIRGLGDGINFAPYRGTEDITSPHGIPLDLLDRVMIIRTMLYTPQEMKQIIKIRAQTEGINISEEALNHLGEIGTKTTLRYSVQLLTPANLLAKINGKDSIEKEHVEEISELFYDAKSSAKILADQQDKYMK

SEQ ID NO: 76202 - protein, 222 aa, Homo sapiens
  Payload ID: 15203
  Gene Symbol: RUVBL1
  Gene Name: RuvB-like AAA ATPase 1
  ENSP ID: ENSP00000417370
  MOD_RES (1)..(1): Any amino acid
XKERVEAGDVIYIEANSGAVKRQGRCDTYATEFDLEAEEYVPLPKGDVHKKKEIIQDVTLHDLDVANARPQGGQDILSMMGQLMKPKKTEITDKLRGEINKVVNKYIDQGIAELVPGVLFVDEVHMLDIECFTYLHRALESSIAPIVIFASNRGNCVIRSHDSMNMLVQLIWKPAAFKYHLIVSTQYDDSAPHRVGDCTQGILKLKSRPWKLPGVGSGHTWK

SEQ ID NO: 76203 - protein, 315 aa, Homo sapiens
  Payload ID: 15203
  Gene Symbol: RUVBL1
  Gene Name: RuvB-like AAA ATPase 1
  ENSP ID: ENSP00000420738
MAGRAVLLAGPPGTGKTALALAIAQELGSKVPFCPMVGSEVYSTEIKKTEVLMENFRRAIGLRIKETKEVYEGEVTELTPCETENPMGGYGKTISHVIIGLKTAKGTKQLKLDPSIFESLQKERVEAGDVIYIEANSGAVKRQGRCDTYATEFDLEAEEYVPLPKGDVHKKKEIIQDVTLHDLDVANARPQGGQDILSMMGQLMKPKKTEITDKLRGEINKVVNKYIDQGIAELVPGVLFVDEVHMLDIECFTYLHRALESSIAPIVIFASNRGNCVIRGTEDITSPHGIPLDLLDRVMIIRTMLYTPQEMKQVP

SEQ ID NO: 76204 - protein, 131 aa, Homo sapiens
  Payload ID: 15203
  Gene Symbol: RUVBL1
  Gene Name: RuvB-like AAA ATPase 1
  ENSP ID: ENSP00000463669
KLRGEINKVVNKYIDQGIAELVPGVLFVDEVHMLDIECFTYLHRALESSIAPIVIFASNRGNCVIRGTEDITSPHGIPLDLLDRVMIIRTMLYTPQEMKQIIKIRAQTEGINISEEALNHLGEIGTKTTLR

SEQ ID NO: 76205 - protein, 259 aa, Homo sapiens
  Payload ID: 15204
  Gene Symbol: RUVBL2
  Gene Name: RuvB-like AAA ATPase 2
  ENSP ID: ENSP00000221413
MATVTATTKVPEIRDVTRIERIGAHSHIRGLGLDDALEPRQASQGMVGQLAARRAAGVVLEMIREGKIAGRAVLIAGQPGTGKTAIAMGMAQALGPDTPFTAIAGSEIFSLEMSKTEALTQAFRRSIGVRIKEETEIIEGEVVEIQIDRPATGTGSKVGKLTLKTTEMETIYDLGTKMIESLTKDKGRDHHRQGDGQDLQAGPLLHTRPRLRRYGLPDQVRAVPRWGAPETQGGGAHRVPARDRRHQLSHPGLPGALLR

SEQ ID NO: 76206 - protein, 109 aa, Homo sapiens
  Payload ID: 15204
  Gene Symbol: RUVBL2
  Gene Name: RuvB-like AAA ATPase 2
  ENSP ID: ENSP00000469189
MVGQLAARRAAGVVLEMIREGKIAGRAVLIAGQPGTGKTAIAMGMAQALGPDTPFTAIAGSEIFSLEMSKTEALTQAFRRSIGVRIKEETEIIEGEVVEIQIDRPATGT

SEQ ID NO: 76207 - protein, 39 aa, Homo sapiens
  Payload ID: 15204
  Gene Symbol: RUVBL2
  Gene Name: RuvB-like AAA ATPase 2
  ENSP ID: ENSP00000469488
MATVTATTKVPEIRDVTRIERIEMEFPRVSQDGLDLLTS

SEQ ID NO: 76208 - protein, 44 aa, Homo sapiens
  Payload ID: 15204
  Gene Symbol: RUVBL2
  Gene Name: RuvB-like AAA ATPase 2
  ENSP ID: ENSP00000469760
MATVELQLSKSSWRNGRFRSPWRQCVMRRVVGPCASSHLGALDC

SEQ ID NO: 76209 - protein, 354 aa, Homo sapiens
  Payload ID: 15204
  Gene Symbol: RUVBL2
  Gene Name: RuvB-like AAA ATPase 2
  ENSP ID: ENSP00000471524
MVGQLAARRAAGVVLEMIREGKIAGRAVLIAGQPGTGKTAIAMGMAQALGPDTPFTAIAGSEIFSLEMSKTEALTQAFRRSIGVRIKEETEIIEGEVVEIQIDRPATGTGSKVGKLTLKTTEMETIYDLGTKMIESLTKDKVQAGDVITIDKATGKISKLGRSFTRARDYDAMGSQTKFVQCPDGELQKRKEVVHTVSLHEIDVINSRTQGFLALFSGDTGEIKSEVREQINAKVAEWREEGKAEIIPGVLFIDEVHMLDIESFSFLNRALESDMAPVLIMATNRGITRIRGTSYQSPHGIPIDLLDRLLIVSTTPYSEKDTKQILRIRVQKCRWMTSSGSTHSSWTSPAPRST

SEQ ID NO: 76210 - protein, 50 aa, Homo sapiens
  Payload ID: 15204
  Gene Symbol: RUVBL2
  Gene Name: RuvB-like AAA ATPase 2
  ENSP ID: ENSP00000471538
MATVTATTKVPEIRDVTRIERIGAHSHIRGLGLDDALEPRQLPDVVEMPW

SEQ ID NO: 76211 - protein, 463 aa, Homo sapiens
  Payload ID: 15204
  Gene Symbol: RUVBL2
  Gene Name: RuvB-like AAA ATPase 2
  Uniprot ID: Q9Y230
  ENSP ID: ENSP00000473172
MATVTATTKVPEIRDVTRIERIGAHSHIRGLGLDDALEPRQASQGMVGQLAARRAAGVVLEMIREGKIAGRAVLIAGQPGTGKTAIAMGMAQALGPDTPFTAIAGSEIFSLEMSKTEALTQAFRRSIGVRIKEETEIIEGEVVEIQIDRPATGTGSKVGKLTLKTTEMETIYDLGTKMIESLTKDKVQAGDVITIDKATGKISKLGRSFTRARDYDAMGSQTKFVQCPDGELQKRKEVVHTVSLHEIDVINSRTQGFLALFSGDTGEIKSEVREQINAKVAEWREEGKAEIIPGVLFIDEVHMLDIESFSFLNRALESDMAPVLIMATNRGITRIRGTSYQSPHGIPIDLLDRLLIVSTTPYSEKDTKQILRIRCEEEDVEMSEDAYTVLTRIGLETSLRYAIQLITAASLVCRKRKGTEVQVDDIKRVYSLFLDESRSTQYMKEYQDAFLFNELKGETMDTS

SEQ ID NO: 76212 - protein, 354 aa, Homo sapiens; identical to SEQ ID NO: 76209
  Payload ID: 15204
  Gene Symbol: RUVBL2
  Gene Name: RuvB-like AAA ATPase 2
  ENSP ID: ENSP00000486242

SEQ ID NO: 76213 - protein, 243 aa, Homo sapiens
  Payload ID: 15205
  Gene Symbol: RWDD1
  Gene Name: RWD domain containing 1
  Uniprot ID: Q9H446
  ENSP ID: ENSP00000420357
MTDYGEEQRNELEALESIYPDSFTVLSENPPSFTITVTSEAGENDETVQTTLKFTYSEKYPDEAPLYEIFSQENLEDNDVSDILKLLALQAEENLGMVMIFTLVTAVQEKLNEIVDQIKTRREEEKKQKEKEAEEAEKQLFHGTPVTIENFLNWKAKFDAELLEIKKKRMKEEEQAGKNKLSGKQLFETDHNLDTSDIQFLEDAGNNVEVDESLFQEMDDLELEDDEDDPDYNPADPESDSAD

SEQ ID NO: 76214 - protein, 67 aa, Homo sapiens
  Payload ID: 15205
  Gene Symbol: RWDD1
  Gene Name: RWD domain containing 1
  ENSP ID: ENSP00000428704
MVMIFTLVTAVQEKLNEIVDQIKTRREEEKKQKEKEAEEAEKQLFHGTPVTIENFLNWKAKFDAELL

SEQ ID NO: 76215 - protein, 147 aa, Homo sapiens
  Payload ID: 15205
  Gene Symbol: RWDD1
  Gene Name: RWD domain containing 1
  Uniprot ID: Q9H446
  ENSP ID: ENSP00000428778
MVMIFTLVTAVQEKLNEIVDQIKTRREEEKKQKEKEAEEAEKQLFHGTPVTIENFLNWKAKFDAELLEIKKKRMKEEEQAGKNKLSGKQLFETDHNLDTSDIQFLEDAGNNVEVDESLFQEMDDLELEDDEDDPDYNPADPESDSAD

SEQ ID NO: 76216 - protein, 51 aa, Homo sapiens
  Payload ID: 15205
  Gene Symbol: RWDD1
  Gene Name: RWD domain containing 1
  ENSP ID: ENSP00000429070
MVMIFTLVTAVQEKLNEIVDQIKTRREEEKKQKEKEAEEAEKQLFHGTPVT

SEQ ID NO: 76217 - protein, 72 aa, Homo sapiens
  Payload ID: 15205
  Gene Symbol: RWDD1
  Gene Name: RWD domain containing 1
  ENSP ID: ENSP00000429942
MVMIFTLVTAVQEKLNEIVDQIKTRREEEKKQKEKEAEEAEKQLFHGTPVTIENFLNWKAKFDAELLEIKKK

SEQ ID NO: 76218 - protein, 292 aa, Homo sapiens
  Payload ID: 15206
  Gene Symbol: RWDD2A
  Gene Name: RWD domain containing 2A
  Uniprot ID: Q9UIY3
  ENSP ID: ENSP00000358739
MSASVKESLQLQLLEMEMLFSMFPNQGEVKLEDVNALTNIKRYLEGTREALPPKIEFVITLQIEEPKVKIDLQVTMPHSYPYVALQLFGRSSELDRHQQLLLNKGLTSYIGTFDPGELCVCAAIQWLQDNSASYFLNRKLVYEPSTQAKPVKNTFLRMWIYSHHIYQQDLRKKILDVGKRLDVTGFCMTGKPGIICVEGFKEHCEEFWHTIRYPNWKHISCKHAESVETEGNGEDLRLFHSFEELLLEAHGDYGLRNDYHMNLGQFLEFLKKHKSEHVFQILFGIESKSSDS

SEQ ID NO: 76219 - protein, 319 aa, Homo sapiens
  Payload ID: 15207
  Gene Symbol: RWDD2B
  Gene Name: RWD domain containing 2B
  Uniprot ID: P57060
  ENSP ID: ENSP00000418693
MKIELSMQPWNPGYSSEGATAQETYTCPKMIEMEQAEAQLAELDLLASMFPGENELIVNDQLAVAELKDCIEKKTMEGRSSKVYFTINMNLDVSDEKMAMFSLACILPFKYPAVLPEITVRSVLLSRSQQTQLNTDLTAFLQKHCHGDVCILNATEWVREHASGYVSRDTSSSPTTGSTVQSVDLIFTRLWIYSHHIYNKCKRKNILEWAKELSLSGFSMPGKPGVVCVEGPQSACEEFWSRLRKLNWKRILIRHREDIPFDGTNDETERQRKFSIFEEKVFSVNGARGNHMDFGQLYQFLNTKGCGDVFQMFFGVEGQ

SEQ ID NO: 76220 - protein, 195 aa, Homo sapiens
  Payload ID: 15208
  Gene Symbol: RWDD3
  Gene Name: RWD domain containing 3
  Uniprot ID: Q9Y3V2
  ENSP ID: ENSP00000263893
MAEPVQEELSVLAAIFCRPHEWEVLSRSETDGTVFRIHTKAEGFMDVDIPLELVFHLPVNYPSCLPGISINSEQLTRAQCVTVKENLLEQAESLLSEPMVHELVLWIQQNLRHILSQPETGSGSEKCTFSTSTTMDDGLWITLLHLDHMRAKTKYVKIVEKWASDLRLTGRLMFMGKIILILLQGDRNNLKVPKS

SEQ ID NO: 76221 - protein, 267 aa, Homo sapiens
  Payload ID: 15208
  Gene Symbol: RWDD3
  Gene Name: RWD domain containing 3
  Uniprot ID: Q9Y3V2
  ENSP ID: ENSP00000359221
MAEPVQEELSVLAAIFCRPHEWEVLSRSETDGTVFRIHTKAEGFMDVDIPLELVFHLPVNYPSCLPGISINSEQLTRAQCVTVKENLLEQAESLLSEPMVHELVLWIQQNLRHILSQPETGSGSEKCTFSTSTTMDDGLWITLLHLDHMRAKTKYVKIVEKWASDLRLTGRLMFMGKIILILLQGDRNNLKEYLILQKTSKVDVDSSGKKCKEKMISVLFETKVQTEHKRFLAFEVKEYSALDELQKEFETAGLKKLFSEFVLALVK

SEQ ID NO: 76222 - protein, 187 aa, Homo sapiens
  Payload ID: 15209
  Gene Symbol: RWDD4
  Gene Name: RWD domain containing 4
  ENSP ID: ENSP00000332177
MSANEDQEMELEALRSIYEGDESFRELSPVSFQYRIGENGDPKAFLIEISWTETYPQTPPILSMNAFFNNTISSAVKQSILAKLQEAVEANLGTAMTYTLFEYAKDNKEQFMENHNPINSATSISNIISIETPNTAPSSKKKDKKEQLSKAQKRKLADKTDHKGELPRGWNWVDVVKLSKTGSKDDE

SEQ ID NO: 76223 - protein, 188 aa, Homo sapiens
  Payload ID: 15209
  Gene Symbol: RWDD4
  Gene Name: RWD domain containing 4
  Uniprot ID: Q6NW29
  ENSP ID: ENSP00000388920
MSANEDQEMELEALRSIYEGDESFRELSPVSFQYRIGENGDPKAFLIEISWTETYPQTPPILSMNAFFNNTISSAVKQSILAKLQEAVEANLGTAMTYTLFEYAKDNKEQFMENHNPINSATSISNIISIETPNTAPSSKKKDKKEQLSKAQKRKLADKTDHKGELPRGWNWVDVVKHLSKTGSKDDE

SEQ ID NO: 76224 - protein, 53 aa, Homo sapiens
  Payload ID: 15209
  Gene Symbol: RWDD4
  Gene Name: RWD domain containing 4
  ENSP ID: ENSP00000420945
MSANEDQEMELEALRSIYEGDESFRELSPVSFQYRIISCKAEYISQATGSSRS

SEQ ID NO: 76225 - protein, 43 aa, Homo sapiens
  Payload ID: 15209
  Gene Symbol: RWDD4
  Gene Name: RWD domain containing 4
  ENSP ID: ENSP00000422970
MELEALRSIYEGDESFRELSPVSFQYRIGENGDPKAFLIEISW

SEQ ID NO: 76226 - protein, 125 aa, Homo sapiens
  Payload ID: 15209
  Gene Symbol: RWDD4
  Gene Name: RWD domain containing 4
  ENSP ID: ENSP00000423598
MNAFFNNTISSAVKQSILAKLQEAVEANLGTAMTYTLFEYAKDNKEQFMENHNPINSATSISNIISIETPNTAPSSKKKDKKEQLSKAQKRKLADKTDHKGELPRGWNWVDVVKHLSKTGSKDDE

SEQ ID NO: 76227 - protein, 93 aa, Homo sapiens
  Payload ID: 15209
  Gene Symbol: RWDD4
  Gene Name: RWD domain containing 4
  Uniprot ID: Q6NW29
  ENSP ID: ENSP00000426329
MTYTLFEYAKDNKEQFMENHNPINSATSISNIISIETPNTAPSSKKKDKKEQLSKAQKRKLADKTDHKGELPRGWNWVDVVKHLSKTGSKDDE

SEQ ID NO: 76228 - protein, 44 aa, Homo sapiens
  Payload ID: 15209
  Gene Symbol: RWDD4
  Gene Name: RWD domain containing 4
  ENSP ID: ENSP00000427164
MSANEDQEMELEALRSIYEGDESFRELSPVSFQYRVKMVIPKPS

SEQ ID NO: 76229 - protein, 5033 aa, Homo sapiens
  Payload ID: 15210
  Gene Symbol: RYR1
  Gene Name: ryanodine receptor 1 (skeletal)
  Uniprot ID: P21817
  ENSP ID: ENSP00000347667
MGDAEGEDEVQFLRTDDEVVLQCSATVLKEQLKLCLAAEGFGNRLCFLEPTSNAQNVPPDLAICCFVLEQSLSVRALQEMLANTVEAGVESSQGGGHRTLLYGHAILLRHAHSRMYLSCLTTSRSMTDKLAFDVGLQEDATGEACWWTMHPASKQRSEGEKVRVGDDIILVSVSSERYLHLSTASGELQVDASFMQTLWNMNPICSRCEEGFVTGGHVLRLFHGHMDECLTISPADSDDQRRLVYYEGGAVCTHARSLWRLEPLRISWSGSHLRWGQPLRVRHVTTGQYLALTEDQGLVVVDASKAHTKATSFCFRISKEKLDVAPKRDVEGMGPPEIKYGESLCFVQHVASGLWLTYAAPDPKALRLGVLKKKAMLHQEGHMDDALSLTRCQQEESQAARMIHSTNGLYNQFIKSLDSFSGKPRGSGPPAGTALPIEGVILSLQDLIIYFEPPSEDLQHEEKQSKLRSLRNRQSLFQEEGMLSMVLNCIDRLNVYTTAAHFAEFAGEEAAESWKEIVNLLYELLASLIRGNRSNCALFSTNLDWLVSKLDRLEASSGILEVLYCVLIESPEVLNIIQENHIKSIISLLDKHGRNHKVLDVLCSLCVCNGVAVRSNQDLITENLLPGRELLLQTNLINYVTSIRPNIFVGRAEGTTQYSKWYFEVMVDEVTPFLTAQATHLRVGWALTEGYTPYPGAGEGWGGNGVGDDLYSYGFDGLHLWTGHVARPVTSPGQHLLAPEDVISCCLDLSVPSISFRINGCPVQGVFESFNLDGLFFPVVSFSAGVKVRFLLGGRHGEFKFLPPPGYAPCHEAVLPRERLHLEPIKEYRREGPRGPHLVGPSRCLSHTDFVPCPVDTVQIVLPPHLERIREKLAENIHELWALTRIEQGWTYGPVRDDNKRLHPCLVDFHSLPEPERNYNLQMSGETLKTLLALGCHVGMADEKAEDNLKKTKLPKTYMMSNGYKPAPLDLSHVRLTPAQTTLVDRLAENGHNVWARDRVGQGWSYSAVQDIPARRNPRLVPYRLLDEATKRSNRDSLCQAVRTLLGYGYNIEPPDQEPSQVENQSRCDRVRIFRAEKSYTVQSGRWYFEFEAVTTGEMRVGWARPELRPDVELGADELAYVFNGHRGQRWHLGSEPFGRPWQPGDVVGCMIDLTENTIIFTLNGEVLMSDSGSETAFREIEIGDGFLPVCSLGPGQVGHLNLGQDVSSLRFFAICGLQEGFEPFAINMQRPVTTWFSKGLPQFEPVPLEHPHYEVSRVDGTVDTPPCLRLTHRTWGSQNSLVEMLFLRLSLPVQFHQHFRCTAGATPLAPPGLQPPAEDEARAAEPDPDYENLRRSAGGWSEAENGKEGTAKEGAPGGTPQAGGEAQPARAENEKDATTEKNKKRGFLFKAKKVAMMTQPPATPTLPRLPHDVVPADNRDDPEIILNTTTYYYSVRVFAGQEPSCVWAGWVTPDYHQHDMSFDLSKVRVVTVTMGDEQGNVHSSLKCSNCYMVWGGDFVSPGQQGRISHTDLVIGCLVDLATGLMTFTANGKESNTFFQVEPNTKLFPAVFVLPTHQNVIQFELGKQKNIMPLSAAMFQSERKNPAPQCPPRLEMQMLMPVSWSRMPNHFLQVETRRAGERLGWAVQCQEPLTMMALHIPEENRCMDILELSERLDLQRFHSHTLRLYRAVCALGNNRVAHALCSHVDQAQLLHALEDAHLPGPLRAGYYDLLISIHLESACRSRRSMLSEYIVPLTPETRAITLFPPGRSTENGHPRHGLPGVGVTTSLRPPHHFSPPCFVAALPAAGAAEAPARLSPAIPLEALRDKALRMLGEAVRDGGQHARDPVGGSVEFQFVPVLKLVSTLLVMGIFGDEDVKQILKMIEPEVFTEEEEEEDEEEEGEEEDEEEKEEDEEETAQEKEDEEKEEEEAAEGEKEEGLEEGLLQMKLPESVKLQMCHLLEYFCDQELQHRVESLAAFAERYVDKLQANQRSRYGLLIKAFSMTAAETARRTREFRSPPQEQINMLLQFKDGTDEEDCPLPEEIRQDLLDFHQDLLAHCGIQLDGEEEEPEEETTLGSRLMSLLEKVRLVKKKEEKPEEERSAEESKPRSLQELVSHMVVRWAQEDFVQSPELVRAMFSLLHRQYDGLGELLRALPRAYTISPSSVEDTMSLLECLGQIRSLLIVQMGPQEENLMIQSIGNIMNNKVFYQHPNLMRALGMHETVMEVMVNVLGGGESKEIRFPKMVTSCCRFLCYFCRISRQNQRSMFDHLSYLLENSGIGLGMQGSTPLDVAAASVIDNNELALALQEQDLEKVVSYLAGCGLQSCPMLVAKGYPDIGWNPCGGERYLDFLRFAVFVNGESVEENANVVVRLLIRKPECFGPALRGEGGSGLLAAIEEAIRISEDPARDGPGIRRDRRREHFGEEPPEENRVHLGHAIMSFYAALIDLLGRCAPEMHLIQAGKGEALRIRAILRSLVPLEDLVGIISLPLQIPTLGKDGALVQPKMSASFVPDHKASMVLFLDRVYGIENQDFLLHVLDVGFLPDMRAAASLDTATFSTTEMALALNRYLCLAVLPLITKCAPLFAGTEHRAIMVDSMLHTVYRLSRGRSLTKAQRDVIEDCLMSLCRYIRPSMLQHLLRRLVFDVPILNEFAKMPLKLLTNHYERCWKYYCLPTGWANFGVTSEEELHLTRKLFWGIFDSLAHKKYDPELYRMAMPCLCAIAGALPPDYVDASYSSKAEKKATVDAEGNFDPRPVETLNVIIPEKLDSFINKFAEYTHEKWAFDKIQNNWSYGENIDEELKTHPMLRPYKTFSEKDKEIYRWPIKESLKAMIAWEWTIEKAREGEEEKTEKKKTRKISQSAQTYDPREGYNPQPPDLSAVTLSRELQAMAEQLAENYHNTWGRKKKQELEAKGGGTHPLLVPYDTLTAKEKARDREKAQELLKFLQMNGYAVTRGLKDMELDSSSIEKRFAFGFLQQLLRWMDISQEFIAHLEAVVSSGRVEKSPHEQEIKFFAKILLPLINQYFTNHCLYFLSTPAKVLGSGGHASNKEKEMITSLFCKLAALVRHRVSLFGTDAPAVVNCLHILARSLDARTVMKSGPEIVKAGLRSFFESASEDIEKMVENLRLGKVSQARTQVKGVGQNLTYTTVALLPVLTTLFQHIAQHQFGDDVILDDVQVSCYRTLCSIYSLGTTKNTYVEKLRPALGECLARLAAAMPVAFLEPQLNEYNACSVYTTKSPRERAILGLPNSVEEMCPDIPVLERLMADIGGLAESGARYTEMPHVIEITLPMLCSYLPRWWERGPEAPPSALPAGAPPPCTAVTSDHLNSLLGNILRIIVNNLGIDEASWMKRLAVFAQPIVSRARPELLQSHFIPTIGRLRKRAGKVVSEEEQLRLEAKAEAQEGELLVRDEFSVLCRDLYALYPLLIRYVDNNRAQWLTEPNPSAEELFRMVGEIFIYWSKSHNFKREEQNFVVQNEINNMSFLTADNKSKMAKSGGSDQERTKKKRRGDRYSVQTSLIVATLKKMLPIGLNMCAPTDQDLITLAKTRYALKDTDEEVREFLHNNLHLQGKVEGSPSLRWQMALYRGVPGREEDADDPEKIVRRVQEVSAVLYYLDQTEHPYKSKKAVWHKLLSKQRRRAVVACFRMTPLYNLPTHRACNMFLESYKAAWILTEDHSFEDRMIDDLSKAGEQEEEEEEVEEKKPDPLHQLVLHFSRTALTEKSKLDEDYLYMAYADIMAKSCHLEEGGENGEAEEEVEVSFEEKQMEKQRLLYQQARLHTRGAAEMVLQMISACKGETGAMVSSTLKLGISILNGGNAEVQQKMLDYLKDKKEVGFFQSIQALMQTCSVLDLNAFERQNKAEGLGMVNEDGTVINRQNGEKVMADDEFTQDLFRFLQLLCEGHNNDFQNYLRTQTGNTTTINIIICTVDYLLRLQESISDFYWYYSGKDVIEEQGKRNFSKAMSVAKQVFNSLTEYIQGPCTGNQQSLAHSRLWDAVVGFLHVFAHMMMKLAQDSSQIELLKELLDLQKDMVVMLLSLLEGNVVNGMIARQMVDMLVESSSNVEMILKFFDMFLKLKDIVGSEAFQDYVTDPRGLISKKDFQKAMDSQKQFSGPEIQFLLSCSEADENEMINCEEFANRFQEPARDIGFNVAVLLTNLSEHVPHDPRLHNFLELAESILEYFRPYLGRIEIMGASRRIERIYFEISETNRAQWEMPQVKESKRQFIFDVVNEGGEAEKMELFVSFCEDTIFEMQIAAQISEPEGEPETDEDEGAGAAEAGAEGAEEGAAGLEGTAATAAAGATARVVAAAGRALRGLSYRSLRRRVRRLRRLTAREAATAVAALLWAAVTRAGAAGAGAAAGALGLLWGSLFGGGLVEGAKKVTVTELLAGMPDPTSDEVHGEQPAGPGGDADGEGASEGAGDAAEGAGDEEEAVHEAGPGGADGAVAVTDGGPFRPEGAGGLGDMGDTTPAEPPTPEGSPILKRKLGVDGVEEELPPEPEPEPEPELEPEKADAENGEKEEVPEPTPEPPKKQAPPSPPPKKEEAGGEFWGELEVQRVKFLNYLSRNFYTLRFLALFLAFAINFILLFYKVSDSPPGEDDMEGSAAGDVSGAGSGGSSGWGLGAGEEAEGDEDENMVYYFLEESTGYMEPALRCLSLLHTLVAFLCIIGYNCLKVPLVIFKREKELARKLEFDGLYITEQPEDDDVKGQWDRLVLNTPSFPSNYWDKFVKRKVLDKHGDIYGRERIAELLGMDLATLEITAHNERKPNPPPGLLTWLMSIDVKYQIWKFGVIFTDNSFLYLGWYMVMSLLGHYNNFFFAAHLLDIAMGVKTLRTILSSVTHNGKQLVMTVGLLAVVVYLYTVVAFNFFRKFYNKSEDEDEPDMKCDDMMTCYLFHMYVGVRAGGGIGDEIEDPAGDEYELYRVVFDITFFFFVIVILLAIIQGLIIDAFGELRDQQEQVKEDMETKCFICGIGSDYFDTTPHGFETHTLEEHNLANYMFFLMYLINKDETEHTGQESYVWKMYQERCWDFFPAGDCFRKQYEDQLS

SEQ ID NO: 76230 - protein, 5038 aa, Homo sapiens
  Payload ID: 15210
  Gene Symbol: RYR1
  Gene Name: ryanodine receptor 1 (skeletal)
  Uniprot ID: P21817
  ENSP ID: ENSP00000352608
MGDAEGEDEVQFLRTDDEVVLQCSATVLKEQLKLCLAAEGFGNRLCFLEPTSNAQNVPPDLAICCFVLEQSLSVRALQEMLANTVEAGVESSQGGGHRTLLYGHAILLRHAHSRMYLSCLTTSRSMTDKLAFDVGLQEDATGEACWWTMHPASKQRSEGEKVRVGDDIILVSVSSERYLHLSTASGELQVDASFMQTLWNMNPICSRCEEGFVTGGHVLRLFHGHMDECLTISPADSDDQRRLVYYEGGAVCTHARSLWRLEPLRISWSGSHLRWGQPLRVRHVTTGQYLALTEDQGLVVVDASKAHTKATSFCFRISKEKLDVAPKRDVEGMGPPEIKYGESLCFVQHVASGLWLTYAAPDPKALRLGVLKKKAMLHQEGHMDDALSLTRCQQEESQAARMIHSTNGLYNQFIKSLDSFSGKPRGSGPPAGTALPIEGVILSLQDLIIYFEPPSEDLQHEEKQSKLRSLRNRQSLFQEEGMLSMVLNCIDRLNVYTTAAHFAEFAGEEAAESWKEIVNLLYELLASLIRGNRSNCALFSTNLDWLVSKLDRLEASSGILEVLYCVLIESPEVLNIIQENHIKSIISLLDKHGRNHKVLDVLCSLCVCNGVAVRSNQDLITENLLPGRELLLQTNLINYVTSIRPNIFVGRAEGTTQYSKWYFEVMVDEVTPFLTAQATHLRVGWALTEGYTPYPGAGEGWGGNGVGDDLYSYGFDGLHLWTGHVARPVTSPGQHLLAPEDVISCCLDLSVPSISFRINGCPVQGVFESFNLDGLFFPVVSFSAGVKVRFLLGGRHGEFKFLPPPGYAPCHEAVLPRERLHLEPIKEYRREGPRGPHLVGPSRCLSHTDFVPCPVDTVQIVLPPHLERIREKLAENIHELWALTRIEQGWTYGPVRDDNKRLHPCLVDFHSLPEPERNYNLQMSGETLKTLLALGCHVGMADEKAEDNLKKTKLPKTYMMSNGYKPAPLDLSHVRLTPAQTTLVDRLAENGHNVWARDRVGQGWSYSAVQDIPARRNPRLVPYRLLDEATKRSNRDSLCQAVRTLLGYGYNIEPPDQEPSQVENQSRCDRVRIFRAEKSYTVQSGRWYFEFEAVTTGEMRVGWARPELRPDVELGADELAYVFNGHRGQRWHLGSEPFGRPWQPGDVVGCMIDLTENTIIFTLNGEVLMSDSGSETAFREIEIGDGFLPVCSLGPGQVGHLNLGQDVSSLRFFAICGLQEGFEPFAINMQRPVTTWFSKGLPQFEPVPLEHPHYEVSRVDGTVDTPPCLRLTHRTWGSQNSLVEMLFLRLSLPVQFHQHFRCTAGATPLAPPGLQPPAEDEARAAEPDPDYENLRRSAGGWSEAENGKEGTAKEGAPGGTPQAGGEAQPARAENEKDATTEKNKKRGFLFKAKKVAMMTQPPATPTLPRLPHDVVPADNRDDPEIILNTTTYYYSVRVFAGQEPSCVWAGWVTPDYHQHDMSFDLSKVRVVTVTMGDEQGNVHSSLKCSNCYMVWGGDFVSPGQQGRISHTDLVIGCLVDLATGLMTFTANGKESNTFFQVEPNTKLFPAVFVLPTHQNVIQFELGKQKNIMPLSAAMFQSERKNPAPQCPPRLEMQMLMPVSWSRMPNHFLQVETRRAGERLGWAVQCQEPLTMMALHIPEENRCMDILELSERLDLQRFHSHTLRLYRAVCALGNNRVAHALCSHVDQAQLLHALEDAHLPGPLRAGYYDLLISIHLESACRSRRSMLSEYIVPLTPETRAITLFPPGRSTENGHPRHGLPGVGVTTSLRPPHHFSPPCFVAALPAAGAAEAPARLSPAIPLEALRDKALRMLGEAVRDGGQHARDPVGGSVEFQFVPVLKLVSTLLVMGIFGDEDVKQILKMIEPEVFTEEEEEEDEEEEGEEEDEEEKEEDEEETAQEKEDEEKEEEEAAEGEKEEGLEEGLLQMKLPESVKLQMCHLLEYFCDQELQHRVESLAAFAERYVDKLQANQRSRYGLLIKAFSMTAAETARRTREFRSPPQEQINMLLQFKDGTDEEDCPLPEEIRQDLLDFHQDLLAHCGIQLDGEEEEPEEETTLGSRLMSLLEKVRLVKKKEEKPEEERSAEESKPRSLQELVSHMVVRWAQEDFVQSPELVRAMFSLLHRQYDGLGELLRALPRAYTISPSSVEDTMSLLECLGQIRSLLIVQMGPQEENLMIQSIGNIMNNKVFYQHPNLMRALGMHETVMEVMVNVLGGGESKEIRFPKMVTSCCRFLCYFCRISRQNQRSMFDHLSYLLENSGIGLGMQGSTPLDVAAASVIDNNELALALQEQDLEKVVSYLAGCGLQSCPMLVAKGYPDIGWNPCGGERYLDFLRFAVFVNGESVEENANVVVRLLIRKPECFGPALRGEGGSGLLAAIEEAIRISEDPARDGPGIRRDRRREHFGEEPPEENRVHLGHAIMSFYAALIDLLGRCAPEMHLIQAGKGEALRIRAILRSLVPLEDLVGIISLPLQIPTLGKDGALVQPKMSASFVPDHKASMVLFLDRVYGIENQDFLLHVLDVGFLPDMRAAASLDTATFSTTEMALALNRYLCLAVLPLITKCAPLFAGTEHRAIMVDSMLHTVYRLSRGRSLTKAQRDVIEDCLMSLCRYIRPSMLQHLLRRLVFDVPILNEFAKMPLKLLTNHYERCWKYYCLPTGWANFGVTSEEELHLTRKLFWGIFDSLAHKKYDPELYRMAMPCLCAIAGALPPDYVDASYSSKAEKKATVDAEGNFDPRPVETLNVIIPEKLDSFINKFAEYTHEKWAFDKIQNNWSYGENIDEELKTHPMLRPYKTFSEKDKEIYRWPIKESLKAMIAWEWTIEKAREGEEEKTEKKKTRKISQSAQTYDPREGYNPQPPDLSAVTLSRELQAMAEQLAENYHNTWGRKKKQELEAKGGGTHPLLVPYDTLTAKEKARDREKAQELLKFLQMNGYAVTRGLKDMELDSSSIEKRFAFGFLQQLLRWMDISQEFIAHLEAVVSSGRVEKSPHEQEIKFFAKILLPLINQYFTNHCLYFLSTPAKVLGSGGHASNKEKEMITSLFCKLAALVRHRVSLFGTDAPAVVNCLHILARSLDARTVMKSGPEIVKAGLRSFFESASEDIEKMVENLRLGKVSQARTQVKGVGQNLTYTTVALLPVLTTLFQHIAQHQFGDDVILDDVQVSCYRTLCSIYSLGTTKNTYVEKLRPALGECLARLAAAMPVAFLEPQLNEYNACSVYTTKSPRERAILGLPNSVEEMCPDIPVLERLMADIGGLAESGARYTEMPHVIEITLPMLCSYLPRWWERGPEAPPSALPAGAPPPCTAVTSDHLNSLLGNILRIIVNNLGIDEASWMKRLAVFAQPIVSRARPELLQSHFIPTIGRLRKRAGKVVSEEEQLRLEAKAEAQEGELLVRDEFSVLCRDLYALYPLLIRYVDNNRAQWLTEPNPSAEELFRMVGEIFIYWSKSHNFKREEQNFVVQNEINNMSFLTADNKSKMAKAGDIQSGGSDQERTKKKRRGDRYSVQTSLIVATLKKMLPIGLNMCAPTDQDLITLAKTRYALKDTDEEVREFLHNNLHLQGKVEGSPSLRWQMALYRGVPGREEDADDPEKIVRRVQEVSAVLYYLDQTEHPYKSKKAVWHKLLSKQRRRAVVACFRMTPLYNLPTHRACNMFLESYKAAWILTEDHSFEDRMIDDLSKAGEQEEEEEEVEEKKPDPLHQLVLHFSRTALTEKSKLDEDYLYMAYADIMAKSCHLEEGGENGEAEEEVEVSFEEKQMEKQRLLYQQARLHTRGAAEMVLQMISACKGETGAMVSSTLKLGISILNGGNAEVQQKMLDYLKDKKEVGFFQSIQALMQTCSVLDLNAFERQNKAEGLGMVNEDGTVINRQNGEKVMADDEFTQDLFRFLQLLCEGHNNDFQNYLRTQTGNTTTINIIICTVDYLLRLQESISDFYWYYSGKDVIEEQGKRNFSKAMSVAKQVFNSLTEYIQGPCTGNQQSLAHSRLWDAVVGFLHVFAHMMMKLAQDSSQIELLKELLDLQKDMVVMLLSLLEGNVVNGMIARQMVDMLVESSSNVEMILKFFDMFLKLKDIVGSEAFQDYVTDPRGLISKKDFQKAMDSQKQFSGPEIQFLLSCSEADENEMINCEEFANRFQEPARDIGFNVAVLLTNLSEHVPHDPRLHNFLELAESILEYFRPYLGRIEIMGASRRIERIYFEISETNRAQWEMPQVKESKRQFIFDVVNEGGEAEKMELFVSFCEDTIFEMQIAAQISEPEGEPETDEDEGAGAAEAGAEGAEEGAAGLEGTAATAAAGATARVVAAAGRALRGLSYRSLRRRVRRLRRLTAREAATAVAALLWAAVTRAGAAGAGAAAGALGLLWGSLFGGGLVEGAKKVTVTELLAGMPDPTSDEVHGEQPAGPGGDADGEGASEGAGDAAEGAGDEEEAVHEAGPGGADGAVAVTDGGPFRPEGAGGLGDMGDTTPAEPPTPEGSPILKRKLGVDGVEEELPPEPEPEPEPELEPEKADAENGEKEEVPEPTPEPPKKQAPPSPPPKKEEAGGEFWGELEVQRVKFLNYLSRNFYTLRFLALFLAFAINFILLFYKVSDSPPGEDDMEGSAAGDVSGAGSGGSSGWGLGAGEEAEGDEDENMVYYFLEESTGYMEPALRCLSLLHTLVAFLCIIGYNCLKVPLVIFKREKELARKLEFDGLYITEQPEDDDVKGQWDRLVLNTPSFPSNYWDKFVKRKVLDKHGDIYGRERIAELLGMDLATLEITAHNERKPNPPPGLLTWLMSIDVKYQIWKFGVIFTDNSFLYLGWYMVMSLLGHYNNFFFAAHLLDIAMGVKTLRTILSSVTHNGKQLVMTVGLLAVVVYLYTVVAFNFFRKFYNKSEDEDEPDMKCDDMMTCYLFHMYVGVRAGGGIGDEIEDPAGDEYELYRVVFDITFFFFVIVILLAIIQGLIIDAFGELRDQQEQVKEDMETKCFICGIGSDYFDTTPHGFETHTLEEHNLANYMFFLMYLINKDETEHTGQESYVWKMYQERCWDFFPAGDCFRKQYEDQLS

SEQ ID NO: 76231 - protein, 5032 aa, Homo sapiens
  Payload ID: 15210
  Gene Symbol: RYR1
  Gene Name: ryanodine receptor 1 (skeletal)
  ENSP ID: ENSP00000354254
MGDAEGEDEVQFLRTDDEVVLQCSATVLKEQLKLCLAAEGFGNRLCFLEPTSNAQNVPPDLAICCFVLEQSLSVRALQEMLANTVEAGVESSQGGGHRTLLYGHAILLRHAHSRMYLSCLTTSRSMTDKLAFDVGLQEDATGEACWWTMHPASKQRSEGEKVRVGDDIILVSVSSERYLHLSTASGELQVDASFMQTLWNMNPICSRCEEGFVTGGHVLRLFHGHMDECLTISPADSDDQRRLVYYEGGAVCTHARSLWRLEPLRISWSGSHLRWGQPLRVRHVTTGQYLALTEDQGLVVVDASKAHTKATSFCFRISKEKLDVAPKRDVEGMGPPEIKYGESLCFVQHVASGLWLTYAAPDPKALRLGVLKKKAMLHQEGHMDDALSLTRCQQEESQAARMIHSTNGLYNQFIKSLDSFSGKPRGSGPPAGTALPIEGVILSLQDLIIYFEPPSEDLQHEEKQSKLRSLRNRQSLFQEEGMLSMVLNCIDRLNVYTTAAHFAEFAGEEAAESWKEIVNLLYELLASLIRGNRSNCALFSTNLDWLVSKLDRLEASSGILEVLYCVLIESPEVLNIIQENHIKSIISLLDKHGRNHKVLDVLCSLCVCNGVAVRSNQDLITENLLPGRELLLQTNLINYVTSIRPNIFVGRAEGTTQYSKWYFEVMVDEVTPFLTAQATHLRVGWALTEGYTPYPGAGEGWGGNGVGDDLYSYGFDGLHLWTGHVARPVTSPGQHLLAPEDVISCCLDLSVPSISFRINGCPVQGVFESFNLDGLFFPVVSFSAGVKVRFLLGGRHGEFKFLPPPGYAPCHEAVLPRERLHLEPIKEYRREGPRGPHLVGPSRCLSHTDFVPCPVDTVQIVLPPHLERIREKLAENIHELWALTRIEQGWTYGPVRDDNKRLHPCLVDFHSLPEPERNYNLQMSGETLKTLLALGCHVGMADEKAEDNLKKTKLPKTYMMSNGYKPAPLDLSHVRLTPAQTTLVDRLAENGHNVWARDRVGQGWSYSAVQDIPARRNPRLVPYRLLDEATKRSNRDSLCQAVRTLLGYGYNIEPPDQEPSQVENQSRCDRVRIFRAEKSYTVQSGRWYFEFEAVTTGEMRVGWARPELRPDVELGADELAYVFNGHRGQRWHLGSEPFGRPWQPGDVVGCMIDLTENTIIFTLNGEVLMSDSGSETAFREIEIGDGFLPVCSLGPGQVGHLNLGQDVSSLRFFAICGLQEGFEPFAINMQRPVTTWFSKGLPQFEPVPLEHPHYEVSRVDGTVDTPPCLRLTHRTWGSQNSLVEMLFLRLSLPVQFHQHFRCTAGATPLAPPGLQPPAEDEARAAEPDPDYENLRRSAGGWSEAENGKEGTAKEGAPGGTPQAGRGAPARAENEKDATTEKNKKRGFLFKAKKVAMMTQPPATPTLPRLPHDVVPADNRDDPEIILNTTTYYYSVRVFAGQEPSCVWAGWVTPDYHQHDMSFDLSKVRVVTVTMGDEQGNVHSSLKCSNCYMVWGGDFVSPGQQGRISHTDLVIGCLVDLATGLMTFTANGKESNTFFQVEPNTKLFPAVFVLPTHQNVIQFELGKQKNIMPLSAAMFQSERKNPAPQCPPRLEMQMLMPVSWSRMPNHFLQVETRRAGERLGWAVQCQEPLTMMALHIPEENRCMDILELSERLDLQRFHSHTLRLYRAVCALGNNRVAHALCSHVDQAQLLHALEDAHLPGPLRAGYYDLLISIHLESACRSRRSMLSEYIVPLTPETRAITLFPPGRSTENGHPRHGLPGVGVTTSLRPPHHFSPPCFVAALPAAGAAEAPARLSPAIPLEALRDKALRMLGEAVRDGGQHARDPVGGSVEFQFVPVLKLVSTLLVMGIFGDEDVKQILKMIEPEVFTEEEEEEDEEEEGEEEDEEEKEEDEEETAQEKEDEEKEEEEAAEGEKEEGLEEGLLQMKLPESVKLQMCHLLEYFCDQELQHRVESLAAFAERYVDKLQANQRSRYGLLIKAFSMTAAETARRTREFRSPPQEQINMLLQFKDGTDEEDCPLPEEIRQDLLDFHQDLLAHCGIQLDGEEEEPEEETTLGSRLMSLLEKVRLVKKKEEKPEEERSAEESKPRSLQELVSHMVVRWAQEDFVQSPELVRAMFSLLHRQYDGLGELLRALPRAYTISPSSVEDTMSLLECLGQIRSLLIVQMGPQEENLMIQSIGNIMNNKVFYQHPNLMRALGMHETVMEVMVNVLGGGESKEIRFPKMVTSCCRFLCYFCRISRQNQRSMFDHLSYLLENSGIGLGMQGSTPLDVAAASVIDNNELALALQEQDLEKVVSYLAGCGLQSCPMLVAKGYPDIGWNPCGGERYLDFLRFAVFVNGESVEENANVVVRLLIRKPECFGPALRGEGGSGLLAAIEEAIRISEDPARDGPGIRRDRRREHFGEEPPEENRVHLGHAIMSFYAALIDLLGRCAPEMHLIQAGKGEALRIRAILRSLVPLEDLVGIISLPLQIPTLGKDGALVQPKMSASFVPDHKASMVLFLDRVYGIENQDFLLHVLDVGFLPDMRAAASLDTATFSTTEMALALNRYLCLAVLPLITKCAPLFAGTEHRAIMVDSMLHTVYRLSRGRSLTKAQRDVIEDCLMSLCRYIRPSMLQHLLRRLVFDVPILNEFAKMPLKLLTNHYERCWKYYCLPTGWANFGVTSEEELHLTRKLFWGIFDSLAHKKYDPELYRMAMPCLCAIAGALPPDYVDASYSSKAEKKATVDAEGNFDPRPVETLNVIIPEKLDSFINKFAEYTHEKWAFDKIQNNWSYGENIDEELKTHPMLRPYKTFSEKDKEIYRWPIKESLKAMIAWEWTIEKAREGEEEKTEKKKTRKISQSAQTYDPREGYNPQPPDLSAVTLSRELQAMAEQLAENYHNTWGRKKKQELEAKGGGTHPLLVPYDTLTAKEKARDREKAQELLKFLQMNGYAVTRGLKDMELDSSSIEKRFAFGFLQQLLRWMDISQEFIAHLEAVVSSGRVEKSPHEQEIKFFAKILLPLINQYFTNHCLYFLSTPAKVLGSGGHASNKEKEMITSLFCKLAALVRHRVSLFGTDAPAVVNCLHILARSLDARTVMKSGPEIVKAGLRSFFESASEDIEKMVENLRLGKVSQARTQVKGVGQNLTYTTVALLPVLTTLFQHIAQHQFGDDVILDDVQVSCYRTLCSIYSLGTTKNTYVEKLRPALGECLARLAAAMPVAFLEPQLNEYNACSVYTTKSPRERAILGLPNSVEEMCPDIPVLERLMADIGGLAESGARYTEMPHVIEITLPMLCSYLPRWWERGPEAPPSALPAGAPPPCTAVTSDHLNSLLGNILRIIVNNLGIDEASWMKRLAVFAQPIVSRARPELLQSHFIPTIGRLRKRAGKVVSEEEQLRLEAKAEAQEGELLVRDEFSVLCRDLYALYPLLIRYVDNNRAQWLTEPNPSAEELFRMVGEIFIYWSKSHNFKREEQNFVVQNEINNMSFLTADNKSKMAKSGGSDQERTKKKRRGDRYSVQTSLIVATLKKMLPIGLNMCAPTDQDLITLAKTRYALKDTDEEVREFLHNNLHLQGKVEGSPSLRWQMALYRGVPGREEDADDPEKIVRRVQEVSAVLYYLDQTEHPYKSKKAVWHKLLSKQRRRAVVACFRMTPLYNLPTHRACNMFLESYKAAWILTEDHSFEDRMIDDLSKAGEQEEEEEEVEEKKPDPLHQLVLHFSRTALTEKSKLDEDYLYMAYADIMAKSCHLEEGGENGEAEEEVEVSFEEKQMEKQRLLYQQARLHTRGAAEMVLQMISACKGETGAMVSSTLKLGISILNGGNAEVQQKMLDYLKDKKEVGFFQSIQALMQTCSVLDLNAFERQNKAEGLGMVNEDGTVINRQNGEKVMADDEFTQDLFRFLQLLCEGHNNDFQNYLRTQTGNTTTINIIICTVDYLLRLQESISDFYWYYSGKDVIEEQGKRNFSKAMSVAKQVFNSLTEYIQGPCTGNQQSLAHSRLWDAVVGFLHVFAHMMMKLAQDSSQIELLKELLDLQKDMVVMLLSLLEGNVVNGMIARQMVDMLVESSSNVEMILKFFDMFLKLKDIVGSEAFQDYVTDPRGLISKKDFQKAMDSQKQFSGPEIQFLLSCSEADENEMINCEEFANRFQEPARDIGFNVAVLLTNLSEHVPHDPRLHNFLELAESILEYFRPYLGRIEIMGASRRIERIYFEISETNRAQWEMPQVKESKRQFIFDVVNEGGEAEKMELFVSFCEDTIFEMQIAAQISEPEGEPETDEDEGAGAAEAGAEGAEEGAAGLEGTAATAAAGATARVVAAAGRALRGLSYRSLRRRVRRLRRLTAREAATAVAALLWAAVTRAGAAGAGAAAGALGLLWGSLFGGGLVEGAKKVTVTELLAGMPDPTSDEVHGEQPAGPGGDADGEGASEGAGDAAEGAGDEEEAVHEAGPGGADGAVAVTDGGPFRPEGAGGLGDMGDTTPAEPPTPEGSPILKRKLGVDGVEEELPPEPEPEPEPELEPEKADAENGEKEEVPEPTPEPPKKQAPPSPPPKKEEAGGEFWGELEVQRVKFLNYLSRNFYTLRFLALFLAFAINFILLFYKVSDSPPGEDDMEGSAAGDVSGAGSGGSSGWGLGAGEEAEGDEDENMVYYFLEESTGYMEPALRCLSLLHTLVAFLCIIGYNCLKVPLVIFKREKELARKLEFDGLYITEQPEDDDVKGQWDRLVLNTPSFPSNYWDKFVKRKVLDKHGDIYGRERIAELLGMDLATLEITAHNERKPNPPPGLLTWLMSIDVKYQIWKFGVIFTDNSFLYLGWYMVMSLLGHYNNFFFAAHLLDIAMGVKTLRTILSSVTHNGKQLVMTVGLLAVVVYLYTVVAFNFFRKFYNKSEDEDEPDMKCDDMMTCYLFHMYVGVRAGGGIGDEIEDPAGDEYELYRVVFDITFFFFVIVILLAIIQGLIIDAFGELRDQQEQVKEDMETKCFICGIGSDYFDTTPHGFETHTLEEHNLANYMFFLMYLINKDETEHTGQESYVWKMYQERCWDFFPAGDCFRKQYEDQLS

SEQ ID NO: 76232 - protein, 171 aa, Homo sapiens
  Payload ID: 15210
  Gene Symbol: RYR1
  Gene Name: ryanodine receptor 1 (skeletal)
  ENSP ID: ENSP00000470848
EKQRLLYQQARLHTRGAAEMVLQMISACKGETGAMVSSTLKLGISILNGGNAEVQQKMLDYLKDKKEVGFFQSIQALMQTCSVLDLNAFERQNKAEGLGMVNEDGTGEKVMADDEFTQDLFRFLQLLCEGHNNGALQWLPKFYTRGGFLYFRSRKDLREKTAWHLKINLLE

SEQ ID NO: 76233 - protein, 886 aa, Homo sapiens
  Payload ID: 15210
  Gene Symbol: RYR1
  Gene Name: ryanodine receptor 1 (skeletal)
  ENSP ID: ENSP00000470927
  MOD_RES (1)..(1): Any amino acid
XNIMNNKVFYQHPNLMRALGMHETVMEVMVNVLGGGESKEIRFPKMVTSCCRFLCYFCRISRQNQRSMFDHLSYLLENSGIGLGMQGSTPLDVAAASVIDNNELALALQEQDLEKVVSYLAGCGLQSCPMLVAKGYPDIGWNPCGGERYLDFLRFAVFVNGESVEENANVVVRLLIRKPECFGPALRGEGGSGLLAAIEEAIRISEDPARDGPGIRRDRRREHFGEEPPEENRVHLGHAIMSFYAALIDLLGRCAPEMHLIQAGKGEALRIRAILRSLVPLEDLVGIISLPLQIPTLGKDGALVQPKMSASFVPDHKASMVLFLDRVYGIENQDFLLHVLDVGFLPDMRAAASLDTATFSTTEMALALNRYLCLAVLPLITKCAPLFAGTEHRAIMVDSMLHTVYRLSRGRSLTKAQRDVIEDCLMSLCRYIRPSMLQHLLRRLVFDVPILNEFAKMPLKLLTNHYERCWKYYCLPTGWANFGVTSEEELHLTRKLFWGIFDSLAHKKYDPELYRMAMPCLCAIAGALPPDYVDASYSSKAEKKATVDAEGNFDPRPVETLNVIIPEKLDSFINKFAEYTHEKWAFDKIQNNWSYGENIDEELKTHPMLRPYKTFSEKDKEIYRWPIKESLKAMIAWEWTIEKAREGEEEKTEKKKTRKISQSAQTYDPREGYNPQPPDLSAVTLSRELQAMAEQLAENYHNTWGRKKKQELEAKGGGTHPLLVPYDTLTAKEKARDREKAQELLKFLQMNGYAVTRGLKDMELDSSSIEKRFAFGFLQQLLRWMDISQEFIAHLEAVVSSGRVEKSPHEQEIKFFAKILLPLINQYFTNHCLYFLSTPAKVLGSGGHASNKEKEMITRDRRPSCGQLSSHPGPLPGCQDSDEVRP

SEQ ID NO: 76234 - protein, 79 aa, Homo sapiens
  Payload ID: 15210
  Gene Symbol: RYR1
  Gene Name: ryanodine receptor 1 (skeletal)
  ENSP ID: ENSP00000471404
  MOD_RES (1)..(1): Any amino acid
XRLHTRGAAEMVLQMISACKGETGAMVSSTLKLGISILNGGNAEVQQKMLDYLKDKKEVGFFQSIQALMQTCRREGHGG

SEQ ID NO: 76235 - protein, 733 aa, Homo sapiens
  Payload ID: 15210
  Gene Symbol: RYR1
  Gene Name: ryanodine receptor 1 (skeletal)
  ENSP ID: ENSP00000471601
  MOD_RES (1)..(1): Any amino acid
XTCCSRPPPSLSLWTVMKSGPEIVKAGLRSFFESASEDIEKMVENLRLGKVSQARTQVKGVGQNLTYTTVALLPVLTTLFQHIAQHQFGDDVILDDVQVSCYRTLCSIYSLGTTKNTYVEKLRPALGECLARLAAAMPVAFLEPQLNEYNACSVYTTKSPRERAILGLPNSVEEMCPDIPVLERLMADIGGLAESGARYTEMPHVIEITLPMLCSYLPRWWERGPEAPPSALPAGAPPPCTAVTSDHLNSLLGNILRIIVNNLGIDEASWMKRLAVFAQPIVSRARPELLQSHFIPTIGRLRKRAGKVVSEEEQLRLEAKAEAQEGELLVRDEFSVLCRDLYALYPLLIRYVDNNRAQWLTEPNPSAEELFRMVGEIFIYWSKSHNFKREEQNFVVQNEINNMSFLTADNKSKMAKAGDIQSGGSDQERTKKKRRGDRYSVQTSLIVATLKKMLPIGLNMCAPTDQDLITLAKTRYALKDTDEEVREFLHNNLHLQGKVEGSPSLRWQMALYRGVPGREEDADDPEKIVRRVQEVSAVLYYLDQTEHPYKSKKAVWHKLLSKQRRRAVVACFRMTPLYNLPTHRACNMFLESYKAAWILTEDHSFEDRMIDDLSKAGEQEEEEEEVEEKKPDPLHQLVLHFSRTALTEKSKLDEDYLYMAYADIMAKSCHLEEGGENGEAEEEVEVSFEEKQMEKQRLLYQQARLHTRGAAEMVLQMISACKGETGAMVSSTL

SEQ ID NO: 76236 - protein, 144 aa, Homo sapiens
  Payload ID: 15210
  Gene Symbol: RYR1
  Gene Name: ryanodine receptor 1 (skeletal)
  ENSP ID: ENSP00000472126
  MOD_RES (1)..(1): Any amino acid
XELPPEPEPEPEPELEPEKADAENGEKEEVPEPTPEPPKKQAPPSPPPKKEEAGGEFWGELEVQRVKFLVSDSPPGEDDMEGSAAGDVSGAGSGGSSGWGLGAGEEAEGDEDENMVYYFLEESTGYMEPALRCLSLLHTLVAFL

SEQ ID NO: 76237 - protein, 287 aa, Homo sapiens
  Payload ID: 15210
  Gene Symbol: RYR1
  Gene Name: ryanodine receptor 1 (skeletal)
  ENSP ID: ENSP00000472497
RGPGSVGPGLGWKLRSGGGVRTLTLLVETRFSFCRTEHPYKSKKAVWHKLLSKQRRRAVVACFRMTPLYNLPTHRACNMFLESYKAAWILTEDHSFEDRMIDDLSKAGEQEEEEEEVEEKKPDPLHQLVLHFSRTALTEKSKLDEDYLYMAYADIMAKSCHLEEGGENGEAEEEVEVSFEEKQMEKQRLLYQQARLHTRGAAEMVLQMISACKGETGAMVSSTLKLGISILNGGNAEVQQKMLDYLKDKKEVGFFQSIQALMQTCSVLDLNAFERQNKAEGLGMVNE

SEQ ID NO: 76238 - protein, 4950 aa, Homo sapiens
  Payload ID: 15211
  Gene Symbol: RYR2
  Gene Name: ryanodine receptor 2 (cardiac)
  ENSP ID: ENSP00000353174
DDEVVLQCTATIHKEQQKLCLAAEGFGNRLCFLESTSNSKNVPPDLSICTFVLEQSLSVRALQEMLANTVEKSEGQVDVEKWLFSLKTAQGGGHRTLLYGHAILLRHSYSGMYLCCLSTSRSSTDKLAFDVGLQEDTTGEACWWTIHPASKQRSEGEKVRVGDDLILVSVSSERYLHLSYGNGSLHVDAAFQQTLWSVAPISSGSEAAQGYLIGGDVLRLLHGHMDECLTVPSGEHGEEQRRTVHYEGGAVSVHARSLWRLETLRVAWSGSHIRWGQPFRLRHVTTGKYLSLMEDKNLLLMDKEKADVKSTAFTFRSSKEKLDVGVRKEVDGMGTSEIKYGDSVCYIQHVDTGLWLTYQSVDVKSVRMGSIQRKAIMHHEGHMDDGISLSRSQHEESRTARVIRSTVFLFNRFIRGLDALSKKAKASTVDLPIESVSLSLQDLIGYFHPPDEHLEHEDKQNRLRALKNRQNLFQEEGMINLVLECIDRLHVYSSAAHFADVAGREAGESWKSILNSLYELLAALIRGNRKNCAQFSGSLDWLISRLERLEASSGILEVLHCVLVESPEALNIIKEGHIKSIISLLDKHGRNHKVLDVLCSLCVCHGVAVRSNQHLICDNLLPGRDLLLQTRLVNHVSSMRPNIFLGVSEGSAQYKKWYYELMVDHTEPFVTAEATHLRVGWASTEGYSPYPGGGEEWGGNGVGDDLFSYGFDGLHLWSGCIARTVSSPNQHLLRTDDVISCCLDLSAPSISFRINGQPVQGMFENFNIDGLFFPVVSFSAGIKVRFLLGGRHGEFKFLPPPGYAPCYEAVLPKEKLKVEHSREYKQERTYTRDLLGPTVSLTQAAFTPIPVDTSQIVLPPHLERIREKLAENIHELWVMNKIELGWQYGPVRDDNKRQHPCLVEFSKLPEQERNYNLQMSLETLKTLLALGCHVGISDEHAEDKVKKMKLPKNYQLTSGYKPAPMDLSFIKLTPSQEAMVDKLAENAHNVWARDRIRQGWTYGIQQDVKNRRNPRLVPYTLLDDRTKKSNKDSLREAVRTLLGYGYNLEAPDQDHAARAEVCSGTGERFRIFRAEKTYAVKAGRWYFEFETVTAGDMRVGWSRPGCQPDQELGSDERAFAFDGFKAQRWHQGNEHYGRSWQAGDVVGCMVDMNEHTMMFTLNGEILLDDSGSELAFKDFDVGDGFIPVCSLGVAQVGRMNFGKDVSTLKYFTICGLQEGYEPFAVNTNRDITMWLSKRLPQFLQVPSNHEHIEVTRIDGTIDSSPCLKVTQKSFGSQNSNTDIMFYRLSMPIECAEVFSKTVAGGLPGAGLFGPKNDLEDYDADSDFEVLMKTAHGHLVPDRVDKDKEATKPEFNNHKDYAQEKPSRLKQRFLLRRTKPDYSTSHSARLTEDVLADDRDDYDFLMQTSTYYYSVRIFPGQEPANVWVGWITSDFHQYDTGFDLDRVRTVTVTLGDEKGKVHESIKRSNCYMVCAGESMSPGQGRNNNGLEIGCVVDAASGLLTFIANGKELSTYYQVEPSTKLFPAVFAQATSPNVFQFELGRIKNVMPLSAGLFKSEHKNPVPQCPPRLHVQFLSHVLWSRMPNQFLKVDVSRISERQGWLVQCLDPLQFMSLHIPEENRSVDILELTEQEELLKFHYHTLRLYSAVCALGNHRVAHALCSHVDEPQLLYAIENKYMPGLLRAGYYDLLIDIHLSSYATARLMMNNEYIVPMTEETKSITLFPDENKKHGLPGIGLSTSLRPRMQFSSPSFVSISNECYQYSPEFPLDILKSKTIQMLTEAVKEGSLHARDPVGGTTEFLFVPLIKLFYTLLIMGIFHNEDLKHILQLIEPSVFKEAATPEEESDTLEKELSVDDAKLQGAGEEEAKGGKRPKEGLLQMKLPEPVKLQMCLLLQYLCDCQVRHRIEAIVAFSDDFVAKLQDNQRFRYNEVMQALNMSAALTARKTKEFRSPPQEQINMLLNFKDDKSECPCPEEIRDQLLDFHEDLMTHCGIELDEDGSLDGNSDLTIRGRLLSLVEKVTYLKKKQAEKPVESDSKKSSTLQQLISETMVRWAQESVIEDPELVRAMFVLLHRQYDGIGGLVRALPKTYTINGVSVEDTINLLASLGQIRSLLSVRMGKEEEKLMIRGLGDIMNNKVFYQHPNLMRALGMHETVMEVMVNVLGGGESKEITFPKMVANCCRFLCYFCRISRQNQKAMFDHLSYLLENSSVGLASPAMRGSTPLDVAAASVMDNNELALALREPDLEKVVRYLAGCGLQSCQMLVSKGYPDIGWNPVEGERYLDFLRFAVFCNGESVEENANVVVRLLIRRPECFGPALRGEGGNGLLAAMEEAIKIAEDPSRDGPSPNSGSSKTLDTEEEEDDTIHMGNAIMTFYSALIDLLGRCAPEMHLIHAGKGEAIRIRSILRSLIPLGDLVGVISIAFQMPTIAKDGNVVEPDMSAGFCPDHKAAMVLFLDRVYGIEVQDFLLHLLEVGFLPDLRAAASLDTAALSATDMALALNRYLCTAVLPLLTRCAPLFAGTEHHASLIDSLLHTVYRLSKGCSLTKAQRDSIEVCLLSICGQLRPSMMQHLLRRLVFDVPLLNEHAKMPLKLLTNHYERCWKYYCLPGGWGNFGAASEEELHLSRKLFWGIFDALSQKKYEQELFKLALPCLSAVAGALPPDYMESNYVSMMEKQSSMDSEGNFNPQPVDTSNITIPEKLEYFINKYAEHSHDKWSMDKLANGWIYGEIYSDSSKVQPLMKPYKLLSEKEKEIYRWPIKESLKTMLAWGWRIERTREGDSMALYNRTRRISQTSQVSVDAAHGYSPRAIDMSNVTLSRDLHAMAEMMAENYHNIWAKKKKMELESKGGGNHPLLVPYDTLTAKEKAKDREKAQDILKFLQINGYAVSRGFKDLELDTPSIEKRFAYSFLQQLIRYVDEAHQYILEFDGGSRGKGEHFPYEQEIKFFAKVVLPLIDQYFKNHRLYFLSAASRPLCSGGHASNKEKEMVTSLFCKLGVLVRHRISLFGNDATSIVNCLHILGQTLDARTVMKTGLESVKSALRAFLDNAAEDLEKTMENLKQGQFTHTRNQPKGVTQIINYTTVALLPMLSSLFEHIGQHQFGEDLILEDVQVSCYRILTSLYALGTSKSIYVERQRSALGECLAAFAGAFPVAFLETHLDKHNIYSIYNTKSSRERAALSLPTNVEDVCPNIPSLEKLMEEIVELAESGIRYTQMPHVMEVILPMLCSYMSRWWEHGPENNPERAEMCCTALNSEHMNTLLGNILKIIYNNLGIDEGAWMKRLAVFSQPIINKVKPQLLKTHFLPLMEKLKKKAATVVSEEDHLKAEARGDMSEAELLILDEFTTLARDLYAFYPLLIRFVDYNRAKWLKEPNPEAEELFRMVAEVFIYWSKSHNFKREEQNFVVQNEINNMSFLITDTKSKMSKAAVSDQERKKMKRKGDRYSMQTSLIVAALKRLLPIGLNICAPGDQELIALAKNRFSLKDTEDEVRDIIRSNIHLQGKLEDPAIRWQMALYKDLPNRTDDTSDPEKTVERVLDIANVLFHLEQKSKRVGRRHYCLVEHPQRSKKAVWHKLLSKQRKRAVVACFRMAPLYNLPRHRAVNLFLQGYEKSWIETEEHYFEDKLIEDLAKPGAEPPEEDEGTKRVDPLHQLILLFSRTALTEKCKLEEDFLYMAYADIMAKSCHDEEDDDGEEEVKSFEEKEMEKQKLLYQQARLHDRGAAEMVLQTISASKGETGPMVAATLKLGIAILNGGNSTVQQKMLDYLKEKKDVGFFQSLAGLMQSCSVLDLNAFERQNKAEGLGMVTEEGSGEKVLQDDEFTCDLFRFLQLLCEGHNSDFQNYLRTQTGNNTTVNIIISTVDYLLRVQESISDFYWYYSGKDVIDEQGQRNFSKAIQVAKQVFNTLTEYIQGPCTGNQQSLAHSRLWDAVVGFLHVFAHMQMKLSQDSSQIELLKELMDLQKDMVVMLLSMLEGNVVNGTIGKQMVDMLVESSNNVEMILKFFDMFLKLKDLTSSDTFKEYDPDGKGVISKRDFHKAMESHKHYTQSETEFLLSCAETDENETLDYEEFVKRFHEPAKDIGFNVAVLLTNLSEHMPNDTRLQTFLELAESVLNYFQPFLGRIEIMGSAKRIERVYFEISESSRTQWEKPQVKESKRQFIFDVVNEGGEKEKMELFVNFCEDTIFEMQLAAQISESDLNERSANKEESEKERPEEQGPRMAFFSILTVRSALFALRYNILTLMRMLSLKSLKKQMKKVKKMTVKDMVTAFFSSYWSIFMTLLHFVASVFRGFFRIICSLLLGGSLVEGAKKIKVAELLANMPDPTQDEVRGDGEEGERKPLEAALPSEDLTDLKELTEESDLLSDIFGLDLKREGGQYKLIPHNPNAGLSDLMSNPVPMPEVQEKFQVIYLVTAAFSRRAYVLFVCFHRGEDGEKEEKAKEDKGKQKLRQLHTHRYGEPEVPESAFWKKIIAYQQKLLNYFARNFYNMRMLALFVAFAINFILLFYKVSTSSVVEGKELPTRSSSENAKVTSLDSSSHRIIAVHYVLEESSGYMEPTLRILAILHTVISFFCIIGYYCLKVPLVIFKREKEVARKLEFDGLYITEQPSEDDIKGQWDRLVINTQSFPNNYWDKFVKRKVMDKYGEFYGRDRISELLGMDKAALDFSDAREKKKPKKDSSLSAVLNSIDVKYQMWKLGVVFTDNSFLYLAWYMTMSVLGHYNNFFFAAHLLDIAMGFKTLRTILSSVTHNGKQLVLTVGLLAVVVYLYTVVAFNFFRKFYNKSEDGDTPDMKCDDMLTCYMFHMYVGVRAGGGIGDEIEDPAGDEYEIYRIIFDITFFFFVIVILLAIIQGLIIDAFGELRDQQEQVKEDMETKCFICGIGNDYFDTVPHGFETHTLQEHNLANYLFFLMYLINKDETEHTGQESYVWKMYQERCWEFFPAGDCFRKQYEDQLN

SEQ ID NO: 76239 - protein, 4967 aa, Homo sapiens
  Payload ID: 15211
  Gene Symbol: RYR2
  Gene Name: ryanodine receptor 2 (cardiac)
  Uniprot ID: Q92736
  ENSP ID: ENSP00000355533
MADGGEGEDEIQFLRTDDEVVLQCTATIHKEQQKLCLAAEGFGNRLCFLESTSNSKNVPPDLSICTFVLEQSLSVRALQEMLANTVEKSEGQVDVEKWKFMMKTAQGGGHRTLLYGHAILLRHSYSGMYLCCLSTSRSSTDKLAFDVGLQEDTTGEACWWTIHPASKQRSEGEKVRVGDDLILVSVSSERYLHLSYGNGSLHVDAAFQQTLWSVAPISSGSEAAQGYLIGGDVLRLLHGHMDECLTVPSGEHGEEQRRTVHYEGGAVSVHARSLWRLETLRVAWSGSHIRWGQPFRLRHVTTGKYLSLMEDKNLLLMDKEKADVKSTAFTFRSSKEKLDVGVRKEVDGMGTSEIKYGDSVCYIQHVDTGLWLTYQSVDVKSVRMGSIQRKAIMHHEGHMDDGISLSRSQHEESRTARVIRSTVFLFNRFIRGLDALSKKAKASTVDLPIESVSLSLQDLIGYFHPPDEHLEHEDKQNRLRALKNRQNLFQEEGMINLVLECIDRLHVYSSAAHFADVAGREAGESWKSILNSLYELLAALIRGNRKNCAQFSGSLDWLISRLERLEASSGILEVLHCVLVESPEALNIIKEGHIKSIISLLDKHGRNHKVLDVLCSLCVCHGVAVRSNQHLICDNLLPGRDLLLQTRLVNHVSSMRPNIFLGVSEGSAQYKKWYYELMVDHTEPFVTAEATHLRVGWASTEGYSPYPGGGEEWGGNGVGDDLFSYGFDGLHLWSGCIARTVSSPNQHLLRTDDVISCCLDLSAPSISFRINGQPVQGMFENFNIDGLFFPVVSFSAGIKVRFLLGGRHGEFKFLPPPGYAPCYEAVLPKEKLKVEHSREYKQERTYTRDLLGPTVSLTQAAFTPIPVDTSQIVLPPHLERIREKLAENIHELWVMNKIELGWQYGPVRDDNKRQHPCLVEFSKLPEQERNYNLQMSLETLKTLLALGCHVGISDEHAEDKVKKMKLPKNYQLTSGYKPAPMDLSFIKLTPSQEAMVDKLAENAHNVWARDRIRQGWTYGIQQDVKNRRNPRLVPYTLLDDRTKKSNKDSLREAVRTLLGYGYNLEAPDQDHAARAEVCSGTGERFRIFRAEKTYAVKAGRWYFEFETVTAGDMRVGWSRPGCQPDQELGSDERAFAFDGFKAQRWHQGNEHYGRSWQAGDVVGCMVDMNEHTMMFTLNGEILLDDSGSELAFKDFDVGDGFIPVCSLGVAQVGRMNFGKDVSTLKYFTICGLQEGYEPFAVNTNRDITMWLSKRLPQFLQVPSNHEHIEVTRIDGTIDSSPCLKVTQKSFGSQNSNTDIMFYRLSMPIECAEVFSKTVAGGLPGAGLFGPKNDLEDYDADSDFEVLMKTAHGHLVPDRVDKDKEATKPEFNNHKDYAQEKPSRLKQRFLLRRTKPDYSTSHSARLTEDVLADDRDDYDFLMQTSTYYYSVRIFPGQEPANVWVGWITSDFHQYDTGFDLDRVRTVTVTLGDEKGKVHESIKRSNCYMVCAGESMSPGQGRNNNGLEIGCVVDAASGLLTFIANGKELSTYYQVEPSTKLFPAVFAQATSPNVFQFELGRIKNVMPLSAGLFKSEHKNPVPQCPPRLHVQFLSHVLWSRMPNQFLKVDVSRISERQGWLVQCLDPLQFMSLHIPEENRSVDILELTEQEELLKFHYHTLRLYSAVCALGNHRVAHALCSHVDEPQLLYAIENKYMPGLLRAGYYDLLIDIHLSSYATARLMMNNEYIVPMTEETKSITLFPDENKKHGLPGIGLSTSLRPRMQFSSPSFVSISNECYQYSPEFPLDILKSKTIQMLTEAVKEGSLHARDPVGGTTEFLFVPLIKLFYTLLIMGIFHNEDLKHILQLIEPSVFKEAATPEEESDTLEKELSVDDAKLQGAGEEEAKGGKRPKEGLLQMKLPEPVKLQMCLLLQYLCDCQVRHRIEAIVAFSDDFVAKLQDNQRFRYNEVMQALNMSAALTARKTKEFRSPPQEQINMLLNFKDDKSECPCPEEIRDQLLDFHEDLMTHCGIELDEDGSLDGNSDLTIRGRLLSLVEKVTYLKKKQAEKPVESDSKKSSTLQQLISETMVRWAQESVIEDPELVRAMFVLLHRQYDGIGGLVRALPKTYTINGVSVEDTINLLASLGQIRSLLSVRMGKEEEKLMIRGLGDIMNNKVFYQHPNLMRALGMHETVMEVMVNVLGGGESKEITFPKMVANCCRFLCYFCRISRQNQKAMFDHLSYLLENSSVGLASPAMRGSTPLDVAAASVMDNNELALALREPDLEKVVRYLAGCGLQSCQMLVSKGYPDIGWNPVEGERYLDFLRFAVFCNGESVEENANVVVRLLIRRPECFGPALRGEGGNGLLAAMEEAIKIAEDPSRDGPSPNSGSSKTLDTEEEEDDTIHMGNAIMTFYSALIDLLGRCAPEMHLIHAGKGEAIRIRSILRSLIPLGDLVGVISIAFQMPTIAKDGNVVEPDMSAGFCPDHKAAMVLFLDRVYGIEVQDFLLHLLEVGFLPDLRAAASLDTAALSATDMALALNRYLCTAVLPLLTRCAPLFAGTEHHASLIDSLLHTVYRLSKGCSLTKAQRDSIEVCLLSICGQLRPSMMQHLLRRLVFDVPLLNEHAKMPLKLLTNHYERCWKYYCLPGGWGNFGAASEEELHLSRKLFWGIFDALSQKKYEQELFKLALPCLSAVAGALPPDYMESNYVSMMEKQSSMDSEGNFNPQPVDTSNITIPEKLEYFINKYAEHSHDKWSMDKLANGWIYGEIYSDSSKVQPLMKPYKLLSEKEKEIYRWPIKESLKTMLAWGWRIERTREGDSMALYNRTRRISQTSQVSVDAAHGYSPRAIDMSNVTLSRDLHAMAEMMAENYHNIWAKKKKMELESKGGGNHPLLVPYDTLTAKEKAKDREKAQDILKFLQINGYAVSRGFKDLELDTPSIEKRFAYSFLQQLIRYVDEAHQYILEFDGGSRGKGEHFPYEQEIKFFAKVVLPLIDQYFKNHRLYFLSAASRPLCSGGHASNKEKEMVTSLFCKLGVLVRHRISLFGNDATSIVNCLHILGQTLDARTVMKTGLESVKSALRAFLDNAAEDLEKTMENLKQGQFTHTRNQPKGVTQIINYTTVALLPMLSSLFEHIGQHQFGEDLILEDVQVSCYRILTSLYALGTSKSIYVERQRSALGECLAAFAGAFPVAFLETHLDKHNIYSIYNTKSSRERAALSLPTNVEDVCPNIPSLEKLMEEIVELAESGIRYTQMPHVMEVILPMLCSYMSRWWEHGPENNPERAEMCCTALNSEHMNTLLGNILKIIYNNLGIDEGAWMKRLAVFSQPIINKVKPQLLKTHFLPLMEKLKKKAATVVSEEDHLKAEARGDMSEAELLILDEFTTLARDLYAFYPLLIRFVDYNRAKWLKEPNPEAEELFRMVAEVFIYWSKSHNFKREEQNFVVQNEINNMSFLITDTKSKMSKAAVSDQERKKMKRKGDRYSMQTSLIVAALKRLLPIGLNICAPGDQELIALAKNRFSLKDTEDEVRDIIRSNIHLQGKLEDPAIRWQMALYKDLPNRTDDTSDPEKTVERVLDIANVLFHLEQKSKRVGRRHYCLVEHPQRSKKAVWHKLLSKQRKRAVVACFRMAPLYNLPRHRAVNLFLQGYEKSWIETEEHYFEDKLIEDLAKPGAEPPEEDEGTKRVDPLHQLILLFSRTALTEKCKLEEDFLYMAYADIMAKSCHDEEDDDGEEEVKSFEEKEMEKQKLLYQQARLHDRGAAEMVLQTISASKGETGPMVAATLKLGIAILNGGNSTVQQKMLDYLKEKKDVGFFQSLAGLMQSCSVLDLNAFERQNKAEGLGMVTEEGSGEKVLQDDEFTCDLFRFLQLLCEGHNSDFQNYLRTQTGNNTTVNIIISTVDYLLRVQESISDFYWYYSGKDVIDEQGQRNFSKAIQVAKQVFNTLTEYIQGPCTGNQQSLAHSRLWDAVVGFLHVFAHMQMKLSQDSSQIELLKELMDLQKDMVVMLLSMLEGNVVNGTIGKQMVDMLVESSNNVEMILKFFDMFLKLKDLTSSDTFKEYDPDGKGVISKRDFHKAMESHKHYTQSETEFLLSCAETDENETLDYEEFVKRFHEPAKDIGFNVAVLLTNLSEHMPNDTRLQTFLELAESVLNYFQPFLGRIEIMGSAKRIERVYFEISESSRTQWEKPQVKESKRQFIFDVVNEGGEKEKMELFVNFCEDTIFEMQLAAQISESDLNERSANKEESEKERPEEQGPRMAFFSILTVRSALFALRYNILTLMRMLSLKSLKKQMKKVKKMTVKDMVTAFFSSYWSIFMTLLHFVASVFRGFFRIICSLLLGGSLVEGAKKIKVAELLANMPDPTQDEVRGDGEEGERKPLEAALPSEDLTDLKELTEESDLLSDIFGLDLKREGGQYKLIPHNPNAGLSDLMSNPVPMPEVQEKFQEQKAKEEEKEEKEETKSEPEKAEGEDGEKEEKAKEDKGKQKLRQLHTHRYGEPEVPESAFWKKIIAYQQKLLNYFARNFYNMRMLALFVAFAINFILLFYKVSTSSVVEGKELPTRSSSENAKVTSLDSSSHRIIAVHYVLEESSGYMEPTLRILAILHTVISFFCIIGYYCLKVPLVIFKREKEVARKLEFDGLYITEQPSEDDIKGQWDRLVINTQSFPNNYWDKFVKRKVMDKYGEFYGRDRISELLGMDKAALDFSDAREKKKPKKDSSLSAVLNSIDVKYQMWKLGVVFTDNSFLYLAWYMTMSVLGHYNNFFFAAHLLDIAMGFKTLRTILSSVTHNGKQLVLTVGLLAVVVYLYTVVAFNFFRKFYNKSEDGDTPDMKCDDMLTCYMFHMYVGVRAGGGIGDEIEDPAGDEYEIYRIIFDITFFFFVIVILLAIIQGLIIDAFGELRDQQEQVKEDMETKCFICGIGNDYFDTVPHGFETHTLQEHNLANYLFFLMYLINKDETEHTGQESYVWKMYQERCWEFFPAGDCFRKQYEDQLN

SEQ ID NO: 76240 - protein, 4869 aa, Homo sapiens
  Payload ID: 15212
  Gene Symbol: RYR3
  Gene Name: ryanodine receptor 3
  Uniprot ID: Q15413
  ENSP ID: ENSP00000373884
MAEGGEGGEDEIQFLRTEDEVVLQCIATIHKEQRKFCLAAEGLGNRLCFLEPTSEAKYIPPDLCVCNFVLEQSLSVRALQEMLANTGENGGEGAAQGGGHRTLLYGHAVLLRHSFSGMYLTCLTTSRSQTDKLAFDVGLREHATGEACWWTIHPASKQRSEGEKVRIGDDLILVSVSSERYLHLSVSNGNIQVDASFMQTLWNVHPTCSGSSIEEGYLLGGHVVRLFHGHDECLTIPSTDQNDSQHRRIFYEAGGAGTRARSLWRVEPLRISWSGSNIRWGQAFRLRHLTTGHYLALTEDQGLILQDRAKSDTKSTAFSFRASKELKEKLDSSHKRDIEGMGVPEIKYGDSVCFVQHIASGLWVTYKAQDAKTSRLGPLKRKVILHQEGHMDDGLTLQRCQREESQAARIIRNTTALFSQFVSGNNRTAAPITLPIEEVLQTLQDLIAYFQPPEEEMRHEDKQNKLRSLKNRQNLFKEEGMLALVLNCIDRLNVYNSVAHFAGIAREESGMAWKEILNLLYKLLAALIRGNRNNCAQFSNNLDWLISKLDRLESSSGILEVLHCILTESPEALNLIAEGHIKSIISLLDKHGRNHKVLDILCSLCLCNGVAVRANQNLICDNLLPRRNLLLQTRLINDVTSIRPNIFLGVAEGSAQYKKWYFELIIDQVDPFLTAEPTHLRVGWASSSGYAPYPGGGEGWGGNGVGDDLYSYGFDGLHLWSGRIPRAVASINQHLLRSDDVVSCCLDLGVPSISFRINGQPVQGMFENFNTDGLFFPVMSFSAGVKVRFLMGGRHGEFKFLPPSGYAPCYEALLPKEKMRLEPVKEYKRDADGIRDLLGTTQFLSQASFIPCPVDTSQVILPPHLEKIRDRLAENIHELWGMNKIELGWTFGKIRDDNKRQHPCLVEFSKLPETEKNYNLQMSTETLKTLLALGCHIAHVNPAAEEDLKKVKLPKNYMMSNGYKPAPLDLSDVKLLPPQEILVDKLAENAHNVWAKDRIKQGWTYGIQQDLKNKRNPRLVPYALLDERTKKSNRDSLREAVRTFVGYGYNIEPSDQELADSAVEKVSIDKIRFFRVERSYAVRSGKWYFEFEVVTGGDMRVGWARPGCRPDVELGADDQAFVFEGNRGQRWHQGSGYFGRTWQPGDVVGCMINLDDASMIFTLNGELLITNKGSELAFADYEIENGFVPICCLGLSQIGRMNLGTDASTFKFYTMCGLQEGFEPFAVNMNRDVAMWFSKRLPTFVNVPKDHPHIEVMRIDGTMDSPPCLKVTHKTFGTQNSNADMIYCRLSMPVECHSSFSHSPCLDSEAFQKRKQMQEILSHTTTQCYYAIRIFAGQDPSCVWVGWVTPDYHLYSEKFDLNKNCTVTVTLGDERGRVHESVKRSNCYMVWGGDIVASSQRSNRSNVDLEIGCLVDLAMGMLSFSANGKELGTCYQVEPNTKVFPAVFLQPTSTSLFQFELGKLKNAMPLSAAIFRSEEKNPVPQCPPRLDVQTIQPVLWSRMPNSFLKVETERVSERHGWVVQCLEPLQMMALHIPEENRCVDILELCEQEDLMRFHYHTLRLYSAVCALGNSRVAYALCSHVDLSQLFYAIDNKYLPGLLRSGFYDLLISIHLASAKERKLMMKNEYIIPITSTTRNIRLFPDESKRHGLPGVGLRTCLKPGFRFSTPCFVVTGEDHQKQSPEIPLESLRTKALSMLTEAVQCSGAHIRDPVGGSVEFQFVPVLKLIGTLLVMGVFDDDDVRQILLLIDPSVFGEHSAGTEEGAEKEEVTQVEEKAVEAGEKAGKEAPVKGLLQTRLPESVKLQMCELLSYLCDCELQHRVEAIVAFGDIYVSKLQANQKFRYNELMQALNMSAALTARKTKEFRSPPQEQINMLLNFQLGENCPCPEEIREELYDFHEDLLLHCGVPLEEEEEEEEDTSWTGKLCALVYKIKGPPKPEKEQPTEEEERCPTTLKELISQTMICWAQEDQIQDSELVRMMFNLLRRQYDSIGELLQALRKTYTISHTSVSDTINLLAALGQIRSLLSVRMGKEEELLMINGLGDIMNNKVFYQHPNLMRVLGMHETVMEVMVNVLGTEKSQIAFPKMVASCCRFLCYFCRISRQNQKAMFEHLSYLLENSSVGLASPSMRGSTPLDVAASSVMDNNELALSLEEPDLEKVVTYLAGCGLQSCPMLLAKGYPDVGWNPIEGERYLSFLRFAVFVNSESVEENASVVVKLLIRRPECFGPALRGEGGNGLLAAMQGAIKISENPALDLPSQGYKREVTGDDEEEEEIVHMGNAIMSFYSALIDLLGRCAPEMHLIQTGKGEAIRIRSILRSLVPTEDLVGIISIPLKLPSLNKDGSVSEPDMAANFCPDHKAPMVLFLDRVYGIKDQTFLLHLLEVGFLPDLRASASLDTVSLSTTEAALALNRYICSAVLPLLTRCAPLFAGTEHCTSLIDSTLQTIYRLSKGRSLTKAQRDTIEECLLAICNHLRPSMLQQLLRRLVFDVPQLNEYCKMPLKLLTNHYEQCWKYYCLPSGWGSYGLAVEEELHLTEKLFWGIFDSLSHKKYDPDLFRMALPCLSAIAGALPPDYLDTRITATLEKQISVDADGNFDPKPINTMNFSLPEKLEYIVTKYAEHSHDKWACDKSQSGWKYGISLDENVKTHPLIRPFKTLTEKEKEIYRWPARESLKTMLAVGWTVERTKEGEALVQQRENEKLRSVSQANQGNSYSPAPLDLSNVVLSRELQGMVEVVAENYHNIWAKKKKLELESKGGGSHPLLVPYDTLTAKEKFKDREKAQDLFKFLQVNGIIVSRGMKDMELDASSMEKRFAYKFLKKILKYVDSAQEFIAHLEAIVSSGKTEKSPRDQEIKFFAKVLLPLVDQYFTSHCLYFLSSPLKPLSSSGYASHKEKEMVAGLFCKLAALVRHRISLFGSDSTTMVSCLHILAQTLDTRTVMKSGSELVKAGLRAFFENAAEDLEKTSENLKLGKFTHSRTQIKGVSQNINYTTVALLPILTSIFEHVTQHQFGMDLLLGDVQISCYHILCSLYSLGTGKNIYVERQRPALGECLASLAAAIPVAFLEPTLNRYNPLSVFNTKTPRERSILGMPDTVEDMCPDIPQLEGLMKEINDLAESGARYTEMPHVIEVILPMLCNYLSYWWERGPENLPPSTGPCCTKVTSEHLSLILGNILKIINNNLGIDEASWMKRIAVYAQPIISKARPDLLRSHFIPTLEKLKKKAVKTVQEEEQLKADGKGDTQEAELLILDEFAVLCRDLYAFYPMLIRYVDNNRSNWLKSPDADSDQLFRMVAEVFILWCKSHNFKREEQNFVIQNEINNLAFLTGDSKSKMSKAMQVKSGGQDQERKKTKRRGDLYSIQTSLIVAALKKMLPIGLNMCTPGDQELISLAKSRYSHRDTDEEVREHLRNNLHLQEKSDDPAVKWQLNLYKDVLKSEEPFNPEKTVERVQRISAAVFHLEQVEQPLRSKKAVWHKLLSKQRKRAVVACFRMAPLYNLPRHRSINLFLHGYQRFWIETEEYSFEEKLVQDLAKSPKVEEEEEEETEKQPDPLHQIILYFSRNALTERSKLEDDPLYTSYSSMMAKSCQSGEDEEEDEDKEKTFEEKEMEKQKTLYQQARLHERGAAEMVLQMISASKGEMSPMVVETLKLGIAILNGGNAGVQQKMLDYLKEKKDAGFFQSLSGLMQSCSVLDLNAFERQNKAEGLGMVTEEGTLIVRERGEKVLQNDEFTRDLFRFLQLLCEGHNSDFQNFLRTQMGNTTTVNVIISTVDYLLRLQESISDFYWYYSGKDIIDESGQHNFSKALAVTKQIFNSLTEYIQGPCIGNQQSLAHSRLWDAVVGFLHVFANMQMKLSQDSSQIELLKELLDLLQDMVVMLLSLLEGNVVNGTIGKQMVDTLVESSTNVEMILKFFDMFLKLKDLTSSDTFKEYDPDGKGIISKKEFQKAMEGQKQYTQSEIDFLLSCAEADENDMFNYVDFVDRFHEPAKDIGFNVAVLLTNLSEHMPNDSRLKCLLDPAESVLNYFEPYLGRIEIMGGAKKIERVYFEISESSRTQWEKPQVKESKRQFIFDVVNEGGEQEKMELFVNFCEDTIFEMQLASQISESDSADRPEEEEEDEDSSYVLEIAGEEEEDGSLEPASAFAMACASVKRNVTDFLKRATLKNLRKQYRNVKKMTAKELVKVLFSFFWMLFVGLFQLLFTILGGIFQILWSTVFGGGLVEGAKNIRVTKILGDMPDPTQFGIHDDTMEAERAEVMEPGITTELVHFIKGEKGDTDIMSDLFGLHPKKEGSLKHGPEVGLGDLSEIIGKDEPPTLESTVQKKRKAQAAEMKAANEAEGKVESEKADMEDGEKEDKDKEEEQAEYLWTEVTKKKKRRCGQKVEKPEAFTANFFKGLEIYQTKLLHYLARNFYNLRFLALFVAFAINFILLFYKVTEEPLEEETEDVANLWNSFNDEEEEEAMVFFVLQESTGYMAPTLRALAIIHTIISLVCVVGYYCLKVPLVVFKREKEIARKLEFDGLYITEQPSEDDIKGQWDRLVINTPSFPNNYWDKFVKRKVINKYGDLYGAERIAELLGLDKNALDFSPVEETKAEAASLVSWLSSIDMKYHIWKLGVVFTDNSFLYLAWYTTMSVLGHYNNFFFAAHLLDIAMGFKTLRTILSSVTHNGKQLVLTVGLLAVVVYLYTVVAFNFFRKFYNKSEDDDEPDMKCDDMMTCYLFHMYVGVRAGGGIGDEIEDPAGDPYEMYRIVFDITFFFFVIVILLAIIQGLIIDAFGELRDQQEQVREDMETKCFICGIGNDYFDTTPHGFETHTLQEHNLANYLFFLMYLINKDETEHTGQESYVWKMYQERCWDFFPAGDCFRKQYEDQLG

SEQ ID NO: 76241 - protein, 4865 aa, Homo sapiens
  Payload ID: 15212
  Gene Symbol: RYR3
  Gene Name: ryanodine receptor 3
  Uniprot ID: Q15413
  ENSP ID: ENSP00000399610
MAEGGEGGEDEIQFLRTEDEVVLQCIATIHKEQRKFCLAAEGLGNRLCFLEPTSEAKYIPPDLCVCNFVLEQSLSVRALQEMLANTGENGGEGAAQGGGHRTLLYGHAVLLRHSFSGMYLTCLTTSRSQTDKLAFDVGLREHATGEACWWTIHPASKQRSEGEKVRIGDDLILVSVSSERYLHLSVSNGNIQVDASFMQTLWNVHPTCSGSSIEEGYLLGGHVVRLFHGHDECLTIPSTDQNDSQHRRIFYEAGGAGTRARSLWRVEPLRISWSGSNIRWGQAFRLRHLTTGHYLALTEDQGLILQDRAKSDTKSTAFSFRASKELKEKLDSSHKRDIEGMGVPEIKYGDSVCFVQHIASGLWVTYKAQDAKTSRLGPLKRKVILHQEGHMDDGLTLQRCQREESQAARIIRNTTALFSQFVSGNNRTAAPITLPIEEVLQTLQDLIAYFQPPEEEMRHEDKQNKLRSLKNRQNLFKEEGMLALVLNCIDRLNVYNSVAHFAGIAREESGMAWKEILNLLYKLLAALIRGNRNNCAQFSNNLDWLISKLDRLESSSGILEVLHCILTESPEALNLIAEGHIKSIISLLDKHGRNHKVLDILCSLCLCNGVAVRANQNLICDNLLPRRNLLLQTRLINDVTSIRPNIFLGVAEGSAQYKKWYFELIIDQVDPFLTAEPTHLRVGWASSSGYAPYPGGGEGWGGNGVGDDLYSYGFDGLHLWSGRIPRAVASINQHLLRSDDVVSCCLDLGVPSISFRINGQPVQGMFENFNTDGLFFPVMSFSAGVKVRFLMGGRHGEFKFLPPSGYAPCYEALLPKEKMRLEPVKEYKRDADGIRDLLGTTQFLSQASFIPCPVDTSQVILPPHLEKIRDRLAENIHELWGMNKIELGWTFGKIRDDNKRQHPCLVEFSKLPETEKNYNLQMSTETLKTLLALGCHIAHVNPAAEEDLKKVKLPKNYMMSNGYKPAPLDLSDVKLLPPQEILVDKLAENAHNVWAKDRIKQGWTYGIQQDLKNKRNPRLVPYALLDERTKKSNRDSLREAVRTFVGYGYNIEPSDQELADSAVEKVSIDKIRFFRVERSYAVRSGKWYFEFEVVTGGDMRVGWARPGCRPDVELGADDQAFVFEGNRGQRWHQGSGYFGRTWQPGDVVGCMINLDDASMIFTLNGELLITNKGSELAFADYEIENGFVPICCLGLSQIGRMNLGTDASTFKFYTMCGLQEGFEPFAVNMNRDVAMWFSKRLPTFVNVPKDHPHIEVMRIDGTMDSPPCLKVTHKTFGTQNSNADMIYCRLSMPVECHSSFSHSPCLDSEAFQKRKQMQEILSHTTTQCYYAIRIFAGQDPSCVWVGWVTPDYHLYSEKFDLNKNCTVTVTLGDERGRVHESVKRSNCYMVWGGDIVASSQRSNRSNVDLEIGCLVDLAMGMLSFSANGKELGTCYQVEPNTKVFPAVFLQPTSTSLFQFELGKLKNAMPLSAAIFRSEEKNPVPQCPPRLDVQTIQPVLWSRMPNSFLKVETERVSERHGWVVQCLEPLQMMALHIPEENRCVDILELCEQEDLMRFHYHTLRLYSAVCALGNSRVAYALCSHVDLSQLFYAIDNKYLPGLLRSGFYDLLISIHLASAKERKLMMKNEYIIPITSTTRNIRLFPDESKRHGLPGVGLRTCLKPGFRFSTPCFVVTGEDHQKQSPEIPLESLRTKALSMLTEAVQCSGAHIRDPVGGSVEFQFVPVLKLIGTLLVMGVFDDDDVRQILLLIDPSVFGEHSAGTEEGAEKEEVTQVEEKAVEAGEKAGKEAPVKGLLQTRLPESVKLQMCELLSYLCDCELQHRVEAIVAFGDIYVSKLQANQKFRYNELMQALNMSAALTARKTKEFRSPPQEQINMLLNFQLGENCPCPEEIREELYDFHEDLLLHCGVPLEEEEEEEEDTSWTGKLCALVYKIKGPPKPEKEQPTEEEERCPTTLKELISQTMICWAQEDQIQDSELVRMMFNLLRRQYDSIGELLQALRKTYTISHTSVSDTINLLAALGQIRSLLSVRMGKEEELLMINGLGDIMNNKVFYQHPNLMRVLGMHETVMEVMVNVLGTEKSQIAFPKMVASCCRFLCYFCRISRQNQKAMFEHLSYLLENSSVGLASPSMRGSTPLDVAASSVMDNNELALSLEEPDLEKVVTYLAGCGLQSCPMLLAKGYPDVGWNPIEGERYLSFLRFAVFVNSESVEENASVVVKLLIRRPECFGPALRGEGGNGLLAAMQGAIKISENPALDLPSQGYKREVSTGDDEEEEEIVHMGNAIMSFYSALIDLLGRCAPEMHLIQTGKGEAIRIRSILRSLVPTEDLVGIISIPLKLPSLNKDGSVSEPDMAANFCPDHKAPMVLFLDRVYGIKDQTFLLHLLEVGFLPDLRASASLDTVSLSTTEAALALNRYICSAVLPLLTRCAPLFAGTEHCTSLIDSTLQTIYRLSKGRSLTKAQRDTIEECLLAICNHLRPSMLQQLLRRLVFDVPQLNEYCKMPLKLLTNHYEQCWKYYCLPSGWGSYGLAVEEELHLTEKLFWGIFDSLSHKKYDPDLFRMALPCLSAIAGALPPDYLDTRITATLEKQISVDADGNFDPKPINTMNFSLPEKLEYIVTKYAEHSHDKWACDKSQSGWKYGISLDENVKTHPLIRPFKTLTEKEKEIYRWPARESLKTMLAVGWTVERTKEGEALVQQRENEKLRSVSQANQGNSYSPAPLDLSNVVLSRELQGMVEVVAENYHNIWAKKKKLELESKGGGSHPLLVPYDTLTAKEKFKDREKAQDLFKFLQVNGIIVSRGMKDMELDASSMEKRFAYKFLKKILKYVDSAQEFIAHLEAIVSSGKTEKSPRDQEIKFFAKVLLPLVDQYFTSHCLYFLSSPLKPLSSSGYASHKEKEMVAGLFCKLAALVRHRISLFGSDSTTMVSCLHILAQTLDTRTVMKSGSELVKAGLRAFFENAAEDLEKTSENLKLGKFTHSRTQIKGVSQNINYTTVALLPILTSIFEHVTQHQFGMDLLLGDVQISCYHILCSLYSLGTGKNIYVERQRPALGECLASLAAAIPVAFLEPTLNRYNPLSVFNTKTPRERSILGMPDTVEDMCPDIPQLEGLMKEINDLAESGARYTEMPHVIEVILPMLCNYLSYWWERGPENLPPSTGPCCTKVTSEHLSLILGNILKIINNNLGIDEASWMKRIAVYAQPIISKARPDLLRSHFIPTLEKLKKKAVKTVQEEEQLKADGKGDTQEAELLILDEFAVLCRDLYAFYPMLIRYVDNNRSNWLKSPDADSDQLFRMVAEVFILWCKSHNFKREEQNFVIQNEINNLAFLTGDSKSKMSKSGGQDQERKKTKRRGDLYSIQTSLIVAALKKMLPIGLNMCTPGDQELISLAKSRYSHRDTDEEVREHLRNNLHLQEKSDDPAVKWQLNLYKDVLKSEEPFNPEKTVERVQRISAAVFHLEQVEQPLRSKKAVWHKLLSKQRKRAVVACFRMAPLYNLPRHRSINLFLHGYQRFWIETEEYSFEEKLVQDLAKSPKVEEEEEEETEKQPDPLHQIILYFSRNALTERSKLEDDPLYTSYSSMMAKSCQSGEDEEEDEDKEKTFEEKEMEKQKTLYQQARLHERGAAEMVLQMISASKGEMSPMVVETLKLGIAILNGGNAGVQQKMLDYLKEKKDAGFFQSLSGLMQSCSVLDLNAFERQNKAEGLGMVTEEGTLIVRERGEKVLQNDEFTRDLFRFLQLLCEGHNSDFQNFLRTQMGNTTTVNVIISTVDYLLRLQESISDFYWYYSGKDIIDESGQHNFSKALAVTKQIFNSLTEYIQGPCIGNQQSLAHSRLWDAVVGFLHVFANMQMKLSQDSSQIELLKELLDLLQDMVVMLLSLLEGNVVNGTIGKQMVDTLVESSTNVEMILKFFDMFLKLKDLTSSDTFKEYDPDGKGIISKKEFQKAMEGQKQYTQSEIDFLLSCAEADENDMFNYVDFVDRFHEPAKDIGFNVAVLLTNLSEHMPNDSRLKCLLDPAESVLNYFEPYLGRIEIMGGAKKIERVYFEISESSRTQWEKPQVKESKRQFIFDVVNEGGEQEKMELFVNFCEDTIFEMQLASQISESDSADRPEEEEEDEDSSYVLEIAGEEEEDGSLEPASAFAMACASVKRNVTDFLKRATLKNLRKQYRNVKKMTAKELVKVLFSFFWMLFVGLFQLLFTILGGIFQILWSTVFGGGLVEGAKNIRVTKILGDMPDPTQFGIHDDTMEAERAEVMEPGITTELVHFIKGEKGDTDIMSDLFGLHPKKEGSLKHGPEVGLGDLSEIIGKDEPPTLESTVQKKRKAQAAEMKAANEAEGKVESEKADMEDGEKEDKDKEEEQAEYLWTEVTKKKKRRCGQKVEKPEAFTANFFKGLEIYQTKLLHYLARNFYNLRFLALFVAFAINFILLFYKVTEEPLEEETEDVANLWNSFNDEEEEEAMVFFVLQESTGYMAPTLRALAIIHTIISLVCVVGYYCLKVPLVVFKREKEIARKLEFDGLYITEQPSEDDIKGQWDRLVINTPSFPNNYWDKFVKRKVINKYGDLYGAERIAELLGLDKNALDFSPVEETKAEAASLVSWLSSIDMKYHIWKLGVVFTDNSFLYLAWYTTMSVLGHYNNFFFAAHLLDIAMGFKTLRTILSSVTHNGKQLVLTVGLLAVVVYLYTVVAFNFFRKFYNKSEDDDEPDMKCDDMMTCYLFHMYVGVRAGGGIGDEIEDPAGDPYEMYRIVFDITFFFFVIVILLAIIQGLIIDAFGELRDQQEQVREDMETKCFICGIGNDYFDTTPHGFETHTLQEHNLANYLFFLMYLINKDETEHTGQESYVWKMYQERCWDFFPAGDCFRKQYEDQLG

SEQ ID NO: 76242 - protein, 4873 aa, Homo sapiens
  Payload ID: 15212
  Gene Symbol: RYR3
  Gene Name: ryanodine receptor 3
  ENSP ID: ENSP00000483166
MAEGGEGGEDEIQFLRTEDEVVLQCIATIHKEQRKFCLAAEGLGNRLCFLEPTSEAKYIPPDLCVCNFVLEQSLSVRALQEMLANTGENGGEGAAQGGGHRTLLYGHAVLLRHSFSGMYLTCLTTSRSQTDKLAFDVGLREHATGEACWWTIHPASKQRSEGEKVRIGDDLILVSVSSERYLHLSVSNGNIQVDASFMQTLWNVHPTCSGSSIEEGYLLGGHVVRLFHGHDECLTIPSTDQNDSQHRRIFYEAGGAGTRARSLWRVEPLRISWSGSNIRWGQAFRLRHLTTGHYLALTEDQGLILQDRAKSDTKSTAFSFRASKELKEKLDSSHKRDIEGMGVPEIKYGDSVCFVQHIASGLWVTYKAQDAKTSRLGPLKRKVILHQEGHMDDGLTLQRCQREESQAARIIRNTTALFSQFVSGNNRTAAPITLPIEEVLQTLQDLIAYFQPPEEEMRHEDKQNKLRSLKNRQNLFKEEGMLALVLNCIDRLNVYNSVAHFAGIAREESGMAWKEILNLLYKLLAALIRGNRNNCAQFSNNLDWLISKLDRLESSSGILEVLHCILTESPEALNLIAEGHIKSIISLLDKHGRNHKVLDILCSLCLCNGVAVRANQNLICDNLLPRRNLLLQTRLINDVTSIRPNIFLGVAEGSAQYKKWYFELIIDQVDPFLTAEPTHLRVGWASSSGYAPYPGGGEGWGGNGVGDDLYSYGFDGLHLWSGRIPRAVASINQHLLRSDDVVSCCLDLGVPSISFRINGQPVQGMFENFNTDGLFFPVMSFSAGVKVRFLMGGRHGEFKFLPPSGYAPCYEALLPKEKMRLEPVKEYKRDADGIRDLLGTTQFLSQASFIPCPVDTSQVILPPHLEKIRDRLAENIHELWGMNKIELGWTFGKIRDDNKRQHPCLVEFSKLPETEKNYNLQMSTETLKTLLALGCHIAHVNPAAEEDLKKVKLPKNYMMSNGYKPAPLDLSDVKLLPPQEILVDKLAENAHNVWAKDRIKQGWTYGIQQDLKNKRNPRLVPYALLDERTKKSNRDSLREAVRTFVGYGYNIEPSDQELADSAVEKVSIDKIRFFRVERSYAVRSGKWYFEFEVVTGGDMRVGWARPGCRPDVELGADDQAFVFEGNRGQRWHQGSGYFGRTWQPGDVVGCMINLDDASMIFTLNGELLITNKGSELAFADYEIENGFVPICCLGLSQIGRMNLGTDASTFKFYTMCGLQEGFEPFAVNMNRDVAMWFSKRLPTFVNVPKDHPHIEVMRIDGTMDSPPCLKVTHKTFGTQNSNADMIYCRLSMPVECHSSFSHSPCLDSEAFQKRKQMQEILSHTTTQCYYAIRIFAGQDPSCVWVGWVTPDYHLYSEKFDLNKNCTVTVTLGDERGRVHESVKRSNCYMVWGGDIVASSQRSNRSNVDLEIGCLVDLAMGMLSFSANGKELGTCYQVEPNTKVFPAVFLQPTSTSLFQFELGKLKNAMPLSAAIFRSEEKNPVPQCPPRLDVQTIQPVLWSRMPNSFLKVETERVSERHGWVVQCLEPLQMMALHIPEENRCVDILELCEQEDLMRFHYHTLRLYSAVCALGNSRVAYALCSHVDLSQLFYAIDNKYLPGLLRSGFYDLLISIHLASAKERKLMMKNEYIIPITSTTRNIRLFPDESKRHGLPGVGLRTCLKPGFRFSTPCFVVTGEDHQKQSPEIPLESLRTKALSMLTEAVQCSGAHIRDPVGGSVEFQFVPVLKLIGTLLVMGVFDDDDVRQILLLIDPSVFGEHSAGTEEGAEKEEVTQVEEKAVEAGEKAGKEAPVKGLLQTRLPESVKLQMCELLSYLCDCELQHRVEAIVAFGDIYVSKLQANQKFRYNELMQALNMSAALTARKTKEFRSPPQEQINMLLNFQLGENCPCPEEIREELYDFHEDLLLHCGVPLEEEEEEEEDTSWTGKLCALVYKIKGPPKPEKEQPTEEEERCPTTLKELISQTMICWAQEDQIQDSELVRMMFNLLRRQYDSIGELLQALRKTYTISHTSVSDTINLLAALGQIRSLLSVRMGKEEELLMINGLGDIMNNKVFYQHPNLMRVLGMHETVMEVMVNVLGTEKSQIAFPKMVASCCRFLCYFCRISRQNQKAMFEHLSYLLENSSVGLASPSMRGSTPLDVAASSVMDNNELALSLEEPDLEKVVTYLAGCGLQSCPMLLAKGYPDVGWNPIEGERYLSFLRFAVFVNSESVEENASVVVKLLIRRPECFGPALRGEGGNGLLAAMQGAIKISENPALDLPSQGYKREVSTGDDEEEEEIVHMGNAIMSFYSALIDLLGRCAPEMHLIQTGKGEAIRIRSILRSLVPTEDLVGIISIPLKLPSLNKDGSVSEPDMAANFCPDHKAPMVLFLDRVYGIKDQTFLLHLLEVGFLPDLRASASLDTVSLSTTEAALALNRYICSAVLPLLTRCAPLFAGTEHCTSLIDSTLQTIYRLSKGRSLTKAQRDTIEECLLAICNHLRPSMLQQLLRRLVFDVPQLNEYCKMPLKLLTNHYEQCWKYYCLPSGWGSYGLAVEEELHLTEKLFWGIFDSLSHKKYDPDLFRMALPCLSAIAGALPPDYLDTRITATLEKQISVDADGNFDPKPINTMNFSLPEKLEYIVTKYAEHSHDKWACDKSQSGWKYGISLDENVKTHPLIRPFKTLTEKEKEIYRWPARESLKTMLAVGWTVERTKEGEALVQQRENEKLRSVSQANQGNSYSPAPLDLSNVVLSRELQGMVEVVAENYHNIWAKKKKLELESKGGGSHPLLVPYDTLTAKEKFKDREKAQDLFKFLQVNGIIVSRGMKDMELDASSMEKRFAYKFLKKILKYVDSAQEFIAHLEAIVSSGKTEKSPRDQEIKFFAKVLLPLVDQYFTSHCLYFLSSPLKPLSSSGYASHKEKEMVAGLFCKLAALVRHRISLFGNDSTTMVSCLHILAQTLDTRTVMKSGSELVKAGLRAFFENAAEDLEKTSENLKLGKFTHSRTQIKGVSQNINYTTVALLPILTSIFEHVTQHQFGMDLLLGDVQISCYHILCSLYSLGTGKNIYVERQRPALGECLASLAAAIPVAFLEPTLNRYNPLSVFNTKTPRERSILGMPDTVEDMCPDIPQLEGLMKEINDLAESGARYTEMPHVIEVILPMLCNYLSYWWERGPENLPPSTGPCCTKVTSEHLSLILGNILKIINNNLGIDEASWMKRIAVYAQPIISKARPDLLRSHFIPTLEKLKKKAVKTVQEEEQLKADGKGDTQEAELLILDEFAVLCRDLYAFYPMLIRYVDNNRSNWLKSPDADSDQLFRMVAEVFILWCKSHNFKREEQNFVIQNEINNLAFLTGDSKSKMSKAMQVKSGGQDQERKKTKRRGDLYSIQTSLIVAALKKMLPIGLNMCTPGDQELISLAKSRYSHRDTDEEVREHLRNNLHLQEKSDDPAVKWQLNLYKDVLKSEEPFNPEKTVERVQRISAAVFHLEQVEQPLRSKKAVWHKLLSKQRKRAVVACFRMAPLYNLPRQHMHRSINLFLHGYQRFWIETEEYSFEEKLVQDLAKSPKVEEEEEEETEKQPDPLHQIILYFSRNALTERSKLEDDPLYTSYSSMMAKSCQSGEDEEEDEDKEKTFEEKEMEKQKTLYQQARLHERGAAEMVLQMISASKGEMSPMVVETLKLGIAILNGGNAGVQQKMLDYLKEKKDAGFFQSLSGLMQSCSVLDLNAFERQNKAEGLGMVTEEGTLIVRERGEKVLQNDEFTRDLFRFLQLLCEGHNSDFQNFLRTQMGNTTTVNVIISTVDYLLRLQESISDFYWYYSGKDIIDESGQHNFSKALAVTKQIFNSLTEYIQGPCIGNQQSLAHSRLWDAVVGFLHVFANMQMKLSQDSSQIELLKELLDLLQDMVVMLLSLLEGNVVNGTIGKQMVDTLVESSTNVEMILKFFDMFLKLKDLTSSDTFKEYDPDGKGIISKKEFQKAMEGQKQYTQSEIDFLLSCAEADENDMFNYVDFVDRFHEPAKDIGFNVAVLLTNLSEHMPNDSRLKCLLDPAESVLNYFEPYLGRIEIMGGAKKIERVYFEISESSRTQWEKPQVKESKRQFIFDVVNEGGEQEKMELFVNFCEDTIFEMQLASQISESDSADRPEEEEEDEDSSYVLEIAGEEEEDGSLEPASAFAMACASVKRNVTDFLKRATLKNLRKQYRNVKKMTAKELVKVLFSFFWMLFVGLFQLLFTILGGIFQILWSTVFGGGLVEGAKNIRVTKILGDMPDPTQFGIHDDTMEAERAEVMEPGITTELVHFIKGEKGDTDIMSDLFGLHPKKEGSLKHGPEVGLGDLSEIIGKDEPPTLESTVQKKRKAQAAEMKAANEAEGKVESEKADMEDGEKEDKDKEEEQAEYLWTEVTKKKKRRCGQKVEKPEAFTANFFKGLEIYQTKLLHYLARNFYNLRFLALFVAFAINFILLFYKVTEEPLEEETEDVANLWNSFNDEEEEEAMVFFVLQESTGYMAPTLRALAIIHTIISLVCVVGYYCLKVPLVVFKREKEIARKLEFDGLYITEQPSEDDIKGQWDRLVINTPSFPNNYWDKFVKRKVINKYGDLYGAERIAELLGLDKNALDFSPVEETKAEAASLVSWLSSIDMKYHIWKLGVVFTDNSFLYLAWYTTMSVLGHYNNFFFAAHLLDIAMGFKTLRTILSSVTHNGKQLVLTVGLLAVVVYLYTVVAFNFFRKFYNKSEDDDEPDMKCDDMMTCYLFHMYVGVRAGGGIGDEIEDPAGDPYEMYRIVFDITFFFFVIVILLAIIQGLIIDAFGELRDQQEQVREDMETKCFICGIGNDYFDTTPHGFETHTLQEHNLANYLFFLMYLINKDETEHTGQESYVWKMYQERCWDFFPAGDCFRKQYEDQLG

SEQ ID NO: 76243 - protein, 4870 aa, Homo sapiens
  Payload ID: 15212
  Gene Symbol: RYR3
  Gene Name: ryanodine receptor 3
  ENSP ID: ENSP00000489262
MAEGGEGGEDEIQFLRTEDEVVLQCIATIHKEQRKFCLAAEGLGNRLCFLEPTSEAKYIPPDLCVCNFVLEQSLSVRALQEMLANTGENGGEGAAQGGGHRTLLYGHAVLLRHSFSGMYLTCLTTSRSQTDKLAFDVGLREHATGEACWWTIHPASKQRSEGEKVRIGDDLILVSVSSERYLHLSVSNGNIQVDASFMQTLWNVHPTCSGSSIEEGYLLGGHVVRLFHGHDECLTIPSTDQNDSQHRRIFYEAGGAGTRARSLWRVEPLRISWSGSNIRWGQAFRLRHLTTGHYLALTEDQGLILQDRAKSDTKSTAFSFRASKELKEKLDSSHKRDIEGMGVPEIKYGDSVCFVQHIASGLWVTYKAQDAKTSRLGPLKRKVILHQEGHMDDGLTLQRCQREESQAARIIRNTTALFSQFVSGNNRTAAPITLPIEEVLQTLQDLIAYFQPPEEEMRHEDKQNKLRSLKNRQNLFKEEGMLALVLNCIDRLNVYNSVAHFAGIAREESGMAWKEILNLLYKLLAALIRGNRNNCAQFSNNLDWLISKLDRLESSSGILEVLHCILTESPEALNLIAEGHIKSIISLLDKHGRNHKVLDILCSLCLCNGVAVRANQNLICDNLLPRRNLLLQTRLINDVTSIRPNIFLGVAEGSAQYKKWYFELIIDQVDPFLTAEPTHLRVGWASSSGYAPYPGGGEGWGGNGVGDDLYSYGFDGLHLWSGRIPRAVASINQHLLRSDDVVSCCLDLGVPSISFRINGQPVQGMFENFNTDGLFFPVMSFSAGVKVRFLMGGRHGEFKFLPPSGYAPCYEALLPKEKMRLEPVKEYKRDADGIRDLLGTTQFLSQASFIPCPVDTSQVILPPHLEKIRDRLAENIHELWGMNKIELGWTFGKIRDDNKRQHPCLVEFSKLPETEKNYNLQMSTETLKTLLALGCHIAHVNPAAEEDLKKVKLPKNYMMSNGYKPAPLDLSDVKLLPPQEILVDKLAENAHNVWAKDRIKQGWTYGIQQDLKNKRNPRLVPYALLDERTKKSNRDSLREAVRTFVGYGYNIEPSDQELADSAVEKVSIDKIRFFRVERSYAVRSGKWYFEFEVVTGGDMRVGWARPGCRPDVELGADDQAFVFEGNRGQRWHQGSGYFGRTWQPGDVVGCMINLDDASMIFTLNGELLITNKGSELAFADYEIENGFVPICCLGLSQIGRMNLGTDASTFKFYTMCGLQEGFEPFAVNMNRDVAMWFSKRLPTFVNVPKDHPHIEVMRIDGTMDSPPCLKVTHKTFGTQNSNADMIYCRLSMPVECHSSFSHSPCLDSEAFQKRKQMQEILSHTTTQCYYAIRIFAGQDPSCVWVGWVTPDYHLYSEKFDLNKNCTVTVTLGDERGRVHESVKRSNCYMVWGGDIVASSQRSNRSNVDLEIGCLVDLAMGMLSFSANGKELGTCYQVEPNTKVFPAVFLQPTSTSLFQFELGKLKNAMPLSAAIFRSEEKNPVPQCPPRLDVQTIQPVLWSRMPNSFLKVETERVSERHGWVVQCLEPLQMMALHIPEENRCVDILELCEQEDLMRFHYHTLRLYSAVCALGNSRVAYALCSHVDLSQLFYAIDNKYLPGLLRSGFYDLLISIHLASAKERKLMMKNEYIIPITSTTRNIRLFPDESKRHGLPGVGLRTCLKPGFRFSTPCFVVTGEDHQKQSPEIPLESLRTKALSMLTEAVQCSGAHIRDPVGGSVEFQFVPVLKLIGTLLVMGVFDDDDVRQILLLIDPSVFGEHSAGTEEGAEKEEVTQVEEKAVEAGEKAGKEAPVKGLLQTRLPESVKLQMCELLSYLCDCELQHRVEAIVAFGDIYVSKLQANQKFRYNELMQALNMSAALTARKTKEFRSPPQEQINMLLNFQLGENCPCPEEIREELYDFHEDLLLHCGVPLEEEEEEEEDTSWTGKLCALVYKIKGPPKPEKEQPTEEEERCPTTLKELISQTMICWAQEDQIQDSELVRMMFNLLRRQYDSIGELLQALRKTYTISHTSVSDTINLLAALGQIRSLLSVRMGKEEELLMINGLGDIMNNKVFYQHPNLMRVLGMHETVMEVMVNVLGTEKSQIAFPKMVASCCRFLCYFCRISRQNQKAMFEHLSYLLENSSVGLASPSMRGSTPLDVAASSVMDNNELALSLEEPDLEKVVTYLAGCGLQSCPMLLAKGYPDVGWNPIEGERYLSFLRFAVFVNSESVEENASVVVKLLIRRPECFGPALRGEGGNGLLAAMQGAIKISENPALDLPSQGYKREVSTGDDEEEEEIVHMGNAIMSFYSALIDLLGRCAPEMHLIQTGKGEAIRIRSILRSLVPTEDLVGIISIPLKLPSLNKDGSVSEPDMAANFCPDHKAPMVLFLDRVYGIKDQTFLLHLLEVGFLPDLRASASLDTVSLSTTEAALALNRYICSAVLPLLTRCAPLFAGTEHCTSLIDSTLQTIYRLSKGRSLTKAQRDTIEECLLAICNHLRPSMLQQLLRRLVFDVPQLNEYCKMPLKLLTNHYEQCWKYYCLPSGWGSYGLAVEEELHLTEKLFWGIFDSLSHKKYDPDLFRMALPCLSAIAGALPPDYLDTRITATLEKQISVDADGNFDPKPINTMNFSLPEKLEYIVTKYAEHSHDKWACDKSQSGWKYGISLDENVKTHPLIRPFKTLTEKEKEIYRWPARESLKTMLAVGWTVERTKEGEALVQQRENEKLRSVSQANQGNSYSPAPLDLSNVVLSRELQGMVEVVAENYHNIWAKKKKLELESKGGGSHPLLVPYDTLTAKEKFKDREKAQDLFKFLQVNGIIVSRGMKDMELDASSMEKRFAYKFLKKILKYVDSAQEFIAHLEAIVSSGKTEKSPRDQEIKFFAKVLLPLVDQYFTSHCLYFLSSPLKPLSSSGYASHKEKEMVAGLFCKLAALVRHRISLFGSDSTTMVSCLHILAQTLDTRTVMKSGSELVKAGLRAFFENAAEDLEKTSENLKLGKFTHSRTQIKGVSQNINYTTVALLPILTSIFEHVTQHQFGMDLLLGDVQISCYHILCSLYSLGTGKNIYVERQRPALGECLASLAAAIPVAFLEPTLNRYNPLSVFNTKTPRERSILGMPDTVEDMCPDIPQLEGLMKEINDLAESGARYTEMPHVIEVILPMLCNYLSYWWERGPENLPPSTGPCCTKVTSEHLSLILGNILKIINNNLGIDEASWMKRIAVYAQPIISKARPDLLRSHFIPTLEKLKKKAVKTVQEEEQLKADGKGDTQEAELLILDEFAVLCRDLYAFYPMLIRYVDNNRSNWLKSPDADSDQLFRMVAEVFILWCKSHNFKREEQNFVIQNEINNLAFLTGDSKSKMSKAMQVKSGGQDQERKKTKRRGDLYSIQTSLIVAALKKMLPIGLNMCTPGDQELISLAKSRYSHRDTDEEVREHLRNNLHLQEKSDDPAVKWQLNLYKDVLKSEEPFNPEKTVERVQRISAAVFHLEQVEQPLRSKKAVWHKLLSKQRKRAVVACFRMAPLYNLPRHRSINLFLHGYQRFWIETEEYSFEEKLVQDLAKSPKVEEEEEEETEKQPDPLHQIILYFSRNALTERSKLEDDPLYTSYSSMMAKSCQSGEDEEEDEDKEKTFEEKEMEKQKTLYQQARLHERGAAEMVLQMISASKGEMSPMVVETLKLGIAILNGGNAGVQQKMLDYLKEKKDAGFFQSLSGLMQSCSVLDLNAFERQNKAEGLGMVTEEGTLIVRERGEKVLQNDEFTRDLFRFLQLLCEGHNSDFQNFLRTQMGNTTTVNVIISTVDYLLRLQESISDFYWYYSGKDIIDESGQHNFSKALAVTKQIFNSLTEYIQGPCIGNQQSLAHSRLWDAVVGFLHVFANMQMKLSQDSSQIELLKELLDLLQDMVVMLLSLLEGNVVNGTIGKQMVDTLVESSTNVEMILKFFDMFLKLKDLTSSDTFKEYDPDGKGIISKKEFQKAMEGQKQYTQSEIDFLLSCAEADENDMFNYVDFVDRFHEPAKDIGFNVAVLLTNLSEHMPNDSRLKCLLDPAESVLNYFEPYLGRIEIMGGAKKIERVYFEISESSRTQWEKPQVKESKRQFIFDVVNEGGEQEKMELFVNFCEDTIFEMQLASQISESDSADRPEEEEEDEDSSYVLEIAGEEEEDGSLEPASAFAMACASVKRNVTDFLKRATLKNLRKQYRNVKKMTAKELVKVLFSFFWMLFVGLFQLLFTILGGIFQILWSTVFGGGLVEGAKNIRVTKILGDMPDPTQFGIHDDTMEAERAEVMEPGITTELVHFIKGEKGDTDIMSDLFGLHPKKEGSLKHGPEVGLGDLSEIIGKDEPPTLESTVQKKRKAQAAEMKAANEAEGKVESEKADMEDGEKEDKDKEEEQAEYLWTEVTKKKKRRCGQKVEKPEAFTANFFKGLEIYQTKLLHYLARNFYNLRFLALFVAFAINFILLFYKVTEEPLEEETEDVANLWNSFNDEEEEEAMVFFVLQESTGYMAPTLRALAIIHTIISLVCVVGYYCLKVPLVVFKREKEIARKLEFDGLYITEQPSEDDIKGQWDRLVINTPSFPNNYWDKFVKRKVINKYGDLYGAERIAELLGLDKNALDFSPVEETKAEAASLVSWLSSIDMKYHIWKLGVVFTDNSFLYLAWYTTMSVLGHYNNFFFAAHLLDIAMGFKTLRTILSSVTHNGKQLVLTVGLLAVVVYLYTVVAFNFFRKFYNKSEDDDEPDMKCDDMMTCYLFHMYVGVRAGGGIGDEIEDPAGDPYEMYRIVFDITFFFFVIVILLAIIQGLIIDAFGELRDQQEQVREDMETKCFICGIGNDYFDTTPHGFETHTLQEHNLANYLFFLMYLINKDETEHTGQESYVWKMYQERCWDFFPAGDCFRKQYEDQLG

SEQ ID NO: 76244 - protein, 46 aa, Homo sapiens
  Payload ID: 15212
  Gene Symbol: RYR3
  Gene Name: ryanodine receptor 3
  ENSP ID: ENSP00000489294
  MOD_RES (1)..(1): Any amino acid
XEDEIQFLRTYIPPDLCVCNFVLEQSLSVRALQEMLANTGENGGEG

SEQ ID NO: 76245 - protein, 615 aa, Homo sapiens
  Payload ID: 15212
  Gene Symbol: RYR3
  Gene Name: ryanodine receptor 3
  ENSP ID: ENSP00000489346
RVTKILGDMPDPTQFGIHDDTMEAERAEVMEPGITTELVHFIKGEKGDTDIMSDLFGLHPKKEGSLKHGPEVGLGDLSEIIGKDEPPTLESTVQKKRKAQAAEMKAANEAEGKVESEKADMEDGEKEDKDKEEEQAEYLWTEVTKKKKRRCGQKVEKPEAFTANFFKGLEIYQTKLLVTEEPLEEETEDVANLWNSFNDEEEEEAMVFFVLQESTGYMAPTLRALAIIHTIISLVCVVGYYCLKVPLVVFKREKEIARKLEFDGLYITEQPSEDDIKGQWDRLVINTPSFPNNYWDKFVKRKVINKYGDLYGAERIAELLGLDKNALDFSPVEETKAEAASLVSWLSSIDMKYHIWKLGVVFTDNSFLYLAWYTTMSVLGHYNNFFFAAHLLDIAMGFKTLRTILSSVTHNGKQLVLTVGLLAVVVYLYTVVAFNFFRKFYNKSEDDDEPDMKCDDMMTCYLFHMYVGVRAGGGIGDEIEDPAGDPYEMYRIVFDITFFFFVIVILLAIIQGLIIDAFGELRDQQEQVREDMETKCFICGIGNDYFDTTPHGFETHTLQEHNLANYLFFLMYLINKDETEHTGQESYVWKMYQERCWDFFPAGDCFRKQYEDQLG

SEQ ID NO: 76246 - protein, 4859 aa, Homo sapiens
  Payload ID: 15212
  Gene Symbol: RYR3
  Gene Name: ryanodine receptor 3
  ENSP ID: ENSP00000489529
MAEGGEGGEDEIQFLRTEDEVVLQCIATIHKEQRKFCLAAEGLGNRLCFLEPTSEAKYIPPDLCVCNFVLEQSLSVRALQEMLANTGENGGEGAAQGGGHRTLLYGHAVLLRHSFSGMYLTCLTTSRSQTDKLAFDVGLREHATGEACWWTIHPASKQRSEGEKVRIGDDLILVSVSSERYLHLSVSNGNIQVDASFMQTLWNVHPTCSGSSIEEGYLLGGHVVRLFHGHDECLTIPSTDQNDSQHRRIFYEAGGAGTRARSLWRVEPLRISWSGSNIRWGQAFRLRHLTTGHYLALTEDQGLILQDRAKSDTKSTAFSFRASKELKEKLDSSHKRDIEGMGVPEIKYGDSVCFVQHIASGLWVTYKAQDAKTSRLGPLKRKVILHQEGHMDDGLTLQRCQREESQAARIIRNTTALFSQFVSGNNRTAAPITLPIEEVLQTLQDLIAYFQPPEEEMRHEDKQNKLRSLKNRQNLFKEEGMLALVLNCIDRLNVYNSVAHFAGIAREESGMAWKEILNLLYKLLAALIRGNRNNCAQFSNNLDWLISKLDRLESSSGILEVLHCILTESPEALNLIAEGHIKSIISLLDKHGRNHKVLDILCSLCLCNGVAVRANQNLICDNLLPRRNLLLQTRLINDVTSIRPNIFLGVAEGSAQYKKWYFELIIDQVDPFLTAEPTHLRVGWASSSGYAPYPGGGEGWGGNGVGDDLYSYGFDGLHLWSGRIPRAVASINQHLLRSDDVVSCCLDLGVPSISFRINGQPVQGMFENFNTDGLFFPVMSFSAGVKVRFLMGGRHGEFKFLPPSGYAPCYEALLPKEKMRLEPVKEYKRDADGIRDLLGTTQFLSQASFIPCPVDTSQVILPPHLEKIRDRLAENIHELWGMNKIELGWTFGKIRDDNKRQHPCLVEFSKLPETEKNYNLQMSTETLKTLLALGCHIAHVNPAAEEDLKKVKLPKNYMMSNGYKPAPLDLSDVKLLPPQEILVDKLAENAHNVWAKDRIKQGWTYGIQQDLKNKRNPRLVPYALLDERTKKSNRDSLREAVRTFVGYGYNIEPSDQELADSAVEKVSIDKIRFFRVERSYAVRSGKWYFEFEVVTGGDMRVGWARPGCRPDVELGADDQAFVFEGNRGQRWHQGSGYFGRTWQPGDVVGCMINLDDASMIFTLNGELLITNKGSELAFADYEIENGFVPICCLGLSQIGRMNLGTDASTFKFYTMCGLQEGFEPFAVNMNRDVAMWFSKRLPTFVNVPKDHPHIEVMRIDGTMDSPPCLKVTHKTFGTQNSNADMIYCRLSMPVECHSSFSHSPCLDSEAFQKRKQMQEILSHTTTQCYYAIRIFAGQDPSCVWVGWVTPDYHLYSEKFDLNKNCTVTVTLGDERGRVHESVKRSNCYMVWGGDIVASSQRSNRSNVDLEIGCLVDLAMGMLSFSANGKELGTCYQVEPNTKVFPAVFLQPTSTSLFQFELGKLKNAMPLSAAIFRSEEKNPVPQCPPRLDVQTIQPVLWSRMPNSFLKVETERVSERHGWVVQCLEPLQMMALHIPEENRCVDILELCEQEDLMRFHYHTLRLYSAVCALGNSRVAYALCSHVDLSQLFYAIDNKYLPGLLRSGFYDLLISIHLASAKERKLMMKNEYIIPITSTTRNIRLFPDESKRHGLPGVGLRTCLKPGFRFSTPCFVVTGEDHQKQSPEIPLESLRTKALSMLTEAVQCSGAHIRDPVGGSVEFQFVPVLKLIGTLLVMGVFDDDDVRQILLLIDPSVFGEHSAGTEEGAEKEEVTQVEEKAVEAGEKAGKEAPVKGLLQTRLPESVKLQMCELLSYLCDCELQHRVEAIVAFGDIYVSKLQANQKFRYNELMQALNMSAALTARKTKEFRSPPQEQINMLLNFQLGENCPCPEEIREELYDFHEDLLLHCGVPLEEEEEEEEDTSWTGKLCALVYKIKGPPKPEKEQPTEEEERCPTTLKELISQTMICWAQEDQIQDSELVRMMFNLLRRQYDSIGELLQALRKTYTISHTSVSDTINLLAALGQIRSLLSVRMGKEEELLMINGLGDIMNNKVFYQHPNLMRVLGMHETVMEVMVNVLGTEKSQIAFPKMVASCCRFLCYFCRISRQNQKAMFEHLSYLLENSSVGLASPSMRGSTPLDVAASSVMDNNELALSLEEPDLEKVVTYLAGCGLQSCPMLLAKGYPDVGWNPIEGERYLSFLRFAVFVNSESVEENASVVVKLLIRRPECFGPALRGEGGNGLLAAMQGAIKISENPALDLPSQGYKREVTGDDEEEEEIVHMGNAIMSFYSALIDLLGRCAPEMHLIQTGKGEAIRIRSILRSLVPTEDLVGIISIPLKLPSLNKDGSVSEPDMAANFCPDHKAPMVLFLDRVYGIKDQTFLLHLLEVGFLPDLRASASLDTVSLSTTEAALALNRYICSAVLPLLTRCAPLFAGTEHCTSLIDSTLQTIYRLSKGRSLTKAQRDTIEECLLAICNHLRPSMLQQLLRRLVFDVPQLNEYCKMPLKLLTNHYEQCWKYYCLPSGWGSYGLAVEEELHLTEKLFWGIFDSLSHKKYDPDLFRMALPCLSAIAGALPPDYLDTRITATLEKQISVDADGNFDPKPINTMNFSLPEKLEYIVTKYAEHSHDKWACDKSQSGWKYGISLDENVKTHPLIRPFKTLTEKEKEIYRWPARESLKTMLAVGWTVERTKEGEALVQQRENEKLRSVSQANQGNSYSPAPLDLSNVVLSRELQGMVEVVAENYHNIWAKKKKLELESKGGGSHPLLVPYDTLTAKEKFKDREKAQDLFKFLQVNGIIVSRGMKDMELDASSMEKRFAYKFLKKILKYVDSAQEFIAHLEAIVSSGKTEKSPRDQEIKFFAKVLLPLVDQYFTSHCLYFLSSPLKPLSSSGYASHKEKEMVAGLFCKLAALVRHRISLFGSDSTTMVSCLHILAQTLDTRTVMKSGSELVKAGLRAFFENAAEDLEKTSENLKLGKFTHSRTQIKGVSQNINYTTVALLPILTSIFEHVTQHQFGMDLLLGDVQISCYHILCSLYSLGTGKNIYVERQRPALGECLASLAAAIPVAFLEPTLNRYNPLSVFNTKTPRERSILGMPDTVEDMCPDIPQLEGLMKEINDLAESGARYTEMPHVIEVILPMLCNYLSYWWERGPENLPPSTGPCCTKVTSEHLSLILGNILKIINNNLGIDEASWMKRIAVYAQPIISKARPDLLRSHFIPTLEKLKKKAVKTVQEEEQLKADGKGDTQEAELLILDEFAVLCRDLYAFYPMLIRYVDNNRSNWLKSPDADSDQLFRMVAEVFILWCKSHNFKREEQNFVIQNEINNLAFLTGDSKSKMSKSGGQDQERKKTKRRGDLYSIQTSLIVAALKKMLPIGLNMCTPGDQELISLAKSRYSHRDTDEEVREHLRNNLHLQEKSDDPAVKWQLNLYKDVLKSEEPFNPEKTVERVQRISAAVFHLEQVEQPLRSKKAVWHKLLSKQRKRAVVACFRMAPLYNLPRHKINNFFLSTFQQVWLEKVNEKTQYDRLIPILMKSPKVEEEEEEETEKQPDPLHQIILYFSRNALTERSKLEDDPLYTSYSSMMAKSCQSGEDEEEDEDKEKTFEEKEMEKQKTLYQQARLHERGAAEMVLQMISASKGEMSPMVVETLKLGIAILNGGNAGVQQKMLDYLKEKKDAGFFQSLSGLMQSCSVLDLNAFERQNKAEGLGMVTEEGTREKVLQNDEFTRDLFRFLQLLCEGHNSDFQNFLRTQMGNTTTVNVIISTVDYLLRLQESISDFYWYYSGKDIIDESGQHNFSKALAVTKQIFNSLTEYIQGPCIGNQQSLAHSRLWDAVVGFLHVFANMQMKLSQDSSQIELLKELLDLLQDMVVMLLSLLEGNVVNGTIGKQMVDTLVESSTNVEMILKFFDMFLKLKDLTSSDTFKEYDPDGKGIISKKEFQKAMEGQKQYTQSEIDFLLSCAEADENDMFNYVDFVDRFHEPAKDIGFNVAVLLTNLSEHMPNDSRLKCLLDPAESVLNYFEPYLGRIEIMGGAKKIERVYFEISESSRTQWEKPQVKESKRQFIFDVVNEGGEQEKMELFVNFCEDTIFEMQLASQISESDSADRPEEEEEDEDSSYVLEIAGEEEEDGSLEPASAFAMACASVKRNVTDFLKRATLKNLRKQYRNVKKMTAKELVKVLFSFFWMLFVGLFQLLFTILGGIFQILWSTVFGGGLVEGAKNIRVTKILGDMPDPTQFGIHDDTMEAERAEVMEPGITTELVHFIKGEKGDTDIMSDLFGLHPKKEGSLKHGPEVGLGDLSEIIGKDEPPTLESTVQKKRKAQAAEMKAANEAEGKVESEKADMEDGEKEDKDKEEEQAEYLWTEVTKKKKRRCGQKVEKPEAFTANFFKGLEIYQTKLLHYLARNFYNLRFLALFVAFAINFILLFYKVTEEPLEEETEDVANLWNSFNDEEEEEAMVFFVLQESTGYMAPTLRALAIIHTIISLVCVVGYYCLKVPLVVFKREKEIARKLEFDGLYITEQPSEDDIKGQWDRLVINTPSFPNNYWDKFVKRKVINKYGDLYGAERIAELLGLDKNALDFSPVEETKAEAASLVSWLSSIDMKYHIWKLGVVFTDNSFLYLAWYTTMSVLGHYNNFFFAAHLLDIAMGFKTLRTILSSVTHNGKQLVLTVGLLAVVVYLYTVVAFNFFRKFYNKSEDDDEPDMKCDDMMTCYLFHMYVGVRAGGGIGDEIEDPAGDPYEMYRIVFDITFFFFVIVILLAIIQGLIIDAFGELRDQQEQVREDMETKCFICGIGNDYFDTTPHGFETHTLQEHNLANYLFFLMYLINKDETEHTGQESYVWKMYQERCWDFFPAGDCFRKQYEDQLG

SEQ ID NO: 76247 - protein, 995 aa, Homo sapiens
  Payload ID: 15213
  Gene Symbol: SRBD1
  Gene Name: S1 RNA binding domain 1
  Uniprot ID: Q8N5C6
  ENSP ID: ENSP00000263736
MSSLPRRAKVQVQDVVLKDEFSSFSELSSASEEDDKEDSAWEPQKKVPRSRKQPPPKESKPKRMPRVKKNAPQISDGSEVVVVKEELNSSVAIADTALEDRKNKLDTVQTLKTAKTKQKCAAQPHTVRRTKKLKVEEETSKASNLEGESNSSETPSTSTVWGGTCKKEENDDDFTFGQSALKKIKTETYPQGQPVKFPANANSTKEEVEMNWDMVQVLSERTNIEPWVCANIIRLFNDDNTIPFIIRYRKELINNLDADSLREVQQTLEELRAVAKKVHSTIQKIKKEGKMSECLLKAMLNCKTFEELEHVSAPYKTGSKGTKAQRARQLGLEGAARALLEKPGELSLLSYIRPDVKGLSTLQDIEIGVQHILADMIAKDKDTLDFIRNLCQKRHVCIQSSLAKVSSKKVNEKDVDKFLLYQHFSCNIRNIHHHQILAINRGENLKVLTVKVNISDGVKDEFCRWCIQNRWRPRSFARPELMKILYNSLNDSFKRLIYPLLCREFRAKLTSDAEKESVMMFGRNLRQLLLTSPVPGRTLMGVDPGYKHGCKLAIISPTSQILHTDVVYLHCGQGFREAEKIKTLLLNFNCSTVVIGNGTACRETEAYFADLIMKNYFAPLDVVYCIVSEAGASIYSVSPEANKEMPGLDPNLRSAVSIARRVQDPLAELVKIEPKHIGVGMYQHDVSQTLLKATLDSVVEECVSFVGVDINICSEVLLRHIAGLNANRAKNIIEWREKNGPFINREQLKKVKGLGPKSFQQCAGFIRINQDYIRTFCSQQTETSGQIQGVAVTSSADVEVTNEKQGKKKSKTAVNVLLKPNPLDQTCIHPESYDIAMRFLSSIGGTLYEVGKPEMQQKINSFLEKEGMEKIAERLQTTVHTLQVIIDGLSQPESFDFRTDFDKPDFKRSIVCLEDLQIGTVLTGKVENATLFGIFVDIGVGKSGLIPIRNVTEAKLSKTKKRRSLGLGPGERVEVQVLNIDIPRSRITLDLIRVL

SEQ ID NO: 76248 - protein, 94 aa, Homo sapiens
  Payload ID: 15214
  Gene Symbol: S100A1
  Gene Name: S100 calcium binding protein A1
  Uniprot ID: P23297
  ENSP ID: ENSP00000292169
MGSELETAMETLINVFHAHSGKEGDKYKLSKKELKELLQTELSGFLDAQKDVDAVDKVMKELDENGDGEVDFQEYVVLVAALTVACNNFFWENS

SEQ ID NO: 76249 - protein, 53 aa, Homo sapiens
  Payload ID: 15214
  Gene Symbol: S100A1
  Gene Name: S100 calcium binding protein A1
  ENSP ID: ENSP00000357685
MGSELETAMETLINVFHAHSGKEGDKYKLSKKELKELLQTELSGFLDVKELML

SEQ ID NO: 76250 - protein, 147 aa, Homo sapiens
  Payload ID: 15214
  Gene Symbol: S100A1
  Gene Name: S100 calcium binding protein A1
  ENSP ID: ENSP00000357687
MEEPQTKTPSAEFPPYRAQPAQPATAPAATFATLAICPEPAPTSGPGQPCTAAMGSELETAMETLINVFHAHSGKEGDKYKLSKKELKELLQTELSGFLDAQKDVDAVDKVMKELDENGDGEVDFQEYVVLVAALTVACNNFFWENS

SEQ ID NO: 76251 - protein, 34 aa, Homo sapiens
  Payload ID: 15214
  Gene Symbol: S100A1
  Gene Name: S100 calcium binding protein A1
  ENSP ID: ENSP00000389708
MGSELETAMETLINVFHAHSGKEGDKYKLSKKEL

SEQ ID NO: 76252 - protein, 97 aa, Homo sapiens
  Payload ID: 15215
  Gene Symbol: S100A10
  Gene Name: S100 calcium binding protein A10
  Uniprot ID: P60903
  ENSP ID: ENSP00000357799
MPSQMEHAMETMMFTFHKFAGDKGYLTKEDLRVLMEKEFPGFLENQKDPLAVDKIMKDLDQCRDGKVGFQSFFSLIAGLTIACNDYFVVHMKQKGKK

SEQ ID NO: 76253 - protein, 97 aa, Homo sapiens; identical to SEQ ID NO: 76252
  Payload ID: 15215
  Gene Symbol: S100A10
  Gene Name: S100 calcium binding protein A10
  Uniprot ID: P60903
  ENSP ID: ENSP00000357801

SEQ ID NO: 76254 - protein, 105 aa, Homo sapiens
  Payload ID: 15216
  Gene Symbol: S100A11
  Gene Name: S100 calcium binding protein A11
  Uniprot ID: P31949
  ENSP ID: ENSP00000271638
MAKISSPTETERCIESLIAVFQKYAGKDGYNYTLSKTEFLSFMNTELAAFTKNQKDPGVLDRMMKKLDTNSDGQLDFSEFLNLIGGLAMACHDSFLKAVPSQKRT

SEQ ID NO: 76255 - protein, 92 aa, Homo sapiens
  Payload ID: 15217
  Gene Symbol: S100A12
  Gene Name: S100 calcium binding protein A12
  Uniprot ID: P80511
  ENSP ID: ENSP00000357726
MTKLEEHLEGIVNIFHQYSVRKGHFDTLSKGELKQLLTKELANTIKNIKDKAVIDEIFQGLDANQDEQVDFQEFISLVAIALKAAHYHTHKE

SEQ ID NO: 76256 - protein, 98 aa, Homo sapiens
  Payload ID: 15218
  Gene Symbol: S100A13
  Gene Name: S100 calcium binding protein A13
  Uniprot ID: Q99584
  ENSP ID: ENSP00000344822
MAAEPLTELEESIETVVTTFFTFARQEGRKDSLSVNEFKELVTQQLPHLLKDVGSLDEKMKSLDVNQDSELKFNEYWRLIGELAKEIRKKKDLKIRKK

SEQ ID NO: 76257 - protein, 98 aa, Homo sapiens; identical to SEQ ID NO: 76256
  Payload ID: 15218
  Gene Symbol: S100A13
  Gene Name: S100 calcium binding protein A13
  Uniprot ID: Q99584
  ENSP ID: ENSP00000376398

SEQ ID NO: 76258 - protein, 98 aa, Homo sapiens; identical to SEQ ID NO: 76256
  Payload ID: 15218
  Gene Symbol: S100A13
  Gene Name: S100 calcium binding protein A13
  Uniprot ID: Q99584
  ENSP ID: ENSP00000376399

SEQ ID NO: 76259 - protein, 98 aa, Homo sapiens; identical to SEQ ID NO: 76256
  Payload ID: 15218
  Gene Symbol: S100A13
  Gene Name: S100 calcium binding protein A13
  Uniprot ID: Q99584
  ENSP ID: ENSP00000392767

SEQ ID NO: 76260 - protein, 104 aa, Homo sapiens
  Payload ID: 15219
  Gene Symbol: S100A14
  Gene Name: S100 calcium binding protein A14
  Uniprot ID: Q9HCY8
  ENSP ID: ENSP00000340463
MGQCRSANAEDAQEFSDVERAIETLIKNFHQYSVEGGKETLTPSELRDLVTQQLPHLMPSNCGLEEKIANLGSCNDSKLEFRSFWELIGEAAKSVKLERPVRGH

SEQ ID NO: 76261 - protein, 104 aa, Homo sapiens; identical to SEQ ID NO: 76260
  Payload ID: 15219
  Gene Symbol: S100A14
  Gene Name: S100 calcium binding protein A14
  Uniprot ID: Q9HCY8
  ENSP ID: ENSP00000357690

SEQ ID NO: 76262 - protein, 104 aa, Homo sapiens; identical to SEQ ID NO: 76260
  Payload ID: 15219
  Gene Symbol: S100A14
  Gene Name: S100 calcium binding protein A14
  Uniprot ID: Q9HCY8
  ENSP ID: ENSP00000357691

SEQ ID NO: 76263 - protein, 104 aa, Homo sapiens; identical to SEQ ID NO: 76260
  Payload ID: 15219
  Gene Symbol: S100A14
  Gene Name: S100 calcium binding protein A14
  Uniprot ID: Q9HCY8
  ENSP ID: ENSP00000420296

SEQ ID NO: 76264 - protein, 103 aa, Homo sapiens
  Payload ID: 15220
  Gene Symbol: S100A16
  Gene Name: S100 calcium binding protein A16
  Uniprot ID: Q96FQ6
  ENSP ID: ENSP00000357692
MSDCYTELEKAVIVLVENFYKYVSKYSLVKNKISKSSFREMLQKELNHMLSDTGNRKAADKLIQNLDANHDGRISFDEYWTLIGGITGPIAKLIHEQEQQSSS

SEQ ID NO: 76265 - protein, 103 aa, Homo sapiens; identical to SEQ ID NO: 76264
  Payload ID: 15220
  Gene Symbol: S100A16
  Gene Name: S100 calcium binding protein A16
  Uniprot ID: Q96FQ6
  ENSP ID: ENSP00000357693

SEQ ID NO: 76266 - protein, 103 aa, Homo sapiens; identical to SEQ ID NO: 76264
  Payload ID: 15220
  Gene Symbol: S100A16
  Gene Name: S100 calcium binding protein A16
  Uniprot ID: Q96FQ6
  ENSP ID: ENSP00000357694

SEQ ID NO: 76267 - protein, 103 aa, Homo sapiens; identical to SEQ ID NO: 76264
  Payload ID: 15220
  Gene Symbol: S100A16
  Gene Name: S100 calcium binding protein A16
  Uniprot ID: Q96FQ6
  ENSP ID: ENSP00000357695

SEQ ID NO: 76268 - protein, 95 aa, Homo sapiens
  Payload ID: 15221
  Gene Symbol: S100A2
  Gene Name: S100 calcium binding protein A2
  ENSP ID: ENSP00000357696
MCSSLEQALAVLVTTFHKYSCQEGDKFKLSKGEMKELLHKELPSFVGHSREPCAVRAFRVHLFNPVIGDLRNQSPEGKSDCPKITQHWRKWMRRG

SEQ ID NO: 76269 - protein, 97 aa, Homo sapiens
  Payload ID: 15221
  Gene Symbol: S100A2
  Gene Name: S100 calcium binding protein A2
  Uniprot ID: P29034
  ENSP ID: ENSP00000357697
MCSSLEQALAVLVTTFHKYSCQEGDKFKLSKGEMKELLHKELPSFVGEKVDEEGLKKLMGSLDENSDQQVDFQEYAVFLALITVMCNDFFQGCPDRP

SEQ ID NO: 76270 - protein, 97 aa, Homo sapiens; identical to SEQ ID NO: 76269
  Payload ID: 15221
  Gene Symbol: S100A2
  Gene Name: S100 calcium binding protein A2
  Uniprot ID: P29034
  ENSP ID: ENSP00000357698

SEQ ID NO: 76271 - protein, 97 aa, Homo sapiens; identical to SEQ ID NO: 76269
  Payload ID: 15221
  Gene Symbol: S100A2
  Gene Name: S100 calcium binding protein A2
  Uniprot ID: P29034
  ENSP ID: ENSP00000357699

SEQ ID NO: 76272 - protein, 97 aa, Homo sapiens; identical to SEQ ID NO: 76269
  Payload ID: 15221
  Gene Symbol: S100A2
  Gene Name: S100 calcium binding protein A2
  Uniprot ID: P29034
  ENSP ID: ENSP00000473260

SEQ ID NO: 76273 - protein, 64 aa, Homo sapiens
  Payload ID: 15221
  Gene Symbol: S100A2
  Gene Name: S100 calcium binding protein A2
  ENSP ID: ENSP00000473489
MKELLHKELPSFVGEKVDEEGLKKLMGSLDENSDQQVDFQEYAVFLALITVMCNDFFQGCPDRP

SEQ ID NO: 76274 - protein, 101 aa, Homo sapiens
  Payload ID: 15222
  Gene Symbol: S100A3
  Gene Name: S100 calcium binding protein A3
  Uniprot ID: P33764
  ENSP ID: ENSP00000357701
MARPLEQAVAAIVCTFQEYAGRCGDKYKLCQAELKELLQKELATWTPTEFRECDYNKFMSVLDTNKDCEVDFVEYVRSLACLCLYCHEYFKDCPSEPPCSQ

SEQ ID NO: 76275 - protein, 101 aa, Homo sapiens; identical to SEQ ID NO: 76274
  Payload ID: 15222
  Gene Symbol: S100A3
  Gene Name: S100 calcium binding protein A3
  Uniprot ID: P33764
  ENSP ID: ENSP00000357702

SEQ ID NO: 76276 - protein, 101 aa, Homo sapiens
  Payload ID: 15223
  Gene Symbol: S100A4
  Gene Name: S100 calcium binding protein A4
  Uniprot ID: P26447
  ENSP ID: ENSP00000346294
MACPLEKALDVMVSTFHKYSGKEGDKFKLNKSELKELLTRELPSFLGKRTDEAAFQKLMSNLDSNRDNEVDFQEYCVFLSCIAMMCNEFFEGFPDKQPRKK

SEQ ID NO: 76277 - protein, 101 aa, Homo sapiens; identical to SEQ ID NO: 76276
  Payload ID: 15223
  Gene Symbol: S100A4
  Gene Name: S100 calcium binding protein A4
  Uniprot ID: P26447
  ENSP ID: ENSP00000357703

SEQ ID NO: 76278 - protein, 101 aa, Homo sapiens; identical to SEQ ID NO: 76276
  Payload ID: 15223
  Gene Symbol: S100A4
  Gene Name: S100 calcium binding protein A4
  Uniprot ID: P26447
  ENSP ID: ENSP00000357704

SEQ ID NO: 76279 - protein, 101 aa, Homo sapiens; identical to SEQ ID NO: 76276
  Payload ID: 15223
  Gene Symbol: S100A4
  Gene Name: S100 calcium binding protein A4
  Uniprot ID: P26447
  ENSP ID: ENSP00000357705

SEQ ID NO: 76280 - protein, 92 aa, Homo sapiens
  Payload ID: 15224
  Gene Symbol: S100A5
  Gene Name: S100 calcium binding protein A5
  Uniprot ID: P33763
  ENSP ID: ENSP00000357706
METPLEKALTTMVTTFHKYSGREGSKLTLSRKELKELIKKELCLGEMKESSIDDLMKSLDKNSDQEIDFKEYSVFLTMLCMAYNDFFLEDNK

SEQ ID NO: 76281 - protein, 92 aa, Homo sapiens; identical to SEQ ID NO: 76280
  Payload ID: 15224
  Gene Symbol: S100A5
  Gene Name: S100 calcium binding protein A5
  Uniprot ID: P33763
  ENSP ID: ENSP00000357707

SEQ ID NO: 76282 - protein, 90 aa, Homo sapiens
  Payload ID: 15225
  Gene Symbol: S100A6
  Gene Name: S100 calcium binding protein A6
  Uniprot ID: P06703
  ENSP ID: ENSP00000357708
MACPLDQAIGLLVAIFHKYSGREGDKHTLSKKELKELIQKELTIGSKLQDAEIARLMEDLDRNKDQEVNFQEYVTFLGALALIYNEALKG

SEQ ID NO: 76283 - protein, 90 aa, Homo sapiens; identical to SEQ ID NO: 76282
  Payload ID: 15225
  Gene Symbol: S100A6
  Gene Name: S100 calcium binding protein A6
  Uniprot ID: P06703
  ENSP ID: ENSP00000357709

SEQ ID NO: 76284 - protein, 85 aa, Homo sapiens
  Payload ID: 15225
  Gene Symbol: S100A6
  Gene Name: S100 calcium binding protein A6
  ENSP ID: ENSP00000473547
MACPLDQAIGLLVAIFHKYSGREGDKHTLSKKELKELIQKELTIGSKLQDAEIARLMEDLDRNKDQEVNFQEYVTFLGALALIYN

SEQ ID NO: 76285 - protein, 90 aa, Homo sapiens; identical to SEQ ID NO: 76282
  Payload ID: 15225
  Gene Symbol: S100A6
  Gene Name: S100 calcium binding protein A6
  Uniprot ID: P06703
  ENSP ID: ENSP00000473589

SEQ ID NO: 76286 - protein, 101 aa, Homo sapiens
  Payload ID: 15226
  Gene Symbol: S100A7
  Gene Name: S100 calcium binding protein A7
  Uniprot ID: P31151
  ENSP ID: ENSP00000357711
MSNTQAERSIIGMIDMFHKYTRRDDKIEKPSLLTMMKENFPNFLSACDKKGTNYLADVFEKKDKNEDKKIDFSEFLSLLGDIATDYHKQSHGAAPCSGGSQ

SEQ ID NO: 76287 - protein, 101 aa, Homo sapiens; identical to SEQ ID NO: 76286
  Payload ID: 15226
  Gene Symbol: S100A7
  Gene Name: S100 calcium binding protein A7
  Uniprot ID: P31151
  ENSP ID: ENSP00000357712

SEQ ID NO: 76288 - protein, 101 aa, Homo sapiens
  Payload ID: 15227
  Gene Symbol: S100A7A
  Gene Name: S100 calcium binding protein A7A
  Uniprot ID: Q86SG5
  ENSP ID: ENSP00000329008
MSNTQAERSIIGMIDMFHKYTGRDGKIEKPSLLTMMKENFPNFLSACDKKGIHYLATVFEKKDKNEDKKIDFSEFLSLLGDIAADYHKQSHGAAPCSGGSQ

SEQ ID NO: 76289 - protein, 101 aa, Homo sapiens; identical to SEQ ID NO: 76288
  Payload ID: 15227
  Gene Symbol: S100A7A
  Gene Name: S100 calcium binding protein A7A
  Uniprot ID: Q86SG5
  ENSP ID: ENSP00000357717

SEQ ID NO: 76290 - protein, 101 aa, Homo sapiens; identical to SEQ ID NO: 76288
  Payload ID: 15227
  Gene Symbol: S100A7A
  Gene Name: S100 calcium binding protein A7A
  Uniprot ID: Q86SG5
  ENSP ID: ENSP00000357718

SEQ ID NO: 76291 - protein, 112 aa, Homo sapiens
  Payload ID: 15228
  Gene Symbol: S100A7L2
  Gene Name: S100 calcium binding protein A7-like 2
  Uniprot ID: Q5SY68
  ENSP ID: ENSP00000357714
MLPSSGFLKAKMNIPLGEKVMLDIVAMFRQYSGDDGRMDMPGLVNLMKENFPNFLSGCEKSDMDYLSNALEKKDDNKDKKVNYSEFLSLLGDITIDHHKIMHGVAPCSGGSQ

SEQ ID NO: 76292 - protein, 93 aa, Homo sapiens
  Payload ID: 15229
  Gene Symbol: S100A8
  Gene Name: S100 calcium binding protein A8
  Uniprot ID: P05109
  ENSP ID: ENSP00000357721
MLTELEKALNSIIDVYHKYSLIKGNFHAVYRDDLKKLLETECPQYIRKKGADVWFKELDINTDGAVNFQEFLILVIKMGVAAHKKSHEESHKE

SEQ ID NO: 76293 - protein, 93 aa, Homo sapiens; identical to SEQ ID NO: 76292
  Payload ID: 15229
  Gene Symbol: S100A8
  Gene Name: S100 calcium binding protein A8
  Uniprot ID: P05109
  ENSP ID: ENSP00000357722

SEQ ID NO: 76294 - protein, 114 aa, Homo sapiens
  Payload ID: 15230
  Gene Symbol: S100A9
  Gene Name: S100 calcium binding protein A9
  Uniprot ID: P06702
  ENSP ID: ENSP00000357727
MTCKMSQLERNIETIINTFHQYSVKLGHPDTLNQGEFKELVRKDLQNFLKKENKNEKVIEHIMEDLDTNADKQLSFEEFIMLMARLTWASHEKMHEGDEGPGHHHKPGLGEGTP

SEQ ID NO: 76295 - protein, 92 aa, Homo sapiens
  Payload ID: 15231
  Gene Symbol: S100B
  Gene Name: S100 calcium binding protein B
  Uniprot ID: P04271
  ENSP ID: ENSP00000291700
MSELEKAMVALIDVFHQYSGREGDKHKLKKSELKELINNELSHFLEEIKEQEVVDKVMETLDNDGDGECDFQEFMAFVAMVTTACHEFFEHE

SEQ ID NO: 76296 - protein, 94 aa, Homo sapiens
  Payload ID: 15231
  Gene Symbol: S100B
  Gene Name: S100 calcium binding protein B
  ENSP ID: ENSP00000356038
MSELEKAMVALIDVFHQYSGREGDKHKLKKSELKELINNELSHFLERWSLPMLPRLVSNFLCSSYPPALASQSAGITGNQRAGGCGQSHGNTGQ

SEQ ID NO: 76297 - protein, 92 aa, Homo sapiens; identical to SEQ ID NO: 76295
  Payload ID: 15231
  Gene Symbol: S100B
  Gene Name: S100 calcium binding protein B
  Uniprot ID: P04271
  ENSP ID: ENSP00000380769

SEQ ID NO: 76298 - protein, 79 aa, Homo sapiens
  Payload ID: 15232
  Gene Symbol: S100G
  Gene Name: S100 calcium binding protein G
  Uniprot ID: P29377
  ENSP ID: ENSP00000369547
MSTKKSPEELKRIFEKYAAKEGDPDQLSKDELKLLIQAEFPSLLKGPNTLDDLFQELDKNGDGEVSFEEFQVLVKKISQ

SEQ ID NO: 76299 - protein, 95 aa, Homo sapiens
  Payload ID: 15233
  Gene Symbol: S100P
  Gene Name: S100 calcium binding protein P
  Uniprot ID: P25815
  ENSP ID: ENSP00000296370
MTELETAMGMIIDVFSRYSGSEGSTQTLTKGELKVLMEKELPGFLQSGKDKDAVDKLLKDLDANGDAQVDFSEFIVFVAAITSACHKYFEKAGLK

SEQ ID NO: 76300 - protein, 99 aa, Homo sapiens
  Payload ID: 15234
  Gene Symbol: S100Z
  Gene Name: S100 calcium binding protein Z
  Uniprot ID: Q8WXG8
  ENSP ID: ENSP00000320430
MPTQLEMAMDTMIRIFHRYSGKERKRFKLSKGELKLLLQRELTEFLSCQKETQLVDKIVQDLDANKDNEVDFNEFVVMVAALTVACNDYFVEQLKKKGK

SEQ ID NO: 76301 - protein, 99 aa, Homo sapiens; identical to SEQ ID NO: 76300
  Payload ID: 15234
  Gene Symbol: S100Z
  Gene Name: S100 calcium binding protein Z
  Uniprot ID: Q8WXG8
  ENSP ID: ENSP00000426768

SEQ ID NO: 76302 - protein, 99 aa, Homo sapiens; identical to SEQ ID NO: 76300
  Payload ID: 15234
  Gene Symbol: S100Z
  Gene Name: S100 calcium binding protein Z
  Uniprot ID: Q8WXG8
  ENSP ID: ENSP00000483535

SEQ ID NO: 76303 - protein, 408 aa, Homo sapiens
  Payload ID: 15235
  Gene Symbol: S100PBP
  Gene Name: S100P binding protein
  Uniprot ID: Q96BU1
  ENSP ID: ENSP00000362574
MMCSRVPSEQSSGTSLLPKDGAPFSWDSLDEDGLDDSLLELSEGEEDDGDVNYTEEEIDALLKEDDPSYEQSSGEDDGGHVEKGERGSQILLDTPREKNSSYSLGPVAETPDLFKLPQLSTSSGHGPAHTKPLNRRSVLEKNLIKVTVAPFNPTVCDALLDKDETDSSKDTEKLSSLGEEMREDGLSPNESKLCTESEGISPNNSAWNGPQLSSSNNNFQQTVSDKNMPDSENPTSVFSRISDHSETPNMELSCRNGGSHKSSCEMRSLVVSTSSNKQDVLNKDSGKMKGHERRLGKVIPVLQTKTRTNVPTFSQSNLEQQKQLYLRSVIAHIEDPEDTNQGISGELCALMDQVHHMQHSKWQHPSDLTTRNYARRQKHLQRYSLTQWVDRNMRSHHRFQRLPDFSYS

SEQ ID NO: 76304 - protein, 408 aa, Homo sapiens; identical to SEQ ID NO: 76303
  Payload ID: 15235
  Gene Symbol: S100PBP
  Gene Name: S100P binding protein
  Uniprot ID: Q96BU1
  ENSP ID: ENSP00000362575

SEQ ID NO: 76305 - protein, 146 aa, Homo sapiens
  Payload ID: 15235
  Gene Symbol: S100PBP
  Gene Name: S100P binding protein
  ENSP ID: ENSP00000431432
MMCSRVPSEQSSGTSLLPKDGAPFSWDSLDEDGLDDSLLELSEGEEDDGDVNYTEEEIDALLKEDDPSYEQSSGEDDGGHVEKGERGSQILLDTPREKNSSYSLGPVAETPDLFKLPQLSTSSGHGPAHTKPLNRRSVLEKNLIKV

SEQ ID NO: 76306 - protein, 41 aa, Homo sapiens
  Payload ID: 15235
  Gene Symbol: S100PBP
  Gene Name: S100P binding protein
  ENSP ID: ENSP00000431921
MMCSRVPSEQSSGTSLLPKDGAPFSWDSLDEDGLDDSLLEL

SEQ ID NO: 76307 - protein, 120 aa, Homo sapiens
  Payload ID: 15235
  Gene Symbol: S100PBP
  Gene Name: S100P binding protein
  ENSP ID: ENSP00000431940
MMCSRVPSEQSSGTSLLPKDGAPFSWDSLDEDGLDDSLLELSEGEEDDGDVNYTEEEIDALLKEDDPSYEQSSGEDDGGHVEKGERGSQILLDTPREKNSSYSLGPVAETPDLFKLPQLS

SEQ ID NO: 76308 - protein, 5 aa, Homo sapiens
  Payload ID: 15235
  Gene Symbol: S100PBP
  Gene Name: S100P binding protein
  ENSP ID: ENSP00000433456
MMCSR

SEQ ID NO: 76309 - protein, 130 aa, Homo sapiens
  Payload ID: 15235
  Gene Symbol: S100PBP
  Gene Name: S100P binding protein
  ENSP ID: ENSP00000434933
MMCSRVPSEQSSGTSLLPKDGAPFSWDSLDEDGLDDSLLELSEGEEDDGDVNYTEEEIDALLKEDDPSYEQSSGEDDGGHVEKGERGSQILLDTPREKNSSYSLGPVAETPDLFKLPQLSTSSGHGPAHT

SEQ ID NO: 76310 - protein, 171 aa, Homo sapiens
  Payload ID: 15235
  Gene Symbol: S100PBP
  Gene Name: S100P binding protein
  ENSP ID: ENSP00000435856
MMCSRVPSEQSSGTSLLPKDGAPFSWDSLDEDGLDDSLLELSEGEEDDGDVNYTEEEIDALLKEDDPSYEQSSGEDDGGHVEKGERGSQILLDTPREKNSSYSLGPVAETPDLFKLPQLSTSSGHGPAHTKPLNRRSVLEKNLIKVTVAPFNPTVCDALLDKDETDSSKDT

SEQ ID NO: 76311 - protein, 208 aa, Homo sapiens
  Payload ID: 15236
  Gene Symbol: SAA2-SAA4
  Gene Name: SAA2-SAA4 readthrough
  ENSP ID: ENSP00000485552
MKLLTGLVFCSLVLSVSSRSFFSFLGEAFDGARDMWRAYSDMREANYIGSDKYFHARGNYDAAKRGPGGAWAAEVISTMRLFTGIVFCSLVMGVTSESWRSFFKEALQGVGDMGRAYWDIMISNHQNSNRYLYARGNYDAAQRGPGGVWAAKLISRSRVYLQGLIDCYLFGNSSTVLEDSKSNEKAEEWGRSGKDPDRFRPDGLPKKY

SEQ ID NO: 76312 - protein, 587 aa, Homo sapiens
  Payload ID: 15237
  Gene Symbol: SACM1L
  Gene Name: SAC1 suppressor of actin mutations 1-like (yeast)
  Uniprot ID: Q9NTJ5
  ENSP ID: ENSP00000373713
MATAAYEQLKLHITPEKFYVEACDDGADDVLTIDRVSTEVTLAVKKDVPPSAVTRPIFGILGTIHLVAGNYLIVITKKIKVGEFFSHVVWKATDFDVLSYKKTMLHLTDIQLQDNKTFLAMLNHVLNVDGFYFSTTYDLTHTLQRLSNTSPEFQEMSLLERADQRFVWNGHLLRELSAQPEVHRFALPVLHGFITMHSCSINGKYFDWILISRRSCFRAGVRYYVRGIDSEGHAANFVETEQIVHYNGSKASFVQTRGSIPVFWSQRPNLKYKPLPQISKVANHMDGFQRHFDSQVIIYGKQVIINLINQKGSEKPLEQTFATMVSSLGSGMMRYIAFDFHKECKNMRWDRLSILLDQVAEMQDELSYFLVDSAGQVVANQEGVFRSNCMDCLDRTNVIQSLLARRSLQAQLQRLGVLHVGQKLEEQDEFEKIYKNAWADNANACAKQYAGTGALKTDFTRTGKRTHLGLIMDGWNSMIRYYKNNFSDGFRQDSIDLFLGNYSVDELESHSPLSVPRDWKFLALPIIMVVAFSMCIICLLMAGDTWTETLAYVLFWGVASIGTFFIILYNGKDFVDAPRLVQKEKID

SEQ ID NO: 76313 - protein, 287 aa, Homo sapiens
  Payload ID: 15237
  Gene Symbol: SACM1L
  Gene Name: SAC1 suppressor of actin mutations 1-like (yeast)
  ENSP ID: ENSP00000389975
MLHLTDIQLQDNKTFLAMLNHVLNVDGFYFSTTYDLTHTLQRLSNTSPEFQEMSLLERADQRFVWNGHLLRELSAQPEVHRFALPVLHGFITMHSCSINGKYFDWILISRRSCFRAGVRYYVRGIDSEGHAANFVETEQIVHYNGSKASFVQTRGSIPVFWSQRPNLKYKPLPQISKVANHMDGFQRHFDSQVIIYGKQVIINLINQKGSEKPLEQTFATMVSSLGSGMMRYIAFDFHKECKNMRWDRLSILLDQVAEMQDELSGLCWPGGGKPGRRVPKQLHGLSR

SEQ ID NO: 76314 - protein, 484 aa, Homo sapiens
  Payload ID: 15237
  Gene Symbol: SACM1L
  Gene Name: SAC1 suppressor of actin mutations 1-like (yeast)
  ENSP ID: ENSP00000396387
MLHLTDIQLQDNKTFLAMLNHVLNVDGFYFSTTYDLTHTLQRLSNTSPEFQEMSLLERADQRFVWNGHLLRELSAQPEVHRFALPVLHGFITMHSCSINGKYFDWILISRRSCFRAGVRYYVRGIDSEGHAANFVETEQIVHYNGSKASFVQTRGSIPVFWSQRPNLKYKPLPQISKVANHMDGFQRHFDSQVIIYGKQVIINLINQKGSEKPLEQTFATMVSSLGSGMMRYIAFDFHKECKNMRWDRLSILLDQVAEMQDELSYFLVDSAGQVVANQEGVFRSNCMDCLDRTNVIQSLLARRSLQAQLQRLGVLHVGQKLEEQDEFEKIYKNAWADNANACAKQYAGTGALKTDFTRTGKRTHLGLIMDGWNSMIRYYKNNFSDGFRQDSIDLFLGNYSVDELESHSPLSVPRDWKFLALPIIMVVAFSMCIICLLMAGDTWTETLAYVLFWGVASIGTFFIILYNGKDFVDAPRLVQKEKID

SEQ ID NO: 76315 - protein, 71 aa, Homo sapiens
  Payload ID: 15237
  Gene Symbol: SACM1L
  Gene Name: SAC1 suppressor of actin mutations 1-like (yeast)
  ENSP ID: ENSP00000406263
MATAAYEQLKLHITPEKFYVEACDDGADDVLTIDRVSTEVTLAVKKDVPPSAVTRPIFGILGTIHLVAVTR

SEQ ID NO: 76316 - protein, 112 aa, Homo sapiens
  Payload ID: 15237
  Gene Symbol: SACM1L
  Gene Name: SAC1 suppressor of actin mutations 1-like (yeast)
  ENSP ID: ENSP00000411966
MWKLVMMEQMTYLPLTVCPQRLPLQSRKMFLLQLSQDQYLVYWAQSIWWQLQDNKTFLAMLNHVLNVDGFYFSTTYDLTHTLQRLSNTSPEFQEMSLLERADQRFVWNGHLL

SEQ ID NO: 76317 - protein, 187 aa, Homo sapiens
  Payload ID: 15237
  Gene Symbol: SACM1L
  Gene Name: SAC1 suppressor of actin mutations 1-like (yeast)
  ENSP ID: ENSP00000412883
MVSSLGSGMMRYIAFDFHKECKNMRWDRLSILLDQVAEMQDELSYFLVDSAGQVVANQEGVFRSNCMDCLDRTNVIQSLLARRSLQAQLQRLGVLHVGQKLEEQDEFEKIYKNAWADNANACAKQYAGTGALKTDFTRTGKRTHLGLIMDGWNSMIRYYKNNFSDGFRQDSIDLFLGNYSVDELESH

SEQ ID NO: 76318 - protein, 358 aa, Homo sapiens
  Payload ID: 15238
  Gene Symbol: SAC3D1
  Gene Name: SAC3 domain containing 1
  ENSP ID: ENSP00000381824
MPGCELPVGTCPDMCPAAERAQREREHRLHRLEVVPGCRQDPPRADPQRAVKEYSRPAAGKPRPPPSQLRPPSVLLATVRYLAGEVAESADIARAEVASFVADRLRAVLLDLALQGAGDAEAAVVLEAALATLLTVVARLGPDAARGPADPVLLQAQVQEGFGSLRRCYARGAGPHPRQPAFQGLFLLYNLGSVEALHEVLQLPAALRACPPLRKALAVDAAFREGNAARLFRLLQTLPYLPSCAVQCHVGHARREALARFARAFSTPKGQTLPLGFMVNLLALDGLREARDLCQAHGLPLDGEERVVFLRGRYVEEGLPPASTCKVLVESKLRGRTLEEVVMAEEEDEGTDRPGSPA

SEQ ID NO: 76319 - protein, 358 aa, Homo sapiens; identical to SEQ ID NO: 76318
  Payload ID: 15238
  Gene Symbol: SAC3D1
  Gene Name: SAC3 domain containing 1
  ENSP ID: ENSP00000436649

SEQ ID NO: 76320 - protein, 239 aa, Homo sapiens
  Payload ID: 15238
  Gene Symbol: SAC3D1
  Gene Name: SAC3 domain containing 1
  ENSP ID: ENSP00000436704
CRPRDAERPPSPRSPLMPGCELPVGTCPDMCPAAERAQREREHRLHRLEVVPGCRQDPPRADPQRAVKEYSRPAAGKPRPPPSQLRPPSVLLATVRYLAGEVAESADIARAEVASFVADRLRAVLLDLALQGAGDAEAAVVLEAALATLLTVVARLGPDAARGPADPVLLQAQVQEGFGSLRRCYARGAGPHPRQPAFQGLFLLYNLEMGSRMLPLEFLGSSDPPAPPSQVAGCGHHAQ

SEQ ID NO: 76321 - protein, 404 aa, Homo sapiens
  Payload ID: 15238
  Gene Symbol: SAC3D1
  Gene Name: SAC3 domain containing 1
  Uniprot ID: A6NKF1
  ENSP ID: ENSP00000482039
MAGRRAQTGSAPPRPAAPHPRPASRAFPQHCRPRDAERPPSPRSPLMPGCELPVGTCPDMCPAAERAQREREHRLHRLEVVPGCRQDPPRADPQRAVKEYSRPAAGKPRPPPSQLRPPSVLLATVRYLAGEVAESADIARAEVASFVADRLRAVLLDLALQGAGDAEAAVVLEAALATLLTVVARLGPDAARGPADPVLLQAQVQEGFGSLRRCYARGAGPHPRQPAFQGLFLLYNLGSVEALHEVLQLPAALRACPPLRKALAVDAAFREGNAARLFRLLQTLPYLPSCAVQCHVGHARREALARFARAFSTPKGQTLPLGFMVNLLALDGLREARDLCQAHGLPLDGEERVVFLRGRYVEEGLPPASTCKVLVESKLRGRTLEEVVMAEEEDEGTDRPGSPA

SEQ ID NO: 76322 - protein, 429 aa, Homo sapiens
  Payload ID: 15239
  Gene Symbol: SCCPDH
  Gene Name: saccharopine dehydrogenase (putative)
  Uniprot ID: Q8NBX0
  ENSP ID: ENSP00000355467
MATEQRPFHLVVFGASGFTGQFVTEEVAREQVDPERSSRLPWAVAGRSREKLQRVLEKAALKLGRPTLSSEVGIIICDIANPASLDEMAKQATVVLNCVGPYRFYGEPVIKACIENGASCIDISGEPQFLELMQLKYHEKAADKGVYIIGSSGFDSIPADLGVIYTRNKMNGTLTAVESFLTIHSGPEGLSIHDGTWKSAIYGFGDQSNLRKLRNVSNLKPVPLIGPKLKRRWPISYCRELKGYSIPFMGSDVSVVRRTQRYLYENLEESPVQYAAYVTVGGITSVIKLMFAGLFFLFFVRFGIGRQLLIKFPWFFSFGYFSKQGPTQKQIDAASFTLTFFGQGYSQGTGTDKNKPNIKICTQVKGPEAGYVATPIAMVQAAMTLLSDASHLPKAGGVFTPGAAFSKTKLIDRLNKHGIEFSVISSSEV

SEQ ID NO: 76323 - protein, 4579 aa, Homo sapiens
  Payload ID: 15240
  Gene Symbol: SACS
  Gene Name: sacsin molecular chaperone
  Uniprot ID: Q9NZJ4
  ENSP ID: ENSP00000371729
METKENRWVPVTVLPGCVGCRTVAALASWTVRDVKERIFAETGFPVSEQRLWRGGRELSDWIKIGDLTSKNCHLFVNLQSKGLKGGGRFGQTTPPLVDFLKDILRRYPEGGQILKELIQNAEDAGATEVKFLYDETQYGTETLWSKDMAPYQGPALYVYNNAVFTPEDWHGIQEIARSRKKDDPLKVGRFGIGFNSVYHITDVPCIFSGDQIGMLDPHQTLFGPHESGQCWNLKDDSKEISELSDQFAPFVGIFGSTKETFINGNFPGTFFRFPLRLQPSQLSSNLYNKQKVLELFESFRADADTVLLFLKSVQDVSLYVREADGTEKLVFRVTSSESKALKHERPNSIKILGTAISNYCKKTPSNNITCVTYHVNIVLEEESTKDAQKTSWLVCNSVGGRGISSKLDSLADELKFVPIIGIAMPLSSRDDEAKGATSDFSGKAFCFLPLPPGEESSTGLPVHISGFFGLTDNRRSIKWRELDQWRDPAALWNEFLVMNVVPKAYATLILDSIKRLEMEKSSDFPLSVDVIYKLWPEASKVKVHWQPVLEPLFSELLQNAVIYSISCDWVRLEQVYFSELDENLEYTKTVLNYLQSSGKQIAKVPGNVDAAVQLTAASGTTPVRKVTPAWVRQVLRKCAHLGCAEEKLHLLEFVLSDQAYSELLGLELLPLQNGNFVPFSSSVSDQDVIYITSAEYPRSLFPSLEGRFILDNLKPHLVAALKEAAQTRGRPCTQLQLLNPERFARLIKEVMNTFWPGRELIVQWYPFDENRNHPSVSWLKMVWKNLYIHFSEDLTLFDEMPLIPRTILEEGQTCVELIRLRIPSLVILDDESEAQLPEFLADIVQKLGGFVLKKLDASIQHPLIKKYIHSPLPSAVLQIMEKMPLQKLCNQITSLLPTHKDALRKFLASLTDSSEKEKRIIQELAIFKRINHSSDQGISSYTKLKGCKVLHHTAKLPADLRLSISVIDSSDEATIRLANMLKIEQLKTTSCLKLVLKDIENAFYSHEEVTQLMLWVLENLSSLKNENPNVLEWLTPLKFIQISQEQMVSAGELFDPDIEVLKDLFCNEEGTYFPPSVFTSPDILHSLRQIGLKNEASLKEKDVVQVAKKIEALQVGACPDQDVLLKKAKTLLLVLNKNHTLLQSSEGKMTLKKIKWVPACKERPPNYPGSLVWKGDLCNLCAPPDMCDVGHAILIGSSLPLVESIHVNLEKALGIFTKPSLSAVLKHFKIVVDWYSSKTFSDEDYYQFQHILLEIYGFMHDHLNEGKDSFRALKFPWVWTGKKFCPLAQAVIKPIHDLDLQPYLHNVPKTMAKFHQLFKVCGSIEELTSDHISMVIQKIYLKSDQDLSEQESKQNLHLMLNIIRWLYSNQIPASPNTPVPIHHSKNPSKLIMKPIHECCYCDIKVDDLNDLLEDSVEPIILVHEDIPMKTAEWLKVPCLSTRLINPENMGFEQSGQREPLTVRIKNILEEYPSVSDIFKELLQNADDANATECSFLIDMRRNMDIRENLLDPGMAACHGPALWSFNNSQFSDSDFVNITRLGESLKRGEVDKVGKFGLGFNSVYHITDIPIIMSREFMIMFDPNINHISKHIKDKSNPGIKINWSKQQKRLRKFPNQFKPFIDVFGCQLPLTVEAPYSYNGTLFRLSFRTQQEAKVSEVSSTCYNTADIYSLVDEFSLCGHRLIIFTQSVKSMYLKYLKIEETNPSLAQDTVIIKKKSCSSKALNTPVLSVLKEAAKLMKTCSSSNKKLPSDEPKSSCILQITVEEFHHVFRRIADLQSPLFRGPDDDPAALFEMAKSGQSKKPSDELSQKTVECTTWLLCTCMDTGEALKFSLSESGRRLGLVPCGAVGVQLSEIQDQKWTVKPHIGEVFCYLPLRIKTGLPVHINGCFAVTSNRKEIWKTDTKGRWNTTFMRHVIVKAYLQVLSVLRDLATSGELMDYTYYAVWPDPDLVHDDFSVICQGFYEDIAHGKGKELTKVFSDGSTWVSMKNVRFLDDSILKRRDVGSAAFKIFLKYLKKTGSKNLCAVELPSSVKLGFEEAGCKQILLENTFSEKQFFSEVFFPNIQEIEAELRDPLMIFVLNEKVDEFSGVLRVTPCIPCSLEGHPLVLPSRLIHPEGRVAKLFDIKDGRFPYGSTQDYLNPIILIKLVQLGMAKDDILWDDMLERAVSVAEINKSDHVAACLRSSILLSLIDEKLKIRDPRAKDFAAKYQTIRFLPFLTKPAGFSLDWKGNSFKPETMFAATDLYTAEHQDIVCLLQPILNENSHSFRGCGSVSLAVKEFLGLLKKPTVDLVINQLKEVAKSVDDGITLYQENITNACYKYLHEALMQNEITKMSIIDKLKPFSFILVENAYVDSEKVSFHLNFEAAPYLYQLPNKYKNNFRELFETVGVRQSCTVEDFALVLESIDQERGTKQITEENFQLCRRIISEGIWSLIREKKQEFCEKNYGKILLPDTNLMLLPAKSLCYNDCPWIKVKDTTVKYCHADIPREVAVKLGAVPKRHKALERYASNVCFTTLGTEFGQKEKLTSRIKSILNAYPSEKEMLKELLQNADDAKATEICFVFDPRQHPVDRIFDDKWAPLQGPALCVYNNQPFTEDDVRGIQNLGKGTKEGNPYKTGQYGIGFNSVYHITDCPSFISGNDILCIFDPHARYAPGATSISPGRMFRDLDADFRTQFSDVLDLYLGTHFKLDNCTMFRFPLRNAEMAKVSEISSVPASDRMVQNLLDKLRSDGAELLMFLNHMEKISICEIDKSTGALNVLYSVKGKITDGDRLKRKQFHASVIDSVTKKRQLKDIPVQQITYTMDTEDSEGNLTTWLICNRSGFSSMEKVSKSVISAHKNQDITLFPRGGVAACITHNYKKPHRAFCFLPLSLETGLPFHVNGHFALDSARRNLWRDDNGVGVRSDWNNSLMTALIAPAYVELLIQLKKRYFPGSDPTLSVLQNTPIHVVKDTLKKFLSFFPVNRLDLQPDLYCLVKALYNCIHEDMKRLLPVVRAPNIDGSDLHSAVIITWINMSTSNKTRPFFDNLLQDELQHLKNADYNITTRKTVAENVYRLKHLLLEIGFNLVYNCDETANLYHCLIDADIPVSYVTPADIRSFLMTFSSPDTNCHIGKLPCRLQQTNLKLFHSLKLLVDYCFKDAEENEIEVEGLPLLITLDSVLQTFDAKRPKFLTTYHELIPSRKDLFMNTLYLKYSNILLNCKVAKVFDISSFADLLSSVLPREYKTKSCTKWKDNFASESWLKNAWHFISESVSVKEDQEETKPTFDIVVDTLKDWALLPGTKFTVSANQLVVPEGDVLLPLSLMHIAVFPNAQSDKVFHALMKAGCIQLALNKICSKDSAFVPLLSCHTANIESPTSILKALHYMVQTSTFRAEKLVENDFEALLMYFNCNLNHLMSQDDIKILKSLPCYKSISGRYVSIGKFGTCYVLTKSIPSAEVEKWTQSSSSAFLEEKIHLKELYEVIGCVPVDDLEVYLKHLLPKIENLSYDAKLEHLIYLKNRLSSAEELSEIKEQLFEKLESLLIIHDANSRLKQAKHFYDRTVRVFEVMLPEKLFIPNDFFKKLEQLIKPKNHVTFMTSWVEFLRNIGLKYILSQQQLLQFAKEISVRANTENWSKETLQNTVDILLHHIFQERMDLLSGNFLKELSLIPFLCPERAPAEFIRFHPQYQEVNGTLPLIKFNGAQVNPKFKQCDVLQLLWTSCPILPEKATPLSIKEQEGSDLGPQEQLEQVLNMLNVNLDPPLDKVINNCRNICNITTLDEEMVKTRAKVLRSIYEFLSAEKREFRFQLRGVAFVMVEDGWKLLKPEEVVINLEYESDFKPYLYKLPLELGTFHQLFKHLGTEDIISTKQYVEVLSRIFKNSEGKQLDPNEMRTVKRVVSGLFRSLQNDSVKVRSDLENVRDLALYLPSQDGRLVKSSILVFDDAPHYKSRIQGNIGVQMLVDLSQCYLGKDHGFHTKLIMLFPQKLRPRLLSSILEEQLDEETPKVCQFGALCSLQGRLQLLLSSEQFITGLIRIMKHENDNAFLANEEKAIRLCKALREGLKVSCFEKLQTTLRVKGFNPIPHSRSETFAFLKRFGNAVILLYIQHSDSKDINFLLALAMTLKSATDNLISDTSYLIAMLGCNDIYRIGEKLDSLGVKYDSSEPSKLELPMPGTPIPAEIHYTLLMDPMNVFYPGEYVGYLVDAEGGDIYGSYQPTYTYAIIVQEVEREDADNSSFLGKIYQIDIGYSEYKIVSSLDLYKFSRPEESSQSRDSAPSTPTSPTEFLTPGLRSIPPLFSGRESHKTSSKHQSPKKLKVNSLPEILKEVTSVVEQAWKLPESERKKIIRRLYLKWHPDKNPENHDIANEVFKHLQNEINRLEKQAFLDQNADRASRRTFSTSASRFQSDKYSFQRFYTSWNQEATSHKSERQQQNKEKCPPSAGQTYSQRFFVPPTFKSVGNPVEARRWLRQARANFSAARNDLHKNANEWVCFKCYLSTKLALIAADYAVRGKSDKDVKPTALAQKIEEYSQQLEGLTNDVHTLEAYGVDSLKTRYPDLLPFPQIPNDRFTSEVAMRVMECTACIIIKLENFMQQKV

SEQ ID NO: 76324 - protein, 4579 aa, Homo sapiens; identical to SEQ ID NO: 76323
  Payload ID: 15240
  Gene Symbol: SACS
  Gene Name: sacsin molecular chaperone
  Uniprot ID: Q9NZJ4
  ENSP ID: ENSP00000371735

SEQ ID NO: 76325 - protein, 3829 aa, Homo sapiens
  Payload ID: 15240
  Gene Symbol: SACS
  Gene Name: sacsin molecular chaperone
  Uniprot ID: Q9NZJ4
  ENSP ID: ENSP00000385844
MNTFWPGRELIVQWYPFDENRNHPSVSWLKMVWKNLYIHFSEDLTLFDEMPLIPRTILEEGQTCVELIRLRIPSLVILDDESEAQLPEFLADIVQKLGGFVLKKLDASIQHPLIKKYIHSPLPSAVLQIMEKMPLQKLCNQITSLLPTHKDALRKFLASLTDSSEKEKRIIQELAIFKRINHSSDQGISSYTKLKGCKVLHHTAKLPADLRLSISVIDSSDEATIRLANMLKIEQLKTTSCLKLVLKDIENAFYSHEEVTQLMLWVLENLSSLKNENPNVLEWLTPLKFIQISQEQMVSAGELFDPDIEVLKDLFCNEEGTYFPPSVFTSPDILHSLRQIGLKNEASLKEKDVVQVAKKIEALQVGACPDQDVLLKKAKTLLLVLNKNHTLLQSSEGKMTLKKIKWVPACKERPPNYPGSLVWKGDLCNLCAPPDMCDVGHAILIGSSLPLVESIHVNLEKALGIFTKPSLSAVLKHFKIVVDWYSSKTFSDEDYYQFQHILLEIYGFMHDHLNEGKDSFRALKFPWVWTGKKFCPLAQAVIKPIHDLDLQPYLHNVPKTMAKFHQLFKVCGSIEELTSDHISMVIQKIYLKSDQDLSEQESKQNLHLMLNIIRWLYSNQIPASPNTPVPIHHSKNPSKLIMKPIHECCYCDIKVDDLNDLLEDSVEPIILVHEDIPMKTAEWLKVPCLSTRLINPENMGFEQSGQREPLTVRIKNILEEYPSVSDIFKELLQNADDANATECSFLIDMRRNMDIRENLLDPGMAACHGPALWSFNNSQFSDSDFVNITRLGESLKRGEVDKVGKFGLGFNSVYHITDIPIIMSREFMIMFDPNINHISKHIKDKSNPGIKINWSKQQKRLRKFPNQFKPFIDVFGCQLPLTVEAPYSYNGTLFRLSFRTQQEAKVSEVSSTCYNTADIYSLVDEFSLCGHRLIIFTQSVKSMYLKYLKIEETNPSLAQDTVIIKKKSCSSKALNTPVLSVLKEAAKLMKTCSSSNKKLPSDEPKSSCILQITVEEFHHVFRRIADLQSPLFRGPDDDPAALFEMAKSGQSKKPSDELSQKTVECTTWLLCTCMDTGEALKFSLSESGRRLGLVPCGAVGVQLSEIQDQKWTVKPHIGEVFCYLPLRIKTGLPVHINGCFAVTSNRKEIWKTDTKGRWNTTFMRHVIVKAYLQVLSVLRDLATSGELMDYTYYAVWPDPDLVHDDFSVICQGFYEDIAHGKGKELTKVFSDGSTWVSMKNVRFLDDSILKRRDVGSAAFKIFLKYLKKTGSKNLCAVELPSSVKLGFEEAGCKQILLENTFSEKQFFSEVFFPNIQEIEAELRDPLMIFVLNEKVDEFSGVLRVTPCIPCSLEGHPLVLPSRLIHPEGRVAKLFDIKDGRFPYGSTQDYLNPIILIKLVQLGMAKDDILWDDMLERAVSVAEINKSDHVAACLRSSILLSLIDEKLKIRDPRAKDFAAKYQTIRFLPFLTKPAGFSLDWKGNSFKPETMFAATDLYTAEHQDIVCLLQPILNENSHSFRGCGSVSLAVKEFLGLLKKPTVDLVINQLKEVAKSVDDGITLYQENITNACYKYLHEALMQNEITKMSIIDKLKPFSFILVENAYVDSEKVSFHLNFEAAPYLYQLPNKYKNNFRELFETVGVRQSCTVEDFALVLESIDQERGTKQITEENFQLCRRIISEGIWSLIREKKQEFCEKNYGKILLPDTNLMLLPAKSLCYNDCPWIKVKDTTVKYCHADIPREVAVKLGAVPKRHKALERYASNVCFTTLGTEFGQKEKLTSRIKSILNAYPSEKEMLKELLQNADDAKATEICFVFDPRQHPVDRIFDDKWAPLQGPALCVYNNQPFTEDDVRGIQNLGKGTKEGNPYKTGQYGIGFNSVYHITDCPSFISGNDILCIFDPHARYAPGATSISPGRMFRDLDADFRTQFSDVLDLYLGTHFKLDNCTMFRFPLRNAEMAKVSEISSVPASDRMVQNLLDKLRSDGAELLMFLNHMEKISICEIDKSTGALNVLYSVKGKITDGDRLKRKQFHASVIDSVTKKRQLKDIPVQQITYTMDTEDSEGNLTTWLICNRSGFSSMEKVSKSVISAHKNQDITLFPRGGVAACITHNYKKPHRAFCFLPLSLETGLPFHVNGHFALDSARRNLWRDDNGVGVRSDWNNSLMTALIAPAYVELLIQLKKRYFPGSDPTLSVLQNTPIHVVKDTLKKFLSFFPVNRLDLQPDLYCLVKALYNCIHEDMKRLLPVVRAPNIDGSDLHSAVIITWINMSTSNKTRPFFDNLLQDELQHLKNADYNITTRKTVAENVYRLKHLLLEIGFNLVYNCDETANLYHCLIDADIPVSYVTPADIRSFLMTFSSPDTNCHIGKLPCRLQQTNLKLFHSLKLLVDYCFKDAEENEIEVEGLPLLITLDSVLQTFDAKRPKFLTTYHELIPSRKDLFMNTLYLKYSNILLNCKVAKVFDISSFADLLSSVLPREYKTKSCTKWKDNFASESWLKNAWHFISESVSVKEDQEETKPTFDIVVDTLKDWALLPGTKFTVSANQLVVPEGDVLLPLSLMHIAVFPNAQSDKVFHALMKAGCIQLALNKICSKDSAFVPLLSCHTANIESPTSILKALHYMVQTSTFRAEKLVENDFEALLMYFNCNLNHLMSQDDIKILKSLPCYKSISGRYVSIGKFGTCYVLTKSIPSAEVEKWTQSSSSAFLEEKIHLKELYEVIGCVPVDDLEVYLKHLLPKIENLSYDAKLEHLIYLKNRLSSAEELSEIKEQLFEKLESLLIIHDANSRLKQAKHFYDRTVRVFEVMLPEKLFIPNDFFKKLEQLIKPKNHVTFMTSWVEFLRNIGLKYILSQQQLLQFAKEISVRANTENWSKETLQNTVDILLHHIFQERMDLLSGNFLKELSLIPFLCPERAPAEFIRFHPQYQEVNGTLPLIKFNGAQVNPKFKQCDVLQLLWTSCPILPEKATPLSIKEQEGSDLGPQEQLEQVLNMLNVNLDPPLDKVINNCRNICNITTLDEEMVKTRAKVLRSIYEFLSAEKREFRFQLRGVAFVMVEDGWKLLKPEEVVINLEYESDFKPYLYKLPLELGTFHQLFKHLGTEDIISTKQYVEVLSRIFKNSEGKQLDPNEMRTVKRVVSGLFRSLQNDSVKVRSDLENVRDLALYLPSQDGRLVKSSILVFDDAPHYKSRIQGNIGVQMLVDLSQCYLGKDHGFHTKLIMLFPQKLRPRLLSSILEEQLDEETPKVCQFGALCSLQGRLQLLLSSEQFITGLIRIMKHENDNAFLANEEKAIRLCKALREGLKVSCFEKLQTTLRVKGFNPIPHSRSETFAFLKRFGNAVILLYIQHSDSKDINFLLALAMTLKSATDNLISDTSYLIAMLGCNDIYRIGEKLDSLGVKYDSSEPSKLELPMPGTPIPAEIHYTLLMDPMNVFYPGEYVGYLVDAEGGDIYGSYQPTYTYAIIVQEVEREDADNSSFLGKIYQIDIGYSEYKIVSSLDLYKFSRPEESSQSRDSAPSTPTSPTEFLTPGLRSIPPLFSGRESHKTSSKHQSPKKLKVNSLPEILKEVTSVVEQAWKLPESERKKIIRRLYLKWHPDKNPENHDIANEVFKHLQNEINRLEKQAFLDQNADRASRRTFSTSASRFQSDKYSFQRFYTSWNQEATSHKSERQQQNKEKCPPSAGQTYSQRFFVPPTFKSVGNPVEARRWLRQARANFSAARNDLHKNANEWVCFKCYLSTKLALIAADYAVRGKSDKDVKPTALAQKIEEYSQQLEGLTNDVHTLEAYGVDSLKTRYPDLLPFPQIPNDRFTSEVAMRVMECTACIIIKLENFMQQKV

SEQ ID NO: 76326 - protein, 374 aa, Homo sapiens
  Payload ID: 15240
  Gene Symbol: SACS
  Gene Name: sacsin molecular chaperone
  ENSP ID: ENSP00000390925
IVLEEESTKDAQKTSWLVCNSVGGRGISSKLDSLADELKFVPIIGIAMPLSSRDDEAKGATSDFSGKAFCFLPLPPGEESSTGLPVHISGFFGLTDNRRSIKWRELDQWRDPAALWNEFLVMNVVPKAYATLILDSIKRLEMEKSSDFPLSVDVIYKLWPEASKVKVHWQPVLEPLFSELLQNAVIYSISCDWVRLEQVYFSELDENLEYTKTVLNYLQSSGKQIAKVPGNVDAAVQLTAASGTTPVRKVTPAWVRQVLRKCAHLGCAEEKLHLLEFVLSDQAYSELLGLELLPLQNGNFVPFSSSVSDQDVIYITSAEYPRSLFPSLEGRFILDNLKPHLVAALKEAAQTRGFLFDEDSNGKLKMVAVLITSC

SEQ ID NO: 76327 - protein, 732 aa, Homo sapiens
  Payload ID: 15240
  Gene Symbol: SACS
  Gene Name: sacsin molecular chaperone
  ENSP ID: ENSP00000406565
  MOD_RES (1)..(1): Any amino acid
XDILRRYPEGGQILKELIQNAEDAGATEVKFLYDETQYGTETLWSKDMAPYQGPALYVYNNAVFTPEDWHGIQEIARSRKKDDPLKVGRFGIGFNSVYHITDVPCIFSGDQIGMLDPHQTLFGPHESGQCWNLKDDSKEISELSDQFAPFVGIFGSTKETFINGNFPGTFFRFPLRLQPSQLSSNLYNKQKVLELFESFRADADTVLLFLKSVQDVSLYVREADGTEKLVFRVTSSESKALKHERPNSIKILGTAISNYCKKTPSNNITCVTYHVNIVLEEESTKDAQKTSWLVCNSVGGRGISSKLDSLADELKFVPIIGIAMPLSSRDDEAKGATSDFSGKAFCFLPLPPGEESSTGLPVHISGFFGLTDNRRSIKWRELDQWRDPAALWNEFLVMNVVPKAYATLILDSIKRLEMEKSSDFPLSVDVIYKLWPEASKVKVHWQPVLEPLFSELLQNAVIYSISCDWVRLEQVYFSELDENLEYTKTVLNYLQSSGKQIAKVPGNVDAAVQLTAASGTTPVRKVTPAWVRQVLRKCAHLGCAEEKLHLLEFVLSDQAYSELLGLELLPLQNGNFVPFSSSVSDQDVIYITSAEYPRSLFPSLEGRFILDNLKPHLVAALKEAAQTRGRPCTQLQLLNPERFARLIKEVMNTFWPGRELIVQWYPFDENRNHPSVSWLKMVWKNLYIHFSEDLTLFDEMPLIPRTILEEGFLFDEDSNGKLKMVAVLITSC

SEQ ID NO: 76328 - protein, 702 aa, Homo sapiens
  Payload ID: 15241
  Gene Symbol: SUN1
  Gene Name: Sad1 and UNC84 domain containing 1
  Uniprot ID: O94901
  ENSP ID: ENSP00000374225
MSRRSLRLATTACTLGDGEAVGADSGTSSAVSLKNRAARTTKQRRSTNKSAFSINHVSRQVTSSGVSHGGTVSLQDAVTRRPPVLDESWIREQTTVDHFWGLDDDGDLKGGNKAAIQGNGDVGAAAATAHNGFSCSNCSMLSERKDVLTAHPAAPGPVSRVYSRDRNQKWKAASGVFWWLGIGWYQFVTLISWLNVFLLTRCLRNICKFLVLLIPLFLLLAGLSLRGQGNFFSFLPVLNWASMHRTQRVDDPQDVFKPTTSRLKQPLQGDSEAFPWHWMSGVEQQVASLSGQCHHHGENLRELTTLLQKLQARVDQMEGGAAGPSASVRDAVGQPPRETDFMAFHQEHEVRMSHLEDILGKLREKSEAIQKELEQTKQKTISAVGEQLLPTVEHLQLELDQLKSELSSWRHVKTGCETVDAVQERVDVQVREMVKLLFSEDQQGGSLEQLLQRFSSQFVSKGDLQTMLRDLQLQILRNVTHHVSVTKQLPTSEAVVSAVSEAGASGITEAQARAIVNSALKLYSQDKTGMVDFALESGGGSILSTRCSETYETKTALMSLFGIPLWYFSQSPRVVIQPDIYPGNCWAFKGSQGYLVVRLSMMIHPAAFTLEHIPKTLSPTGNISSAPKDFAVYGLENEYQEEGQLLGQFTYDQDGESLQMFQALKRPDDTAFQIVELRIFSNWGHPEYTCLYRFRVHGEPVK

SEQ ID NO: 76329 - protein, 257 aa, Homo sapiens
  Payload ID: 15241
  Gene Symbol: SUN1
  Gene Name: Sad1 and UNC84 domain containing 1
  Uniprot ID: O94901
  ENSP ID: ENSP00000383947
MDFSRLHMYSPPQCVPENTGYTYALSSSYSSDALDFETEHKLDPVFDSPRMSRRSLRLATTACTLGDGEAVGADSGTSSAVSLKNRAARTTKQRRSTNKSAFSINHVSRQVTSSGVSHGGTVSLQDAVTRRPPVLDESWIREQTTVDHFWGLDDDGDLKGGNKAAIQGNGDVGAAAATAHNGFSCSNCSMLSERKDVLTAHPAAPGPVSRVYSRDRNQKCKSQSFKTQKKVCFPNLIFPFCKSQCLHYLSWRLKIIP

SEQ ID NO: 76330 - protein, 785 aa, Homo sapiens
  Payload ID: 15241
  Gene Symbol: SUN1
  Gene Name: Sad1 and UNC84 domain containing 1
  Uniprot ID: O94901
  ENSP ID: ENSP00000384015
MDFSRLHMYSPPQCVPENTGYTYALSSSYSSDALDFETEHKLDPVFDSPRMSRRSLRLATTACTLGDGEAVGADSGTSSAVSLKNRAARTTKQRRSTNKSAFSINHVSRQVTSSGVSHGGTVSLQDAVTRRPPVLDESWIREQTTVDHFWGLDDDGDLKGGNKAAIQGNGDVGAAAATAHNGFSCSNCSMLSERKDVLTAHPAAPGPVSRVYSRDRNQKCYFLLQILRRIGAVGQAVSRTAWSALWLAVVAPGKAASGVFWWLGIGWYQFVTLISWLNVFLLTRCLRNICKFLVLLIPLFLLLAGLSLRGQGNFFSFLPVLNWASMHRTQRVDDPQDVFKPTTSRLKQPLQGDSEAFPWHWMSGVEQQVASLSGQCHHHGENLRELTTLLQKLQARVDQMEGGAAGPSASVRDAVGQPPRETDFMAFHQEHEVRMSHLEDILGKLREKSEAIQKELEQTKQKTISAVGEQLLPTVEHLQLELDQLKSELSSWRHVKTGCETVDAVQERVDVQVREMVKLLFSEDQQGGSLEQLLQRFSSQFVSKGDLQTMLRDLQLQILRNVTHHVSVTKQLPTSEAVVSAVSEAGASGITEAQARAIVNSALKLYSQDKTGMVDFALESGGGSILSTRCSETYETKTALMSLFGIPLWYFSQSPRVVIQPDIYPGNCWAFKGSQGYLVVRLSMMIHPAAFTLEHIPKTLSPTGNISSAPKDFAVYGLENEYQEEGQLLGQFTYDQDGESLQMFQALKRPDDTAFQIVELRIFSNWGHPEYTCLYRFRVHGEPVK

SEQ ID NO: 76331 - protein, 822 aa, Homo sapiens
  Payload ID: 15241
  Gene Symbol: SUN1
  Gene Name: Sad1 and UNC84 domain containing 1
  ENSP ID: ENSP00000384116
MDFSRLHMYSPPQCVPENTGYTYALSSSYSSDALDFETEHKLDPVFDSPRMSRRSLRLATTACTLGDGEAVGADSGTSSAVSLKNRAARTTKQRRSTNKSAFSINHVSRQVTSSGVSHGGTVSLQDAVTRRPPVLDESWIREQTTVDHFWGLDDDGDLKGGNKAAIQGNGDVGAAAATAHNGFSCSNCSMLSERKDVLTAHPAAPGPVSRVYSRDRNQKCDDCKGKRHLDAHTAAHSQSPRLPGRAGTLWHIWACAGYFLLQILRRIGAVGQAVSRTAWSALWLAVVAPGKAASGVFWWLGIGWYQFVTLISWLNVFLLTRCLRNICKFLVLLIPLFLLLAGLSLRGQGNFFSFLPVLNWASMHRTQRVDDPQDVFKPTTSRLKQPLQGDSEAFPWHWMSGVEQQVASLSGQCHHHGENLRELTTLLQKLQARVDQMEGGAAGPSASVRDAVGQPPRETDFMAFHQEHEVRMSHLEDILGKLREKSEAIQKELEQTKQKTISAVGEQLLPTVEHLQLELDQLKSELSSWRHVKTGCETVDAVQERVDVQVREMVKLLFSEDQQGGSLEQLLQRFSSQFVSKGDLQTMLRDLQLQILRNVTHHVSVTKQLPTSEAVVSAVSEAGASGITEAQARAIVNSALKLYSQDKTGMVDFALESGGGSILSTRCSETYETKTALMSLFGIPLWYFSQSPRVVIQPDIYPGNCWAFKGSQGYLVVRLSMMIHPAAFTLEHIPKTLSPTGNISSAPKDFAVYGLENEYQEEGQLLGQFTYDQDGESLQMFQALKRPDDTAFQIVELRIFSNWGHPEYTCLYRFRVHGEPVK

SEQ ID NO: 76332 - protein, 174 aa, Homo sapiens
  Payload ID: 15241
  Gene Symbol: SUN1
  Gene Name: Sad1 and UNC84 domain containing 1
  ENSP ID: ENSP00000388430
MDFSRLHMYSPPQCVPENTGYTYALSSSYSSDALDFETEHKLDPVFDSPRMSRRSLRLATTACTLGDGEAVGADSGTSSAVSLKNRAARTTKQRRSTNKSAFSINHVSRQVTSSGVSHGGTVSLQDAVTRRPPVLDESWIREQTTVDHFWGLDDDGDLKGGNKAAIQGNGDVGA

SEQ ID NO: 76333 - protein, 702 aa, Homo sapiens; identical to SEQ ID NO: 76328
  Payload ID: 15241
  Gene Symbol: SUN1
  Gene Name: Sad1 and UNC84 domain containing 1
  Uniprot ID: O94901
  ENSP ID: ENSP00000392309

SEQ ID NO: 76334 - protein, 171 aa, Homo sapiens
  Payload ID: 15241
  Gene Symbol: SUN1
  Gene Name: Sad1 and UNC84 domain containing 1
  ENSP ID: ENSP00000392595
SSSYSSDALDFETEHKLDPVFDSPRMSRRSLRLATTACTLGDGEAVGADSGTSSAVSLKNRAARTTKQRRSTNKSAFSINHVSRQVTSSGVSHGGTVSLQDAVTRRPPVLDESWIREQTTVDHFWGKAASGVFWWLGIGWYQFVTLISWLNVFLLTRCLRNICKFLVLLIP

SEQ ID NO: 76335 - protein, 113 aa, Homo sapiens
  Payload ID: 15241
  Gene Symbol: SUN1
  Gene Name: Sad1 and UNC84 domain containing 1
  ENSP ID: ENSP00000394381
MDFSRLHMYSPPQCVPENTGYTYALSSSYSSDALDFETEHKLDPVFDSPRMSRRSLRLATTACTLGDGEAVGADSGTSSAVSLKNRAARTTKQRRSTNKSAFSINHVSRQVTS

SEQ ID NO: 76336 - protein, 88 aa, Homo sapiens
  Payload ID: 15241
  Gene Symbol: SUN1
  Gene Name: Sad1 and UNC84 domain containing 1
  ENSP ID: ENSP00000394597
MDFSRLHMYSPPQCVPENTGYTYALSSSYSSDALDFETEHKLDPVFDSPRMSRRSLRLATTACTLGDGEAVGADSGTSSAVSLKNRAA

SEQ ID NO: 76337 - protein, 278 aa, Homo sapiens
  Payload ID: 15241
  Gene Symbol: SUN1
  Gene Name: Sad1 and UNC84 domain containing 1
  Uniprot ID: O94901
  ENSP ID: ENSP00000395952
MGRISPGSPGLPRTVWFEVVNMDFSRLHMYSPPQCVPENTGYTYALSSSYSSDALDFETEHKLDPVFDSPRMSRRSLRLATTACTLGDGEAVGADSGTSSAVSLKNRAARTTKQRRSTNKSAFSINHVSRQVTSSGVSHGGTVSLQDAVTRRPPVLDESWIREQTTVDHFWGLDDDGDLKGGNKAAIQGNGDVGAAAATAHNGFSCSNCSMLSERKDVLTAHPAAPGPVSRVYSRDRNQKCKSQSFKTQKKVCFPNLIFPFCKSQCLHYLSWRLKIIP

SEQ ID NO: 76338 - protein, 88 aa, Homo sapiens; identical to SEQ ID NO: 76336
  Payload ID: 15241
  Gene Symbol: SUN1
  Gene Name: Sad1 and UNC84 domain containing 1
  ENSP ID: ENSP00000399549

SEQ ID NO: 76339 - protein, 118 aa, Homo sapiens
  Payload ID: 15241
  Gene Symbol: SUN1
  Gene Name: Sad1 and UNC84 domain containing 1
  ENSP ID: ENSP00000404965
MDFSRLHMYSPPQCVPENTGYTYALSSSYSSDALDFETEHKLDPVFDSPRMSRRSLRLATTACTLGDGEAVGADSGTSSAVSLKNRAARTTKQRRSTNKSAFSINHVSRQVTSSGVSH

SEQ ID NO: 76340 - protein, 427 aa, Homo sapiens
  Payload ID: 15241
  Gene Symbol: SUN1
  Gene Name: Sad1 and UNC84 domain containing 1
  ENSP ID: ENSP00000406444
  MOD_RES (1)..(1): Any amino acid
XKAASGVFWWLGIGWYQFVTLISWLNVFLLTRCLRNICKFLVLLIPLFLLLGLSLRGQGNFFSFLPVLNWASMHRTQRVDDPQDVFKPTTSRLKQPLQGDSEAFPWHWMSGVEQQVASLSGQCHHHGENLRELTTLLQKLQARVDQMEGGAAGPSASVRDAVGQPPREAIQKELEQTKQKTISAVGEQLLPTVEHLQLELDQLKSELSSWRHVKTGCETVDAVQERVDVQVREMVKLLFSEDQQGGSLEQLLQRFSSQFVSKGDLQTMLRDLQLQILRNVTHHVSVTKQLPTSEAVVSAVSEAGASGITEAQARAIVNSALKLYSQDKTGMVDFALESGGGSILSTRCSETYETKTALMSLFGIPLWYFSQSPRVVIQVHVPEQAHGGPGAHVLGSPALLQPWPAKQCSRLVHAGPGVPGEGGSGGG

SEQ ID NO: 76341 - protein, 634 aa, Homo sapiens
  Payload ID: 15241
  Gene Symbol: SUN1
  Gene Name: Sad1 and UNC84 domain containing 1
  ENSP ID: ENSP00000406653
  MOD_RES (1)..(1): Any amino acid
XSKAHASYYGRMNVREVLREDGHLSVNGEALCDDCKGKRHLDAHTAAHSQSPRLPGRAGTLWHIWACAGYFLLQILRRIGAVGQAVSRTAWSALWLAVVAPGKAASGVFWWLGIGWYQFVTLISWLNVFLLTRCLRNICKFLVLLIPLFLLLAGLSLRGQGNFFSFLPVLNWASMHRTQRVDDPQDVFKPTTSRLKQPLQGDSEAFPWHWMSGVEQQVASLSGQCHHHGENLRELTTLLQKLQARVDQMEGGAAGPSASVRDAVGQPPRETDFMAFHQEHEVRMSHLEDILGKLREKSEAIQKELEQTKQKTISAVGEQLLPTVEHLQLELDQLKSELSSWRHVKTGCETVDAVQERVDVQVREMVKLLFSEDQQGGSLEQLLQRFSSQFVSKGDLQTMLRDLQLQILRNVTHHVSVTKQLPTSEAVVSAVSEAGASGITEAQARAIVNSALKLYSQDKTGMVDFALESGGGSILSTRCSETYETKTALMSLFGIPLWYFSQSPRVVIQPDIYPGNCWAFKGSQGYLVVRLSMMIHPAAFTLEHIPKTLSPTGNISSAPKDFAVYGLENEYQEEGQLLGQFTYDQDGESLQMFQALKRPDDTAFQIVELRIFSNWGHPEYTCLYRFRVHGEPVK

SEQ ID NO: 76342 - protein, 710 aa, Homo sapiens
  Payload ID: 15241
  Gene Symbol: SUN1
  Gene Name: Sad1 and UNC84 domain containing 1
  ENSP ID: ENSP00000409909
GDVGAAAATAHNGFSCSNCSMLSERKDVLTAHPAAPGPVSRVYSRDRNQKCGASFYVNRILWLARYTASSFSSFLVQLFQVVLMKLSYESENYKLKTHESKDCESESYKSKSHESKAHASYYGRMNVREVLREDGHLSVNGEALCYFLLQILRRIGAVGQAVSRTAWSALWLAVVAPGKAASGVFWWLGIGWYQFVTLISWLNVFLLTRCLRNICKFLVLLIPLFLLLAGLSLRGQGNFFSFLPVLNWASMHRTQRVDDPQDVFKPTTSRLKQPLQGDSEAFPWHWMSGVEQQVASLSGQCHHHGENLRELTTLLQKLQARVDQMEGGAAGPSASVRDAVGQPPRETDFMAFHQEHEVRMSHLEDILGKLREKSEAIQKELEQTKQKTISAVGEQLLPTVEHLQLELDQLKSELSSWRHVKTGCETVDAVQERVDVQVREMVKLLFSEDQQGGSLEQLLQRFSSQFVSKGDLQTMLRDLQLQILRNVTHHVSVTKQLPTSEAVVSAVSEAGASGITEAQARAIVNSALKLYSQDKTGMVDFALESGGGSILSTRCSETYETKTALMSLFGIPLWYFSQSPRVVIQPDIYPGNCWAFKGSQGYLVVRLSMMIHPAAFTLEHIPKTLSPTGNISSAPKDFAVYGLENEYQEEGQLLGQFTYDQDGESLQMFQALKRPDDTAFQIVELRIFSNWGHPEYTCLYRFRVHGEPVK

SEQ ID NO: 76343 - protein, 135 aa, Homo sapiens
  Payload ID: 15241
  Gene Symbol: SUN1
  Gene Name: Sad1 and UNC84 domain containing 1
  ENSP ID: ENSP00000413188
MDFSRLHMYSPPQCVPENTGYTYALSSSYSSDALDFETEHKLDPVFDSPRMSRRSLRLATTACTLGDGEAVGADSGTSSAVSLKNRAARTTKQRRSTNKSAFSINHVSRQVTSSGVSHGGTVSLQDAVTRRPPVL

SEQ ID NO: 76344 - protein, 682 aa, Homo sapiens
  Payload ID: 15241
  Gene Symbol: SUN1
  Gene Name: Sad1 and UNC84 domain containing 1
  Uniprot ID: O94901
  ENSP ID: ENSP00000413439
MDFSRLHMYSPPQCVPENTGYTYALSSSYSSDALDFETEHKLDPVFDSPRMSRRSLRLATTACTLGDGEAVGADSGTSSAVSLKNRAARTTKQRRSTNKSAFSINHVSRQVTSSGVSHGGTVSLQDAVTRRPPVLDESWIREQTTVDHFWGKAASGVFWWLGIGWYQFVTLISWLNVFLLTRCLRNICKFLVLLIPLFLLLGLSLRGQGNFFSFLPVLNWASMHRTQRVDDPQDVFKPTTSRLKQPLQGDSEAFPWHWMSGVEQQVASLSGQCHHHGENLRELTTLLQKLQARVDQMEGGAAGPSASVRDAVGQPPRETDFMAFHQEHEVRMSHLEDILGKLREKSEAIQKELEQTKQKTISAVGEQLLPTVEHLQLELDQLKSELSSWRHVKTGCETVDAVQERVDVQVREMVKLLFSEDQQGGSLEQLLQRFSSQFVSKGDLQTMLRDLQLQILRNVTHHVSVTKQLPTSEAVVSAVSEAGASGITEAQARAIVNSALKLYSQDKTGMVDFALESGGGSILSTRCSETYETKTALMSLFGIPLWYFSQSPRVVIQPDIYPGNCWAFKGSQGYLVVRLSMMIHPAAFTLEHIPKTLSPTGNISSAPKDFAVYGLENEYQEEGQLLGQFTYDQDGESLQMFQALKRPDDTAFQIVELRIFSNWGHPEYTCLYRFRVHGEPVK

SEQ ID NO: 76345 - protein, 158 aa, Homo sapiens
  Payload ID: 15241
  Gene Symbol: SUN1
  Gene Name: Sad1 and UNC84 domain containing 1
  ENSP ID: ENSP00000414279
  MOD_RES (1)..(1): Any amino acid
XGNKAAIQGNGDVGAAAATAHNGFSCSNCSMLSERKDVLTAHPAAPGPVSRVYSRDRNQKSHASYYGRMNVREVLREDGHLSVNGEALCDDCKGKRHLDAHTAAHSQSPRLPGRAGTLWHIWACAGYFLLQILRRIGAVGQAVSRTAWSALWLAVVAP

SEQ ID NO: 76346 - protein, 717 aa, Homo sapiens
  Payload ID: 15242
  Gene Symbol: SUN2
  Gene Name: Sad1 and UNC84 domain containing 2
  Uniprot ID: Q9UH99
  ENSP ID: ENSP00000383992
MSRRSQRLTRYSQGDDDGSSSSGGSSVAGSQSTLFKDSPLRTLKRKSSNMKRLSPAPQLGPSSDAHTSYYSESLVHESWFPPRSSLEELHGDANWGEDLRVRRRRGTGGSESSRASGLVGRKATEDFLGSSSGYSSEDDYVGYSDVDQQSSSSRLRSAVSRAGSLLWMVATSPGRLFRLLYWWAGTTWYRLTTAASLLDVFVLTRRFSSLKTFLWFLLPLLLLTCLTYGAWYFYPYGLQTFHPALVSWWAAKDSRRPDEGWEARDSSPHFQAEQRVMSRVHSLERRLEALAAEFSSNWQKEAMRLERLELRQGAPGQGGGGGLSHEDTLALLEGLVSRREAALKEDFRRETAARIQEELSALRAEHQQDSEDLFKKIVRASQESEARIQQLKSEWQSMTQESFQESSVKELRRLEDQLAGLQQELAALALKQSSVAEEVGLLPQQIQAVRDDVESQFPAWISQFLARGGGGRVGLLQREEMQAQLRELESKILTHVAEMQGKSAREAAASLSLTLQKEGVIGVTEEQVHHIVKQALQRYSEDRIGLADYALESGGASVISTRCSETYETKTALLSLFGIPLWYHSQSPRVILQPDVHPGNCWAFQGPQGFAVVRLSARIRPTAVTLEHVPKALSPNSTISSAPKDFAIFGFDEDLQQEGTLLGKFTYDQDGEPIQTFHFQAPTMATYQVVELRILTNWGHPEYTCIYRFRVHGEPAH

SEQ ID NO: 76347 - protein, 738 aa, Homo sapiens
  Payload ID: 15242
  Gene Symbol: SUN2
  Gene Name: Sad1 and UNC84 domain containing 2
  Uniprot ID: Q9UH99
  ENSP ID: ENSP00000385616
MSRRSQRLTRYSQGDDDGSSSSGGSSVAGSQSTLFKDSPLRTLKRKSSNMKRLSPAPQLGPSSDAHTSYYSESLVHESWFPPRSSLEELHGDANWGEDLRVRRRRGTGGSESSRASGLVGRKATEDFLGSSSGYSSEDDYVEDSEGRGSKVTETEPVSSFPAGYSDVDQQSSSSRLRSAVSRAGSLLWMVATSPGRLFRLLYWWAGTTWYRLTTAASLLDVFVLTRRFSSLKTFLWFLLPLLLLTCLTYGAWYFYPYGLQTFHPALVSWWAAKDSRRPDEGWEARDSSPHFQAEQRVMSRVHSLERRLEALAAEFSSNWQKEAMRLERLELRQGAPGQGGGGGLSHEDTLALLEGLVSRREAALKEDFRRETAARIQEELSALRAEHQQDSEDLFKKIVRASQESEARIQQLKSEWQSMTQESFQESSVKELRRLEDQLAGLQQELAALALKQSSVAEEVGLLPQQIQAVRDDVESQFPAWISQFLARGGGGRVGLLQREEMQAQLRELESKILTHVAEMQGKSAREAAASLSLTLQKEGVIGVTEEQVHHIVKQALQRYSEDRIGLADYALESGGASVISTRCSETYETKTALLSLFGIPLWYHSQSPRVILQPDVHPGNCWAFQGPQGFAVVRLSARIRPTAVTLEHVPKALSPNSTISSAPKDFAIFGFDEDLQQEGTLLGKFTYDQDGEPIQTFHFQAPTMATYQVVELRILTNWGHPEYTCIYRFRVHGEPAH

SEQ ID NO: 76348 - protein, 717 aa, Homo sapiens; identical to SEQ ID NO: 76346
  Payload ID: 15242
  Gene Symbol: SUN2
  Gene Name: Sad1 and UNC84 domain containing 2
  Uniprot ID: Q9UH99
  ENSP ID: ENSP00000385740

SEQ ID NO: 76349 - protein, 198 aa, Homo sapiens
  Payload ID: 15242
  Gene Symbol: SUN2
  Gene Name: Sad1 and UNC84 domain containing 2
  ENSP ID: ENSP00000390154
VHHIVKQALQRYSEDRIGLADYALESGGASVISTRCSETYETKTALLSLFGIPLWYHSQSPRVILQPDVHPGNCWAFQGPQGFAVVRLSARIRPTAVTLEHVPKALSPNSTISSAPKDFAIFGFDEDLQQEGTLLGKFTYDQDGEPIQTFHFQVRDAAVLAEVAQTPHPGSRCSLGTYPARHGVQRGKPCSPFPQLKM

SEQ ID NO: 76350 - protein, 100 aa, Homo sapiens
  Payload ID: 15242
  Gene Symbol: SUN2
  Gene Name: Sad1 and UNC84 domain containing 2
  ENSP ID: ENSP00000393271
MSRRSQRLTRYSQGDDDGSSSSGGSSVAGSQSTLFKDSPLRTLKRKSSNMKRLSPAPQLGPSSDAHTSYYSESLVHESWFPPRSSLEELHGDANWGEDLR

SEQ ID NO: 76351 - protein, 143 aa, Homo sapiens
  Payload ID: 15242
  Gene Symbol: SUN2
  Gene Name: Sad1 and UNC84 domain containing 2
  ENSP ID: ENSP00000403694
  MOD_RES (1)..(1): Any amino acid
XDVDQQSSSSRLRSAVSRAGSLLWMVATSPGRLFRLLYWWAGTTWYRLTTAASLLDVFVLTRRFSSLKTFLWFLLPLLLLTCLTYGAWYFYPYGLQTFHPALVSWWAAKDSRRPDEGWEARDSSPHFQAGFQERTKATRPLRP

SEQ ID NO: 76352 - protein, 224 aa, Homo sapiens
  Payload ID: 15242
  Gene Symbol: SUN2
  Gene Name: Sad1 and UNC84 domain containing 2
  ENSP ID: ENSP00000406941
MSRRSQRLTRYSQGDDDGSSSSGGSSVAGSQSTLFKDSPLRTLKRKSSNMKRLSPAPQLGPSSDAHTSYYSESLVHESWFPPRSSLEELHGDANWGYSDVDQQSSSSRLRSAVSRAGSLLWMVATSPGRLFRLLYWWAGTTWYRLTTAASLLDVFVLTRRFSSLKTFLWFLLPLLLLTCLTYGAWYFYPYGLQTFHPALVSWWAAKDSRRPDEGWEARDSSPHF

SEQ ID NO: 76353 - protein, 127 aa, Homo sapiens
  Payload ID: 15242
  Gene Symbol: SUN2
  Gene Name: Sad1 and UNC84 domain containing 2
  ENSP ID: ENSP00000408834
MSRRSQRLTRYSQGDDDGSSSSGGSSVAGSQSTLFKDSPLRTLKRKSSNMKRLSPAPQLGPSSDAHTSYYSESLVHESWFPPRSSLEELHGDANWGYSDVDQQSSSSRLRSAVSRAGSLLWMVATSP

SEQ ID NO: 76354 - protein, 110 aa, Homo sapiens
  Payload ID: 15242
  Gene Symbol: SUN2
  Gene Name: Sad1 and UNC84 domain containing 2
  ENSP ID: ENSP00000411615
MSRRSQRLTRYSQGDDDGSSSSGGSSVAGSQSTLFKDSPLRTLKRKSSNMKRLSPAPQLGPSSDAHTSYYSESLVHESWFPPRSSLEELHGDANWGEDLRVRRRRGTGGS

SEQ ID NO: 76355 - protein, 124 aa, Homo sapiens
  Payload ID: 15242
  Gene Symbol: SUN2
  Gene Name: Sad1 and UNC84 domain containing 2
  ENSP ID: ENSP00000412928
MSRRSQRLTRYSQGDDDGSSSSGGSSVAGSQSTLFKDSPLRTLKRKSSNMKRLSPAPQLGPSSDAHTSYYSESLVHESWFPPRSSLEELHGDANWDPTFQKLLEAQKSPWFFPAQVRTCGCGGG

SEQ ID NO: 76356 - protein, 144 aa, Homo sapiens
  Payload ID: 15242
  Gene Symbol: SUN2
  Gene Name: Sad1 and UNC84 domain containing 2
  ENSP ID: ENSP00000414950
MSRRSQRLTRYSQGDDDGSSSSGGSSVAGSQSTLFKDSPLRTLKRKSSNMKRLSPAPQLGPSSDAHTSYYSESLVHESWFPPRSSLEELHGDANWGEDLRVRRRRGTGGSESSRASGLVGRKATEDFLGSSSGYSSEDDYVGRR

SEQ ID NO: 76357 - protein, 228 aa, Homo sapiens
  Payload ID: 15242
  Gene Symbol: SUN2
  Gene Name: Sad1 and UNC84 domain containing 2
  ENSP ID: ENSP00000415588
MSRRSQRLTRYSQGDDDGSSSSGGSSVAGSQSTLFKDSPLRTLKRKSSNMKRLSPAPQLGPSSDAHTSYYSESLVHESWFPPRSSLEELHGDANWGEDLRVRRRRGTGGSESSRASGLVGRKATEDFLGSSSGYSSEDDYVGYSDVDQQSSSSRLRSAVSRAGSLLWMVATSPGRLFRLLYWWAGTTWYRLTTAASLLDVFVLTRRFSSLKTFLWFLLPLLLLTCLTY

SEQ ID NO: 76358 - protein, 357 aa, Homo sapiens
  Payload ID: 15243
  Gene Symbol: SUN3
  Gene Name: Sad1 and UNC84 domain containing 3
  Uniprot ID: Q8TAQ9
  ENSP ID: ENSP00000297325
MSGKTKARRAAMFFRRCSEDASGSASGNALLSEDENPDANGVTRSWKIILSTMLTLTFLLVGLLNHQWLKETDVPQKSRQLYAIIAEYGSRLYKYQARLRMPKEQLELLKKESQNLENNFRQILFLIEQIDVLKALLRDMKDGMDNNHNWNTHGDPVEDPDHTEEVSNLVNYVLKKLREDQVEMADYALKSAGASIIEAGTSESYKNNKAKLYWHGIGFLNHEMPPDIILQPDVYPGKCWAFPGSQGHTLIKLATKIIPTAVTMEHISEKVSPSGNISSAPKEFSVYGITKKCEGEEIFLGQFIYNKTGTTVQTFELQHAVSEYLLCVKLNIFSNWGHPKYTCLYRFRVHGTPGKHI

SEQ ID NO: 76359 - protein, 357 aa, Homo sapiens; identical to SEQ ID NO: 76358
  Payload ID: 15243
  Gene Symbol: SUN3
  Gene Name: Sad1 and UNC84 domain containing 3
  Uniprot ID: Q8TAQ9
  ENSP ID: ENSP00000378939

SEQ ID NO: 76360 - protein, 266 aa, Homo sapiens [sequence omitted]

SEQ ID NO: 76361 - protein, 281 aa, Homo sapiens
  Payload ID: 15243
  Gene Symbol: SUN3
  Gene Name: Sad1 and UNC84 domain containing 3
  ENSP ID: ENSP00000388627
  MOD_RES (1)..(1): Any amino acid
XYAIIAEYGSRLYKYQARLRMPKEQLELLKKESQNLENNFRQILFLIEQIDVLKALLRDMKDGMDNNHNWNTHGDPVEDPDHTEVLDEEVSNLVNYVLKKLREDQVEMADYALKSAGASIIEAGTSESYKNNKAKLYWHGIGFLNHEMPPDIILQPDVYPGKCWAFPGSQGHTLIKLATKIIPTAVTMEHISEKVSPSGNISSAPKEFSVYGITKKCEGEEIFLGQFIYNKTGTTVQTFELQHAVSEYLLCVKLNIFSNWGHPKYTCLYRFRVHGTPGKHI

SEQ ID NO: 76362 - protein, 89 aa, Homo sapiens
  Payload ID: 15243
  Gene Symbol: SUN3
  Gene Name: Sad1 and UNC84 domain containing 3
  ENSP ID: ENSP00000395392
MSGKTKARRAAMFFRRCSEDASGSASGNALLSEDENPDANGVTRSWKIILSTMLTLTFLLVGWSAVVRSWLTATSTSWVQAFLLPQPPE

SEQ ID NO: 76363 - protein, 170 aa, Homo sapiens
  Payload ID: 15243
  Gene Symbol: SUN3
  Gene Name: Sad1 and UNC84 domain containing 3
  ENSP ID: ENSP00000406887
EDQVEMADYALKSAGASIIEAGTSESYKNNKAKLYWHGIGFLNHEMPPDIILQPDVYPGKCWAFPGSQGHTLIKLATKIIPTAVTMEHISEKVSPSGNISSAPKEFSVYGITKKCEGEEIFLGQFIYNKTGTTVQTFELQGPWHTRQAHLEELVQKAMPHVQNIQECLFS

SEQ ID NO: 76364 - protein, 269 aa, Homo sapiens
  Payload ID: 15243
  Gene Symbol: SUN3
  Gene Name: Sad1 and UNC84 domain containing 3
  Uniprot ID: Q8TAQ9
  ENSP ID: ENSP00000409077
MPKEQLELLKKESQNLENNFRQILFLIEQIDVLKALLRDMKDGMDNNHNWNTHGDPVEDPDHTEEVSNLVNYVLKKLREDQVEMADYALKSAGASIIEAGTSESYKNNKAKLYWHGIGFLNHEMPPDIILQPDVYPGKCWAFPGSQGHTLIKLATKIIPTAVTMEHISEKVSPSGNISSAPKEFSVYVQRYMCRFVIQAGITKKCEGEEIFLGQFIYNKTGTTVQTFELQHAVSEYLLCVKLNIFSNWGHPKYTCLYRFRVHGTPGKHI

SEQ ID NO: 76365 - protein, 345 aa, Homo sapiens
  Payload ID: 15243
  Gene Symbol: SUN3
  Gene Name: Sad1 and UNC84 domain containing 3
  Uniprot ID: Q8TAQ9
  ENSP ID: ENSP00000410204
MEDYSKYNAYTDFSSCRLECSGAILAHCNLHLLGSSISPASASRVAGTTGLLNHQWLKETDVPQKSRQLYAIIAEYGSRLYKYQARLRMPKEQLELLKKESQNLENNFRQILFLIEQIDVLKALLRDMKDGMDNNHNWNTHGDPVEDPDHTEEVSNLVNYVLKKLREDQVEMADYALKSAGASIIEAGTSESYKNNKAKLYWHGIGFLNHEMPPDIILQPDVYPGKCWAFPGSQGHTLIKLATKIIPTAVTMEHISEKVSPSGNISSAPKEFSVYGITKKCEGEEIFLGQFIYNKTGTTVQTFELQHAVSEYLLCVKLNIFSNWGHPKYTCLYRFRVHGTPGKHI

SEQ ID NO: 76366 - protein, 379 aa, Homo sapiens
  Payload ID: 15244
  Gene Symbol: SUN5
  Gene Name: Sad1 and UNC84 domain containing 5
  Uniprot ID: Q8TC36
  ENSP ID: ENSP00000348496
MPRSSRSPGDPGALLEDVAHNPRPRRIAQRGRNTSRMAEDTSPNMNDNILLPVRNNDQALGLTQCMLGCVSWFTCFACSLRTQAQQVLFNTCRCKLLCQKLMEKTGILLLCAFGFWMFSIHLPSKMKVWQDDSINGPLQSLRLYQEKVRHHSGEIQDLRGSMNQLIAKLQEMEAMSDEQKMAQKIMKMIHGDYIEKPDFALKSIGASIDFEHTSVTYNHEKAHSYWNWIQLWNYAQPPDVILEPNVTPGNCWAFEGDRGQVTIQLAQKVYLSNLTLQHIPKTISLSGSLDTAPKDFVIYGMEGSPKEEVFLGAFQFQPENIIQMFPLQNQPARAFSAVKVKISSNWGNPGFTCLYRVRVHGSVAPPREQPHQNPYPKRD

SEQ ID NO: 76367 - protein, 122 aa, Homo sapiens
  Payload ID: 15244
  Gene Symbol: SUN5
  Gene Name: Sad1 and UNC84 domain containing 5
  ENSP ID: ENSP00000364669
MPRSSRSPGDPGALLEDVAHNPRPRRIAQRGRNTSRMAEDTSPNMNDNILLPVRNNDQALGLTQCMLGCVYASCCARSSWRRQAFCSSVLSVCPRALPSPRWRYPWALALIIGHWARHCTAT

SEQ ID NO: 76368 - protein, 354 aa, Homo sapiens
  Payload ID: 15244
  Gene Symbol: SUN5
  Gene Name: Sad1 and UNC84 domain containing 5
  ENSP ID: ENSP00000364673
MPRSSRSPGDPGALLEDVAHNPRPRRIAQRGRNTSRMAEDTSPNMTWFTCFACSLRTQAQQVLFNTCRCKLLCQKLMEKTGILLLCAFGFWMFSIHLPSKMKVWQDDSINGPLQSLRLYQEKVRHHSGEIQDLRGSMNQLIAKLQEMEAMSDEQKMAQKIMKMIHGDYIEKPDFALKSIGASIDFEHTSVTYNHEKAHSYWNWIQLWNYAQPPDVILEPNVTPGNCWAFEGDRGQVTIQLAQKVYLSNLTLQHIPKTISLSGSLDTAPKDFVIYGMEGSPKEEVFLGAFQFQPENIIQMFPLQNQPARAFSAVKVKISSNWGNPGFTCLYRVRVHGSVAPPREQPHQNPYPKRD

SEQ ID NO: 76369 - protein, 152 aa, Homo sapiens
  Payload ID: 15244
  Gene Symbol: SUN5
  Gene Name: Sad1 and UNC84 domain containing 5
  ENSP ID: ENSP00000400089
GALLEDVAHNPRPRRIAQRGRNTSRMAEDTSPNMNDNILLPVRNNDQALGLTQCMLGCVSWFTCFACSLRTQAQQVLFNTCRCKLLCQKLMEKTGILLLCAFGVSQGPAQSQVEVSLGPGTDYRTLGKTLHCHVTQFPHLPDGCCCENYEMK

SEQ ID NO: 76370 - protein, 453 aa, Homo sapiens
  Payload ID: 15245
  Gene Symbol: SLTM
  Gene Name: SAFB-like, transcription modulator
  ENSP ID: ENSP00000249736
MAAATGAVAASAASGQAEGKKITDLRVIDLKSELKRRNLDITGVKTVLISRLKQAIEEEGGDPDNIELTVSTDTPNKKPTKGKGKKHEADELSGDASVEDDAFIKDCELENQEAHEQDGNDELKDSEEFGENEEENVHSKELLSAEENKRAHELIEAEGIEDIEKEDIESQEIEAQEGEDDTFLTAQDGEEEENEKEGSLAEADHTAHEEMEAHTTVKEAEDDNISVTIQAEDAITLDFDGDDLLETGKNVKITDSEASKPKDGQDAIAQSPEKESKDYEMNANHKDGKKEDCVKGDPVEKEARESSKKAESGDKEKDTLKKGPSSTGASGQAKSSSKESKDSKTSSKDDKGSTSSTSGSSGSSTKNIWVSGLSSNTKAADLKNLFGKYGKVLSAKVVTNARSPGAKCYGIVTMSSSTEVSRCIAHLHRTELHGQLISVEKVKGDPSKKEMKK

SEQ ID NO: 76371 - protein, 1034 aa, Homo sapiens
  Payload ID: 15245
  Gene Symbol: SLTM
  Gene Name: SAFB-like, transcription modulator
  Uniprot ID: Q9NWH9
  ENSP ID: ENSP00000369887
MAAATGAVAASAASGQAEGKKITDLRVIDLKSELKRRNLDITGVKTVLISRLKQAIEEEGGDPDNIELTVSTDTPNKKPTKGKGKKHEADELSGDASVEDDAFIKDCELENQEAHEQDGNDELKDSEEFGENEEENVHSKELLSAEENKRAHELIEAEGIEDIEKEDIESQEIEAQEGEDDTFLTAQDGEEEENEKDIAGSGDGTQEVSKPLPSEGSLAEADHTAHEEMEAHTTVKEAEDDNISVTIQAEDAITLDFDGDDLLETGKNVKITDSEASKPKDGQDAIAQSPEKESKDYEMNANHKDGKKEDCVKGDPVEKEARESSKKAESGDKEKDTLKKGPSSTGASGQAKSSSKESKDSKTSSKDDKGSTSSTSGSSGSSTKNIWVSGLSSNTKAADLKNLFGKYGKVLSAKVVTNARSPGAKCYGIVTMSSSTEVSRCIAHLHRTELHGQLISVEKVKGDPSKKEMKKENDEKSSSRSSGDKKNTSDRSSKTQASVKKEEKRSSEKSEKKESKDTKKIEGKDEKNDNGASGQTSESIKKSEEKKRISSKSPGHMVILDQTKGDHCRPSRRGRYEKIHGRSKEKERASLDKKRDKDYRRKEILPFEKMKEQRLREHLVRFERLRRAMELRRRREIAERERRERERIRIIREREERERLQRERERLEIERQKLERERMERERLERERIRIEQERRKEAERIAREREELRRQQQQLRYEQEKRNSLKRPRDVDHRRDDPYWSENKKLSLDTDARFGHGSDYSRQQNRFNDFDHRERGRFPESSAVQSSSFERRDRFVGQSEGKKARPTARREDPSFERYPKNFSDSRRNEPPPPRNELRESDRREVRGERDERRTVIIHDRPDITHPRHPREAGPNPSRPTSWKSEGSMSTDKRETRVERPERSGREVSGHSVRGAPPGNRSSASGYGSREGDRGVITDRGGGSQHYPEERHVVERHGRDTSGPRKEWHGPPSQGPSYHDTRRMGDGRAGAGMITQHSSNASPINRIVQISGNSMPRGSGSGFKPFKGGPPRRF

SEQ ID NO: 76372 - protein, 600 aa, Homo sapiens
  Payload ID: 15245
  Gene Symbol: SLTM
  Gene Name: SAFB-like, transcription modulator
  ENSP ID: ENSP00000411534
GKVLSAKVVTNARSPGAKCYGIVTMSSSTEVSRCIAHLHRTELHGQLISVEKVKGDPSKKEMKKENDEKSSSRSSGDKKNTSDRSSKTQASVKKEEKRSSEKSEKKESKDTKKIEGSKSPGHMVILDQTKGDHCRPSRRGRYEKIHGRSKEKERASLDKKRDKDYRRKEILPFEKMKEQRLREHLVRFERLRRAMELRRRREIAERERRERERIRIIREREERERLQRERERLEIERQKLERERMERERLERERIRIEQERRKEAERIAREREELRRQQQQLRYEQEKRNSLKRPRDVDHRRDDPYWSENKKLSLDTDARFGHGSDYSRQQNRFNDFDHRERGRFPESSAVQSSSFERRDRFVGQSEGKKARPTARREDPSFERYPKNFSDSRRNEPPPPRNELRESDRREVRGERDERRTVIIHDRPDITHPRHPREAGPNPSRPTSWKSEGSMSTDKRETRVERPERSGREVSGHSVRGAPPGNRSSASGYGSREGDRGVITDRGGGSQHYPEERHVVERHGRDTSGPRKEWHGPPSQGPSYHDTRRMGDGRAGAGMITQHSSNASPINRIVQISGNSMPRGSGSGFKPFKGGPPRRF

SEQ ID NO: 76373 - protein, 100 aa, Homo sapiens
  Payload ID: 15245
  Gene Symbol: SLTM
  Gene Name: SAFB-like, transcription modulator
  ENSP ID: ENSP00000452805
GVITDRGGGSQHYPEERHVVERHGRDTSGPRKEWHGPPSQGPSYHDTRRMGDGRAGAGMITQHSSNASPINRIVQISGNSMPRGSGSGFKPFKGGPPRRF

SEQ ID NO: 76374 - protein, 205 aa, Homo sapiens
  Payload ID: 15245
  Gene Symbol: SLTM
  Gene Name: SAFB-like, transcription modulator
  ENSP ID: ENSP00000452945
  MOD_RES (1)..(1): Any amino acid
XDITGVKTVLISRLKQAIEEEGGDPDNIELTVSTDTPNKKPTKGKGKKHEADELSGDASVEDDAFIKDCELENQEAHEQDGNDELKDSEEFGENEEENVHSKELLSAEENKRAHELIEAEGIEDIEKEDIESQEIEAQEGEDDTFLTAQDGEEEENEKALQRNLKTARHHLKMTKEVQVVLVVAVEAQLKISGLVDFHLIPKLLI

SEQ ID NO: 76375 - protein, 229 aa, Homo sapiens
  Payload ID: 15245
  Gene Symbol: SLTM
  Gene Name: SAFB-like, transcription modulator
  ENSP ID: ENSP00000453065
MAAATGAVAASAASGQAEGKKITDLRVIDLKSELKRRNLDITGVKTVLISRLKQAIEEEGGDPDNIELTVSTDTPNKKPTKGKGKKHEADELSGDASVEDDAFIKDCELENQEAHEQDGNDELKDSEEFGENEEENVHSKELLSAEENKRAHELIEAEGIEDIEKEDIESQEIEAQEGEDDTFLTAQDGEEEENEKDSEASKPKDGQDAIAQSPEKESKDYEMNANHKD

SEQ ID NO: 76376 - protein, 192 aa, Homo sapiens
  Payload ID: 15245
  Gene Symbol: SLTM
  Gene Name: SAFB-like, transcription modulator
  ENSP ID: ENSP00000453179
MAAATGAVAASAASGQAEGKKITDLRVIDLKSELKRRNLDITGVKTVLISRLKQAIEEEGGDPDNIELTVSTDTPNKKPTKGKGKKHEADELSGDASVEDDAFIKDGEEEENEKDIAGSGDGTQEVSKPLPSEGSLAEADHTAHEEMEAHTTVKEAEDDNISVTIQAEDAITLDFDGDDLLETGKNVKITDS

SEQ ID NO: 76377 - protein, 62 aa, Homo sapiens
  Payload ID: 15245
  Gene Symbol: SLTM
  Gene Name: SAFB-like, transcription modulator
  ENSP ID: ENSP00000453371
MAAATGAVAASAASGQAEGKKITDLRVIDLKSELKRRNLDITGVKTVLISRLKQVKNMKQMS

SEQ ID NO: 76378 - protein, 111 aa, Homo sapiens
  Payload ID: 15245
  Gene Symbol: SLTM
  Gene Name: SAFB-like, transcription modulator
  ENSP ID: ENSP00000453662
  MOD_RES (1)..(1): Any amino acid
XLRYEQEKRNSLKRPRDVDHSKYFSSRRDDPYWSENKKLSLDTDARFGHGSDYSRQQNRFNDFDHRERGRFPESSAVQSSSFERRDRFVGQSEGKKARPTARREDPSFERY

SEQ ID NO: 76379 - protein, 177 aa, Homo sapiens
  Payload ID: 15245
  Gene Symbol: SLTM
  Gene Name: SAFB-like, transcription modulator
  ENSP ID: ENSP00000453711
MAAATGAVAASAASGQAEGKKITDLRVIDLKSELKRRNLDITGVKTVLISRLKQAIEEEGGDPDNIELTVSTDTPNKKPTKGKGKKHEADELSGDASVEDDAFIKEIEAQEGEDDTFLTAQDGEEEENEKALQRNLKTARHHLKMTKEVQVVLVVAVEAQLKISGLVDFHLIPKLLI

SEQ ID NO: 76380 - protein, 89 aa, Homo sapiens
  Payload ID: 15245
  Gene Symbol: SLTM
  Gene Name: SAFB-like, transcription modulator
  ENSP ID: ENSP00000453775
MAAATGAVAASAASGQAEGKKITDLRVIDLKSELKRRNLDITGVKTVLISRLKQAIEEEGGDPDNIELTVSTDTPNKKPTKGKDYKLKH

SEQ ID NO: 76381 - protein, 161 aa, Homo sapiens
  Payload ID: 15245
  Gene Symbol: SLTM
  Gene Name: SAFB-like, transcription modulator
  ENSP ID: ENSP00000453987
MAAATGAVAASAASGQAEGKKITDLRVIDLKSELKRRNLDITGVKTVLISRLKQAIEEEGGDPDNIELTVSTDTPNKKPTKGKGKKHEADELSGDASVEDDAFIKEIEAQEGEDDTFLTAQDGEEEENEKEGSLAEADHTAHEEMEAHTTVKEAEDDNISV

SEQ ID NO: 76382 - protein, 62 aa, Homo sapiens; identical to SEQ ID NO: 76377
  Payload ID: 15245
  Gene Symbol: SLTM
  Gene Name: SAFB-like, transcription modulator
  ENSP ID: ENSP00000454000

SEQ ID NO: 76383 - protein, 62 aa, Homo sapiens; identical to SEQ ID NO: 76377
  Payload ID: 15245
  Gene Symbol: SLTM
  Gene Name: SAFB-like, transcription modulator
  ENSP ID: ENSP00000485870

SEQ ID NO: 76384 - protein, 293 aa, Homo sapiens
  Payload ID: 15246
  Gene Symbol: SGF29
  Gene Name: SAGA complex associated factor 29
  Uniprot ID: Q96ES7
  ENSP ID: ENSP00000316114
MALVSADSRIAELLTELHQLIKQTQEERSRSEHNLVNIQKTHERMQTENKISPYYRTKLRGLYTTAKADAEAECNILRKALDKIAEIKSLLEERRIAAKIAGLYNDSEPPRKTMRRGVLMTLLQQSAMTLPLWIGKPGDKPPPLCGAIPASGDYVARPGDKVAARVKAVDGDEQWILAEVVSYSHATNKYEVDDIDEEGKERHTLSRRRVIPLPQWKANPETDPEALFQKEQLVLALYPQTTCFYRALIHAPPQRPQDDYSVLFEDTSYADGYSPPLNVAQRYVVACKEPKKK

SEQ ID NO: 76385 - protein, 90 aa, Homo sapiens
  Payload ID: 15246
  Gene Symbol: SGF29
  Gene Name: SAGA complex associated factor 29
  ENSP ID: ENSP00000454730
  MOD_RES (1)..(1): Any amino acid
XGDEQWILAEVVSYSHATNKYEALFQKEQLVLALYPQTTCFYRALIHAPPQRPQDDYSVLFEDTSYADGYSPPLNVAQRYVVACKEPKKK

SEQ ID NO: 76386 - protein, 132 aa, Homo sapiens
  Payload ID: 15246
  Gene Symbol: SGF29
  Gene Name: SAGA complex associated factor 29
  ENSP ID: ENSP00000455370
MALVSADSRIAELLTELHQLIKQTQEERSRSEHNLVNIQKTHERMQTENKISPYYRTKLRGLYTTAKADAEAECKLECNDAISVHCNLCLPGSSDSLASASQHPSESSGQDRGNQVSVGREADCGQDCRSLQ

SEQ ID NO: 76387 - protein, 128 aa, Homo sapiens
  Payload ID: 15247
  Gene Symbol: STH
  Gene Name: saitohin
  Uniprot ID: Q8IWL8
  ENSP ID: ENSP00000443168
MSEGGGQVSCIFAAPTRLCRWPALIECGVNLTQPLCEWMIQVARDRTLSLAWEVASLLTLSSSEVGLEGVGTIWPSSYSSEESSRNGAEQGRQLSIEGPFQGQNCPSHPAAALPLPMRGESQATSCQV

SEQ ID NO: 76388 - protein, 128 aa, Homo sapiens
  Payload ID: 15247
  Gene Symbol: STH
  Gene Name: saitohin
  ENSP ID: ENSP00000486737
MSEGGGRVSCIFAAPTRLCRWPALIECGVNLTQPLCEWMIQVARDRTLSLAWEVASLLTLSSSEVGLEGVGTIWPSSYSSEESSRNGAEQGRQLSIEGPFQGQNCPSHPAAALPLPMRGESQATSCQV

SEQ ID NO: 76389 - protein, 783 aa, Homo sapiens
  Payload ID: 15248
  Gene Symbol: SIK1
  Gene Name: salt-inducible kinase 1
  Uniprot ID: P57059
  ENSP ID: ENSP00000270162
MVIMSEFSADPAGQGQGQQKPLRVGFYDIERTLGKGNFAVVKLARHRVTKTQVAIKIIDKTRLDSSNLEKIYREVQLMKLLNHPHIIKLYQVMETKDMLYIVTEFAKNGEMFDYLTSNGHLSENEARKKFWQILSAVEYCHDHHIVHRDLKTENLLLDGNMDIKLADFGFGNFYKSGEPLSTWCGSPPYAAPEVFEGKEYEGPQLDIWSLGVVLYVLVCGSLPFDGPNLPTLRQRVLEGRFRIPFFMSQDCESLIRRMLVVDPARRITIAQIRQHRWMRAEPCLPGPACPAFSAHSYTSNLGDYDEQALGIMQTLGVDRQRTVESLQNSSYNHFAAIYYLLLERLKEYRNAQCARPGPARQPRPRSSDLSGLEVPQEGLSTDPFRPALLCPQPQTLVQSVLQAEMDCELQSSLQWPLFFPVDASCSGVFRPRPVSPSSLLDTAISEEARQGPGLEEEQDTQESLPSSTGRRHTLAEVSTRLSPLTAPCIVVSPSTTASPAEGTSSDSCLTFSASKSPAGLSGTPATQGLLGACSPVRLASPFLGSQSATPVLQAQGGLGGAVLLPVSFQEGRRASDTSLTQGLKAFRQQLRKTTRTKGFLGLNKIKGLARQVCQAPASRASRGGLSPFHAPAQSPGLHGGAAGSREGWSLLEEVLEQQRLLQLQHHPAAAPGCSQAPQPAPAPFVIAPCDGPGAAPLPSTLLTSGLPLLPPPLLQTGASPVASAAQLLDTHLHIGTGPTALPAVPPPRLARLAPGCEPLGLLQGDCEMEDLMPCSLGTFVLVQ

SEQ ID NO: 76390 - protein, 926 aa, Homo sapiens
  Payload ID: 15249
  Gene Symbol: SIK2
  Gene Name: salt-inducible kinase 2
  Uniprot ID: Q9H0K1
  ENSP ID: ENSP00000305976
MVMADGPRHLQRGPVRVGFYDIEGTLGKGNFAVVKLGRHRITKTEVAIKIIDKSQLDAVNLEKIYREVQIMKMLDHPHIIKLYQVMETKSMLYLVTEYAKNGEIFDYLANHGRLNESEARRKFWQILSAVDYCHGRKIVHRDLKAENLLLDNNMNIKIADFGFGNFFKSGELLATWCGSPPYAAPEVFEGQQYEGPQLDIWSMGVVLYVLVCGALPFDGPTLPILRQRVLEGRFRIPYFMSEDCEHLIRRMLVLDPSKRLTIAQIKEHKWMLIEVPVQRPVLYPQEQENEPSIGEFNEQVLRLMHSLGIDQQKTIESLQNKSYNHFAAIYFLLVERLKSHRSSFPVEQRLDGRQRRPSTIAEQTVAKAQTVGLPVTMHSPNMRLLRSALLPQASNVEAFSFPASGCQAEAAFMEEECVDTPKVNGCLLDPVPPVLVRKGCQSLPSNMMETSIDEGLETEGEAEEDPAHAFEAFQSTRSGQRRHTLSEVTNQLVVMPGAGKIFSMNDSPSLDSVDSEYDMGSVQRDLNFLEDNPSLKDIMLANQPSPRMTSPFISLRPTNPAMQALSSQKREVHNRSPVSFREGRRASDTSLTQGIVAFRQHLQNLARTKGILELNKVQLLYEQIGPEADPNLAPAAPQLQDLASSCPQEEVSQQQESVSTLPASVHPQLSPRQSLETQYLQHRLQKPSLLSKAQNTCQLYCKEPPRSLEQQLQEHRLQQKRLFLQKQSQLQAYFNQMQIAESSYPQPSQQLPLPRQETPPPSQQAPPFSLTQPLSPVLEPSSEQMQYSPFLSQYQEMQLQPLPSTSGPRAAPPLPTQLQQQQPPPPPPPPPPRQPGAAPAPLQFSYQTCELPSAASPAPDYPTPCQYPVDGAQQSDLTGPDCPRSPGLQEAPSSYDPLALSELPGLFDCEMLDAVDPQHNGYVLVN

SEQ ID NO: 76391 - protein, 383 aa, Homo sapiens
  Payload ID: 15250
  Gene Symbol: SAV1
  Gene Name: salvador family WW domain containing protein 1
  Uniprot ID: Q9H4B6
  ENSP ID: ENSP00000324729
MLSRKKTKNEVSKPAEVQGKYVKKETSPLLRNLMPSFIRHGPTIPRRTDICLPDSSPNAFSTSGDVVSRNQSFLRTPIQRTPHEIMRRESNRLSAPSYLARSLADVPREYGSSQSFVTEVSFAVENGDSGSRYYYSDNFFDGQRKRPLGDRAHEDYRYYEYNHDLFQRMPQNQGRHASGIGRVAATSLGNLTNHGSEDLPLPPGWSVDWTMRGRKYYIDHNTNTTHWSHPLEREGLPPGWERVESSEFGTYYVDHTNKKAQYRHPCAPSVPRYDQPPPVTYQPQQTERNQSLLVPANPYHTAEIPDWLQVYARAPVKYDHILKWELFQLADLDTYQGMLKLLFMKELEQIVKMYEAYRQALLTELENRKQRQQWYAQQHGKNF

SEQ ID NO: 76392 - protein, 67 aa, Homo sapiens
  Payload ID: 15250
  Gene Symbol: SAV1
  Gene Name: salvador family WW domain containing protein 1
  ENSP ID: ENSP00000450571
VTEVSFAVENGDSGSRYYYSDNFFDGQRKRPLGDRAHEDYRYYEYNHDLFQRMPQNQGRHASDMTTF

SEQ ID NO: 76393 - protein, 312 aa, Homo sapiens
  Payload ID: 15250
  Gene Symbol: SAV1
  Gene Name: salvador family WW domain containing protein 1
  ENSP ID: ENSP00000451492
RNQSFLRTPIQRTPHEIMRRESNRLSAPSYLARSLADVPREYGSSQSFVTEVSFAVENGDSGSRYYYSDNFFDGQRKRPLGDRAHEDYRYYEYNHDLFQRMPQNQGRHASGIGRVAATSLGNLTNHGSEDLPLPPGWSVDWTMRGRKYYIDHNTNTTHWSHPLEREGLPPGWERVESSEFGTYYVDHTNKKAQYRHPCAPSVPRYDQPPPVTYQPQQTERNQSLLVPANPYHTAEIPDWLQVYARAPVKYDHILKWELFQLADLDTYQGMLKLLFMKELEQIVKMYEAYRQALLTELENRKQRQQCQCCYCI

SEQ ID NO: 76394 - protein, 77 aa, Homo sapiens
  Payload ID: 15250
  Gene Symbol: SAV1
  Gene Name: salvador family WW domain containing protein 1
  ENSP ID: ENSP00000451596
MLSRKKTKNEVSKPAEVQGKYVKKETSPLLRNASRCASCLQTLRVSLDCAASCANSGAEFLSPAAGCRLEKILCLHS

SEQ ID NO: 76395 - protein, 89 aa, Homo sapiens
  Payload ID: 15250
  Gene Symbol: SAV1
  Gene Name: salvador family WW domain containing protein 1
  ENSP ID: ENSP00000452104
  MOD_RES (1)..(1): Any amino acid
XFGTYYVDHTNKKAQYRHPCAPRYDHILKWELFQLADLDTYQGMLKLLFMKELEQIVKMYEAYRQALLTELENRKQRQQWYAQQHGKNF

SEQ ID NO: 76396 - protein, 1247 aa, Homo sapiens
  Payload ID: 15251
  Gene Symbol: SASH1
  Gene Name: SAM and SH3 domain containing 1
  Uniprot ID: O94885
  ENSP ID: ENSP00000356437
MEDAGAAGPGPEPEPEPEPEPEPAPEPEPEPKPGAGTSEAFSRLWTDVMGILDGSLGNIDDLAQQYADYYNTCFSDVCERMEELRKRRVSQDLEVEKPDASPTSLQLRSQIEESLGFCSAVSTPEVERKNPLHKSNSEDSSVGKGDWKKKNKYFWQNFRKNQKGIMRQTSKGEDVGYVASEITMSDEERIQLMMMVKEKMITIEEALARLKEYEAQHRQSAALDPADWPDGSYPTFDGSSNCNSREQSDDETEESVKFKRLHKLVNSTRRVRKKLIRVEEMKKPSTEGGEEHVFENSPVLDERSALYSGVHKKPLFFDGSPEKPPEDDSDSLTTSPSSSSLDTWGAGRKLVKTFSKGESRGLIKPPKKMGTFFSYPEEEKAQKVSRSLTEGEMKKGLGSLSHGRTCSFGGFDLTNRSLHVGSNNSDPMGKEGDFVYKEVIKSPTASRISLGKKVKSVKETMRKRMSKKYSSSVSEQDSGLDGMPGSPPPSQPDPEHLDKPKLKAGGSVESLRSSLSGQSSMSGQTVSTTDSSTSNRESVKSEDGDDEEPPYRGPFCGRARVHTDFTPSPYDTDSLKLKKGDIIDIISKPPMGTWMGLLNNKVGTFKFIYVDVLSEDEEKPKRPTRRRRKGRPPQPKSVEDLLDRINLKEHMPTFLFNGYEDLDTFKLLEEEDLDELNIRDPEHRAVLLTAVELLQEYDSNSDQSGSQEKLLVDSQGLSGCSPRDSGCYESSENLENGKTRKASLLSAKSSTEPSLKSFSRNQLGNYPTLPLMKSGDALKQGQEEGRLGGGLAPDTSKSCDPPGVTGLNKNRRSLPVSICRSCETLEGPQTVDTWPRSHSLDDLQVEPGAEQDVPTEVTEPPPQIVPEVPQKTTASSTKAQPLEQDSAVDNALLLTQSKRFSEPQKLTTKKLEGSIAASGRGLSPPQCLPRNYDAQPPGAKHGLARTPLEGHRKGHEFEGTHHPLGTKEGVDAEQRMQPKIPSQPPPVPAKKSRERLANGLHPVPMGPSGALPSPDAPCLPVKRGSPASPTSPSDCPPALAPRPLSGQAPGSPPSTRPPPWLSELPENTSLQEHGVKLGPALTRKVSCARGVDLETLTENKLHAEGIDLTEEPYSDKHGRCGIPEALVQRYAEDLDQPERDVAANMDQIRVKQLRKQHRMAIPSGGLTEICRKPVSPGCISSVSDWLISIGLPMYAGTLSTAGFSTLSQVPSLSHTCLQEAGITEERHIRKLLSAARLFKLPPGPEAM

SEQ ID NO: 76397 - protein, 84 aa, Homo sapiens
  Payload ID: 15251
  Gene Symbol: SASH1
  Gene Name: SAM and SH3 domain containing 1
  ENSP ID: ENSP00000356439
MEEQDCRDGSLGNIDDLAQQYADYYNTCFSDVCERMEELRKRRVSQDLEVEKPDASPTSLQLRSQIEESLGFCSAVSTPEVERK

SEQ ID NO: 76398 - protein, 657 aa, Homo sapiens
  Payload ID: 15251
  Gene Symbol: SASH1
  Gene Name: SAM and SH3 domain containing 1
  ENSP ID: ENSP00000479998
MGTWMGLLNNKVGTFKFIYVDVLSEDEEKPKRPTRRRRKGRPPQPKSVEDLLDRINLKEHMPTFLFNGYEDLDTFKLLEEEDLDELNIRDPEHRAVLLTAVELLQEYDSNSDQSGSQEKLLVDSQGLSGCSPRDSGCYESSENLENGKTRKASLLSAKSSTEPSLKSFSRNQLGNYPTLPLMKSGDALKQGQEEGRLGGGLAPDTSKSCDPPGVTGLNKNRRSLPVSICRSCETLEGPQTVDTWPRSHSLDDLQVEPGAEQDVPTEVTEPPPQIVPEVPQKTTASSTKAQPLEQDSAVDNALLLTQSKRFSEPQKLTTKKLEGSIAASGRGLSPPQCLPRNYDAQPPGAKHGLARTPLEGHRKGHEFEGTHHPLGTKEGVDAEQRMQPKIPSQPPPVPAKKSRERLANGLHPVPMGPSGALPSPDAPCLPVKRGSPASPTSPSDCPPALAPRPLSGQAPGSPPSTRPPPWLSELPENTSLQEHGVKLGPALTRKVSCARGVDLETLTENKLHAEGIDLTEEPYSDKHGRCGIPEALVQRYAEDLDQPERDVAANMDQIRVKQLRKQHRMAIPSGGLTEICRKPVSPGCISSVSDWLISIGLPMYAGTLSTAGFSTLSQVPSLSHTCLQEAGITEERHIRKLLSAARLFKLPPGPEAM

SEQ ID NO: 76399 - protein, 380 aa, Homo sapiens
  Payload ID: 15252
  Gene Symbol: SASH3
  Gene Name: SAM and SH3 domain containing 3
  Uniprot ID: O75995
  ENSP ID: ENSP00000349359
MLRRKPSNASEKEPTQKKKLSLQRSSSFKDFAKSKPSSPVVSEKEFNLDDNIPEDDSGVPTPEDAGKSGKKLGKKWRAVISRTMNRKMGKMMVKALSEEMADTLEEGSASPTSPDYSLDSPGPEKMALAFSEQEEHELPVLSRQASTGSELCSPSPGSGSFGEEPPAPQYTGPFCGRARVHTDFTPSPYDHDSLKLQKGDVIQIIEKPPVGTWLGLLNGKVGSFKFIYVDVLPEEAVGHARPSRRQSKGKRPKPKTLHELLERIGLEEHTSTLLLNGYQTLEDFKELRETHLNELNIMDPQHRAKLLTAAELLLDYDTGSEEAEEGAESSQEPVAHTVSEPKVDIPRDSGCFEGSESGRDDAELAGTEEQLQGLSLAGAP

SEQ ID NO: 76400 - protein, 626 aa, Homo sapiens
  Payload ID: 15253
  Gene Symbol: SAMHD1
  Gene Name: SAM domain and HD domain 1
  Uniprot ID: Q9Y3Z3
  ENSP ID: ENSP00000262878
MQRADSEQPSKRPRCDDSPRTPSNTPSAEADWSPGLELHPDYKTWGPEQVCSFLRRGGFEEPVLLKNIRENEITGALLPCLDESRFENLGVSSLGERKKLLSYIQRLVQIHVDTMKVINDPIHGHIELHPLLVRIIDTPQFQRLRYIKQLGGGYYVFPGASHNRFEHSLGVGYLAGCLVHALGEKQPELQISERDVLCVQIAGLCHDLGHGPFSHMFDGRFIPLARPEVKWTHEQGSVMMFEHLINSNGIKPVMEQYGLIPEEDICFIKEQIVGPLESPVEDSLWPYKGRPENKSFLYEIVSNKRNGIDVDKWDYFARDCHHLGIQNNFDYKRFIKFARVCEVDNELRICARDKEVGNLYDMFHTRNSLHRRAYQHKVGNIIDTMITDAFLKADDYIEITGAGGKKYRISTAIDDMEAYTKLTDNIFLEILYSTDPKLKDAREILKQIEYRNLFKYVGETQPTGQIKIKREDYESLPKEVASAKPKVLLDVKLKAEDFIVDVINMDYGMQEKNPIDHVSFYCKTAPNRAIRITKNQVSQLLPEKFAEQLIRVYCKKVDRKSLYAARQYFVQWCADRNFTKPQDGDVIAPLITPQKKEWNDSTSVQNPTRLREASKSRVQLFKDDPM

SEQ ID NO: 76401 - protein, 441 aa, Homo sapiens
  Payload ID: 15254
  Gene Symbol: SAMSN1
  Gene Name: SAM domain, SH3 domain and nuclear localization signals 1
  Uniprot ID: Q9NSI8
  ENSP ID: ENSP00000285670
MEIRLDTLSASLGRSSTLNNCNLEDKLAWYEGEAYMWHHWKPFPENPLWTCLDFQIAQVGPWDHCSSCIRHTRLKSSCSDMDLLHSWRSSSFGNFDRFRNNSLSKPDDSTEAHEGDPTNGSGEQSKTSNNGGGLGKKMRAISWTMKKKVGKKYIKALSEEKDEEDGENAHPYRNSDPVIGTHTEKVSLKASDSMDSLYSGQSSSSGITSCSDGTSNRDSFRLDDDGPYSGPFCGRARVHTDFTPSPYDTDSLKIKKGDIIDIICKTPMGMWTGMLNNKVGNFKFIYVDVISEEEAAPKKIKANRRSNSKKSKTLQEFLERIHLQEYTSTLLLNGYETLEDLKDIKESHLIELNIENPDDRRRLLSAAENFLEEEIIQEQENEPEPLSLSSDISLNKSQLDDCPRDSGCYISSGNSDNGKEDLESENLSDMVHKIIITEPSD

SEQ ID NO: 76402 - protein, 205 aa, Homo sapiens
  Payload ID: 15254
  Gene Symbol: SAMSN1
  Gene Name: SAM domain, SH3 domain and nuclear localization signals 1
  Uniprot ID: Q9NSI8
  ENSP ID: ENSP00000383409
MLKRKPSNVSEKEKHQKPKKGDIIDIICKTPMGMWTGMLNNKVGNFKFIYVDVISEEEAAPKKIKANRRSNSKKSKTLQEFLERIHLQEYTSTLLLNGYETLEDLKDIKESHLIELNIENPDDRRRLLSAAENFLEEEIIQEQENEPEPLSLSSDISLNKSQLDDCPRDSGCYISSGNSDNGKEDLESENLSDMVHKIIITEPSD

SEQ ID NO: 76403 - protein, 373 aa, Homo sapiens
  Payload ID: 15254
  Gene Symbol: SAMSN1
  Gene Name: SAM domain, SH3 domain and nuclear localization signals 1
  Uniprot ID: Q9NSI8
  ENSP ID: ENSP00000383411
MLKRKPSNVSEKEKHQKPKRSSSFGNFDRFRNNSLSKPDDSTEAHEGDPTNGSGEQSKTSNNGGGLGKKMRAISWTMKKKVGKKYIKALSEEKDEEDGENAHPYRNSDPVIGTHTEKVSLKASDSMDSLYSGQSSSSGITSCSDGTSNRDSFRLDDDGPYSGPFCGRARVHTDFTPSPYDTDSLKIKKGDIIDIICKTPMGMWTGMLNNKVGNFKFIYVDVISEEEAAPKKIKANRRSNSKKSKTLQEFLERIHLQEYTSTLLLNGYETLEDLKDIKESHLIELNIENPDDRRRLLSAAENFLEEEIIQEQENEPEPLSLSSDISLNKSQLDDCPRDSGCYISSGNSDNGKEDLESENLSDMVHKIIITEPSD

SEQ ID NO: 76404 - protein, 304 aa, Homo sapiens
  Payload ID: 15254
  Gene Symbol: SAMSN1
  Gene Name: SAM domain, SH3 domain and nuclear localization signals 1
  ENSP ID: ENSP00000480850
MRAISWTMKKKVGKKYIKALSEEKDEEDGENAHPYRNSDPVIGTHTEKVSLKASDSMDSLYSGQSSSSGITSCSDGTSNRDSFRLDDDGPYSGPFCGRARVHTDFTPSPYDTDSLKIKKGDIIDIICKTPMGMWTGMLNNKVGNFKFIYVDVISEEEAAPKKIKANRRSNSKKSKTLQEFLERIHLQEYTSTLLLNGYETLEDLKDIKESHLIELNIENPDDRRRLLSAAENFLEEEIIQEQENEPEPLSLSSDISLNKSQLDDCPRDSGCYISSGNSDNGKEDLESENLSDMVHKIIITEPSD

SEQ ID NO: 76405 - protein, 335 aa, Homo sapiens
  Payload ID: 15255
  Gene Symbol: SPDEF
  Gene Name: SAM pointed domain containing ETS transcription factor
  Uniprot ID: O95238
  ENSP ID: ENSP00000363149
MGSASPGLSSVSPSHLLLPPDTVSRTGLEKAAAGAVGLERRDWSPSPPATPEQGLSAFYLSYFDMLYPEDSSWAAKAPGASSREEPPEEPEQCPVIDSQAPAGSLDLVPGGLTLEEHSLEQVQSMVVGEVLKDIETACKLLNITADPMDWSPSNVQKWLLWTEHQYRLPPMGKAFQELAGKELCAMSEEQFRQRSPLGGDVLHAHLDIWKSAAWMKERTSPGAIHYCASTSEESWTDSEVDSSCSGQPIHLWQFLKELLLKPHSYGRFIRWLNKEKGIFKIEDSAQVARLWGIRKNRPAMNYDKLSRSIRQYYKKGIIRKPDISQRLVYQFVHPI

SEQ ID NO: 76406 - protein, 319 aa, Homo sapiens
  Payload ID: 15255
  Gene Symbol: SPDEF
  Gene Name: SAM pointed domain containing ETS transcription factor
  Uniprot ID: O95238
  ENSP ID: ENSP00000442715
MGSASPGLSSVSPSHLLLPPDTVSRTGLEKAAAGAVGLERRDWSPSPPATPEQGLSAFYLSYFDMLYPEDSSWAAKAPGASSREEPPEEPEQCPVIDSQAPAGSLDLVPGGLTLEEHSLEQVQSMVVGEVLKDIETACKLLNITADPMDWSPSNVQKWLLWTEHQYRLPPMGKAFQELAGKELCAMSEEQFRQRSPLGGDVLHAHLDIWKSASTSEESWTDSEVDSSCSGQPIHLWQFLKELLLKPHSYGRFIRWLNKEKGIFKIEDSAQVARLWGIRKNRPAMNYDKLSRSIRQYYKKGIIRKPDISQRLVYQFVHPI

SEQ ID NO: 76407 - protein, 469 aa, Homo sapiens
  Payload ID: 15256
  Gene Symbol: SAMM50
  Gene Name: SAMM50 sorting and assembly machinery component
  Uniprot ID: Q9Y512
  ENSP ID: ENSP00000345445
MGTVHARSLEPLPSSGPDFGGLGEEAEFVEVEPEAKQEILENKDVVVQHVHFDGLGRTKDDIIICEIGDVFKAKNLIEVMRKSHEAREKLLRLGIFRQVDVLIDTCQGDDALPNGLDVTFEVTELRRLTGSYNTMVGNNEGSMVLGLKLPNLLGRAEKVTFQFSYGTKETSYGLSFFKPRPGNFERNFSVNLYKVTGQFPWSSLRETDRGMSAEYSFPIWKTSHTVKWEGVWRELGCLSRTASFAVRKESGHSLKSSLSHAMVIDSRNSSILPRRGALLKVNQELAGYTGGDVSFIKEDFELQLNKQLIFDSVFSASFWGGMLVPIGDKPSSIADRFYLGGPTSIRGFSMHSIGPQSEGDYLGGEAYWAGGLHLYTPLPFRPGQGGFGELFRTHFFLNAGNLCNLNYGEGPKAHIRKLAECIRWSYGAGIVLRLGNIARLELNYCVPMGVQTGDRICDGVQFGAGIRFL

SEQ ID NO: 76408 - protein, 405 aa, Homo sapiens
  Payload ID: 15257
  Gene Symbol: SAG
  Gene Name: S-antigen
  retina and pineal gland (arrestin)
  Uniprot ID: P10523
  ENSP ID: ENSP00000386444
MAASGKTSKSEPNHVIFKKISRDKSVTIYLGNRDYIDHVSQVQPVDGVVLVDPDLVKGKKVYVTLTCAFRYGQEDIDVIGLTFRRDLYFSRVQVYPPVGAASTPTKLQESLLKKLGSNTYPFLLTFPDYLPCSVMLQPAPQDSGKSCGVDFEVKAFATDSTDAEEDKIPKKSSVRLLIRKVQHAPLEMGPQPRAEAAWQFFMSDKPLHLAVSLNKEIYFHGEPIPVTVTVTNNTEKTVKKIKAFVEQVANVVLYSSDYYVKPVAMEEAQEKVPPNSTLTKTLTLLPLLANNRERRGIALDGKIKHEDTNLASSTIIKEGIDRTVLGILVSYQIKVKLTVSGFLGELTSSEVATEVPFRLMHPQPEDPAKESYQDANLVFEEFARHNLKDAGEAEEGKRDKNDVDE

SEQ ID NO: 76409 - protein, 35 aa, Homo sapiens
  Payload ID: 15257
  Gene Symbol: SAG
  Gene Name: S-antigen
  retina and pineal gland (arrestin)
  ENSP ID: ENSP00000404733
MAASGKTSKSEPNHVIFKKISRDKSMVSCWLILIL

SEQ ID NO: 76410 - protein, 169 aa, Homo sapiens
  Payload ID: 15257
  Gene Symbol: SAG
  Gene Name: S-antigen
  retina and pineal gland (arrestin)
  ENSP ID: ENSP00000408937
MAASGKTSKSEPNHVIFKKISRDKSVTIYLGNRDYIDHVSQVQPVDGVVLVDPDLVKGKKVYVTLTCAFRYGQEDIDVIGLTFRRDLYFSRVQVYPPVGAASTPTKLQESLLKKLGSNTYPFLLTFPDYLPCSVMLQPAPQDSGKSCGVDFEVKAFATDSTDAEEDKIP

SEQ ID NO: 76411 - protein, 130 aa, Homo sapiens
  Payload ID: 15257
  Gene Symbol: SAG
  Gene Name: S-antigen
  retina and pineal gland (arrestin)
  ENSP ID: ENSP00000409475
MAASGKTSKSEPNHVIFKKISRDKSVTIYLGNRDYIDHVSQVQPVDGVVLVDPDLVKGKKGEMKPLVSGWFLGGVDCSLGGSGKGHLHGRRDRKAEAALLHMEPVPGPLTHTPVPNSRDIGPVDTRAHSL

SEQ ID NO: 76412 - protein, 130 aa, Homo sapiens; identical to SEQ ID NO: 76411
  Payload ID: 15257
  Gene Symbol: SAG
  Gene Name: S-antigen
  retina and pineal gland (arrestin)
  ENSP ID: ENSP00000485836

SEQ ID NO: 76413 - protein, 35 aa, Homo sapiens; identical to SEQ ID NO: 76409
  Payload ID: 15257
  Gene Symbol: SAG
  Gene Name: S-antigen
  retina and pineal gland (arrestin)
  ENSP ID: ENSP00000486299

SEQ ID NO: 76414 - protein, 405 aa, Homo sapiens; identical to SEQ ID NO: 76408
  Payload ID: 15257
  Gene Symbol: SAG
  Gene Name: S-antigen
  retina and pineal gland (arrestin)
  Uniprot ID: P10523
  ENSP ID: ENSP00000486571

SEQ ID NO: 76415 - protein, 169 aa, Homo sapiens; identical to SEQ ID NO: 76410
  Payload ID: 15257
  Gene Symbol: SAG
  Gene Name: S-antigen
  retina and pineal gland (arrestin)
  ENSP ID: ENSP00000487232

SEQ ID NO: 76416 - protein, 210 aa, Homo sapiens
  Payload ID: 15258
  Gene Symbol: SARNP
  Gene Name: SAP domain containing ribonucleoprotein
  Uniprot ID: P82979
  ENSP ID: ENSP00000337632
MATETVELHKLKLAELKQECLARGLETKGIKQDLIHRLQAYLEEHAEEEANEEDVLGDETEEEETKPIELPVKEEEPPEKTVDVAAEKKVVKITSEIPQTERMQKRAERFNVPVSLESKKAARAARFGISSVPTKGLSSDNKPMVNLDKLKERAQRFGLNVSSISRKSEDDEKLKKRKERFGIVTSSAGTGTTEDTEAKKRKRAERFGIA

SEQ ID NO: 76417 - protein, 213 aa, Homo sapiens
  Payload ID: 15258
  Gene Symbol: SARNP
  Gene Name: SAP domain containing ribonucleoprotein
  ENSP ID: ENSP00000447690
MATETVELHKLKLAELKQECLARGLETKGIKQDLIHRLQAYLEEHAEEEANEEDVLGDETEEEETKPIELPVKEEEPPEKTVDVAAEKKVVKITSEIPQTERMQKRAERFNVPVSLESKKAARAARFGISSVPTKGLSSDNKPMVNLDKLKERAQRFGLNVSSISRKSEDDEKLKKRKERFGIVTSSAGTGTTEDTEVKIYLERFIDLEGKLE

SEQ ID NO: 76418 - protein, 52 aa, Homo sapiens
  Payload ID: 15258
  Gene Symbol: SARNP
  Gene Name: SAP domain containing ribonucleoprotein
  ENSP ID: ENSP00000448455
MATETVELHKLKLAELKQECLARGLETKGIKQDLIHRLQAYLEEHGRRNKAH

SEQ ID NO: 76419 - protein, 210 aa, Homo sapiens; identical to SEQ ID NO: 76416
  Payload ID: 15258
  Gene Symbol: SARNP
  Gene Name: SAP domain containing ribonucleoprotein
  Uniprot ID: P82979
  ENSP ID: ENSP00000449409

SEQ ID NO: 76420 - protein, 235 aa, Homo sapiens
  Payload ID: 15259
  Gene Symbol: SAP30BP
  Gene Name: SAP30 binding protein
  ENSP ID: ENSP00000293208
MAGKKNVLSSLAVYAEDSEPESDGEAGIEAVGSAAEEKGGLVSDAYGEDDFSRLGGDEDGYEEEEDENSRQSDNTEAEKRDPQELVASFSERVRNMSPDEIKIPPEPPGRCSNHLQDKIQKLYERKIKEGMDMNYIIQRKKEFRNPSIYEKLIQFCAIDELGTNYPKDMFDPHGWSEDSYYEALAKAQKIEMDKLEKAKKERTKACCRDVSAAPGDRSCPSPVRAGTASSWVLSL

SEQ ID NO: 76421 - protein, 292 aa, Homo sapiens
  Payload ID: 15259
  Gene Symbol: SAP30BP
  Gene Name: SAP30 binding protein
  Uniprot ID: Q9UHR5
  ENSP ID: ENSP00000347592
MAGKKNVLSSLAVYAEDSEPESDGEAGIEAVGSAAEEKGGLVSDAYGEDDFSRLGGDEDGYEEEEDENSRQSDNTEAEKRDPQELVASFSERVRNMSPDEIKIPPEPPGRCSNHLQDKIQKLYERKIKEGMDMNYIIQRKKEFRNPSIYEKLIQFCAIDELGTNYPKDMFDPHGWSEDSYYEALAKAQKIEMDKLEKAKKERTKIEFVTGTKKGTTTNATSTTTTTASTAVADAQKRKSKWDSAIPVTTIAQPTILTTTATLPAVVTVTTSASGSKTTVISAVGTIVKKAKQ

SEQ ID NO: 76422 - protein, 168 aa, Homo sapiens
  Payload ID: 15259
  Gene Symbol: SAP30BP
  Gene Name: SAP30 binding protein
  ENSP ID: ENSP00000446117
MAGKKNVLSSLAVYAEDSEPESDGEAGIEAVGSAAEEKGGLVSDAYGEDDFSRLGGDEDGYEEEEDENSRQSEDDDSETEKPEADDPKDNTEAEKRDPQELVASFSERVRNMSPDEIKIPPEPPGRCSNHLQDKIQKLYERKIKEGMDMNYIIQRKKEFRNPSQGPEN

SEQ ID NO: 76423 - protein, 308 aa, Homo sapiens
  Payload ID: 15259
  Gene Symbol: SAP30BP
  Gene Name: SAP30 binding protein
  Uniprot ID: Q9UHR5
  ENSP ID: ENSP00000462116
MAGKKNVLSSLAVYAEDSEPESDGEAGIEAVGSAAEEKGGLVSDAYGEDDFSRLGGDEDGYEEEEDENSRQSEDDDSETEKPEADDPKDNTEAEKRDPQELVASFSERVRNMSPDEIKIPPEPPGRCSNHLQDKIQKLYERKIKEGMDMNYIIQRKKEFRNPSIYEKLIQFCAIDELGTNYPKDMFDPHGWSEDSYYEALAKAQKIEMDKLEKAKKERTKIEFVTGTKKGTTTNATSTTTTTASTAVADAQKRKSKWDSAIPVTTIAQPTILTTTATLPAVVTVTTSASGSKTTVISAVGTIVKKAKQ

SEQ ID NO: 76424 - protein, 109 aa, Homo sapiens
  Payload ID: 15259
  Gene Symbol: SAP30BP
  Gene Name: SAP30 binding protein
  ENSP ID: ENSP00000462133
MSPDEIKIPPEPPGRCSNHLQDKIQKLYERKIKEGMDMNYIIQRKKEFRNPSIYEKLIQFCAIDELGTNYPKDMFDPHGWSEDSYYEALAKAQKIEMDKLEKAKKERTK

SEQ ID NO: 76425 - protein, 179 aa, Homo sapiens
  Payload ID: 15259
  Gene Symbol: SAP30BP
  Gene Name: SAP30 binding protein
  ENSP ID: ENSP00000462166
MAGKKNVLSSLAVYAEDSEPESDGEAGIEAVGSAAEEKGGLVSDAYGEDDFSRLGGDEDGYEEEEDENSRQSEDDDSETEKPEADDPKDNTEAEKRDPQELVASFSERVRNMSPDEIKIPPEPPGRCSNHLQDKIQKLYERKIKEGMDMNYIIQRKKEFRNPRICLIPMAGLRTPTMRH

SEQ ID NO: 76426 - protein, 104 aa, Homo sapiens
  Payload ID: 15259
  Gene Symbol: SAP30BP
  Gene Name: SAP30 binding protein
  ENSP ID: ENSP00000462255
  MOD_RES (1)..(1): Any amino acid
XEKGGLVSDAYGEDDFSRLGGDEDGYEEEEDENSRQSEDDDSETEKPEADDPKDNTEAEKRDPQELVASFSERVRNMSPDEIKIPPEPPGRCSNHLQVSMRLGY

SEQ ID NO: 76427 - protein, 36 aa, Homo sapiens
  Payload ID: 15259
  Gene Symbol: SAP30BP
  Gene Name: SAP30 binding protein
  ENSP ID: ENSP00000462825
MAGKKNVLSSLAVYAEDSEPESDGEAGIEAVGSAAG

SEQ ID NO: 76428 - protein, 36 aa, Homo sapiens; identical to SEQ ID NO: 76427
  Payload ID: 15259
  Gene Symbol: SAP30BP
  Gene Name: SAP30 binding protein
  ENSP ID: ENSP00000463261

SEQ ID NO: 76429 - protein, 248 aa, Homo sapiens
  Payload ID: 15259
  Gene Symbol: SAP30BP
  Gene Name: SAP30 binding protein
  ENSP ID: ENSP00000463545
  MOD_RES (1)..(1): Any amino acid
XAGKKNVLSSLAVYAEDSEPESDGEAGIEAVGSAAEEKGGLVSDAYGEDDFSRLGGDEDGYEEEEDENSRQSEDDDSETEKPEADDPKDNTEAEKRDPQELVASFSERVRNMSPDEIKIPPEPPGRCSNHLQDKIQKLYERKIKEGMDMNYIIQRKKEFRNPSIYEKLIQFCAIDELGTNYPKDMFDPHGWSEDSYYEALAKAQKIEMDKLEKAKKERTKACCRDVSAAPGDRSCPSPVRAGTASSWV

SEQ ID NO: 76430 - protein, 93 aa, Homo sapiens
  Payload ID: 15259
  Gene Symbol: SAP30BP
  Gene Name: SAP30 binding protein
  ENSP ID: ENSP00000463615
MSPDEIKIPPEPPGRCSNHLQDKIQKLYERKIKEGMDMNYIIQRKKEFRNPSIYEKLIQFCAIDELGTNYPKDMFDPHGWSEDSYYEALAKAQ

SEQ ID NO: 76431 - protein, 325 aa, Homo sapiens
  Payload ID: 15259
  Gene Symbol: SAP30BP
  Gene Name: SAP30 binding protein
  ENSP ID: ENSP00000463758
  MOD_RES (1)..(1): Any amino acid
XEPESDGEAGIEAVGSAAEEKGGLVSDAYGEDDFSRLGGDEDGYEEEEDENSRQSEDDDSETEKPEADDPKEKLGTVTEAPRAQQAHGPACWTQRAEESHSKHDKDNTEAEKRDPQELVASFSERVRNMSPDEIKIPPEPPGRCSNHLQDKIQKLYERKIKEGMDMNYIIQRKKEFRNPSIYEKLIQFCAIDELGTNYPKDMFDPHGWSEDSYYEALAKAQKIEMDKLEKAKKERTKIEFVTGTKKGTTTNATSTTTTTASTAVADAQKRKSKWDSAIPVTTIAQPTILTTTATLPAVVTVTTSASGSKTTVISAVGTIVKKAKQ

SEQ ID NO: 76432 - protein, 37 aa, Homo sapiens
  Payload ID: 15259
  Gene Symbol: SAP30BP
  Gene Name: SAP30 binding protein
  ENSP ID: ENSP00000464459
MAGKKNVLSSLAVYAEDSEPESDGEAGIEAVGSAAGR

SEQ ID NO: 76433 - protein, 183 aa, Homo sapiens
  Payload ID: 15260
  Gene Symbol: SAP30L
  Gene Name: SAP30-like
  Uniprot ID: Q9HAJ7
  ENSP ID: ENSP00000297109
MNGFSTEEDSREGPPAAPAAAAPGYGQSCCLIEDGERCVRPAGNASFSKRVQKSISQKKLKLDIDKSVRHLYICDFHKNFIQSVRNKRKRKTSDDGGDSPEHDTDIPEVDLFQLQVNTLRRYKRHYKLQTRPGFNKAQLAETVSRHFRNIPVNEKETLAYFIYMVKSNKSRLDQKSEGGKQLE

SEQ ID NO: 76434 - protein, 142 aa, Homo sapiens
  Payload ID: 15260
  Gene Symbol: SAP30L
  Gene Name: SAP30-like
  Uniprot ID: Q9HAJ7
  ENSP ID: ENSP00000390927
MNGFSTEEDSREGPPAAPAAAAPGYGQSCCLIEDGERCVRPAGNASFSKRVQKSISQKKLKLDIDKSVDLFQLQVNTLRRYKRHYKLQTRPGFNKAQLAETVSRHFRNIPVNEKETLAYFIYMVKSNKSRLDQKSEGGKQLE

SEQ ID NO: 76435 - protein, 137 aa, Homo sapiens
  Payload ID: 15260
  Gene Symbol: SAP30L
  Gene Name: SAP30-like
  Uniprot ID: Q9HAJ7
  ENSP ID: ENSP00000416393
MNGFSTEEDSREGPPAAPAAAAPGYGQSCCLIEDGERCVRPAGNASFSKRVQKSISQKKLKLDIDKSLQVNTLRRYKRHYKLQTRPGFNKAQLAETVSRHFRNIPVNEKETLAYFIYMVKSNKSRLDQKSEGGKQLE

SEQ ID NO: 76436 - protein, 473 aa, Homo sapiens
  Payload ID: 15261
  Gene Symbol: SRL
  Gene Name: sarcalumenin
  Uniprot ID: Q86TD4
  ENSP ID: ENSP00000382518
MRALVLLGCLLASLLFSGQAEETEDANEEAPLRDRSHIEKTLMLNEDKPSDDYSAVLQRLRKIYHSSIKPLEQSYKYNELRQHEITDGEITSKPMVLFLGPWSVGKSTMINYLLGLENTRYQLYTGAEPTTSEFTVLMHGPKLKTIEGIVMAADSARSFSPLEKFGQNFLEKLIGIEVPHKLLERVTFVDTPGIIENRKQQERGYPFNDVCQWFIDRADLIFVVFDPTKLDVGLELEMLFRQLKGRESQIRIILNKADNLATQMLMRVYGALFWSLAPLINVTEPPRVYVSSFWPQEYKPDTHQELFLQEEISLLEDLNQVIENRLENKIAFIRQHAIRVRIHALLVDRYLQTYKDKMTFFSDGELVFKDIVEDPDKFYIFKTILAKTNVSKFDLPNREAYKDFFGINPISSFKLLSQQCSYMGGCFLEKIERAITQELPGLLGSLGLGKNPGALNCDKTGCSETPKNRYRKH

SEQ ID NO: 76437 - protein, 431 aa, Homo sapiens
  Payload ID: 15261
  Gene Symbol: SRL
  Gene Name: sarcalumenin
  ENSP ID: ENSP00000440350
MLNEDKPSDDYSAVLQRLRKIYHSSIKPLEQSYKYNELRQHEITDGEITSKPMVLFLGPWSVGKSTMINYLLGLENTRYQLYTGAEPTTSEFTVLMHGPKLKTIEGIVMAADSARSFSPLEKFGQNFLEKLIGIEVPHKLLERVTFVDTPGIIENRKQQERGYPFNDVCQWFIDRADLIFVVFDPTKLDVGLELEMLFRQLKGRESQIRIILNKADNLATQMLMRVYGALFWSLAPLINVTEPPRVYVSSFWPQEYKPDTHQELFLQEEISLLEDLNQVIENRLENKIAFIRQHAIRVRIHALLVDRYLQTYKDKMTFFSDGELVFKDIVEDPDKFYIFKTILAKTNVSKFDLPNREAYKDFFGINPISSFKLLSQQCSYMGGCFLEKIERAITQELPGLLGSLGLGKNPGALNCDKTGCSETPKNRYRKH

SEQ ID NO: 76438 - protein, 486 aa, Homo sapiens
  Payload ID: 15261
  Gene Symbol: SRL
  Gene Name: sarcalumenin
  ENSP ID: ENSP00000461179
MRALVLLGCLLASLLFSGQAELQVSASGGTEDVGNLLENHFSAGDASLEEKERALYADTAPQDKKLLLHYPDGREAESPKKTPASAASAGPDPEASLSNASATESPPPGERDDRDAAGPGEEKNGPPVASALPPGGAKGPVEEEWPEPSSGEGQGEEETGFGLPTEGTASGEAGGQAGGHELPEEVQEVQGDSLVQGAVAGTAEPKAEGASPHSEGDGVGPLNAEAEGSPGPGEEPAVPEGAPDVAAVGGESEPDIDTQASEGTEDQGEPGPAAEASAEPGGAQSVKAGDTEENQSPEMTEEDADEASSEEESGDGSGSEEEGGVPSEEESEEDSGDGASSEEAEGASEEATEPQEAGEPQEAREPQEGGDLQEAEESQEGGDPQEAEEPQEGGAPQEGGEPQEGGDPQEAREPQEAREPQEGAELPEATGTTSHRDRGAQPGPEELNTESMGSETLDMKAEEPEEGHQGEGESHHCCPGRDGGCK

SEQ ID NO: 76439 - protein, 387 aa, Homo sapiens
  Payload ID: 15262
  Gene Symbol: SGCA
  Gene Name: sarcoglycan, alpha (50kDa dystrophin-associated glycoprotein)
  Uniprot ID: Q16586
  ENSP ID: ENSP00000262018
MAETLFWTPLLVVLLAGLGDTEAQQTTLHPLVGRVFVHTLDHETFLSLPEHVAVPPAVHITYHAHLQGHPDLPRWLRYTQRSPHHPGFLYGSATPEDRGLQVIEVTAYNRDSFDTTRQRLVLEIGDPEGPLLPYQAEFLVRSHDAEEVLPSTPASRFLSALGGLWEPGELQLLNVTSALDRGGRVPLPIEGRKEGVYIKVGSASPFSTCLKMVASPDSHARCAQGQPPLLSCYDTLAPHFRVDWCNVTLVDKSVPEPADEVPTPGDGILEHDPFFCPPTEAPDRDFLVDALVTLLVPLLVALLLTLLLAYVMCCRREGRLKRDLATSDIQMVHHCTIHGNTEELRQMAASREVPRPLSTLPMFNVHTGERLPPRVDSAQVPLILDQH

SEQ ID NO: 76440 - protein, 263 aa, Homo sapiens
  Payload ID: 15262
  Gene Symbol: SGCA
  Gene Name: sarcoglycan, alpha (50kDa dystrophin-associated glycoprotein)
  Uniprot ID: Q16586
  ENSP ID: ENSP00000345522
MAETLFWTPLLVVLLAGLGDTEAQQTTLHPLVGRVFVHTLDHETFLSLPEHVAVPPAVHITYHAHLQGHPDLPRWLRYTQRSPHHPGFLYGSATPEDRGLQVIEVTAYNRDSFDTTRQRLVLEIGDPEGPLLPYQAEFLVRSHDAEEVLPSTPASRFLSALGGLWEPGELQLLNVTSALDRGGRVPLPIEGRKEGLKRDLATSDIQMVHHCTIHGNTEELRQMAASREVPRPLSTLPMFNVHTGERLPPRVDSAQVPLILDQH

SEQ ID NO: 76441 - protein, 160 aa, Homo sapiens
  Payload ID: 15262
  Gene Symbol: SGCA
  Gene Name: sarcoglycan, alpha (50kDa dystrophin-associated glycoprotein)
  ENSP ID: ENSP00000422030
  MOD_RES (1)..(1): Any amino acid
XLDRGGRVPLPIEGRKEGVYIKVDKSVPEPADEVPTPGDGILEHDPFFCPPTEAPDRDFLVDALVTLLVPLLVALLLTLLLAYVMCCRREGRLKRDLATSDIQMVHHCTIHGNTEELRQMAASREVPRPLSTLPMFNVHTGERLPPRVDSAQVPLILDQH

SEQ ID NO: 76442 - protein, 61 aa, Homo sapiens
  Payload ID: 15262
  Gene Symbol: SGCA
  Gene Name: sarcoglycan, alpha (50kDa dystrophin-associated glycoprotein)
  ENSP ID: ENSP00000422817
MAETLFWTPLLVVLLAGLGDTEAQQTTLHPLVGRVFVHTLDHETFLSLPEHVGHSLQSGQL

SEQ ID NO: 76443 - protein, 65 aa, Homo sapiens
  Payload ID: 15262
  Gene Symbol: SGCA
  Gene Name: sarcoglycan, alpha (50kDa dystrophin-associated glycoprotein)
  ENSP ID: ENSP00000423168
MAETLFWTPLLVGKLGPCSAGRPRMRGQDLGVFSWQGWGTPRPSRPRYTHLWAVSLCTPWTMRRF

SEQ ID NO: 76444 - protein, 196 aa, Homo sapiens
  Payload ID: 15262
  Gene Symbol: SGCA
  Gene Name: sarcoglycan, alpha (50kDa dystrophin-associated glycoprotein)
  ENSP ID: ENSP00000426104
LRHSSGLLSSWVTAYNRDSFDTTRQRLVLEIGDPEGPLLPYQAEFLVRSHDAEEVLPSTPASRFLSALGGLWEPGELQLLNVTSALDRGGRVPLPIEGRKEGLKRDLATSDIQMVHHCTIHGNTEELRQMAASREVPRPLSTLPMFNVHTVVPGPALTSSSLLCPHHEWHIPPADSSSWPSWNPGSKQAGRGGGVG

SEQ ID NO: 76445 - protein, 298 aa, Homo sapiens
  Payload ID: 15262
  Gene Symbol: SGCA
  Gene Name: sarcoglycan, alpha (50kDa dystrophin-associated glycoprotein)
  ENSP ID: ENSP00000426571
MAETLFWTPLLVVLLAGLGDTEAQQTTLHPLVGRVFVHTLDHETFLSLPEHVAVPPAVHITYHAHLQGHPDLPRWLRYTQRSPHHPGFLYGSATPEDRGLQVIEVTAYNRDSFDTTRQRLVLEIGDPEGPLLPYQAEFLVRSHDAEEVLPSTPASRFLSALGGLWEPGELQLLNVTSALDRGGRVPLPIEGRKEGVYIKVGSASPFSTCLKMVASPDSHARCAQGQPPLLSCYDTLAPHFRVDWCNVTLAEERPGYLRHPDGPPLHHPREHRGAAADGGQPRGAPATLHPAHVQCAHR

SEQ ID NO: 76446 - protein, 58 aa, Homo sapiens
  Payload ID: 15262
  Gene Symbol: SGCA
  Gene Name: sarcoglycan, alpha (50kDa dystrophin-associated glycoprotein)
  ENSP ID: ENSP00000426606
  MOD_RES (1)..(1): Any amino acid
XCPTRCPHHLPRPPPGTPRPAPVAPLHPAQPPPPWLPLRLCHPRRSWAPGHSLQSGQL

SEQ ID NO: 76447 - protein, 318 aa, Homo sapiens
  Payload ID: 15263
  Gene Symbol: SGCB
  Gene Name: sarcoglycan, beta (43kDa dystrophin-associated glycoprotein)
  Uniprot ID: Q16585
  ENSP ID: ENSP00000370839
MAAAAAAAAEQQSSNGPVKKSMREKAVERRSVNKEHNSNFKAGYIPIDEDRLHKTGLRGRKGNLAICVIILLFILAVINLIITLVIWAVIRIGPNGCDSMEFHESGLLRFKQVSDMGVIHPLYKSTVGGRRNENLVITGNNQPIVFQQGTTKLSVENNKTSITSDIGMQFFDPRTQNILFSTDYETHEFHLPSGVKSLNVQKASTERITSNATSDLNIKVDGRAIVRGNEGVFIMGKTIEFHMGGNMELKAENSIILNGSVMVSTTRLPSSSSGDQLGSGDWVRYKLCMCADGTLFKVQVTSQNMGCQISDNPCGNTH

SEQ ID NO: 76448 - protein, 100 aa, Homo sapiens
  Payload ID: 15263
  Gene Symbol: SGCB
  Gene Name: sarcoglycan, beta (43kDa dystrophin-associated glycoprotein)
  ENSP ID: ENSP00000421235
  MOD_RES (1)..(1): Any amino acid
XAAAAEQQSSNGPVKKSMREKAVERRSVNKEHNSNFKAGYIPIDEDRLHKTGLRGRKGNLAICVIILLFILAVINLILPGSQARDRRAFSGIPDAYRKKI

SEQ ID NO: 76449 - protein, 93 aa, Homo sapiens
  Payload ID: 15263
  Gene Symbol: SGCB
  Gene Name: sarcoglycan, beta (43kDa dystrophin-associated glycoprotein)
  ENSP ID: ENSP00000425818
QSSNGPVKKSMREKAVERRSVNKEHNSNFKAGYIPIDEDRLHKTGLRGRKGNLAICVIILLFILAVINLILPGSQARDRRAFSGIPDAYRKKI

SEQ ID NO: 76450 - protein, 290 aa, Homo sapiens
  Payload ID: 15264
  Gene Symbol: SGCD
  Gene Name: sarcoglycan, delta (35kDa dystrophin-associated glycoprotein)
  Uniprot ID: Q92629
  ENSP ID: ENSP00000338343
MMPQEQYTHHRSTMPGSVGPQVYKVGIYGWRKRCLYFFVLLLMILILVNLAMTIWILKVMNFTIDGMGNLRITEKGLKLEGDSEFLQPLYAKEIQSRPGNALYFKSARNVTVNILNDQTKVLTQLITGPKAVEAYGKKFEVKTVSGKLLFSADNNEVVVGAERLRVLGAEGTVFPKSIETPNVRADPFKELRLESPTRSLVMEAPKGVEINAEAGNMEATCRTELRLESKDGEIKLDAAKIRLPRLPHGSYTPTGTRQKVFEICVCANGRLFLSQAGAGSTCQINTSVCL

SEQ ID NO: 76451 - protein, 289 aa, Homo sapiens
  Payload ID: 15264
  Gene Symbol: SGCD
  Gene Name: sarcoglycan, delta (35kDa dystrophin-associated glycoprotein)
  Uniprot ID: Q92629
  ENSP ID: ENSP00000403003
MPQEQYTHHRSTMPGSVGPQVYKVGIYGWRKRCLYFFVLLLMILILVNLAMTIWILKVMNFTIDGMGNLRITEKGLKLEGDSEFLQPLYAKEIQSRPGNALYFKSARNVTVNILNDQTKVLTQLITGPKAVEAYGKKFEVKTVSGKLLFSADNNEVVVGAERLRVLGAEGTVFPKSIETPNVRADPFKELRLESPTRSLVMEAPKGVEINAEAGNMEATCRTELRLESKDGEIKLDAAKIRLPRLPHGSYTPTGTRQKVFEICVCANGRLFLSQAGAGSTCQINTSVCL

SEQ ID NO: 76452 - protein, 256 aa, Homo sapiens
  Payload ID: 15264
  Gene Symbol: SGCD
  Gene Name: sarcoglycan, delta (35kDa dystrophin-associated glycoprotein)
  Uniprot ID: Q92629
  ENSP ID: ENSP00000429378
MMPQEQYTHHRSTMPGSVGPQVYKVGIYGWRKRCLYFFVLLLMILILVNLAMTIWILKVMNFTIDGMGNLRITEKGLKLEGDSEFLQPLYAKEIQSRPGNALYFKSARNVTVNILNDQTKVLTQLITGPKAVEAYGKKFEVKTVSGKLLFSADNNEVVVGAERLRVLGAEGTVFPKSIETPNVRADPFKELRLESPTRSLVMEAPKGVEINAEAGNMEATCRTELRLESKDGEVRDEKDRSSKSYSFNRPTLPITG

SEQ ID NO: 76453 - protein, 82 aa, Homo sapiens
  Payload ID: 15264
  Gene Symbol: SGCD
  Gene Name: sarcoglycan, delta (35kDa dystrophin-associated glycoprotein)
  ENSP ID: ENSP00000430794
MMPQEQYTHHRSTMPGSVGPQVYKVGIYGWRKRCLYFFVLLLMILILVNLAMTIWILKVMNFTISIHLLLRFNWLFRCCGMS

SEQ ID NO: 76454 - protein, 437 aa, Homo sapiens
  Payload ID: 15265
  Gene Symbol: SGCE
  Gene Name: sarcoglycan, epsilon
  Uniprot ID: O43556
  ENSP ID: ENSP00000265735
MQLPRWWELGDPCAWTGQGRGTRRMSPATTGTFLLTVYSIFSKVHSDRNVYPSAGVLFVHVLEREYFKGEFPPYPKPGEISNDPITFNTNLMGYPDRPGWLRYIQRTPYSDGVLYGSPTAENVGKPTIIEITAYNRRTFETARHNLIINIMSAEDFPLPYQAEFFIKNMNVEEMLASEVLGDFLGAVKNVWQPERLNAINITSALDRGGRVPLPINDLKEGVYVMVGADVPFSSCLREVENPQNQLRCSQEMEPVITCDKKFRTQFYIDWCKISLVDKTKQVSTYQEVIRGEGILPDGGEYKPPSDSLKSRDYYTDFLITLAVPSAVALVLFLILAYIMCCRREGVEKRNMQTPDIQLVHHSAIQKSTKELRDMSKNREIAWPLSTLPVFHPVTGEIIPPLHTDNYDSTNMPLMQTQQNLPHQTQIPQQQTTGKWYP

SEQ ID NO: 76455 - protein, 428 aa, Homo sapiens
  Payload ID: 15265
  Gene Symbol: SGCE
  Gene Name: sarcoglycan, epsilon
  ENSP ID: ENSP00000388734
MQLPRWWELGDPCAWTGQGRGTRRMSPATTGTFLLTVYSIFSKVHSDRNVYPSAGVLFVHVLEREYFKGEFPPYPKPGEISNDPITFNTNLMGYPDRPGWLRYIQRTPYSDGVLYGSPTAENVGKPTIIEITAYNRRTFETARHNLIINIMSAEDFPLPYQAEFFIKNMNVEEMLASEVLGDFLGAVKNVWQPERLNAINITSALDRGGRVPLPINDLKEGVYVMVGADVPFSSCLREVENPQNQLRCSQEMEPVITCDKKFRTQFYIDWCKISLVDKTKQVSTYQEVIRGEGILPDGGEYKPPSDSLKSRDYYTDFLITLAVPSAVALVLFLILAYIMCCRREGVIQLVHHSAIQKSTKELRDMSKNREIAWPLSTLPVFHPVTGEIIPPLHTDNYDSTNMPLMQTQQNLPHQTQIPQQQTTGKWYP

SEQ ID NO: 76456 - protein, 43 aa, Homo sapiens
  Payload ID: 15265
  Gene Symbol: SGCE
  Gene Name: sarcoglycan, epsilon
  ENSP ID: ENSP00000391892
MQLPRWWELGDPCAWTGQGRGTRRMSPATTGTFLLTVEYERDK

SEQ ID NO: 76457 - protein, 396 aa, Homo sapiens
  Payload ID: 15265
  Gene Symbol: SGCE
  Gene Name: sarcoglycan, epsilon
  ENSP ID: ENSP00000394061
MQLPRWWELGDPCAWTGQGRGTRRMSPATTGTFLLTGEISNDPITFNTNLMGYPDRPGWLRYIQRTPYSDGVLYGSPTAENVGKPTIIEITAYNRRTFETARHNLIINIMSAEDFPLPYQAEFFIKNMNVEEMLASEVLGDFLGAVKNVWQPERLNAINITSALDRGGRVPLPINDLKEGVYVMVGADVPFSSCLREVENPQNQLRCSQEMEPVITCDKKFRTQFYIDWCKISLVDKTKQVSTYQEVIRGEGILPDGGEYKPPSDSLKSRDYYTDFLITLAVPSAVALVLFLILAYIMCCRREGVEKRNMQTPDIQLVHHSAIQKSTKELRDMSKNREIAWPLSTLPVFHPVTGEIIPPLHTDNYDSTNMPLMQTQQNLPHQTQIPQQQTTGKWYP

SEQ ID NO: 76458 - protein, 451 aa, Homo sapiens
  Payload ID: 15265
  Gene Symbol: SGCE
  Gene Name: sarcoglycan, epsilon
  Uniprot ID: O43556
  ENSP ID: ENSP00000397536
MQLPRWWELGDPCAWTGQGRGTRRMSPATTGTFLLTVYSIFSKVHSDRNVYPSAGVLFVHVLEREYFKGEFPPYPKPGEISNDPITFNTNLMGYPDRPGWLRYIQRTPYSDGVLYGSPTAENVGKPTIIEITAYNRRTFETARHNLIINIMSAEDFPLPYQAEFFIKNMNVEEMLASEVLGDFLGAVKNVWQPERLNAINITSALDRGGRVPLPINDLKEGVYVMVGADVPFSSCLREVENPQNQLRCSQEMEPVITCDKKFRTQFYIDWCKISLVDKTKQVSTYQEVIRGEGILPDGGEYKPPSDSLKSRDYYTDFLITLAVPSAVALVLFLILAYIMCCRREGVIQLVHHSAIQKSTKELRDMSKNREIAWPLSTLPVFHPVTGEIIPPLHTDNYDSTNMPLMQTQQNLPHQTQIPQQQTTGDFRLTTFQRFEVNGIPEERKLTEAMNL

SEQ ID NO: 76459 - protein, 43 aa, Homo sapiens; identical to SEQ ID NO: 76456
  Payload ID: 15265
  Gene Symbol: SGCE
  Gene Name: sarcoglycan, epsilon
  ENSP ID: ENSP00000398344

SEQ ID NO: 76460 - protein, 462 aa, Homo sapiens
  Payload ID: 15265
  Gene Symbol: SGCE
  Gene Name: sarcoglycan, epsilon
  Uniprot ID: O43556
  ENSP ID: ENSP00000398930
MQLPRWWELGDPCAWTGQGRGTRRMSPATTGTFLLTVYSIFSKVHSDRNVYPSAGVLFVHVLEREYFKGEFPPYPKPGEISNDPITFNTNLMGYPDRPGWLRYIQRTPYSDGVLYGSPTAENVGKPTIIEITAYNRRTFETARHNLIINIMSAEDFPLPYQAEFFIKNMNVEEMLASEVLGDFLGAVKNVWQPERLNAINITSALDRGGRVPLPINDLKEGVYVMVGADVPFSSCLREVENPQNQLRCSQEMEPVITCDKKFRTQFYIDWCKISLVDKTKQVSTYQEVIRGEGILPDGGEYKPPSDSLKSRDYYTDFLITLAVPSAVALVLFLILAYIMCCRREGVEKRNMQTPDIQLVHHSAIQKSTKELRDMSKNREIAWPLSTLPVFHPVTGEIIPPLHTDNYDSTNMPLMQTQQWSFAPVAQAGVQWSDLGSLQPPPPRNLPHQTQIPQQQTTGKWYP

SEQ ID NO: 76461 - protein, 471 aa, Homo sapiens
  Payload ID: 15265
  Gene Symbol: SGCE
  Gene Name: sarcoglycan, epsilon
  ENSP ID: ENSP00000405313
MQLPRWWELGDPCAWTGQGRGTRRMSPATTGTFLLTAFLLSCADGINGTVNWKTRQANNFIISRKMAAGMKDVYSIFSKVHSDRNVYPSAGVLFVHVLEREYFKGEFPPYPKPGEISNDPITFNTNLMGYPDRPGWLRYIQRTPYSDGVLYGSPTAENVGKPTIIEITAYNRRTFETARHNLIINIMSAEDFPLPYQAEFFIKNMNVEEMLASEVLGDFLGAVKNVWQPERLNAINITSALDRGGRVPLPINDLKEGVYVMVGADVPFSSCLREVENPQNQLRCSQEMEPVITCDKKFRTQFYIDWCKISLVDKTKQVSTYQEVIRGEGILPDGGEYKPPSDSLKSRDYYTDFLITLAVPSAVALVLFLILAYIMCCRREGVEKRNMQTPDIQLVHHSAIQKSTKELRDMSKNREIAWPLSTLPVFHPVTGEIIPPLHTDNYDSTNMPLMQTQQNLPHQTQIPQQQTTGEC

SEQ ID NO: 76462 - protein, 41 aa, Homo sapiens
  Payload ID: 15265
  Gene Symbol: SGCE
  Gene Name: sarcoglycan, epsilon
  ENSP ID: ENSP00000431080
TDFLITLAVPSAVALVLFLILAYIMCCRREGVEKRNMQTPE

SEQ ID NO: 76463 - protein, 291 aa, Homo sapiens
  Payload ID: 15266
  Gene Symbol: SGCG
  Gene Name: sarcoglycan, gamma (35kDa dystrophin-associated glycoprotein)
  Uniprot ID: Q13326
  ENSP ID: ENSP00000218867
MVREQYTTATEGICIERPENQYVYKIGIYGWRKRCLYLFVLLLLIILVVNLALTIWILKVMWFSPAGMGHLCVTKDGLRLEGESEFLFPLYAKEIHSRVDSSLLLQSTQNVTVNARNSEGEVTGRLKVGPKMVEVQNQQFQINSNDGKPLFTVDEKEVVVGTDKLRVTGPEGALFEHSVETPLVRADPFQDLRLESPTRSLSMDAPRGVHIQAHAGKIEALSQMDILFHSSDGMLVLDAETVCLPKLVQGTWGPSGSSQSLYEICVCPDGKLYLSVAGVSTTCQEHNHICL

SEQ ID NO: 76464 - protein, 312 aa, Homo sapiens
  Payload ID: 15267
  Gene Symbol: SGCZ
  Gene Name: sarcoglycan, zeta
  Uniprot ID: Q96LD1
  ENSP ID: ENSP00000371512
MDRSTNLDIEELKMTREQYILATQQNNLPRTENAQLYPVGIYGWRKRCLYFFVLLLLVTMIVNLAMTIWILKVMNFTVDGMGNLRVTKKGIRLEGISEFLLPLYVKEIHSRKDSPLVLQSDRNVTVNARNHMGQLTGQLTIGADAVEAQCKRFEVRASEDGRVLFSADEDEITIGAEKLKVTGTEGAVFGHSVETPHIRAEPSQDLRLESPTRSLIMEAPRGVQVSAAAGDFKATCRKELHLQSTEGEIFLNAETIKLGNLPTGSFSSSSPSSSSSRQTVYELCVCPNGKLYLSPAGVGSTCQSSSNICLWS

SEQ ID NO: 76465 - protein, 265 aa, Homo sapiens
  Payload ID: 15267
  Gene Symbol: SGCZ
  Gene Name: sarcoglycan, zeta
  ENSP ID: ENSP00000405224
MTREQYILATQQNNLPRTENAQLYPVGIYGWRKRCLYFFVLLLLVTMIVNLAMTIWILKVMNFTVDSPLVLQSDRNVTVNARNHMGQLTGQLTIGADAVEAQCKRFEVRASEDGRVLFSADEDEITIGAEKLKVTGTEGAVFGHSVETPHIRAEPSQDLRLESPTRSLIMEAPRGVQVSAAAGDFKATCRKELHLQSTEGEIFLNAETIKLGNLPTGSFSSSSPSSSSSRQTVYELCVCPNGKLYLSPAGVGSTCQSSSNICLWS

SEQ ID NO: 76466 - protein, 181 aa, Homo sapiens
  Payload ID: 15267
  Gene Symbol: SGCZ
  Gene Name: sarcoglycan, zeta
  ENSP ID: ENSP00000481839
MGQLTGQLTIGADAVEAQCKRFEVRASEDGRVLFSADEDEITIGAEKLKVTGTEGAVFGHSVETPHIRAEPSQDLRLESPTRSLIMEAPRGVQVSAAAGDFKATCRKELHLQSTEGEIFLNAETIKLGNLPTGSFSSSSPSSSSSRQTVYELCVCPNGKLYLSPAGVGSTCQSSSNICLWS

SEQ ID NO: 76467 - protein, 811 aa, Homo sapiens
  Payload ID: 15268
  Gene Symbol: SLMAP
  Gene Name: sarcolemma associated protein
  Uniprot ID: Q14BN4
  ENSP ID: ENSP00000295951
MPSALAIFTCRPNSHPFQERHVYLDEPIKIGRSVARCRPAQNNATFDCKVLSRNHALVWFDHKTGKFYLQDTKSSNGTFINSQRLSRGSEESPPCEILSGDIIQFGVDVTENTRKVTHGCIVSTIKLFLPDGMEARLRSDVIHAPLPSPVDKVAANTPSMYSQELFQLSQYLQEALHREQMLEQKLATLQRLLAITQEASDTSWQALIDEDRLLSRLEVMGNQLQACSKNQTEDSLRKELIALQEDKHNYETTAKESLRRVLQEKIEVVRKLSEVERSLSNTEDECTHLKEMNERTQEELRELANKYNGAVNEIKDLSDKLKVAEGKQEEIQQKGQAEKKELQHKIDEMEEKEQELQAKIEALQADNDFTNERLTALQEHLLSKSGGDCTFIHQFIECQKKLIVEGHLTKAVEETKLSKENQTRAKESDFSDTLSPSKEKSSDDTTDAQMDEQDLNEPLAKVSLLKDDLQGAQSEIEAKQEIQHLRKELIEAQELARTSKQKCFELQALLEEERKAYRNQVEESTKQIQVLQAQLQRLHIDTENLREEKDSEITSTRDELLSARDEILLLHQAAAKVASERDTDIASLQEELKKVRAELERWRKAASEYEKEITSLQNSFQLRCQQCEDQQREEATRLQGELEKLRKEWNALETECHSLKRENVLLSSELQRQEKELHNSQKQSLELTSDLSILQMSRKELENQVGSLKEQHLRDSADLKTLLSKAENQAKDVQKEYEKTQTVLSELKLKFEMTEQEKQSITDELKQCKNNLKLLREKGNNKPWPWMPMLAALVAVTAIVLYVPGLARASP

SEQ ID NO: 76468 - protein, 811 aa, Homo sapiens; identical to SEQ ID NO: 76467
  Payload ID: 15268
  Gene Symbol: SLMAP
  Gene Name: sarcolemma associated protein
  Uniprot ID: Q14BN4
  ENSP ID: ENSP00000295952

SEQ ID NO: 76469 - protein, 506 aa, Homo sapiens
  Payload ID: 15268
  Gene Symbol: SLMAP
  Gene Name: sarcolemma associated protein
  Uniprot ID: Q14BN4
  ENSP ID: ENSP00000373224
MPSALAIFTCRPNSHPFQERHVYLDEPIKIGRSVARCRPAQNNATFDCKVLSRNHALVWFDHKTGKFYLQDTKSSNGTFINSQRLSRGSEESPPCEILSGDIIQFGVDVTENTRKVTHGCIVSTIKLFLPDGMEARLRSDVIHAPLPSPVDKVAANTPSMYSQELFQLSQYLQEALHREQMLEQKLATLQRLLAITQEASDTSWQALIDEDRLLSRLEVMGNQLQACSKNQTEDSLRKELIALQEDKHNYETTAKESLRRVLQEKIEVVRKLSEVERSLSNTEDECTHLKEMNERTQEELRELANKYNGAVNEIKDLSDKLKVAEGKQEEIQQKGQAEKKELQHKIDEMEEKEQELQAKIEALQADNDFTNERLTALQVRLEHLQEKTLKECSSLGIQVDDFLPKINGSTEKEKLIVEGHLTKAVEETKLSKENQTRAKESDFSDTLSPSKEKSSDDTTDAQMDEQDLNEPLAKVSLLKGTLTCFYDIVNQGIKSPFAIKSVLDIM

SEQ ID NO: 76470 - protein, 433 aa, Homo sapiens
  Payload ID: 15268
  Gene Symbol: SLMAP
  Gene Name: sarcolemma associated protein
  ENSP ID: ENSP00000389978
  MOD_RES (1)..(1): Any amino acid
XQAEKKELQHKIDEMEEKEQELQAKIEALQADNDFTNERLTALQENQTRAKESDFSDTLSPSKEKSSDDTTDAQMDEQDLNEPLAKVSLLKDDLQGAQSEIEAKQEIQHLRKELIEAQELARTSKQKCFELQALLEEERKAYRNQVEESTKQIQVLQAQLQRLHIDTENLREEKDSEITSTRDELLSARDEILLLHQAAAKVASERDTDIASLQEELKKVRAELERWRKAASEYEKEITSLQNSFQLRCQQCEDQQREEATRLQGELEKLRKEWNALETECHSLKRENVLLSSELQRQEKELHNSQKQSLELTSDLSILQMSRKELENQVGSLKEQHLRDSADLKTLLSKAENQAKDVQKEYEKTQTVLSELKLKFEMTEQEKQSITDELKQCKNNLKLLREKGNNPSILQPVPAVFIGLFLAFLFWCFGPLW

SEQ ID NO: 76471 - protein, 316 aa, Homo sapiens
  Payload ID: 15268
  Gene Symbol: SLMAP
  Gene Name: sarcolemma associated protein
  ENSP ID: ENSP00000391886
  MOD_RES (1)..(1): Any amino acid
XGHLTKAVEETKLSKENQTRAKESDFSDTLSPSKEKSSDDTTDAQMDEQDLNEPLAKVSLLKALLEEERKAYRNQVEESTKQIQVLQAQLQRLHIDTENLREEKDSEITSTRDELLSARDEILLLHQAAAKVASERDTDIASLQEELKKVRAELERWRKAASEYEKEITSLQNSFQLRCQQCEDQQREEATRLQGELEKLRKEWNALETECHSLKRENVLLSSELQRQEKELHNSQKQSLELTSDLSILQMSRKELENQVGSLKEQHLRDSADLKTLLSKAENQAKDVQKEVKRKDIMSPIMVGLKAKSKSDIHAS

SEQ ID NO: 76472 - protein, 828 aa, Homo sapiens
  Payload ID: 15268
  Gene Symbol: SLMAP
  Gene Name: sarcolemma associated protein
  Uniprot ID: Q14BN4
  ENSP ID: ENSP00000398661
MPSALAIFTCRPNSHPFQERHVYLDEPIKIGRSVARCRPAQNNATFDCKVLSRNHALVWFDHKTGKFYLQDTKSSNGTFINSQRLSRGSEESPPCEILSGDIIQFGVDVTENTRKVTHGCIVSTIKLFLPDGMEARLRSDVIHAPLPSPVDKVAANTPSMYSQELFQLSQYLQEALHREQMLEQKLATLQRLLAITQEASDTSWQALIDEDRLLSRLEVMGNQLQACSKNQTEDSLRKELIALQEDKHNYETTAKESLRRVLQEKIEVVRKLSEVERSLSNTEDECTHLKEMNERTQEELRELANKYNGAVNEIKDLSDKLKVAEGKQEEIQQKGQAEKKELQHKIDEMEEKEQELQAKIEALQADNDFTNERLTALQVRLEHLQEKTLKECSSLEHLLSKSGGDCTFIHQFIECQKKLIVEGHLTKAVEETKLSKENQTRAKESDFSDTLSPSKEKSSDDTTDAQMDEQDLNEPLAKVSLLKDDLQGAQSEIEAKQEIQHLRKELIEAQELARTSKQKCFELQALLEEERKAYRNQVEESTKQIQVLQAQLQRLHIDTENLREEKDSEITSTRDELLSARDEILLLHQAAAKVASERDTDIASLQEELKKVRAELERWRKAASEYEKEITSLQNSFQLRCQQCEDQQREEATRLQGELEKLRKEWNALETECHSLKRENVLLSSELQRQEKELHNSQKQSLELTSDLSILQMSRKELENQVGSLKEQHLRDSADLKTLLSKAENQAKDVQKEYEKTQTVLSELKLKFEMTEQEKQSITDELKQCKNNLKLLREKGNNKPWPWMPMLAALVAVTAIVLYVPGLARASP

SEQ ID NO: 76473 - protein, 409 aa, Homo sapiens
  Payload ID: 15268
  Gene Symbol: SLMAP
  Gene Name: sarcolemma associated protein
  ENSP ID: ENSP00000412829
  MOD_RES (1)..(1): Any amino acid
XKLIVEGHLTKAVEETKLSKENQTRAKESDFSDTLSPSKEKSSDDTTDAQMDEQDLNEPLAKVSLLKDDLQGAQSEIEAKQEIQHLRKELIEAQELARTSKQKCFELQALLEEERKAYRNQVEESTKQIQVLQAQLQRLHIDTENLREEKDSEITSTRDELLSARDEILLLHQAAAKVASERDTDIASLQEELKKVRAELERWRKAASEYEKEITSLQNSFQLRCQQCEDQQREEATRLQGELEKLRKEWNALETECHSLKRENVLLSSELQRQEKELHNSQKQSLELTSDLSILQMSRKELENQVGSLKEQHLRDSADLKTLLSKAENQAKDVQKEYEKTQTVLSELKLKFEMTEQEKQSITDELKQCKNNLKLLREKGNNPSILQPVPAVFIGLFLAFLFWCFGPLW

SEQ ID NO: 76474 - protein, 790 aa, Homo sapiens
  Payload ID: 15268
  Gene Symbol: SLMAP
  Gene Name: sarcolemma associated protein
  Uniprot ID: Q14BN4
  ENSP ID: ENSP00000412945
MPSALAIFTCRPNSHPFQERHVYLDEPIKIGRSVARCRPAQNNATFDCKVLSRNHALVWFDHKTGKFYLQDTKSSNGTFINSQRLSRGSEESPPCEILSGDIIQFGVDVTENTRKVTHGCIVSTIKLFLPDGMEARLRSDVIHAPLPSPVDKVAANTPSMYSQELFQLSQYLQEALHREQMLEQKLATLQRLLAITQEASDTSWQALIDEDRLLSRLEVMGNQLQACSKNQTEDSLRKELIALQEDKHNYETTAKESLRRVLQEKIEVVRKLSEVERSLSNTEDECTHLKEMNERTQEELRELANKYNGAVNEIKDLSDKLKVAEGKQEEIQQKGQAEKKELQHKIDEMEEKEQELQAKIEALQADNDFTNERLTALQEKLIVEGHLTKAVEETKLSKENQTRAKESDFSDTLSPSKEKSSDDTTDAQMDEQDLNEPLAKVSLLKDDLQGAQSEIEAKQEIQHLRKELIEAQELARTSKQKCFELQALLEEERKAYRNQVEESTKQIQVLQAQLQRLHIDTENLREEKDSEITSTRDELLSARDEILLLHQAAAKVASERDTDIASLQEELKKVRAELERWRKAASEYEKEITSLQNSFQLRCQQCEDQQREEATRLQGELEKLRKEWNALETECHSLKRENVLLSSELQRQEKELHNSQKQSLELTSDLSILQMSRKELENQVGSLKEQHLRDSADLKTLLSKAENQAKDVQKEYEKTQTVLSELKLKFEMTEQEKQSITDELKQCKNNLKLLREKGNNKPWPWMPMLAALVAVTAIVLYVPGLARASP

SEQ ID NO: 76475 - protein, 101 aa, Homo sapiens
  Payload ID: 15268
  Gene Symbol: SLMAP
  Gene Name: sarcolemma associated protein
  ENSP ID: ENSP00000417541
MDEQDLNEPLAKVSLLKDDLQGAQSEIEAKQEIQHLRKELIEAQELARTSKQKCFELQALLEEERKAYRNQVEESTKQIQVLQAQLQRLHIDTENLREEKD

SEQ ID NO: 76476 - protein, 318 aa, Homo sapiens
  Payload ID: 15268
  Gene Symbol: SLMAP
  Gene Name: sarcolemma associated protein
  ENSP ID: ENSP00000418218
MDEQDLNEPLAKVSLLKALLEEERKAYRNQVEESTKQIQVLQAQLQRLHIDTENLREEKDSEITSTRDELLSARDEILLLHQAAAKVASERDTDIASLQEELKKVRAELERWRKAASEYEKEITSLQNSFQLRCQQCEDQQREEATRLQGELEKLRKEWNALETECHSLKRENVLLSSELQRQEKELHNSQKQSLELTSDLSILQMSRKELENQVGSLKEQHLRDSADLKTLLSKAENQAKDVQKEYEKTQTVLSELKLKFEMTEQEKQSITDELKQCKNNLKLLREKGNNPSILQPVPAVFIGLFLAFLFWCFGPLW

SEQ ID NO: 76477 - protein, 362 aa, Homo sapiens
  Payload ID: 15268
  Gene Symbol: SLMAP
  Gene Name: sarcolemma associated protein
  ENSP ID: ENSP00000419543
MDEQDLNEPLAKVSLLKDDLQGAQSEIEAKQEIQHLRKELIEAQELARTSKQKCFELQALLEEERKAYRNQVEESTKQIQVLQAQLQRLHIDTENLREEKDSEITSTRDELLSARDEILLLHQAAAKVASERDTDIASLQEELKKVRAELERWRKAASEYEKEITSLQNSFQLRCQQCEDQQREEATRLQGELEKLRKEWNALETECHSLKRENVLLSSELQRQEKELHNSQKQSLELTSDLSILQMSRKELENQVGSLKEQHLRDSADLKTLLSKAENQAKDVQKEYEKTQTVLSELKLKFEMTEQEKQSITDELKQCKNNLKLLREKGNNKPWPWMPMLAALVAVTAIVLYVPGLARASP

SEQ ID NO: 76478 - protein, 170 aa, Homo sapiens
  Payload ID: 15268
  Gene Symbol: SLMAP
  Gene Name: sarcolemma associated protein
  ENSP ID: ENSP00000419849
ERTQEELRELANKYNGAVNEIKDLSDKLKVAEGKQEEIQQKGQAEKKELQHKIDEMEEKEQELQAKIEALQADNDFTNERLTALQGIQVDDFLPKINGSTEKEHLLSKSGGDCTFIHQFIECQKKLIVEGHLTKAVEETKLSKENQTRAKESDFSDTLSPSKEKSSDDTT

SEQ ID NO: 76479 - protein, 109 aa, Homo sapiens
  Payload ID: 15268
  Gene Symbol: SLMAP
  Gene Name: sarcolemma associated protein
  ENSP ID: ENSP00000420697
MDEQDLNEPLAKVSLLKALLEEERKAYRNQVEESTKQIQVLQAQLQRLHIDTENLREEKDSEITSTRDELLSARDEILLLHQAAAKVASERDTDIASLQEELKKVRAEL

SEQ ID NO: 76480 - protein, 65 aa, Homo sapiens
  Payload ID: 15268
  Gene Symbol: SLMAP
  Gene Name: sarcolemma associated protein
  ENSP ID: ENSP00000420703
  MOD_RES (1)..(1): Any amino acid
XELENQVGSLKEQHLRDSADLKTLLSKAENQAKDVQKEPSILQPVPAVFIGLFLAFLFWCFGPLW

SEQ ID NO: 76481 - protein, 31 aa, Homo sapiens
  Payload ID: 15269
  Gene Symbol: SLN
  Gene Name: sarcolipin
  Uniprot ID: O00631
  ENSP ID: ENSP00000304707
MGINTRELFLNFTIVLITVILMWLLVRSYQY

SEQ ID NO: 76482 - protein, 31 aa, Homo sapiens; identical to SEQ ID NO: 76481
  Payload ID: 15269
  Gene Symbol: SLN
  Gene Name: sarcolipin
  Uniprot ID: O00631
  ENSP ID: ENSP00000434189

SEQ ID NO: 76483 - protein, 31 aa, Homo sapiens; identical to SEQ ID NO: 76481
  Payload ID: 15269
  Gene Symbol: SLN
  Gene Name: sarcolipin
  Uniprot ID: O00631
  ENSP ID: ENSP00000435380

SEQ ID NO: 76484 - protein, 904 aa, Homo sapiens
  Payload ID: 15270
  Gene Symbol: SAGE1
  Gene Name: sarcoma antigen 1
  Uniprot ID: Q9NXZ1
  ENSP ID: ENSP00000323191
MQASPLQTSQPTPPEELHAAAYVFTNDGQQMRSDEVNLVATGHQSKKKHSRKSKRHSSSKRRKSMSSWLDKQEDAAVTHSICEERINNGQPVADNVLSTAPPWPDATIAHNIREERMENGQSRTDKVLSTAPPQLVHMAAAGIPSMSTRDLHSTVTHNIREERMENGQPQPDNVLSTGPTGLINMAATPIPAMSARDLYATVTHNVCEQKMENVQPAPDNVLLTLRPRRINMTDTGISPMSTRDPYATITYNVPEEKMEKGQPQPDNILSTASTGLINVAGAGTPAISTNGLYSTVPHNVCEEKMENDQPQPNNVLSTVQPVIIYLTATGIPGMNTRDQYATITHNVCEERVVNNQPLPSNALSTVLPGLAYLATADMPAMSTRDQHATIIHNLREEKKDNSQPTPDNVLSAVTPELINLAGAGIPPMSTRDQYATVNHHVHEARMENGQRKQDNVLSNVLSGLINMAGASIPAMSSRDLYATITHSVREEKMESGKPQTDKVISNDAPQLGHMAAGGIPSMSTKDLYATVTQNVHEERMENNQPQPSYDLSTVLPGLTYLTVAGIPAMSTRDQYATVTHNVHEEKIKNGQAASDNVFSTVPPAFINMAATGVSSMSTRDQYAAVTHNIREEKINNSQPAPGNILSTAPPWLRHMAAAGISSTITRDLYVTATHSVHEEKMTNGQQAPDNSLSTVPPGCINLSGAGISCRSTRDLYATVIHDIQEEEMENDQTPPDGFLSNSDSPELINMTGHCMPPNALDSFSHDFTSLSKDELLYKPDSNEFAVGTKNYSVSAGDPPVTVMSLVETVPNTPQISPAMAKKINDDIKYQLMKEVRRFGQNYERIFILLEEVQGSMKVKRQFVEFTIKEAARFKKVVLIQQLEKALKEIDSHCHLRKVKHMRKR

SEQ ID NO: 76485 - protein, 904 aa, Homo sapiens; identical to SEQ ID NO: 76484
  Payload ID: 15270
  Gene Symbol: SAGE1
  Gene Name: sarcoma antigen 1
  Uniprot ID: Q9NXZ1
  ENSP ID: ENSP00000359743

SEQ ID NO: 76486 - protein, 528 aa, Homo sapiens
  Payload ID: 15270
  Gene Symbol: SAGE1
  Gene Name: sarcoma antigen 1
  ENSP ID: ENSP00000438276
MQASPLQTSQPTPPEELHAAAYVFTNDGQQMRSDEVNLVATGHQSKKKHSRKSKRHSSSKRRKSMSSWLDKQEDAAVTHSICEERINNGQPVADNVLSTAPPWPDATIAHNIREERMENGQSRTDKVLSTAPPQLVHMAAAGIPSMSTRDLHATVTQNVHEERMENNQPQPSYDLSTVLPGLTYLTVAGIPAMSTRDQYATVTHNVHEEKIKNGQAASDNVFSTVPPAFINMAATGVSSMSTRDQYAAVTHNIREEKINNSQPAPGNILSTAPPWLRHMAAAGISSTITRDLYVTATHSVHEEKMTNGQQAPDNSLSTVPPGCINLSGAGISCRSTRDLYATVIHDIQEEEMENDQTPPDGFLSNSDSPELINMTGHCMPPNALDSFSHDFTSLSKDELLYKPDSNEFAVGTKNYSVSAGDPPVTVMSLVETVPNTPQISPAMAKKINDDIKYQLMKEVRRFGQNYERIFILLEEVQGSMKVKRQFVEFTIKEAARFKKVVLIQQLEKALKEIDSHCHLRKVKHMRKR

SEQ ID NO: 76487 - protein, 396 aa, Homo sapiens
  Payload ID: 15271
  Gene Symbol: SARDH
  Gene Name: sarcosine dehydrogenase
  ENSP ID: ENSP00000298628
MASLSRALRVAAAHPRQSPTRGMGPCNLSSAAGPTAEKSVPYQRTLKEGQGTSVVAQGPSRPLPSTANVVVIGGGSLGCQTLYHLAKLGMSGAVLLERERLTSGTTWHTAGLLWQLRPSDVEVELLAHTRRVVSRELEEETGLHTGWIQNGGLFIASNRQRLDEYKRLMSLGKAYGVESHVLSPAETKTLYPLMNVDDLYGTLYVPHDGTMDPAGTCTTLARAASARGAQVIENCPVTGIRVWTDDFGVRRVAGVETQHGSIQTPCVVNCAGVWASAVGRMAGVKVPLVAMHHAYVVTERIEGIQSFTLLPTLEYSGTVSAHCNLRLPGSSNSRASASHVAGIKCARHHTRLIFFCILVETEFHHVAKAGLELLSSGNPPISDFQSARITGVSHHA

SEQ ID NO: 76488 - protein, 283 aa, Homo sapiens
  Payload ID: 15271
  Gene Symbol: SARDH
  Gene Name: sarcosine dehydrogenase
  ENSP ID: ENSP00000360933
MSGAVLLERERLTSGTTWHTAGLLWQLRPSDVEVELLAHTRRVVSRELEEETGLHTGWIQNGGLFIASNRQRLDEYKRLMSLGKAYGVESHVLSPAETKTLYPLMNVDDLYGTLYVPHDGTMDPAGTCTTLARAASARGAQVIENCPVTGIRVWTDDFGVRRVAGVETQHGSIQTPCVVNCAGVWASAVGRMAGVKVPLVAMHHAYVVTERIEGIQNMPNVRDHDASVYLRLQGDALSVGGYEANPIFWEEAVKYRPRAAGGLCLKTSTEKVCAVWSDDLRRA

SEQ ID NO: 76489 - protein, 368 aa, Homo sapiens
  Payload ID: 15271
  Gene Symbol: SARDH
  Gene Name: sarcosine dehydrogenase
  ENSP ID: ENSP00000360934
MSYFGKFYLVGLDARKAADWLFSADVSRPPGSTVYTCMLNHRGGTESDLTVSRLAPSHQASPLAPAFEGDGYYLAMGGAVAQHNWSHITTVLQDQKSQCQLIDSSEDLGMISIQGPASRAILQEVLDADLSNEAFPFSTHKLLRAAGHLVRAMRLSFVGELGWELHIPKASCVPVYRAVMAAGAKHGLINAGYRAIDSLSIEKGYRHWHADLRPDDSPLEAGLAFTCKLKSPVPFLGREALEQQRAAGLRRRLVCFTMEEPLWTRPHPAVSGAPAFSTASSSKVPMFGLEAIWRNGQVVGHVRRADFGFAIDKTIAYGYIHDPSGGPVSLDFVKSGDYALERMGVTYGAQAHLKSPFDPNNKRVKGIY

SEQ ID NO: 76490 - protein, 918 aa, Homo sapiens
  Payload ID: 15271
  Gene Symbol: SARDH
  Gene Name: sarcosine dehydrogenase
  Uniprot ID: Q9UL12
  ENSP ID: ENSP00000360938
MASLSRALRVAAAHPRQSPTRGMGPCNLSSAAGPTAEKSVPYQRTLKEGQGTSVVAQGPSRPLPSTANVVVIGGGSLGCQTLYHLAKLGMSGAVLLERERLTSGTTWHTAGLLWQLRPSDVEVELLAHTRRVVSRELEEETGLHTGWIQNGGLFIASNRQRLDEYKRLMSLGKAYGVESHVLSPAETKTLYPLMNVDDLYGTLYVPHDGTMDPAGTCTTLARAASARGAQVIENCPVTGIRVWTDDFGVRRVAGVETQHGSIQTPCVVNCAGVWASAVGRMAGVKVPLVAMHHAYVVTERIEGIQNMPNVRDHDASVYLRLQGDALSVGGYEANPIFWEEVSDKFAFGLFDLDWEVFTQHIEGAINRVPVLEKTGIKSTVCGPESFTPDHKPLMGEAPELRGFFLGCGFNSAGMMLGGGCGQELAHWIIHGRPEKDMHGYDIRRFHHSLTDHPRWIRERSHESYAKNYSVVFPHDEPLAGRNMRRDPLHEELLGQGCVFQERHGWERPGWFHPRGPAPVLEYDYYGAYGSRAHEDYAYRRLLADEYTFAFPPHHDTIKKECLACRGAAAVFDMSYFGKFYLVGLDARKAADWLFSADVSRPPGSTVYTCMLNHRGGTESDLTVSRLAPSHQASPLAPAFEGDGYYLAMGGAVAQHNWSHITTVLQDQKSQCQLIDSSEDLGMISIQGPASRAILQEVLDADLSNEAFPFSTHKLLRAAGHLVRAMRLSFVGELGWELHIPKASCVPVYRAVMAAGAKHGLINAGYRAIDSLSIEKGYRHWHADLRPDDSPLEAGLAFTCKLKSPVPFLGREALEQQRAAGLRRRLVCFTMEDKVPMFGLEAIWRNGQVVGHVRRADFGFAIDKTIAYGYIHDPSGGPVSLDFVKSGDYALERMGVTYGAQAHLKSPFDPNNKRVKGIY

SEQ ID NO: 76491 - protein, 608 aa, Homo sapiens
  Payload ID: 15271
  Gene Symbol: SARDH
  Gene Name: sarcosine dehydrogenase
  ENSP ID: ENSP00000394210
MASLSRALRVAAAHPRQSPTRGMGPCNLSSAAGPTAEKSVPYQRTLKEGQGTSVVAQGPSRPLPSTANVVVIGGGSLGCQTLYHLAKLGMSGAVLLERERLTSGTTWHTAGLLWQLRPSDVEVELLAHTRRVVSRELEEETGLHTGWIQNGGLFIASNRQRLDEYKRLMSLGKAYGVESHVLSPAETKTLYPLMNVDDLYGTLYVPHDGTMDPAGTCTTLARAASARGAQVIENCPVTGIRVWTDDFGVRRVAGVETQHGSIQTPCVVNCAGVWASAVGRMAGVKVPLVAMHHAYVVTERIEGIQNMPNVRDHDASVYLRLQGDALSVGGYEANPIFWEEVSDKFAFGLFDLDWEVFTQHIEGAINRVPVLEKTGIKSTVCGPESFTPDHKPLMGEAPELRGFFLGCGFNSAGMMLGGGCGQELAHWIIHGRPEKDMHGYDIRRFHHSLTDHPRWIRERSHESYAKNYSVVFPHDEPLAGRNMRRDPLHEELLGQGCVFQERHGWERPGWFHPRGPAPVLEYDYYGAYGSRAHEDYAYRRLLADEYTFAFPPHHDTIKKECLACRGAAAVFDMSYFGKFYLVGLDARKAADWLFSADVSRPPGSTVYT

SEQ ID NO: 76492 - protein, 918 aa, Homo sapiens; identical to SEQ ID NO: 76490
  Payload ID: 15271
  Gene Symbol: SARDH
  Gene Name: sarcosine dehydrogenase
  Uniprot ID: Q9UL12
  ENSP ID: ENSP00000403084

SEQ ID NO: 76493 - protein, 602 aa, Homo sapiens
  Payload ID: 15271
  Gene Symbol: SARDH
  Gene Name: sarcosine dehydrogenase
  ENSP ID: ENSP00000415537
MAGVKVPLVAMHHAYVVTERIEGIQNMPNVRDHDASVYLRLQGDALSVGGYEANPIFWEEVSDKFAFGLFDLDWEVFTQHIEGAINRVPVLEKTGIKSTVCGPESFTPDHKPLMGEAPELRGFFLGCGFNSAGMMLGGGCGQELAHWIIHGRPEKDMHGYDIRRFHHSLTDHPRWIRERSHESYAKNYSVVFPHDEPLAGRNMRRDPLHEELLGQGCVFQERHGWERPGWFHPRGPAPVLEYDYYGAYGSRAHEDYAYRRLLADEYTFAFPPHHDTIKKECLACRGAAAVFDMSYFGKFYLVGLDARKAADWLFSADVSRPPGSTVYTCMLNHRGGTESDLTVSRLAPSHQASPLAPAFEGDGYYLAMGGAVAQHNWSHITTVLQDQKSQCQLIDSSEDLGMISIQGPASRAILQEVLDADLSNEAFPFSTHKLLRAAGHLVRAMRLSFVGELGWELHIPKASCVPVYRAVMAAGAKHGLINAGYRAIDSLSIEKGYRHWHADLRPDDSPLEAGLAFTCKLKSPVPFLGREALEQQRAAGLRRRLVCFTMEDKVPMFGLEAIWRNGQVVGHVRRADFGFAIDKTIATVTSMTPAVGRSRWTL

SEQ ID NO: 76494 - protein, 474 aa, Homo sapiens
  Payload ID: 15271
  Gene Symbol: SARDH
  Gene Name: sarcosine dehydrogenase
  ENSP ID: ENSP00000484683
MASLSRALRVAAAHPRQSPTRGMGPCNLSSAAGPTAEKSVPYQRTLKEGQGTSVVAQGPSRPLPSTANVVVIGGGSLGCQTLYHLAKLGMSGAVLLERERLTSGTTWHTAGLLWQLRPSDVEVELLAHTRRVVSRELEEETGLHTGWIQNGGLFIASNRQRLDEYKRLMSLGKAYGVESHVLSPAETKTLYPLMNVDDLYGTLYVPHDGTMDPAGTCTTLARAASARGAQVIENCPVTGIRVWTDDFGVRRVAGVETQHGSIQTPCVVNCAGVWASAVGRMAGVKVPLVAMHHAYVVTERIEGIQNMPNVRDHDASVYLRLQGDALSVGGYEANPIFWEEVSDKFAFGLFDLDWEVFTQHIEGAINRVPVLEKTGIKSTVCGPESFTPDHKPLMGEAPELRGFFLGCGFNSAGMMLGGGCGQELAHWIIHGRPEKDMHGYDIRRFHHSLTDHPRWIRERSHESYAELLRRLPPR

SEQ ID NO: 76495 - protein, 243 aa, Homo sapiens
  Payload ID: 15272
  Gene Symbol: SSPN
  Gene Name: sarcospan
  Uniprot ID: Q14714
  ENSP ID: ENSP00000242729
MGKNKQPRGQQRQGGPPAADAAGPDDMEPKKGTGAPKECGEEEPRTCCGCRFPLLLALLQLALGIAVTVVGFLMASISSSLLVRDTPFWAGIIVCLVAYLGLFMLCVSYQVDERTCIQFSMKLLYFLLSALGLTVCVLAVAFAAHHYSQLTQFTCETTLDSCQCKLPSSEPLSRTFVYRDVTDCTSVTGTFKLFLLIQMILNLVCGLVCLLACFVMWKHRYQVFYVGVRICSLTASEGPQQKI

SEQ ID NO: 76496 - protein, 140 aa, Homo sapiens
  Payload ID: 15272
  Gene Symbol: SSPN
  Gene Name: sarcospan
  Uniprot ID: Q14714
  ENSP ID: ENSP00000396087
MLCVSYQVDERTCIQFSMKLLYFLLSALGLTVCVLAVAFAAHHYSQLTQFTCETTLDSCQCKLPSSEPLSRTFVYRDVTDCTSVTGTFKLFLLIQMILNLVCGLVCLLACFVMWKHRYQVFYVGVRICSLTASEGPQQKI

SEQ ID NO: 76497 - protein, 128 aa, Homo sapiens
  Payload ID: 15272
  Gene Symbol: SSPN
  Gene Name: sarcospan
  ENSP ID: ENSP00000438801
MGKNKQPRGQQRQGGPPAADAAGPDDMEPKKGTGAPKECGEEEPRTCCGCRFPLLLALLQLALGIAVTVVGFLMASISSSLLVRDTPFWAGIIVCLVAYLGLFMLCVSYQVDERTCIQFSMKIHCHDF

SEQ ID NO: 76498 - protein, 140 aa, Homo sapiens; identical to SEQ ID NO: 76496
  Payload ID: 15272
  Gene Symbol: SSPN
  Gene Name: sarcospan
  Uniprot ID: Q14714
  ENSP ID: ENSP00000442893

SEQ ID NO: 76499 - protein, 120 aa, Homo sapiens
  Payload ID: 15272
  Gene Symbol: SSPN
  Gene Name: sarcospan
  ENSP ID: ENSP00000445360
MLCVSYQVDERTCIQFSMKLLYFLLSALGLTVCVLAVAFAAHHYSQLTQFTCETTLDSCQCKLPSSEPLSRTFVYRDVTDCTSVTGTFKLFLLIQMILNLVCGLVCLLACFVMWKHRYQV

SEQ ID NO: 76500 - protein, 657 aa, Homo sapiens
  Payload ID: 15273
  Gene Symbol: SASS6
  Gene Name: SAS-6 centriolar assembly protein
  Uniprot ID: Q6UVJ0
  ENSP ID: ENSP00000287482
MSQVLFHQLVPLQVKCKDCEERRVSIRMSIELQSVSNPVHRKDLVIRLTDDTDPFFLYNLVISEEDFQSLKFQQGLLVDFLAFPQKFIDLLQQCTQEHAKEIPRFLLQLVSPAAILDNSPAFLNVVETNPFKHLTHLSLKLLPGNDVEIKKFLAGCLKCSKEEKLSLMQSLDDATKQLDFTRKTLAEKKQELDKLRNEWASHTAALTNKHSQELTNEKEKALQAQVQYQQQHEQQKKDLEILHQQNIHQLQNRLSELEAANKDLTERKYKGDSTIRELKAKLSGVEEELQRTKQEVLSLRRENSTLDVECHEKEKHVNQLQTKVAVLEQEIKDKDQLVLRTKEAFDTIQEQKVVLEENGEKNQVQLGKLEATIKSLSAELLKANEIIKKLQGDLKTLMGKLKLKNTVTIQQEKLLAEKEEKLQKEQKELQDVGQSLRIKEQEVCKLQEQLEATVKKLEESKQLLKNNEKLITWLNKELNENQLVRKQDVLGPSTTPPAHSSSNTIRSGISPNLNVVDGRLTYPTCGIGYPVSSAFAFQNTFPHSISAKNTSHPGSGTKVQFNLQFTKPNASLGDVQSGATISMPCSTDKENGENVGLESKYLKKREDSIPLRGLSQNLFSNSDHQRDGTLGALHTSSKPTALPSASSAYFPGQLPNS

SEQ ID NO: 76501 - protein, 763 aa, Homo sapiens
  Payload ID: 15274
  Gene Symbol: SATB1
  Gene Name: SATB homeobox 1
  Uniprot ID: Q01826
  ENSP ID: ENSP00000341024
MDHLNEATQGKEHSEMSNNVSDPKGPPAKIARLEQNGSPLGRGRLGSTGAKMQGVPLKHSGHLMKTNLRKGTMLPVFCVVEHYENAIEYDCKEEHAEFVLVRKDMLFNQLIEMALLSLGYSHSSAAQAKGLIQVGKWNPVPLSYVTDAPDATVADMLQDVYHVVTLKIQLHSCPKLEDLPPEQWSHTTVRNALKDLLKDMNQSSLAKECPLSQSMISSIVNSTYYANVSAAKCQEFGRWYKHFKKTKDMMVEMDSLSELSQQGANHVNFGQQPVPGNTAEQPPSPAQLSHGSQPSVRTPLPNLHPGLVSTPISPQLVNQQLVMAQLLNQQYAVNRLLAQQSLNQQYLNHPPPVSRSMNKPLEQQVSTNTEVSSEIYQWVRDELKRAGISQAVFARVAFNRTQGLLSEILRKEEDPKTASQSLLVNLRAMQNFLQLPEAERDRIYQDERERSLNAASAMGPAPLISTPPSRPPQVKTATIATERNGKPENNTMNINASIYDEIQQEMKRAKVSQALFAKVAATKSQGWLCELLRWKEDPSPENRTLWENLSMIRRFLSLPQPERDAIYEQESNAVHHHGDRPPHIIHVPAEQIQQQQQQQQQQQQQQQAPPPPQPQQQPQTGPRLPPRQPTVASPAESDEENRQKTRPRTKISVEALGILQSFIQDVGLYPDEEAIQTLSAQLDLPKYTIIKFFQNQRYYLKHHGKLKDNSGLEVDVAEYKEEELLKDLEESVQDKNTNTLFSVKLEEELSVEGNTDINTDLKD

SEQ ID NO: 76502 - protein, 166 aa, Homo sapiens
  Payload ID: 15274
  Gene Symbol: SATB1
  Gene Name: SATB homeobox 1
  ENSP ID: ENSP00000390529
MDHLNEATQGKEHSEMSNNVSDPKGPPAKIARLEQNGSPLGRGRLGSTGAKMQGVPLKHSGHLMKTNLRKGTMLPVFCVVEHYENAIEYDCKEEHAEFVLVRKDMLFNQLIEMALLSLGYSHSSAAQAKGLIQVGKWNPVPLSYVTDAPDATVADMLQDVYHVVTL

SEQ ID NO: 76503 - protein, 70 aa, Homo sapiens
  Payload ID: 15274
  Gene Symbol: SATB1
  Gene Name: SATB homeobox 1
  ENSP ID: ENSP00000391344
MDHLNEATQGKEHSEMSNNVSDPKGPPAKIARLEQNGSPLGRGRLGSTGAKMQGVPLKHSGHLMKTNLRK

SEQ ID NO: 76504 - protein, 8 aa, Homo sapiens
  Payload ID: 15274
  Gene Symbol: SATB1
  Gene Name: SATB homeobox 1
  ENSP ID: ENSP00000394520
MDHLNEAT

SEQ ID NO: 76505 - protein, 129 aa, Homo sapiens
  Payload ID: 15274
  Gene Symbol: SATB1
  Gene Name: SATB homeobox 1
  ENSP ID: ENSP00000398072
MDHLNEATQGKEHSEMSNNVSDPKGPPAKIARLEQNGSPLGRGRLGSTGAKMQGVPLKHSGHLMKTNLRKGTMLPVFCVVEHYENAIEYDCKEEHAEFVLVRKDMLFNQLIEMALLSLGYSHSSAAQAK

SEQ ID NO: 76506 - protein, 795 aa, Homo sapiens
  Payload ID: 15274
  Gene Symbol: SATB1
  Gene Name: SATB homeobox 1
  Uniprot ID: Q01826
  ENSP ID: ENSP00000399518
MDHLNEATQGKEHSEMSNNVSDPKGPPAKIARLEQNGSPLGRGRLGSTGAKMQGVPLKHSGHLMKTNLRKGTMLPVFCVVEHYENAIEYDCKEEHAEFVLVRKDMLFNQLIEMALLSLGYSHSSAAQAKGLIQVGKWNPVPLSYVTDAPDATVADMLQDVYHVVTLKIQLHSCPKLEDLPPEQWSHTTVRNALKDLLKDMNQSSLAKECPLSQSMISSIVNSTYYANVSAAKCQEFGRWYKHFKKTKDMMVEMDSLSELSQQGANHVNFGQQPVPGNTAEQPPSPAQLSHGSQPSVRTPLPNLHPGLVSTPISPQLVNQQLVMAQLLNQQYAVNRLLAQQSLNQQYLNHPPPVSRSMNKPLEQQVSTNTEVSSEIYQWVRDELKRAGISQAVFARVAFNRTQGLLSEILRKEEDPKTASQSLLVNLRAMQNFLQLPEAERDRIYQDERERSLNAASAMGPAPLISTPPSRPPQVKTATIATERNGKPENNTMNINASIYDEIQQEMKRAKVSQALFAKVAATKSQGWLCELLRWKEDPSPENRTLWENLSMIRRFLSLPQPERDAIYEQESNAVHHHGDRPPHIIHVPAEQIQSPSPTTLGKGESRGVFLPGLPTPAPWLGAAPQQQQQQQQQQQQQQQAPPPPQPQQQPQTGPRLPPRQPTVASPAESDEENRQKTRPRTKISVEALGILQSFIQDVGLYPDEEAIQTLSAQLDLPKYTIIKFFQNQRYYLKHHGKLKDNSGLEVDVAEYKEEELLKDLEESVQDKNTNTLFSVKLEEELSVEGNTDINTDLKD

SEQ ID NO: 76507 - protein, 763 aa, Homo sapiens; identical to SEQ ID NO: 76501
  Payload ID: 15274
  Gene Symbol: SATB1
  Gene Name: SATB homeobox 1
  Uniprot ID: Q01826
  ENSP ID: ENSP00000399708

SEQ ID NO: 76508 - protein, 224 aa, Homo sapiens
  Payload ID: 15274
  Gene Symbol: SATB1
  Gene Name: SATB homeobox 1
  ENSP ID: ENSP00000402982
MDHLNEATQGKEHSEMSNNVSDPKGPPAKIARLEQNGSPLGRGRLGSTGAKMQGVPLKHSGHLMKTNLRKGTMLPVFCVVEHYENAIEYDCKEEHAEFVLVRKDMLFNQLIEMALLSLGYSHSSAAQAKGLIQVGKWNPVPLSYVTDAPDATVADMLQDVYHVVTLKIQLHSCPKLEDLPPEQWSHTTVRNALKDLLKDMNQSSLAKECPLSQSMISSIVNSTY

SEQ ID NO: 76509 - protein, 172 aa, Homo sapiens
  Payload ID: 15274
  Gene Symbol: SATB1
  Gene Name: SATB homeobox 1
  ENSP ID: ENSP00000406727
MDHLNEATQGKEHSEMSNNVSDPKGPPAKIARLEQNGSPLGRGRLGSTGAKMQGVPLKHSGHLMKTNLRKGTMLPVFCVVEHYENAIEYDCKEEHAEFVLVRKDMLFNQLIEMALLSLGYSHSSAAQAKGLIQVGKWNPVPLSYVTDAPDATVADMLQDVYHVVTLKIQLHR

SEQ ID NO: 76510 - protein, 116 aa, Homo sapiens
  Payload ID: 15274
  Gene Symbol: SATB1
  Gene Name: SATB homeobox 1
  ENSP ID: ENSP00000408871
MDHLNEATQGKEHSEMSNNVSDPKGPPAKIARLEQNGSPLGRGRLGSTGAKMQGVPLKHSGHLMKTNLRKGTMLPVFCVVEHYENAIEYDCKEEHAEFVLVRKDMLFNQLIEMALL

SEQ ID NO: 76511 - protein, 82 aa, Homo sapiens
  Payload ID: 15274
  Gene Symbol: SATB1
  Gene Name: SATB homeobox 1
  ENSP ID: ENSP00000453908
MDHLNEATQGKEHSEMSNNVSDPKGPPAKIARLEQNGSPLGRGRLGSTGAKMQGVPLKHSGHLMKTNLRKDIEIVYYEHQFG

SEQ ID NO: 76512 - protein, 138 aa, Homo sapiens
  Payload ID: 15274
  Gene Symbol: SATB1
  Gene Name: SATB homeobox 1
  ENSP ID: ENSP00000479866
MLFNQLIEMALLSLGYSHSSAAQAKGLIQVGKWNPVPLSYVTDAPDATVADMLQDVYHVVTLKIQLHSCPKLEDLPPEQWSHTTVRNALKDLLKDMNQSSLAKECPLSQHPEISNMLDNLFINGKINFKKKLPRAPEA

SEQ ID NO: 76513 - protein, 166 aa, Homo sapiens
  Payload ID: 15274
  Gene Symbol: SATB1
  Gene Name: SATB homeobox 1
  ENSP ID: ENSP00000480000
MLPVFCVVEHYENAIEYDCKEEHAEFVLVRKDMLFNQLIEMALLSLGYSHSSAAQAKGLIQVGKWNPVPLSYVTDAPDATVADMLQDVYHVVTLKIQLHSCPKLEDLPPEQWSHTTVRNALKDLLKDMNQSSLAKECPLSQSMISSIVNSTYYANVSAAKCQEFGR

SEQ ID NO: 76514 - protein, 733 aa, Homo sapiens
  Payload ID: 15275
  Gene Symbol: SATB2
  Gene Name: SATB homeobox 2
  Uniprot ID: Q9UPW6
  ENSP ID: ENSP00000260926
MERRSESPCLRDSPDRRSGSPDVKGPPPVKVARLEQNGSPMGARGRPNGAVAKAVGGLMIPVFCVVEQLDGSLEYDNREEHAEFVLVRKDVLFSQLVETALLALGYSHSSAAQAQGIIKLGRWNPLPLSYVTDAPDATVADMLQDVYHVVTLKIQLQSCSKLEDLPAEQWNHATVRNALKELLKEMNQSTLAKECPLSQSMISSIVNSTYYANVSATKCQEFGRWYKKYKKIKVERVERENLSDYCVLGQRPMHLPNMNQLASLGKTNEQSPHSQIHHSTPIRNQVPALQPIMSPGLLSPQLSPQLVRQQIAMAHLINQQIAVSRLLAHQHPQAINQQFLNHPPIPRAVKPEPTNSSVEVSPDIYQQVRDELKRASVSQAVFARVAFNRTQGLLSEILRKEEDPRTASQSLLVNLRAMQNFLNLPEVERDRIYQDERERSMNPNVSMVSSASSSPSSSRTPQAKTSTPTTDLPIKVDGANINITAAIYDEIQQEMKRAKVSQALFAKVAANKSQGWLCELLRWKENPSPENRTLWENLCTIRRFLNLPQHERDVIYEEESRHHHSERMQHVVQLPPEPVQVLHRQQSQPAKESSPPREEAPPPPPPTEDSCAKKPRSRTKISLEALGILQSFIHDVGLYPDQEAIHTLSAQLDLPKHTIIKFFQNQRYHVKHHGKLKEHLGSAVDVAEYKDEELLTESEENDSEEGSEEMYKVEAEEENADKSKAAPAEIDQR

SEQ ID NO: 76515 - protein, 615 aa, Homo sapiens
  Payload ID: 15275
  Gene Symbol: SATB2
  Gene Name: SATB homeobox 2
  Uniprot ID: Q9UPW6
  ENSP ID: ENSP00000388581
MERRSESPCLRDSPDRRSGSPDVKGPPPVKVARLEQNGSPMGARGRPNGAVAKAVGGLMIPVFCVVEQLDGSLEYDNREEHAEFVLVRKDVLFSQLVETALLALGYSHSSAAQAQVERVERENLSDYCVLGQRPMHLPNMNQLASLGKTNEQSPHSQIHHSTPIRNQVPALQPIMSPGLLSPQLSPQLVRQQIAMAHLINQQIAVSRLLAHQHPQAINQQFLNHPPIPRAVKPEPTNSSVEVSPDIYQQVRDELKRASVSQAVFARVAFNRTQGLLSEILRKEEDPRTASQSLLVNLRAMQNFLNLPEVERDRIYQDERERSMNPNVSMVSSASSSPSSSRTPQAKTSTPTTDLPIKVDGANINITAAIYDEIQQEMKRAKVSQALFAKVAANKSQGWLCELLRWKENPSPENRTLWENLCTIRRFLNLPQHERDVIYEEESRHHHSERMQHVVQLPPEPVQVLHRQQSQPAKESSPPREEAPPPPPPTEDSCAKKPRSRTKISLEALGILQSFIHDVGLYPDQEAIHTLSAQLDLPKHTIIKFFQNQRYHVKHHGKLKEHLGSAVDVAEYKDEELLTESEENDSEEGSEEMYKVEAEEENADKSKAAPAEIDQR

SEQ ID NO: 76516 - protein, 674 aa, Homo sapiens
  Payload ID: 15275
  Gene Symbol: SATB2
  Gene Name: SATB homeobox 2
  ENSP ID: ENSP00000388764
MERRSESPCLRDSPDRRSGSPDVKGPPPVKVARLEQNGSPMGARGRPNGAVAKAVGGIIKLGRWNPLPLSYVTDAPDATVADMLQDVYHVVTLKIQLQSCSKLEDLPAEQWNHATVRNALKELLKEMNQSTLAKECPLSQSMISSIVNSTYYANVSATKCQEFGRWYKKYKKIKVERVERENLSDYCVLGQRPMHLPNMNQLASLGKTNEQSPHSQIHHSTPIRNQVPALQPIMSPGLLSPQLSPQLVRQQIAMAHLINQQIAVSRLLAHQHPQAINQQFLNHPPIPRAVKPEPTNSSVEVSPDIYQQVRDELKRASVSQAVFARVAFNRTQGLLSEILRKEEDPRTASQSLLVNLRAMQNFLNLPEVERDRIYQDERERSMNPNVSMVSSASSSPSSSRTPQAKTSTPTTDLPIKVDGANINITAAIYDEIQQEMKRAKVSQALFAKVAANKSQGWLCELLRWKENPSPENRTLWENLCTIRRFLNLPQHERDVIYEEESRHHHSERMQHVVQLPPEPVQVLHRQQSQPAKESSPPREEAPPPPPPTEDSCAKKPRSRTKISLEALGILQSFIHDVGLYPDQEAIHTLSAQLDLPKHTIIKFFQNQRYHVKHHGKLKEHLGSAVDVAEYKDEELLTESEENDSEEGSEEMYKVEAEEENADKSKAAPAEIDQR

SEQ ID NO: 76517 - protein, 733 aa, Homo sapiens; identical to SEQ ID NO: 76514
  Payload ID: 15275
  Gene Symbol: SATB2
  Gene Name: SATB homeobox 2
  Uniprot ID: Q9UPW6
  ENSP ID: ENSP00000401112

SEQ ID NO: 76518 - protein, 733 aa, Homo sapiens; identical to SEQ ID NO: 76514
  Payload ID: 15275
  Gene Symbol: SATB2
  Gene Name: SATB homeobox 2
  Uniprot ID: Q9UPW6
  ENSP ID: ENSP00000405420

SEQ ID NO: 76519 - protein, 126 aa, Homo sapiens
  Payload ID: 15275
  Gene Symbol: SATB2
  Gene Name: SATB homeobox 2
  ENSP ID: ENSP00000415610
MERRSESPCLRDSPDRRSGSPDVKGPPPVKVARLEQNGSPMGARGRPNGAVAKAVGGLMIPVFCVVEQLDGSLEYDNREEHAEFVLVRKDVLFSQLVETALLALGYSHSSAAQAQGWRAANPASWI

SEQ ID NO: 76520 - protein, 615 aa, Homo sapiens; identical to SEQ ID NO: 76515
  Payload ID: 15275
  Gene Symbol: SATB2
  Gene Name: SATB homeobox 2
  Uniprot ID: Q9UPW6
  ENSP ID: ENSP00000483287

SEQ ID NO: 76521 - protein, 183 aa, Homo sapiens
  Payload ID: 15276
  Gene Symbol: SAYSD1
  Gene Name: SAYSVFN motif domain containing 1
  Uniprot ID: Q9NPB0
  ENSP ID: ENSP00000229903
MEQRLAEFRAARKRAGLAAQPPAASQGAQTPGEKAEAAATLKAAPGWLKRFLVWKPRPASARAQPGLVQEAAQPQGSTSETPWNTAIPLPSCWDQSFLTNITFLKVLLWLVLLGLFVELEFGLAYFVLSLFYWMYVGTRGPEEKKEGEKSAYSVFNPGCEAIQGTLTAEQLERELQLRPLAGR

SEQ ID NO: 76522 - protein, 116 aa, Homo sapiens
  Payload ID: 15276
  Gene Symbol: SAYSD1
  Gene Name: SAYSVFN motif domain containing 1
  Uniprot ID: Q9NPB0
  ENSP ID: ENSP00000362346
MLEAAQPQGSTSETPWNTAIPLPSCWDQSFLTNITFLKVLLWLVLLGLFVELEFGLAYFVLSLFYWMYVGTRGPEEKKEGEKSAYSVFNPGCEAIQGTLTAEQLERELQLRPLAGR

SEQ ID NO: 76523 - protein, 915 aa, Homo sapiens
  Payload ID: 15277
  Gene Symbol: SAFB
  Gene Name: scaffold attachment factor B
  Uniprot ID: Q15424
  ENSP ID: ENSP00000292123
MAETLSGLGDSGAAGAAALSSASSETGTRRLSDLRVIDLRAELRKRNVDSSGNKSVLMERLKKAIEDEGGNPDEIEITSEGNKKTSKRSSKGRKPEEEGVEDNGLEENSGDGQEDVETSLENLQDIDIMDISVLDEAEIDNGSVADCVEDDDADNLQESLSDSRELVEGEMKELPEQLQEHAIEDKETINNLDTSSSDFTILQEIEEPSLEPENEKILDILGETCKSEPVKEESSELEQPFAQDTSSVGPDRKLAEEEDLFDSAHPEEGDLDLASESTAHAQSSKADSLLAVVKREPAEQPGDGERTDCEPVGLEPAVEQSSAASELAEASSEELAEAPTEAPSPEARDSKEDGRKFDFDACNEVPPAPKESSTSEGADQKMSSPEDDSDTKRLSKEEKGRSSCGRNFWVSGLSSTTRATDLKNLFSKYGKVVGAKVVTNARSPGARCYGFVTMSTAEEATKCINHLHKTELHGKMISVEKAKNEPVGKKTSDKRDSDGKKEKSSNSDRSTNLKRDDKCDRKDDAKKGDDGSGEKSKDQDDQKPGPSERSRATKSGSRGTERTVVMDKSKGVPVISVKTSGSKERASKSQDRKSASREKRSVVSFDKVKEPRKSRDSESHSRVRERSEREQRMQAQWEREERERLEIARERLAFQRQRLERERMERERLERERMHVEHERRREQERIHREREELRRQQELRYEQERRPAVRRPYDLDRRDDAYWPEAKRAALDERYHSDFNRQDRFHDFDHRDRGRYPDHSVDRREGSRSMMGEREGQHYPERHGGPERHGRDSRDGWGGYGSDKRMSEGRGLPPPPRRDWGDHGRREDDRSWQGTADGGMMDRDHKRWQGGERSMSGHSGPGHMMNRGGMSGRGSFAPGGASRGHPIPHGGMQGGFGGQSRGSRPSDARFTRRY

SEQ ID NO: 76524 - protein, 848 aa, Homo sapiens
  Payload ID: 15277
  Gene Symbol: SAFB
  Gene Name: scaffold attachment factor B
  Uniprot ID: Q15424
  ENSP ID: ENSP00000415895
MAETLSGLGDSGAAGAAALSSASSETGTRRLSDLRVIDLRAELRKRNVDSSGNKSVLMERLKKAIEDEGGNPDEIEITSEGNKKTSKRSSKGRKPEEEGVEDNGLEENSGDGQIEDKETINNLDTSSSDFTILQEIEEPSLEPENEKILDILGETCKSEPVKEESSELEQPFAQDTSSVGPDRKLAEEEDLFDSAHPEEGDLDLASESTAHAQSSKADSLLAVVKREPAEQPGDGERTDCEPVGLEPAVEQSSAASELAEASSEELAEAPTEAPSPEARDSKEDGRKFDFDACNEVPPAPKESSTSEGADQKMSSPEDDSDTKRLSKEEKGRSSCGRNFWVSGLSSTTRATDLKNLFSKYGKVVGAKVVTNARSPGARCYGFVTMSTAEEATKCINHLHKTELHGKMISVEKAKNEPVGKKTSDKRDSDGKKEKSSNSDRSTNLKRDDKCDRKDDAKKGDDGSGEKSKDQDDQKPGPSERSRATKSGSRGTERTVVMDKSKGVPVISVKTSGSKERASKSQDRKSASREKRSVVSFDKVKEPRKSRDSESHSRVRERSEREQRMQAQWEREERERLEIARERLAFQRQRLERERMERERLERERMHVEHERRREQERIHREREELRRQQELRYEQERRPAVRRPYDLDRRDDAYWPEAKRAALDERYHSDFNRQDRFHDFDHRDRGRYPDHSVDRREGSRSMMGEREGQHYPERHGGPERHGRDSRDGWGGYGSDKRMSEGRGLPPPPRGRRDWGDHGRREDDRSWQGTADGGMMDRDHKRWQGGERSMSGHSGPGHMMNRGGMSGRGSFAPGGASRGHPIPHGGMQGGFGGQSRGSRPSDARFTRRY

SEQ ID NO: 76525 - protein, 153 aa, Homo sapiens
  Payload ID: 15277
  Gene Symbol: SAFB
  Gene Name: scaffold attachment factor B
  ENSP ID: ENSP00000464758
SRDSESHRSPSAALLLCSRVRERSEREQRMQAQWEREERERLEIARERLAFQRQRLERERMERERLERERMHVEHERRREQERIHREREELRRQQELRYEQERRPAVRRPYDLDRRDDAYWPEAKRAALDERYHSDFNRQDRFHDFDHRDRGR

SEQ ID NO: 76526 - protein, 916 aa, Homo sapiens
  Payload ID: 15277
  Gene Symbol: SAFB
  Gene Name: scaffold attachment factor B
  Uniprot ID: Q15424
  ENSP ID: ENSP00000464840
MAETLSGLGDSGAAGAAALSSASSETGTRRLSDLRVIDLRAELRKRNVDSSGNKSVLMERLKKAIEDEGGNPDEIEITSEGNKKTSKRSSKGRKPEEEGVEDNGLEENSGDGQEDVETSLENLQDIDIMDISVLDEAEIDNGSVADCVEDDDADNLQESLSDSRELVEGEMKELPEQLQEHAIEDKETINNLDTSSSDFTILQEIEEPSLEPENEKILDILGETCKSEPVKEESSELEQPFAQDTSSVGPDRKLAEEEDLFDSAHPEEGDLDLASESTAHAQSSKADSLLAVVKREPAEQPGDGERTDCEPVGLEPAVEQSSAASELAEASSEELAEAPTEAPSPEARDSKEDGRKFDFDACNEVPPAPKESSTSEGADQKMSSPEDDSDTKRLSKEEKGRSSCGRNFWVSGLSSTTRATDLKNLFSKYGKVVGAKVVTNARSPGARCYGFVTMSTAEEATKCINHLHKTELHGKMISVEKAKNEPVGKKTSDKRDSDGKKEKSSNSDRSTNLKRDDKCDRKDDAKKGDDGSGEKSKDQDDQKPGPSERSRATKSGSRGTERTVVMDKSKGVPVISVKTSGSKERASKSQDRKSASREKRSVVSFDKVKEPRKSRDSESHRVRERSEREQRMQAQWEREERERLEIARERLAFQRQRLERERMERERLERERMHVEHERRREQERIHREREELRRQQELRYEQERRPAVRRPYDLDRRDDAYWPEAKRAALDERYHSDFNRQDRFHDFDHRDRGRYPDHSVDRREGSRSMMGEREGQHYPERHGGPERHGRDSRDGWGGYGSDKRMSEGRGLPPPPRGRRDWGDHGRREDDRSWQGTADGGMMDRDHKRWQGGERSMSGHSGPGHMMNRGGMSGRGSFAPGGASRGHPIPHGGMQGGFGGQSRGSRPSDARFTRRY

SEQ ID NO: 76527 - protein, 917 aa, Homo sapiens
  Payload ID: 15277
  Gene Symbol: SAFB
  Gene Name: scaffold attachment factor B
  Uniprot ID: Q15424
  ENSP ID: ENSP00000467423
MAETLSGLGDSGAAGAAALSSASSETGTRRLSDLRVIDLRAELRKRNVDSSGNKSVLMERLKKAIEDEGGNPDEIEITSEGNKKTSKRSSKGRKPEEEGVEDNGLEENSGDGQEDVETSLENLQDIDIMDISVLDEAEIDNGSVADCVEDDDADNLQESLSDSRELVEGEMKELPEQLQEHAIEDKETINNLDTSSSDFTILQEIEEPSLEPENEKILDILGETCKSEPVKEESSELEQPFAQDTSSVGPDRKLAEEEDLFDSAHPEEGDLDLASESTAHAQSSKADSLLAVVKREPAEQPGDGERTDCEPVGLEPAVEQSSAASELAEASSEELAEAPTEAPSPEARDSKEDGRKFDFDACNEVPPAPKESSTSEGADQKMSSPEDDSDTKRLSKEEKGRSSCGRNFWVSGLSSTTRATDLKNLFSKYGKVVGAKVVTNARSPGARCYGFVTMSTAEEATKCINHLHKTELHGKMISVEKAKNEPVGKKTSDKRDSDGKKEKSSNSDRSTNLKRDDKCDRKDDAKKGDDGSGEKSKDQDDQKPGPSERSRATKSGSRGTERTVVMDKSKGVPVISVKTSGSKERASKSQDRKSASREKRSVVSFDKVKEPRKSRDSESHSRVRERSEREQRMQAQWEREERERLEIARERLAFQRQRLERERMERERLERERMHVEHERRREQERIHREREELRRQQELRYEQERRPAVRRPYDLDRRDDAYWPEAKRAALDERYHSDFNRQDRFHDFDHRDRGRYPDHSVDRREGSRSMMGEREGQHYPERHGGPERHGRDSRDGWGGYGSDKRMSEGRGLPPPPRGRRDWGDHGRREDDRSWQGTADGGMMDRDHKRWQGGERSMSGHSGPGHMMNRGGMSGRGSFAPGGASRGHPIPHGGMQGGFGGQSRGSRPSDARFTRRY

SEQ ID NO: 76528 - protein, 106 aa, Homo sapiens
  Payload ID: 15277
  Gene Symbol: SAFB
  Gene Name: scaffold attachment factor B
  ENSP ID: ENSP00000468543
MAETLSGLGDSGAAGAAALSSASSETGTRRLSDLRVIDLRAELRKRNVDSSGNKSVLMERLKKAIEDEGGNPDEIEITSEGNKKTSKRSSKDRGQRNYKQFRYFII

SEQ ID NO: 76529 - protein, 953 aa, Homo sapiens
  Payload ID: 15278
  Gene Symbol: SAFB2
  Gene Name: scaffold attachment factor B2
  Uniprot ID: Q14151
  ENSP ID: ENSP00000252542
MAETLPGSGDSGPGTASLGPGVAETGTRRLSELRVIDLRAELKKRNLDTGGNKSVLMERLKKAVKEEGQDPDEIGIELEATSKKSAKRCVKGLKMEEEGTEDNGLEDDSRDGQEDMEASLENLQNMGMMDMSVLDETEVANSSAPDFGEDGTDGLLDSFCDSKEYVAAQLRQLPAQPPEHAVDGEGFKNTLETSSLNFKVTPDIEESLLEPENEKILDILGETCKSEPVKEESSELEQPFAQDTSSVGPDRKLAEEEDLFDSAHPEEGDLDLASESTAHAQSSKADSLLAVVKREPAEQPGDGERTDCEPVGLEPAVEQSSAASELAEASSEELAEAPTEAPSPEARDSKEDGRKFDFDACNEVPPAPKESSTSEGADQKMSSFKEEKDIKPIIKDEKGRVGSGSGRNLWVSGLSSTTRATDLKNLFSKYGKVVGAKVVTNARSPGARCYGFVTMSTSDEATKCISHLHRTELHGRMISVEKAKNEPAGKKLSDRKECEVKKEKLSSVDRHHSVEIKIEKTVIKKEEKIEKKEEKKPEDIKKEEKDQDELKPGPTNRSRVTKSGSRGMERTVVMDKSKGEPVISVKTTSRSKERSSKSQDRKSESKEKRDILSFDKIKEQRERERQRQREREIRETERRREREQREREQRLEAFHERKEKARLQRERLQLECQRQRLERERMERERLERERMRVERERRKEQERIHREREELRRQQEQLRYEQERRPGRRPYDLDRRDDAYWPEGKRVAMEDRYRADFPRPDHRFHDFDHRDRGQYQDHAIDRREGSRPMMGDHRDGQHYGDDRHGHGGPPERHGRDSRDGWGGYGSDKRLSEGRGLPPPPRGGRDWGEHNQRLEEHQARAWQGAMDAGAASREHARWQGGERGLSGPSGPGHMASRGGVAGRGGFAQGGHSQGHVVPGGGLEGGGVASQDRGSRVPHPHPHPPPYPHFTRRY

SEQ ID NO: 76530 - protein, 87 aa, Homo sapiens
  Payload ID: 15278
  Gene Symbol: SAFB2
  Gene Name: scaffold attachment factor B2
  ENSP ID: ENSP00000467981
VLDETEVANSSAPDFGEDGTDGLLDSFCDSKEYVAAQLRQLPAQPPEHAVDGEGFKNTLETSSLNFKVTPDIEESLLEPALLRKKKI

SEQ ID NO: 76531 - protein, 124 aa, Homo sapiens
  Payload ID: 15278
  Gene Symbol: SAFB2
  Gene Name: scaffold attachment factor B2
  ENSP ID: ENSP00000468454
MEEEGTEDNGLEDDSRDGQEDMEASLENLQNMGMMDMSVLDETEVANSSAPDFGEDGTDGLLDSFCDSKEYVAAQLRQLPAQPPEHAVDGEGFKNTLETSSLNFKVTPDIEESLLEPGTDKRNT

SEQ ID NO: 76532 - protein, 115 aa, Homo sapiens
  Payload ID: 15278
  Gene Symbol: SAFB2
  Gene Name: scaffold attachment factor B2
  Uniprot ID: Q14151
  ENSP ID: ENSP00000468505
MAETLPGSGDSGPGTASLGPGVAETGTRRLSELRVIDLRAELKKRNLDTGGNKSVLMERLKKAVKEEGQDPDEIGIELEATSKKSAKRCVKGGHGSKSGEPAEYGHDGHECARRN

SEQ ID NO: 76533 - protein, 915 aa, Homo sapiens
  Payload ID: 15279
  Gene Symbol: SPIDR
  Gene Name: scaffolding protein involved in DNA repair
  Uniprot ID: Q14159
  ENSP ID: ENSP00000297423
MPRGSRARGSKRKRSWNTECPSFPGERPLQVRRAGLRTAGAAASLSEAWLRCGEGFQNTSGNPSLTAEEKTITEKHLELCPRPKQETTTSKSTSGLTDITWSSSGSDLSDEDKTLSQLQRDELQFIDWEIDSDRAEASDCDEFEDDEGAVEISDCASCASNQSLTSDEKLSELPKPSSIEILEYSSDSEKEDDLENVLLIDSESPHKYHVQFASDARQIMERLIDPRTKSTETILHTPQKPTAKFPRTPENSAKKKLLRGGLAERLNGLQNRERSAISLWRHQCISYQKTLSGRKSGVLTVKILELHEECAMQVAMCEQLLGSPATSSSQSVAPRPGAGLKVLFTKETAGYLRGRPQDTVRIFPPWQKLIIPSGSCPVILNTYFCEKVVAKEDSEKTCEVYCPDIPLPRRSISLAQMFVIKGLTNNSPEIQVVCSGVATTGTAWTHGHKEAKQRIPTSTPLRDSLLDVVESQGAASWPGAGVRVVVQRVYSLPSRDSTRGQQGASSGHTDPAGTRACLLVQDACGMFGEVHLEFTMSKARQLEGKSCSLVGMKVLQKVTRGRTAGIFSLIDTLWPPAIPLKTPGRDQPCEEIKTHLPPPALCYILTAHPNLGQIDIIDEDPIYKLYQPPVTRCLRDILQMNDLGTRCSFYATVIYQKPQLKSLLLLEQREIWLLVTDVTLQTKEERDPRLPKTLLVYVAPLCVLGSEVLEALAGAAPHSLFFKDALRDQGRIVCAERTVLLLQKPLLSVVSGASSCELPGPVMLDSLDSATPVNSICSVQGTVVGVDESTAFSWPVCDMCGNGRLEQRPEDRGAFSCGDCSRVVTSPVLKRHLQVFLDCRSRPQCRVKVKLLQRSISSLLRFAAGEDGSYEVKSVLGKEVGLLNCFVQSVTAHPTSCIGLEEIELLSAGGASAEH

SEQ ID NO: 76534 - protein, 92 aa, Homo sapiens
  Payload ID: 15279
  Gene Symbol: SPIDR
  Gene Name: scaffolding protein involved in DNA repair
  ENSP ID: ENSP00000427878
MCGNGRLEQRPEDRGAFSCGDCSRVVTSPVLKRHLQVFLDCRSRPQCRVKVKLLQRSISSLLRFAAGEDGSYEVKSVLGKEVGLLNCFVQSV

SEQ ID NO: 76535 - protein, 390 aa, Homo sapiens
  Payload ID: 15279
  Gene Symbol: SPIDR
  Gene Name: scaffolding protein involved in DNA repair
  ENSP ID: ENSP00000427889
MFGEVHLEFTMSKARQLEGKSCSLVGMKVLQKVTRGRTAGIFSLIDTLWPPAIPLKTPGRDQPCEEIKTHLPPPALCYILTAHPNLGQIDIIDEDPIYKLYQPPVTRCLRDILQMNDLGTRCSFYATVIYQKPQLKSLLLLEQREIWLLVTDVTLQTKEERDPRLPKTLLVYVAPLCVLGSEVLEALAGAAPHSLFFKDALRDQGRIVCAERTVLLLQKPLLSVVSGASSCELPGPVMLDSLDSATPVNSICSVQGTVVGVDESTAFSWPVCDMCGNGRLEQRPEDRGAFSCGDCSRVVTSPVLKRHLQVFLDCRSRPQCRVKVKLLQRSISSLLRFAAGEDGSYEVKSVLGKEVGLLNCFVQSVTAHPTSCIGLEEIELLSAGGASAEH

SEQ ID NO: 76536 - protein, 45 aa, Homo sapiens
  Payload ID: 15279
  Gene Symbol: SPIDR
  Gene Name: scaffolding protein involved in DNA repair
  ENSP ID: ENSP00000428222
MPRGSRARGSKKKELEYRMPILSRRKTTAGQKSRSQDSRGSCLSL

SEQ ID NO: 76537 - protein, 181 aa, Homo sapiens
  Payload ID: 15279
  Gene Symbol: SPIDR
  Gene Name: scaffolding protein involved in DNA repair
  ENSP ID: ENSP00000428287
MPRGSRARGSKRKRSWNTECPSFPGERPLQVRRAGLRTAGAAASLSEAWLRCGEGFQNTSGNPSLTAEEKTITEKHLELCPRPKQETTTSKSTSGLTDITWSSSGSDLSDEDKTLSQLQRDELQFIDWEIDSDRAEASDCDEFEDDEGAVEISDCASCASNQSLTSDEKLSELPKVENLVY

SEQ ID NO: 76538 - protein, 497 aa, Homo sapiens
  Payload ID: 15279
  Gene Symbol: SPIDR
  Gene Name: scaffolding protein involved in DNA repair
  ENSP ID: ENSP00000429193
  MOD_RES (1)..(1): Any amino acid
XLLGSPATSSSQSVAPRPGAGLKVLFTKETAGYLRGRPQDTVRIFPPWQKLIIPSGSCPVILNTYFCEKVVAKEDSEKTCEVYCPDIPLPRRSISLAQMFVIKGLTNNSPEIQVVCSGVATTGTAWTHGHKEAKQRIPTSTPLRDSLLDVVESQGAASWPGAGVRVVVQRVYSLPSRDSTRGQQGASSGHTDPAGTRACLLVQDACGMFGEVHLEFTMSKARQLEGKSCSLVGMKVLQKVTRGRTAGIFSLIDTLWPPAIPLKTPGRDQPCEEIKTHLPPPALCYILTAHPNLGQIDIIDEDPIYKLYQPPVTRCLRDILQMNDLGTRCSFYATVIYQKPQLKSLLLLEQREIWLLVTDVTLQTKEERDPRLPKTLLVYVAPLCVLGSEVLEALAGAAPHSLFFKDALRDQGRIVCAERTVLLLQKPLLSVVSGASSCELPGPVMLDSLDSATPVNSICSVQGTVVGVDESTAFSWPVCDMCGNGRLEQRPEDRATK

SEQ ID NO: 76539 - protein, 95 aa, Homo sapiens
  Payload ID: 15279
  Gene Symbol: SPIDR
  Gene Name: scaffolding protein involved in DNA repair
  ENSP ID: ENSP00000429448
MCGNGRLEQRPEDRGAFSCGDCSRVVTSPVLKRHLQVFLDCRSRPQCRVKVKLLQRSISSLLRFAAGEDGRSRDQEPWQKSSFLHLVSFWLRATK

SEQ ID NO: 76540 - protein, 876 aa, Homo sapiens
  Payload ID: 15279
  Gene Symbol: SPIDR
  Gene Name: scaffolding protein involved in DNA repair
  Uniprot ID: Q14159
  ENSP ID: ENSP00000429487
MAQSLTAEEKTITEKHLELCPRPKQETTTSKSTSGLTDITWSSSGSDLSDEDKTLSQLQRDELQFIDWEIDSDRAEASDCDEFEDDEGAVEISDCASCASNQSLTSDEKLSELPKPSSIEILEYSSDSEKEDDLENVLLIDSESPHKYHVQFASDARQIMERLIDPRTKSTETILHTPQKPTAKFPRTPENSAKKKLLRGGLAERLNGLQNRERSAISLWRHQCISYQKTLSGRKSGVLTVKILELHEECAMQVAMCEQLLGSPATSSSQSVAPRPGAGLKVLFTKETAGYLRGRPQDTVRIFPPWQKLIIPSGSCPVILNTYFCEKVVAKEDSEKTCEVYCPDIPLPRRSISLAQMFVIKGLTNNSPEIQVVCSGVATTGTAWTHGHKEAKQRIPTSTPLRDSLLDVVESQGAASWPGAGVRVVVQRVYSLPSRDSTRGQQGASSGHTDPAGTRACLLVQDACGMFGEVHLEFTMSKARQLEGKSCSLVGMKVLQKVTRGRTAGIFSLIDTLWPPAIPLKTPGRDQPCEEIKTHLPPPALCYILTAHPNLGQIDIIDEDPIYKLYQPPVTRCLRDILQMNDLGTRCSFYATVIYQKPQLKSLLLLEQREIWLLVTDVTLQTKEERDPRLPKTLLVYVAPLCVLGSEVLEALAGAAPHSLFFKDALRDQGRIVCAERTVLLLQKPLLSVVSGASSCELPGPVMLDSLDSATPVNSICSVQGTVVGVDESTAFSWPVCDMCGNGRLEQRPEDRGAFSCGDCSRVVTSPVLKRHLQVFLDCRSRPQCRVKVKVGARPEHARTPSSLQHSEELRSEECPRKGSGVVKLFCPVRNRPPDQLHWIGGNRASECRRGLCRTLAVAAGSVNFAMWLQGWWWWW

SEQ ID NO: 76541 - protein, 76 aa, Homo sapiens
  Payload ID: 15279
  Gene Symbol: SPIDR
  Gene Name: scaffolding protein involved in DNA repair
  ENSP ID: ENSP00000429805
MPRGSRARGSKRKRSWNTECPSFPGERPLQVRRAGLRTAGAAASLSEAWLRCGEGFQNTSGNPKPPHLKAPVGLQT

SEQ ID NO: 76542 - protein, 209 aa, Homo sapiens
  Payload ID: 15279
  Gene Symbol: SPIDR
  Gene Name: scaffolding protein involved in DNA repair
  ENSP ID: ENSP00000429997
MPRGSRARGSKRKRSWNTECPSFPGERPLQVRRAGLRTAGAAASLSEAWLRCGEGFQNTSGNPSLTAEEKTITEKHLELCPRPKQETTTSKSTSGLTDITWSSSGSDLSDEDKTLSQLQRDELQFIDWEIDSDRAEASDCDEFEDDEGAVEISDCASCASNQSLTSDEKLSELPKRWTSRKTKWTAESREICYFFVETSMYFLPKDTFR

SEQ ID NO: 76543 - protein, 152 aa, Homo sapiens
  Payload ID: 15279
  Gene Symbol: SPIDR
  Gene Name: scaffolding protein involved in DNA repair
  ENSP ID: ENSP00000430091
MQVAMCEQLLGSPATSSSQSVAPRPGAGLKVLFTKETAGYLRGRPQDTVRIFPPWQKLIIPSGSCPVILNTYFCEKVVAKEDSEKTCEVYCPDIPLPRRSISLAQMFVIKGLTNNSPEIQVVCSGVATTGTAWTHGHKEAKQRIPTSTPLRD

SEQ ID NO: 76544 - protein, 126 aa, Homo sapiens
  Payload ID: 15279
  Gene Symbol: SPIDR
  Gene Name: scaffolding protein involved in DNA repair
  ENSP ID: ENSP00000430664
MPRGSRARGSKRKRSWNTECPSFPGERPLQVRRAGLRTAGAAASLSEAWLRCGEGFQNTSGNPSLTAEEKTITEKHLELCPRPKQETTTSKSTSGLTDITWSSSGSDLSDEDKTLSQLQRGFGNYD

SEQ ID NO: 76545 - protein, 181 aa, Homo sapiens; identical to SEQ ID NO: 76537
  Payload ID: 15279
  Gene Symbol: SPIDR
  Gene Name: scaffolding protein involved in DNA repair
  ENSP ID: ENSP00000430941

SEQ ID NO: 76546 - protein, 132 aa, Homo sapiens
  Payload ID: 15279
  Gene Symbol: SPIDR
  Gene Name: scaffolding protein involved in DNA repair
  ENSP ID: ENSP00000430965
MPRGSRARGSKRKRSWNTECPSFPGERPLQVRRAGLRTAGAAASLSEAWLRCGEGFQNTSGNPSLTAEEKTITEKHLELCPRPKQETTTSKSTSGLTDITWSSSGSDLSDEDKTLSQLQRAKFYRNFRVFIR

SEQ ID NO: 76547 - protein, 845 aa, Homo sapiens
  Payload ID: 15279
  Gene Symbol: SPIDR
  Gene Name: scaffolding protein involved in DNA repair
  Uniprot ID: Q14159
  ENSP ID: ENSP00000444061
MAQVWRRVSEHFWESETTTSKSTSGLTDITWSSSGSDLSDEDKTLSQLQRDELQFIDWEIDSDRAEASDCDEFEDDEGAVEISDCASCASNQSLTSDEKLSELPKPSSIEILEYSSDSEKEDDLENVLLIDSESPHKYHVQFASDARQIMERLIDPRTKSTETILHTPQKPTAKFPRTPENSAKKKLLRGGLAERLNGLQNRERSAISLWRHQCISYQKTLSGRKSGVLTVKILELHEECAMQVAMCEQLLGSPATSSSQSVAPRPGAGLKVLFTKETAGYLRGRPQDTVRIFPPWQKLIIPSGSCPVILNTYFCEKVVAKEDSEKTCEVYCPDIPLPRRSISLAQMFVIKGLTNNSPEIQVVCSGVATTGTAWTHGHKEAKQRIPTSTPLRDSLLDVVESQGAASWPGAGVRVVVQRVYSLPSRDSTRGQQGASSGHTDPAGTRACLLVQDACGMFGEVHLEFTMSKARQLEGKSCSLVGMKVLQKVTRGRTAGIFSLIDTLWPPAIPLKTPGRDQPCEEIKTHLPPPALCYILTAHPNLGQIDIIDEDPIYKLYQPPVTRCLRDILQMNDLGTRCSFYATVIYQKPQLKSLLLLEQREIWLLVTDVTLQTKEERDPRLPKTLLVYVAPLCVLGSEVLEALAGAAPHSLFFKDALRDQGRIVCAERTVLLLQKPLLSVVSGASSCELPGPVMLDSLDSATPVNSICSVQGTVVGVDESTAFSWPVCDMCGNGRLEQRPEDRGAFSCGDCSRVVTSPVLKRHLQVFLDCRSRPQCRVKVKLLQRSISSLLRFAAGEDGSYEVKSVLGKEVGLLNCFVQSVTAHPTSCIGLEEIELLSAGGASAEH

SEQ ID NO: 76548 - protein, 179 aa, Homo sapiens
  Payload ID: 15280
  Gene Symbol: SCAND1
  Gene Name: SCAN domain containing 1
  Uniprot ID: P57086
  ENSP ID: ENSP00000301995
MAATEPILAATGSPAAVPPEKLEGAGSSSAPERNCVGSSLPEASPPAPEPSSPNAAVPEAIPTPRAAASAALELPLGPAPVSVAPQAEAEARSTPGPAGSRLGPETFRQRFRQFRYQDAAGPREAFRQLRELSRQWLRPDIRTKEQIVEMLVQEQLLAILPEAARARRIRRRTDVRITG

SEQ ID NO: 76549 - protein, 179 aa, Homo sapiens; identical to SEQ ID NO: 76548
  Payload ID: 15280
  Gene Symbol: SCAND1
  Gene Name: SCAN domain containing 1
  Uniprot ID: P57086
  ENSP ID: ENSP00000363103

SEQ ID NO: 76550 - protein, 179 aa, Homo sapiens; identical to SEQ ID NO: 76548
  Payload ID: 15280
  Gene Symbol: SCAND1
  Gene Name: SCAN domain containing 1
  Uniprot ID: P57086
  ENSP ID: ENSP00000481289

SEQ ID NO: 76551 - protein, 606 aa, Homo sapiens
  Payload ID: 15281
  Gene Symbol: SCARA3
  Gene Name: scavenger receptor class A, member 3
  Uniprot ID: Q6AZY7
  ENSP ID: ENSP00000301904
MKVRSAGGDGDALCVTEEDLAGDDEDMPTFPCTQKGRPGPRCSRCQKNLSLHTSVRILYLFLALLLVAVAVLASLVFRKVDSLSEDISLTQSIYDKKLVLMQKNLQGLDPKALNNCSFCHEAGQLGPEIRKLQEELEGIQKLLLAQEVQLDQTLQAQEVLSTTSRQISQEMGSCSFSIHQVNQSLGLFLAQVRGWQATTAGLDLSLKDLTQECYDVKAAVHQINFTVGQTSEWIHGIQRKTDEETLTLQKIVTDWQNYTRLFSGLRTTSTKTGEAVKNIQATLGASSQRISQNSESMHDLVLQVMGLQLQLDNISSFLDDHEENMHDLQYHTHYAQNRTVERFESLEGRMASHEIEIGTIFTNINATDNHVHSMLKYLDDVRLSCTLGFHTHAEELYYLNKSVSIMLGTTDLLRERFSLLSARLDLNVRNLSMIVEEMKAVDTQHGEILRNVTILRGAPGPPGPRGFKGDMGVKGPVGGRGPKGDPGSLGPLGPQGPQGQPGEAGPVGERGPVGPRGFPGLKGSKGSFGTGGPRGQPGPKGDIGPPGPEGPPGSPGPSGPQGKPGIAGKTGSPGQRGAMGPKGEPGIQGPPGLPGPPGPPGSQSFY

SEQ ID NO: 76552 - protein, 466 aa, Homo sapiens
  Payload ID: 15281
  Gene Symbol: SCARA3
  Gene Name: scavenger receptor class A, member 3
  Uniprot ID: Q6AZY7
  ENSP ID: ENSP00000337985
MKVRSAGGDGDALCVTEEDLAGDDEDMPTFPCTQKGRPGPRCSRCQKNLSLHTSVRILYLFLALLLVAVAVLASLVFRKVDSLSEDISLTQSIYDKKLVLMQKNLQGLDPKALNNCSFCHEAGQLGPEIRKLQEELEGIQKLLLAQEVQLDQTLQAQEVLSTTSRQISQEMGSCSFSIHQVNQSLGLFLAQVRGWQATTAGLDLSLKDLTQECYDVKAAVHQINFTVGQTSEWIHGIQRKTDEETLTLQKIVTDWQNYTRLFSGLRTTSTKTGEAVKNIQATLGASSQRISQNSESMHDLVLQVMGLQLQLDNISSFLDDHEENMHDLQYHTHYAQNRTVERFESLEGRMASHEIEIGTIFTNINATDNHVHSMLKYLDDVRLSCTLGFHTHAEELYYLNKSVSIMLGTTDLLRERFSLLSARLDLNVRNLSMIVEEMKAVDTQHGEILRNVTILRGHTLFSHNRI

SEQ ID NO: 76553 - protein, 495 aa, Homo sapiens
  Payload ID: 15282
  Gene Symbol: SCARA5
  Gene Name: scavenger receptor class A, member 5
  Uniprot ID: Q6ZMJ2
  ENSP ID: ENSP00000346990
MENKAMYLHTVSDCDTSSICEDSFDGRSLSKLNLCEDGPCHKRRASICCTQLGSLSALKHAVLGLYLLVFLILVGIFILAVSRPRSSPDDLKALTRNVNRLNESFRDLQLRLLQAPLQADLTEQVWKVQDALQNQSDSLLALAGAVQRLEGALWGLQAQAVQTEQAVALLRDRTGQQSDTAQLELYQLQVESNSSQLLLRRHAGLLDGLARRVGILGEELADVGGVLRGLNHSLSYDVALHRTRLQDLRVLVSNASEDTRRLRLAHVGMELQLKQELAMLNAVTEDLRLKDWEHSIALRNISLAKGPPGPKGDQGDEGKEGRPGIPGLPGLRGLPGERGTPGLPGPKGDDGKLGATGPMGMRGFKGDRGPKGEKGEKGDRAGDASGVEAPMMIRLVNGSGPHEGRVEVYHDRRWGTVCDDGWDKKDGDVVCRMLGFRGVEEVYRTARFGQGTGRIWMDDVACKGTEETIFRCSFSKWGVTNCGHAEDASVTCNRH

SEQ ID NO: 76554 - protein, 270 aa, Homo sapiens
  Payload ID: 15282
  Gene Symbol: SCARA5
  Gene Name: scavenger receptor class A, member 5
  Uniprot ID: Q6ZMJ2
  ENSP ID: ENSP00000369746
MENKAMYLHTVSDCDTSSICEDSFDGRSLSKLNLCEDGPCHKRRASICCTQLGSLSALKHAVLGLYLLVFLILVGIFILAGPPGPKGDQGDEGKEGRPGIPGLPGLRGLPGERGTPGLPGPKGDDGKLGATGPMGMRGFKGDRGPKGEKGEKGDRAGDASGVEAPMMIRLVNGSGPHEGRVEVYHDRRWGTVCDDGWDKKDGDVVCRMLGFRGVEEVYRTARFGQGTGRIWMDDVACKGTEETIFRCSFSKWGVTNCGHAEDASVTCNRH

SEQ ID NO: 76555 - protein, 400 aa, Homo sapiens
  Payload ID: 15282
  Gene Symbol: SCARA5
  Gene Name: scavenger receptor class A, member 5
  Uniprot ID: Q6ZMJ2
  ENSP ID: ENSP00000428663
MENKAMYLHTVSDCDTSSICEDSFDGRSLSKLNLCEDGPCHKRRASICCTQLGSLSALKHAVLGLYLLVFLILVGIFILAVSRPRSSPDDLKALTRNVNRLNESFRDLQLRLLQAPLQADLTEQVWKVQDALQNQSDSLLALAGAVQRLEGALWGLQAQAVQTEQAVALLRDRTGQQSDTAQLELYQLQVESNSSQLLLRRHAGLLDGLARRVGILGEELADVGGVLRGLNHSLSYDVALHRTRLQDLRVLVSNASEDTRRLRLAHVGMELQLKQELAMLNAVTEDLRLKDWEHSIALRNISLAKGPPGPKGDQGDEGKEGRPGIPGLPGLRGLPGERGTPGLPGPKGDDGKLGATGPMGMRGFKGDRGPKGEKGEKGDRAGDASKDILLGPWDMVLAQG

SEQ ID NO: 76556 - protein, 357 aa, Homo sapiens
  Payload ID: 15282
  Gene Symbol: SCARA5
  Gene Name: scavenger receptor class A, member 5
  Uniprot ID: Q6ZMJ2
  ENSP ID: ENSP00000430713
MENKAMYLHTVSDCDTSSICEDSFDGRSLSKLNLCEDVSRPRSSPDDLKALTRNVNRLNESFRDLQLRLLQAPLQADLTEQVWKVQDALQNQSDSLLALAGAVQRLEGALWGLQAQAVQTEQAVALLRDRTGQQSDTAQLELYQLQVESNSSQLLLRRHAGLLDGLARRVGILGEELADVGGVLRGLNHSLSYDVALHRTRLQDLRVLVSNASEDTRRLRLAHVGMELQLKQELAMLNAVTEDLRLKDWEHSIALRNISLAKGPPGPKGDQGDEGKEGRPGIPGLPGLRGLPGERGTPGLPGPKGDDGKLGATGPMGMRGFKGDRGPKGEKGEKGDRAGDASKDILLGPWDMVLAQG

SEQ ID NO: 76557 - protein, 509 aa, Homo sapiens
  Payload ID: 15283
  Gene Symbol: SCARB1
  Gene Name: scavenger receptor class B, member 1
  Uniprot ID: Q8WTV0
  ENSP ID: ENSP00000261693
MGCSAKARWAAGALGVAGLLCAVLGAVMIVMVPSLIKQQVLKNVRIDPSSLSFNMWKEIPIPFYLSVYFFDVMNPSEILKGEKPQVRERGPYVYREFRHKSNITFNNNDTVSFLEYRTFQFQPSKSHGSESDYIVMPNILVLGAAVMMENKPMTLKLIMTLAFTTLGERAFMNRTVGEIMWGYKDPLVNLINKYFPGMFPFKDKFGLFAELNNSDSGLFTVFTGVQNISRIHLVDKWNGLSKVDFWHSDQCNMINGTSGQMWPPFMTPESSLEFYSPEACRSMKLMYKESGVFEGIPTYRFVAPKTLFANGSIYPPNEGFCPCLESGIQNVSTCRFSAPLFLSHPHFLNADPVLAEAVTGLHPNQEAHSLFLDIHPVTGIPMNCSVKLQLSLYMKSVAGIGQTGKIEPVVLPLLWFAESGAMEGETLHTFYTQLVLMPKVMHYAQYVLLALGCVLLLVPVICQIRSQEKCYLFWSSSKKGSKDKEAIQAYSESLMTSAPKGSVLQEAKL

SEQ ID NO: 76558 - protein, 506 aa, Homo sapiens
  Payload ID: 15283
  Gene Symbol: SCARB1
  Gene Name: scavenger receptor class B, member 1
  Uniprot ID: Q8WTV0
  ENSP ID: ENSP00000343795
MGCSAKARWAAGALGVAGLLCAVLGAVMIVMVPSLIKQQVLKNVRIDPSSLSFNMWKEIPIPFYLSVYFFDVMNPSEILKGEKPQVRERGPYVYREFRHKSNITFNNNDTVSFLEYRTFQFQPSKSHGSESDYIVMPNILVLGAAVMMENKPMTLKLIMTLAFTTLGERAFMNRTVGEIMWGYKDPLVNLINKYFPGMFPFKDKFGLFAELNNSDSGLFTVFTGVQNISRIHLVDKWNGLSKVDFWHSDQCNMINGTSGQMWPPFMTPESSLEFYSPEACRSMKLMYKESGVFEGIPTYRFVAPKTLFANGSIYPPNEGFCPCLESGIQNVSTCRFSAPLFLSHPHFLNADPVLAEAVTGLHPNQEAHSLFLDIHPVTGIPMNCSVKLQLSLYMKSVAGIGQTGKIEPVVLPLLWFAESGAMEGETLHTFYTQLVLMPKVMHYAQYVLLALGCVLLLVPVICQIRSQGPEDTVSQPGLAAGPDRPPSPYTPLLPDSPSGQPPSPTA

SEQ ID NO: 76559 - protein, 552 aa, Homo sapiens
  Payload ID: 15283
  Gene Symbol: SCARB1
  Gene Name: scavenger receptor class B, member 1
  Uniprot ID: Q8WTV0
  ENSP ID: ENSP00000414979
MGCSAKARWAAGALGVAGLLCAVLGAVMIVMVPSLIKQQVLKNVRIDPSSLSFNMWKEIPIPFYLSVYFFDVMNPSEILKGEKPQVRERGPYVYREFRHKSNITFNNNDTVSFLEYRTFQFQPSKSHGSESDYIVMPNILVLGAAVMMENKPMTLKLIMTLAFTTLGERAFMNRTVGEIMWGYKDPLVNLINKYFPGMFPFKDKFGLFAELNNSDSGLFTVFTGVQNISRIHLVDKWNGLSKVDFWHSDQCNMINGTSGQMWPPFMTPESSLEFYSPEACRSMKLMYKESGVFEGIPTYRFVAPKTLFANGSIYPPNEGFCPCLESGIQNVSTCRFSAPLFLSHPHFLNADPVLAEAVTGLHPNQEAHSLFLDIHPVTGIPMNCSVKLQLSLYMKSVAGIGQTGKIEPVVLPLLWFAESGAMEGETLHTFYTQLVLMPKVMHYAQYVLLALGCVLLLVPVICQIRSQVGAGQRAARADSHSLACWGKGASDRTLWPTAAWSPPPAAVLRLCRSGSGHCWGLRSTLASFACRVATTLPVLEGLGPSLGGGTGS

SEQ ID NO: 76560 - protein, 481 aa, Homo sapiens
  Payload ID: 15283
  Gene Symbol: SCARB1
  Gene Name: scavenger receptor class B, member 1
  ENSP ID: ENSP00000442862
MGCSAKARWAAGALGVAGLLCAVLGAVMIVMVPSLIKQQVLKNVRIDPSSLSFNMWKEIPIPFYLSVYFFDVMNPSEILKGEKPQVRERGPYVYREFRHKSNITFNNNDTVSFLEYRTFQFQPSKSHGSESDYIVMPNILVLGAAVMMENKPMTLKLIMTLAFTTLGERAFMNRTVGEIMWGYKDPLVNLINKYFPGMFPFKDKFGLFAELNNSDSGLFTVFTGVQNISRIHLVDKWNGLSKVDFWHSDQCNMINGTSGQMWPPFMTPESSLEFYSPEACRSMKLMYKESGVFEGIPTYRFVAPKTLFANGSIYPPNEGFCPCLESGIQNVSTCRFSAPLFLSHPHFLNADPVLAEAVTGLHPNQEAHSLFLDIHPVTGIPMNCSVKLQLSLYMKSVAGIGQTGKIEPVVLPLLWFAESGAMEGETLHTFYTQLVLMPKEKCYLFWSSSKKGSKDKEAIQAYSESLMTSAPKGSVLQEAKL

SEQ ID NO: 76561 - protein, 146 aa, Homo sapiens
  Payload ID: 15283
  Gene Symbol: SCARB1
  Gene Name: scavenger receptor class B, member 1
  ENSP ID: ENSP00000443454
MGCSAKARWAAGALGVAGLLCAVLGAVMIVMVPSLIKQQVLKNVRIDPSSLSFNMWKEIPIPFYLSVYFFDVMNPSEILKGEKPQVRERGPYVYREFRHKSNITFNNNDTVSFLEYRTFQFQPSKSHGSESDYIVMPNILVLVRLP

SEQ ID NO: 76562 - protein, 499 aa, Homo sapiens
  Payload ID: 15283
  Gene Symbol: SCARB1
  Gene Name: scavenger receptor class B, member 1
  ENSP ID: ENSP00000444851
MWKEIPIPFYLSVYFFDVMNPSEILKGEKPQVRERGPYVYREFRHKSNITFNNNDTVSFLEYRTFQFQPSKSHGSESDYIVMPNILVLGAAVMMENKPMTLKLIMTLAFTTLGERAFMNRTVGEIMWGYKDPLVNLINKYFPGMFPFKDKFGLFAELNNSDSGLFTVFTGVQNISRIHLVDKWNGLSKVDFWHSDQCNMINGTSGQMWPPFMTPESSLEFYSPEACRSMKLMYKESGVFEGIPTYRFVAPKTLFANGSIYPPNEGFCPCLESGIQNVSTCRFSAPLFLSHPHFLNADPVLAEAVTGLHPNQEAHSLFLDIHPVTGIPMNCSVKLQLSLYMKSVAGIGQTGKIEPVVLPLLWFAESGAMEGETLHTFYTQLVLMPKVMHYAQYVLLALGCVLLLVPVICQIRSQVGAGQRAARADSHSLACWGKGASDRTLWPTAAWSPPPAAVLRLCRSGSGHCWGLRSTLASFACRVATTLPVLEGLGPSLGGGTGGL

SEQ ID NO: 76563 - protein, 478 aa, Homo sapiens
  Payload ID: 15284
  Gene Symbol: SCARB2
  Gene Name: scavenger receptor class B, member 2
  Uniprot ID: Q14108
  ENSP ID: ENSP00000264896
MGRCCFYTAGTLSLLLLVTSVTLLVARVFQKAVDQSIEKKIVLRNGTEAFDSWEKPPLPVYTQFYFFNVTNPEEILRGETPRVEEVGPYTYRELRNKANIQFGDNGTTISAVSNKAYVFERDQSVGDPKIDLIRTLNIPVLTVIEWSQVHFLREIIEAMLKAYQQKLFVTHTVDELLWGYKDEILSLIHVFRPDISPYFGLFYEKNGTNDGDYVFLTGEDSYLNFTKIVEWNGKTSLDWWITDKCNMINGTDGDSFHPLITKDEVLYVFPSDFCRSVYITFSDYESVQGLPAFRYKVPAEILANTSDNAGFCIPEGNCLGSGVLNVSICKNGAPIIMSFPHFYQADERFVSAIEGMHPNQEDHETFVDINPLTGIILKAAKRFQINIYVKKLDDFVETGDIRTMVFPVMYLNESVHIDKETASRLKSMINTTLIITNIPYIIMALGVFFGLVFTWLACKGQGSMDEGTADERAPLIRT

SEQ ID NO: 76564 - protein, 335 aa, Homo sapiens
  Payload ID: 15284
  Gene Symbol: SCARB2
  Gene Name: scavenger receptor class B, member 2
  Uniprot ID: Q14108
  ENSP ID: ENSP00000399154
MGRCCFYTAGTLSLLLLVTSVTLLVARVFQKAVDQSIEKKIVLRNGTEAFDSWEKPPLPVYTQFYFFNVTNPEEILRGETPRVEEVGPYTYRSLDWWITDKCNMINGTDGDSFHPLITKDEVLYVFPSDFCRSVYITFSDYESVQGLPAFRYKVPAEILANTSDNAGFCIPEGNCLGSGVLNVSICKNGAPIIMSFPHFYQADERFVSAIEGMHPNQEDHETFVDINPLTGIILKAAKRFQINIYVKKLDDFVETGDIRTMVFPVMYLNESVHIDKETASRLKSMINTTLIITNIPYIIMALGVFFGLVFTWLACKGQGSMDEGTADERAPLIRT

SEQ ID NO: 76565 - protein, 106 aa, Homo sapiens
  Payload ID: 15284
  Gene Symbol: SCARB2
  Gene Name: scavenger receptor class B, member 2
  ENSP ID: ENSP00000420988
MGRCCFYTAGTLSLLLLVTSVTLLVARVFQKAVDQSIEKKIVLRNGTEAFDSWEKPPLPVYTQFYFFNVTNPEEILRGETPRVEEVGPYTYRDKVLLCCSCWNAVA

SEQ ID NO: 76566 - protein, 830 aa, Homo sapiens
  Payload ID: 15285
  Gene Symbol: SCARF1
  Gene Name: scavenger receptor class F, member 1
  Uniprot ID: Q14162
  ENSP ID: ENSP00000263071
MGLGLLLPLLLLWTRGTQGSELDPKGQHVCVASSPSAELQCCAGWRQKDQECTIPICEGPDACQKDEVCVKPGLCRCKPGFFGAHCSSRCPGQYWGPDCRESCPCHPHGQCEPATGACQCQADRWGARCEFPCACGPHGRCDPATGVCHCEPGWWSSTCRRPCQCNTAAARCEQATGACVCKPGWWGRRCSFRCNCHGSPCEQDSGRCACRPGWWGPECQQQCECVRGRCSAASGECTCPPGFRGARCELPCPAGSHGVQCAHSCGRCKHNEPCSPDTGSCESCEPGWNGTQCQQPCLPGTFGESCEQQCPHCRHGEACEPDTGHCQRCDPGWLGPRCEDPCPTGTFGEDCGSTCPTCVQGSCDTVTGDCVCSAGYWGPSCNASCPAGFHGNNCSVPCECPEGLCHPVSGSCQPGSGSRDTALIAGSLVPLLLLFLGLACCACCCWAPRSDLKDRPARDGATVSRMKLQVWGTLTSLGSTLPCRSLSSHKLPWVTVSHHDPEVPFNHSFIEPPSAGWATDDSFSSDPESGEADEVPAYCVPPQEGMVPVAQAGSSEASLAAGAFPPPEDASTPFAIPRTSSLARAKRPSVSFAEGTKFAPQSRRSSGELSSPLRKPKRLSRGAQSGPEGREAEESTGPEEAEAPESFPAAASPGDSATGHRRPPLGGRTVAEHVEAIEGSVQESSGPVTTIYMLAGKPRGSEGPVRSVFRHFGSFQKGQAEAKVKRAIPKPPRQALNRKKGSPGLASGSVGQSPNSAPKAGLPGATGPMAVRPEEAVRGLGAGTESSRRAQEPVSGCGSPEQDPQKQAEEERQEEPEYENVVPISRPPEP

SEQ ID NO: 76567 - protein, 744 aa, Homo sapiens
  Payload ID: 15285
  Gene Symbol: SCARF1
  Gene Name: scavenger receptor class F, member 1
  ENSP ID: ENSP00000323964
MGLGLLLPLLLLWTRGTQGSELDPKGQHVCVASSPSAELQCCAGWRQKDQECTIPICEGPDACQKDEVCVKPGLCRCKPGFFGAHCSSRCPGQYWGPDCRESCPCHPHGQCEPATGACQCQADRWGARCEFPCACGPHGRCDPATGVCHCEPGWWSSTCRRPCQCNTAAARCEQATGACVCKPGWWGRRCSFRCNCHGSPCEQDSGRCACRPGWWGPECQQQCECVRGRCSAASGECTCPPGFRGARCELPCPAGSHGVQCAHSCGRCKHNEPCSPDTGSCESCEPGWNGTQCQQPCLPGTFGESCEQQCPHCRHGEACEPDTGHCQPGSGSRDTALIAGSLVPLLLLFLGLACCACCCWAPRSDLKDRPARDGATVSRMKLQVWGTLTSLGSTLPCRSLSSHKLPWVTVSHHDPEVPFNHSFIEPPSAGWATDDSFSSDPESGEADEVPAYCVPPQEGMVPVAQAGSSEASLAAGAFPPPEDASTPFAIPRTSSLARAKRPSVSFAEGTKFAPQSRRSSGELSSPLRKPKRLSRGAQSGPEGREAEESTGPEEAEAPESFPAAASPGDSATGHRRPPLGGRTVAEHVEAIEGSVQESSGPVTTIYMLAGKPRGSEGPVRSVFRHFGSFQKGQAEAKVKRAIPKPPRQALNRKKGSPGLASGSVGQSPNSAPKAGLPGATGPMAVRPEEAVRGLGAGTESSRRAQEPVSGCGSPEQDPQKQAEEERQEEPEYENVVPISRPPEP

SEQ ID NO: 76568 - protein, 342 aa, Homo sapiens
  Payload ID: 15285
  Gene Symbol: SCARF1
  Gene Name: scavenger receptor class F, member 1
  Uniprot ID: Q14162
  ENSP ID: ENSP00000411167
MGLGLLLPLLLLWTRGTQGSELDPKGQHVCVASSPSAELQCCAGWRQKDQECTIPICEGPDACQKDEVCVKPGLCRCKPGFFGAHCSSRCPGQYWGPDCRESCPCHPHGQCEPATGACQCQADRWGARCEFPCACGPHGRCDPATGVCHCEPGWWSSTCRRPCQCNTAAARCEQATGACVCKPGWWGRRCSFRCNCHGSPCEQDSGRCACRPGWWGPECQQQCECVRGRCSAASGECTCPPGFRGARCELPCPAGSHGVQCAHSCGRCKHNEPCSPDTGSCESCEPGWNGTQCQQPCLPGTFGESCEQQCPHCRHGEACEPDTGHCQRCDPGWLGPRGPVIL

SEQ ID NO: 76569 - protein, 569 aa, Homo sapiens
  Payload ID: 15285
  Gene Symbol: SCARF1
  Gene Name: scavenger receptor class F, member 1
  Uniprot ID: Q14162
  ENSP ID: ENSP00000458174
MGLGLLLPLLLLWTRGTQGSELDPKGQHVCVASSPSAELQCCAGWRQKDQECTIPICEGPDACQKDEVCVKPGLCRCKPGFFGAHCSSRCPGQYWGPDCRESCPCHPHGQCEPATGACQCQADRWGARCEFPCACGPHGRCDPATGVCHCEPGWWSSTCRRPCQCNTAAARCEQATGACVCKPGWWGRRCSFRCNCHGSPCEQDSGRCACRPGWWGPECQQQCECVRGRCSAASGECTCPPGFRGARCELPCPAGSHGVQCAHSCGRCKHNEPCSPDTGSCESCEPGWNGTQCQQPCLPGTFGESCEQQCPHCRHGEACEPDTGHCQRCDPGWLGPRCEDPCPTGTFGEDCGSTCPTCVQGSCDTVTGDCVCSAGYWGPSCNASCPAGFHGNNCSVPCECPEGLCHPVSGSCQPGSGSRDTALIAGSLVPLLLLFLGLACCACCCWAPRSDLKDRPARDGATVSRMKLQVWGTLTSLGSTLPCRSLSSHKLPWVTASSSRPLPAGPLMTPSHPILSLERQMRFLPTVCHPKKGWSLWPRQGRQRPAWLQVLSRPLRTPPRHSPSRAPPA

SEQ ID NO: 76570 - protein, 49 aa, Homo sapiens
  Payload ID: 15285
  Gene Symbol: SCARF1
  Gene Name: scavenger receptor class F, member 1
  ENSP ID: ENSP00000461468
MGLGLLLPLLLLWTRGTQGSELDPKGQHVCVASRWVSWESDACGQQPLC

SEQ ID NO: 76571 - protein, 744 aa, Homo sapiens; identical to SEQ ID NO: 76567
  Payload ID: 15285
  Gene Symbol: SCARF1
  Gene Name: scavenger receptor class F, member 1
  ENSP ID: ENSP00000478675

SEQ ID NO: 76572 - protein, 830 aa, Homo sapiens; identical to SEQ ID NO: 76566
  Payload ID: 15285
  Gene Symbol: SCARF1
  Gene Name: scavenger receptor class F, member 1
  Uniprot ID: Q14162
  ENSP ID: ENSP00000481595

SEQ ID NO: 76573 - protein, 342 aa, Homo sapiens; identical to SEQ ID NO: 76568
  Payload ID: 15285
  Gene Symbol: SCARF1
  Gene Name: scavenger receptor class F, member 1
  Uniprot ID: Q14162
  ENSP ID: ENSP00000487665

SEQ ID NO: 76574 - protein, 49 aa, Homo sapiens; identical to SEQ ID NO: 76570
  Payload ID: 15285
  Gene Symbol: SCARF1
  Gene Name: scavenger receptor class F, member 1
  ENSP ID: ENSP00000488319

SEQ ID NO: 76575 - protein, 569 aa, Homo sapiens; identical to SEQ ID NO: 76569
  Payload ID: 15285
  Gene Symbol: SCARF1
  Gene Name: scavenger receptor class F, member 1
  Uniprot ID: Q14162
  ENSP ID: ENSP00000488776

SEQ ID NO: 76576 - protein, 866 aa, Homo sapiens
  Payload ID: 15286
  Gene Symbol: SCARF2
  Gene Name: scavenger receptor class F, member 2
  Uniprot ID: Q96GP6
  ENSP ID: ENSP00000477564
MEGAGPRGAGPARRRGAGGPPSPLLPSLLLLLLLWMLPDTVAPQELNPRGRNVCRAPGSQVPTCCAGWRQQGDECGIAVCEGNSTCSENEVCVRPGECRCRHGYFGANCDTKCPRQFWGPDCKELCSCHPHGQCEDVTGQCTCHARRWGARCEHACQCQHGTCHPRSGACRCEPGWWGAQCASACYCSATSRCDPQTGACLCHAGWWGRSCNNQCACNSSPCEQQSGRCQCRERTFGARCDRYCQCFRGRCHPVDGTCACEPGYRGKYCREPCPAGFYGLGCRRRCGQCKGQQPCTVAEGRCLTCEPGWNGTKCDQPCATGFYGEGCSHRCPPCRDGHACNHVTGKCTRCNAGWIGDRCETKCSNGTYGEDCAFVCADCGSGHCDFQSGRCLCSPGVHGPHCNVTCPPGLHGADCAQACSCHEDTCDPVTGACHLETNQRKGVMGAGALLVLLVCLLLSLLGCCCACRGKDPTRRELSLGRKKAPHRLCGRFSRISMKLPRIPLRRQKLPKVVVAHHDLDNTLNCSFLEPPSGLEQPSPSWSSRASFSSFDTTDEGPVYCVPHEEAPAESRDPEVPTVPAEAPAPSPVPLTTPASAEEAIPLPASSDSERSASSVEGPGGALYARVARREARPARARGEIGGLSLSPSPERRKPPPPDPATKPKVSWIHGKHSAAAAGRAPSPPPPGSEAAPSPSKRKRTPSDKSAHTVEHGSPRTRDPTPRPPGLPEEATALAAPSPPRARARGRGPGLLEPTDAGGPPRSAPEAASMLAAELRGKTRSLGRAEVALGAQGPREKPAPPQKAKRSVPPASPARAPPATETPGPEKAATDLPAPETPRKKTPIQKPPRKKSREAAGELGRAGAPTL

SEQ ID NO: 76577 - protein, 870 aa, Homo sapiens
  Payload ID: 15286
  Gene Symbol: SCARF2
  Gene Name: scavenger receptor class F, member 2
  ENSP ID: ENSP00000479389
MEGAGPRGAGPARRRGAGGPPSPLLPSLLLLLLLWMLPDTVAPQELNPRGRNVCRAPGSQVPTCCAGWRQQGDECGIAVCEGNSTCSENEVCVRPGECRCRHGYFGANCDTKCPRQFWGPDCKELCSCHPHGQCEDVTGQCTCHARRWGARCEHACQCQHGTCHPRSGACRCEPGWWGAQCASACYCSATSRCDPQTGACLCHAGWWGRSCNNQCACNSSPCEQQSGRCQCRERTFGARCDRYCQCFRGRCHPVDGTCACEPGYRGKYCREPCPAGFYGLGCRRRCGQCKGQQPCTVAEGRCLTCEPGWNGTKCDQPCATGFYGEGCSHRCPPCRDGHACNHVTGKCTRCNAGWIGDRCETKCSNGTYGEDCAFVCADCGSGHCDFQSGRCLCSPGVHGPHCNVTCPPGLHGADCAQACSCHEDTCDPVTGACHLETNQRKGVMGAGALLVLLVCLLLSLLGCCCACRGKDPTRRPRPRRELSLGRKKAPHRLCGRFSRISMKLPRIPLRRQKLPKVVVAHHDLDNTLNCSFLEPPSGLEQPSPSWSSRASFSSFDTTDEGPVYCVPHEEAPAESRDPEVPTVPAEAPAPSPVPLTTPASAEEAIPLPASSDSERSASSVEGPGGALYARVARREARPARARGEIGGLSLSPSPERRKPPPPDPATKPKVSWIHGKHSAAAAGRAPSPPPPGSEAAPSPSKRKRTPSDKSAHTVEHGSPRTRDPTPRPPGLPEEATALAAPSPPRARARAAPRPLGAHGRRRSPAKRAEAASMLAAELRGKTRSLGRAEVALGAQGPREKPAPPQKAKRSVPPASPARAPPATETPGPEKAATDLPAPETPRKKTPIQKPPRKKSREAAGELGRAGAPTL

SEQ ID NO: 76578 - protein, 871 aa, Homo sapiens
  Payload ID: 15286
  Gene Symbol: SCARF2
  Gene Name: scavenger receptor class F, member 2
  ENSP ID: ENSP00000485276
MEGAGPRGAGPARRRGAGGPPSPLLPSLLLLLLLWMLPDTVAPQELNPRGRNVCRAPGSQVPTCCAGWRQQGDECGIAVCEGNSTCSENEVCVRPGECRCRHGYFGANCDTKCPRQFWGPDCKELCSCHPHGQCEDVTGQCTCHARRWGARCEHACQCQHGTCHPRSGACRCEPGWWGAQCASACYCSATSRCDPQTGACLCHAGWWGRSCNNQCACNSSPCEQQSGRCQCRERTFGARCDRYCQCFRGRCHPVDGTCACEPGYRGKYCREPCPAGFYGLGCRRRCGQCKGQQPCTVAEGRCLTCEPGWNGTKCDQPCATGFYGEGCSHRCPPCRDGHACNHVTGKCTRCNAGWIGDRCETKCSNGTYGEDCAFVCADCGSGHCDFQSGRCLCSPGVHGPHCNVTCPPGLHGADCAQACSCHEDTCDPVTGACHLETNQRKGVMGAGALLVLLVCLLLSLLGCCCACRGKDPTRRPRPRRELSLGRKKAPHRLCGRFSRISMKLPRIPLRRQKLPKVVVAHHDLDNTLNCSFLEPPSGLEQPSPSWSSRASFSSFDTTDEGPVYCVPHEEAPAESRDPEVPTVPAEAPAPSPVPLTTPASAEEAIPLPASSDSERSASSVEGPGGALYARVARREARPARARGEIGGLSLSPSPERRKPPPPDPATKPKVSWIHGKHSAAAAGRAPSPPPPGSEAAPSPSKRKRTPSDKSAHTVEHGSPRTRDPTPRPPGLPEEATALAAPSPPRARARGRGPGLLEPTDAGGPPRSAPEAASMLAAELRGKTRSLGRAEVALGAQGPREKPAPPQKAKRSVPPASPARAPPATETPGPEKAATDLPAPETPRKKTPIQKPPRKKSREAAGELGRAGAPTL

SEQ ID NO: 76579 - protein, 575 aa, Homo sapiens
  Payload ID: 15287
  Gene Symbol: SSC4D
  Gene Name: scavenger receptor cysteine rich family, 4 domains
  Uniprot ID: Q8WTU2
  ENSP ID: ENSP00000275560
MHKEAEMLIGPQLDEKRWGWRLGDGSAAPPFLPQALSFLLLLPLASALQPTPLPFQELRLVGGPSRCRGRLEVMHGGSWGSVCDDDWDVVDANVVCRQLGCGLALPVPRPLAFGQGRGPILLDNVECRGQEAALSECGSRGWGVHNCFHYEDVAVLCDEFLPTQPPTRKMLTSRAPPTTLPNGKSEGSVRLVGGANLCQGRVEILHSGLWGTVCDDDWGLPDAAVVCRQLGCGAAMAATTNAFFGYGTGHILLDNVHCEGGEPRLAACQSLGWGVHNCGHHEDAGALCAGLGPPTLTALPSSATREDWAWQTDPSATGVGPQPSRETALLTTAAWAAGKKSGRLRLVGGPGPCRGRVEVLHAGGWGTVCDDDWDFADARVACREAGCGPALGATGLGHFGYGRGPVLLDNVGCAGTEARLSDCFHLGWGQHNCGHHEDAGALCAGPEELGLQVQQDGSETTRVPTPRPRDGHLRLVNGAHRCEGRVELYLGQRWGTVCDDAWDLRAAGVLCRQLGCGQALAAPGEAHFGPGRGPILLDNVKCRGEESALLLCSHIRWDAHNCDHSEDASVLCQPS

SEQ ID NO: 76580 - protein, 1573 aa, Homo sapiens
  Payload ID: 15288
  Gene Symbol: SSC5D
  Gene Name: scavenger receptor cysteine rich family, 5 domains
  Uniprot ID: A1L4H1
  ENSP ID: ENSP00000374274
MRVLACLLAALVGIQAVERLRLADGPHGCAGRLEVWHGGRWGTVCDDGWDLRDAAVACRQLGCGGALAAPGGAFFGEGAGPVWLSELACRGNEGQLGLCHHRGWKAHICSHEEDAGVVCAGQRVANSRDDSTSPLDGAPWPGLLLELSPSTEEPLVTHAPRPAGNPQNASRKKSPRPKQAKSTRAPLLTTGAPRQERLRLVSGPHRCAGRLEVWHGGRWGTVCDDGWDLRDAAVACRELGCGGALAAPGGARFGPGAGPVWMDDVGCGGGEQALRDCPRSPWGRSNCDHSEDAGLVCTGPAPRLRLADGPHGCAGRLEVWHGGRWGSVCDDAWDLRDAAVACRELGCGGALAAPGGAFFGEGSGPIILDDLRCRGNETALRFCPARPWGQHDCHHREDAGAVCDGMPLGYVPPTAPTDSNNSTPREAASRPPSTMTSQAPGTAGVSPPPASPTVLWEPGPEAGSPQLRLVAGPSKCSGRLEVWHDQRWGTVCDDSWDMRDSAVVCRELGCGGPQQPDPAAGRFGWGAGPIWLDDVGCVGTEASLSDCPAAPWGKHNCAHNEDVGVTCTGPPGLDSISDPFSWSWIPGLGRDRDAWLPGELATKPSASVTASVLEKTTTKAPGKMPKSTKKWVTKNAKRPTTQPPVMPTTKHSRAQSPPDLTSQTTAALTTEASRRPTSEFTRRPTTEAPQRWTSHTTATLTPQAPRERTTKTMAMLTTQGPQEMTSESTIKSIPQASLEPSAEIPEGSPESPKDPAPSPSVSTTGESGLFRVRLADGPNRCAGRLEVWHAGRWGTVCDDNWDLRDATVACWELGCGKVRPRVGKTHYGPGTGPIWLDDMGCKGSEASLSDCPSGAWGKHNCDHEEDVGLTCTGYTDYDDYPPWTWDPTSREDLAKGTTTAGVPGHTLPWRTTRRPGSSSPAIRRLPDTGSKDGYKLPWTWDTPSGRGLAEGTPTAGKLGPTLGAGTTRSPGSPPTLRVHGDTGSPRKPWPERRPPRPAATRTAPPTPSPGPSASPGPPGPALTSDSSRELTPHSALTSEATSDAPDTSPPTPDPASRTNPDLILTSPDFALSTPDSSVVPALTPEPSPTPLPTLPKELTSDPSTPSEVTSLSPTSEQVPESDTTPDLDTTPYSSTVSEYSRSPDPSPSPHPTTTPDPTMAPDPITTLNPTVTPHFPTTPHPTTTPHPTTITHSTMIPDPTTTPQPFTTITHSTMIPDPTTTPQPFTTMQPTTTPHSTTPHPTTTPHPTTITHSTMIPDPTTTPQPFTTMQPTTMPHPTTTPHPTTTPHPTTTPHPTTTPHPTMTPDPTTTPYPTTTPDPTTTPHPTTPDPSSTPVITTVSLPTSLGTELSSPTLAPTVKPSLHPQLTFTAPAPHTSTSQIPTLEPSPALESSPSRSSTATSMDPLSTEDFKPPRSQSPNLTPPPTHTPHSASDLTVSPDPLLSPTAHPLDHPPLDPLTLGPTPGQSPGPHGPCVAPTPPVRVMACEPPALVELVAAVRDVGGQLQRLTQVVEQERQERQALLLGLTQLVEAARGLGQLGEAVKRLAEMAWTTSMPAPTTTTPEEEERPLRGDV

SEQ ID NO: 76581 - protein, 951 aa, Homo sapiens
  Payload ID: 15288
  Gene Symbol: SSC5D
  Gene Name: scavenger receptor cysteine rich family, 5 domains
  Uniprot ID: A1L4H1
  ENSP ID: ENSP00000467252
MRVLACLLAALVGIQAVERLRLADGPHGCAGRLEVWHGGRWGTVCDDGWDLRDAAVACRQLGCGGALAAPGGAFFGEGAGPVWLSELACRGNEGQLGLCHHRGWKAHICSHEEDAGVVCAGQRVANSRDDSTSPLDGAPWPGLLLELSPSTEEPLVTHAPRPAGNPQNASRKKSPRPKQAKSTRAPLLTTGAPRQERLRLVSGPHRCAGRLEVWHGGRWGTVCDDGWDLRDAAVACRELGCGGALAAPGGARFGPGAGPVWMDDVGCGGGEQALRDCPRSPWGRSNCDHSEDAGLVCTGPAPRLRLADGPHGCAGRLEVWHGGRWGSVCDDAWDLRDAAVACRELGCGGALAAPGGAFFGEGSGPIILDDLRCRGNETALRFCPARPWGQHDCHHREDAGAVCDGMPLGYVPPTAPTDSNNSTPREAASRPPSTMTSQAPGTAGVSPPPASPTVLWEPGPEAGSPQLRLVAGPSKCSGRLEVWHDQRWGTVCDDSWDMRDSAVVCRELGCGGPQQPDPAAGRFGWGAGPIWLDDVGCVGTEASLSDCPAAPWGKHNCAHNEDVGVTCTGPPGLDSISDPFSWSWIPGLGRDRDAWLPGELATKPSASVTASVLEKTTTKAPGKMPKSTKKWVTKNAKRPTTQPPVMPTTKHSRAQSPPDLTSQTTAALTTEASRRPTSEFTRRPTTEAPQRWTSHTTATLTPQAPRERTTKTMAMLTTQGPQEMTSESTIKSIPQASLEPSAEIPEGSPESPKDPAPSPSVSTTGESGLFRVRLADGPNRCAGRLEVWHAGRWGTVCDDNWDLRDATVACWELGCGKVRPRVGKTHYGPGTGPIWLDDMGCKGSEASLSDCPSGAWGKHNCDHEEDVGLTCTGYTDYDDYPPWTWDPTSREDLAKGTTTAGVPGHTLPWRTTRRPGSSSPAIRRLPDTEPEAGAPRGDAPRSRTARVAAPP

SEQ ID NO: 76582 - protein, 118 aa, Homo sapiens
  Payload ID: 15288
  Gene Symbol: SSC5D
  Gene Name: scavenger receptor cysteine rich family, 5 domains
  ENSP ID: ENSP00000467434
DAGAVCDGMPLGYVPPTAPTDSNNSTPREAASRPPSTMTSQAPGTAGVSPPPASPTVLWEPGPEAGPPGLDSISDPFSWSWIPGLGRDRDAWLPGELATKPSASVTASVLEKTTTKAP

SEQ ID NO: 76583 - protein, 90 aa, Homo sapiens
  Payload ID: 15288
  Gene Symbol: SSC5D
  Gene Name: scavenger receptor cysteine rich family, 5 domains
  ENSP ID: ENSP00000470226
MRVLACLLAALVGIQAVERLRLADGPHGCAGRLEVWHGGRWGTVCDDGWDLRDAAVACRQLGCGGALAAPGGAFFGEGAGPVWLSELACR

SEQ ID NO: 76584 - protein, 953 aa, Homo sapiens
  Payload ID: 15288
  Gene Symbol: SSC5D
  Gene Name: scavenger receptor cysteine rich family, 5 domains
  ENSP ID: ENSP00000478419
MRVLACLLAALVGIQAVERLRLADGPHGCAGRLEVWHGGRWGTVCDDGWDLRDAAVACRQLGCGGALAAPGGAFFGEGAGPVWLSELACRGNEGQLGLCHHRGWKAHICSHEEDAGVVCAGQRVANSRDDSTSPLDGAPWPGLLLELSPSTEEPLVTHAPRPAGNPQNASRKKSPRPKQAKSTRAPLLTTGAPRQERLRLVSGPHRCAGRLEVWHGGRWGTVCDDGWDLRDAAVACRELGCGGALAAPGGARFGPGAGPVWMDDVGCGGGEQALRDCPRSPWGRSNCDHSEDAGLVCTGPAPRLRLADGPHGCAGRLEVWHGGRWGSVCDDAWDLRDAAVACRELGCGGALAAPGGAFFGEGSGPIILDDLRCRGNETALRFCPARPWGQHDCHHREDAGAVCDGMPLGYVPPTAPTDSNNSTPREAASRPPSTMTSQAPGTAGVSPPPASPTVLWEPGPEAGSPQLRLVAGPSKCSGRLEVWHDQRWGTVCDDSWDMRDSAVVCRELGCGGPQQPDPAAGRFGWGAGPIWLDDVGCVGTEASLSDCPAAPWGKHNCAHNEDVGVTCTGPPGLDSISDPFSWSWIPGLGRDRDAWLPGELATKPSASVTASVLEKTTTKAPGKMPKSTKKWVTKNAKRPTTQPPVMPTTKHSRAQSPPDLTSQTTAALTTEASRRPTSEFTRRPTTEAPQRWTSHTTATLTPQAPRERTTKTMAMLTTQGPQEMTSESTIKSIPQASLEPSAEIPEGSPESPKDPAPSPSVSTTGESGLFRVRLADGPNRCAGRLEVWHAGRWGTVCDDNWDLRDATVACWELGCGKVRPRVGKTHYGPGTGPIWLDDMGCKGSEASLSDCPSGAWGKHNCDHEEDVGLTCTGYTDYDDYPPWTWDPTSREDLAKGTTTAGVPGHTLPWRTTRRPGSSSPAIRRLPDTEPEAGLREVMLLVQGLPGLQRLPSP

SEQ ID NO: 76585 - protein, 901 aa, Homo sapiens
  Payload ID: 15289
  Gene Symbol: SLFN11
  Gene Name: schlafen family member 11
  Uniprot ID: Q7Z7L1
  ENSP ID: ENSP00000312402
MEANQCPLVVEPSYPDLVINVGEVTLGEENRKKLQKIQRDQEKERVMRAACALLNSGGGVIRMAKKVEHPVEMGLDLEQSLRELIQSSDLQAFFETKQQGRCFYIFVKSWSSGPFPEDRSVKPRLCSLSSSLYRRSETSVRSMDSREAFCFLKTKRKPKILEEGPFHKIHKGVYQELPNSDPADPNSDPADLIFQKDYLEYGEILPFPESQLVEFKQFSTKHFQEYVKRTIPEYVPAFANTGGGYLFIGVDDKSREVLGCAKENVDPDSLRRKIEQAIYKLPCVHFCQPQRPITFTLKIVNVLKRGELYGYACMIRVNPFCCAVFSEAPNSWIVEDKYVCSLTTEKWVGMMTDTDPDLLQLSEDFECQLSLSSGPPLSRPVYSKKGLEHKKELQQLLFSVPPGYLRYTPESLWRDLISEHRGLEELINKQMQPFFRGILIFSRSWAVDLNLQEKPGVICDALLIAQNSTPILYTILREQDAEGQDYCTRTAFTLKQKLVNMGGYTGKVCVRAKVLCLSPESSAEALEAAVSPMDYPASYSLAGTQHMEALLQSLVIVLLGFRSLLSDQLGCEVLNLLTAQQYEIFSRSLRKNRELFVHGLPGSGKTIMAMKIMEKIRNVFHCEAHRILYVCENQPLRNFISDRNICRAETRKTFLRENFEHIQHIVIDEAQNFRTEDGDWYGKAKSITRRAKGGPGILWIFLDYFQTSHLDCSGLPPLSDQYPREELTRIVRNADPIAKYLQKEMQVIRSNPSFNIPTGCLEVFPEAEWSQGVQGTLRIKKYLTVEQIMTCVADTCRRFFDRGYSPKDVAVLVSTAKEVEHYKYELLKAMRKKRVVQLSDACDMLGDHIVLDSVRRFSGLERSIVFGIHPRTADPAILPNVLICLASRAKQHLYIFPWGGH

SEQ ID NO: 76586 - protein, 901 aa, Homo sapiens; identical to SEQ ID NO: 76585
  Payload ID: 15289
  Gene Symbol: SLFN11
  Gene Name: schlafen family member 11
  Uniprot ID: Q7Z7L1
  ENSP ID: ENSP00000378067

SEQ ID NO: 76587 - protein, 111 aa, Homo sapiens
  Payload ID: 15289
  Gene Symbol: SLFN11
  Gene Name: schlafen family member 11
  ENSP ID: ENSP00000393615
MEANQCPLVVEPSYPDLVINVGEVTLGEENRKKLQKIQRDQEKERVMRAACALLNSGGGVIRMAKKVEHPVEMGLDLEQSLRELIQSSDLQAFFETKQQGRCFYIFVKSWS

SEQ ID NO: 76588 - protein, 90 aa, Homo sapiens
  Payload ID: 15289
  Gene Symbol: SLFN11
  Gene Name: schlafen family member 11
  ENSP ID: ENSP00000395140
MEANQCPLVVEPSYPDLVINVGEVTLGEENRKKLQKIQRDQEKERVMRAACALLNSGGGVIRMAKKVEHPVEMGLDLEQSLRELIQSSDL

SEQ ID NO: 76589 - protein, 90 aa, Homo sapiens; identical to SEQ ID NO: 76588
  Payload ID: 15289
  Gene Symbol: SLFN11
  Gene Name: schlafen family member 11
  ENSP ID: ENSP00000397454

SEQ ID NO: 76590 - protein, 123 aa, Homo sapiens
  Payload ID: 15289
  Gene Symbol: SLFN11
  Gene Name: schlafen family member 11
  ENSP ID: ENSP00000464806
MEANQCPLVVEPSYPDLVINVGEVTLGEENRKKLQKIQRDQEKERVMRAACALLNSGGGVIRMAKKVEHPVEMGLDLEQSLRELIQSSDLQAFFETKQQGRCFYIFVKSWSSGPFPEDRSVKP

SEQ ID NO: 76591 - protein, 50 aa, Homo sapiens
  Payload ID: 15289
  Gene Symbol: SLFN11
  Gene Name: schlafen family member 11
  ENSP ID: ENSP00000465198
  MOD_RES (1)..(1): Any amino acid
XICRAETRKTFLRENFEHIQHIVIDEAQNFRTEDGDWYGKAKSITRRAKE

SEQ ID NO: 76592 - protein, 48 aa, Homo sapiens
  Payload ID: 15289
  Gene Symbol: SLFN11
  Gene Name: schlafen family member 11
  ENSP ID: ENSP00000465777
MEANQCPLVVEPSYPDLVINVGEVTLGEENRKKLQKIQRDQEKERVMR

SEQ ID NO: 76593 - protein, 100 aa, Homo sapiens
  Payload ID: 15289
  Gene Symbol: SLFN11
  Gene Name: schlafen family member 11
  ENSP ID: ENSP00000468095
MEANQCPLVVEPSYPDLVINVGEVTLGEENRKKLQKIQRDQEKERVMRAACALLNSGGGVIRMAKKVEHPVEMGLDLEQSLRELIQSSDLQAFFETKQQG

SEQ ID NO: 76594 - protein, 80 aa, Homo sapiens
  Payload ID: 15289
  Gene Symbol: SLFN11
  Gene Name: schlafen family member 11
  ENSP ID: ENSP00000468602
MEANQCPLVVEPSYPDLVINVGEVTLGEENRKKLQKIQRDQEKERVMRAACALLNSGGGVIRMAKKVEHPVEMGLDLEQS

SEQ ID NO: 76595 - protein, 578 aa, Homo sapiens
  Payload ID: 15290
  Gene Symbol: SLFN12
  Gene Name: schlafen family member 12
  Uniprot ID: Q8IYM2
  ENSP ID: ENSP00000302077
MNISVDLETNYAELVLDVGRVTLGENSRKKMKDCKLRKKQNESVSRAMCALLNSGGGVIKAEIENEDYSYTKDGIGLDLENSFSNILLFVPEYLDFMQNGNYFLIFVKSWSLNTSGLRITTLSSNLYKRDITSAKVMNATAALEFLKDMKKTRGRLYLRPELLAKRPCVDIQEENNMKALAGVFFDRTELDRKEKLTFTESTHVEIKNFSTEKLLQRIKEILPQYVSAFANTDGGYLFIGLNEDKEIIGFKAEMSDLDDLEREIEKSIRKMPVHHFCMEKKKINYSCKFLGVYDKGSLCGYVCALRVERFCCAVFAKEPDSWHVKDNRVMQLTRKEWIQFMVEAEPKFSSSYEEVISQINTSLPAPHSWPLLEWQRQRHHCPGLSGRITYTPENLCRKLFLQHEGLKQLICEEMDSVRKGSLIFSRSWSVDLGLQENHKVLCDALLISQDSPPVLYTFHMVQDEEFKGYSTQTALTLKQKLAKIGGYTKKVCVMTKIFYLSPEGMTSCQYDLRSQVIYPESYYFTRRKYLLKALFKALKRLKSLRDQFSFAENLYQIIGIDCFQKNDKKMFKSCRRLT

SEQ ID NO: 76596 - protein, 578 aa, Homo sapiens; identical to SEQ ID NO: 76595
  Payload ID: 15290
  Gene Symbol: SLFN12
  Gene Name: schlafen family member 12
  Uniprot ID: Q8IYM2
  ENSP ID: ENSP00000378063

SEQ ID NO: 76597 - protein, 578 aa, Homo sapiens; identical to SEQ ID NO: 76595
  Payload ID: 15290
  Gene Symbol: SLFN12
  Gene Name: schlafen family member 12
  Uniprot ID: Q8IYM2
  ENSP ID: ENSP00000394903

SEQ ID NO: 76598 - protein, 115 aa, Homo sapiens
  Payload ID: 15290
  Gene Symbol: SLFN12
  Gene Name: schlafen family member 12
  ENSP ID: ENSP00000398315
MNISVDLETNYAELVLDVGRVTLGENSRKKMKDCKLRKKQNESVSRAMCALLNSGGGVIKAEIENEDYSYTKDGIGLDLENSFSNILLFVPEYLDFMQNGNYFLIFVKSWSLNTS

SEQ ID NO: 76599 - protein, 69 aa, Homo sapiens
  Payload ID: 15290
  Gene Symbol: SLFN12
  Gene Name: schlafen family member 12
  ENSP ID: ENSP00000404175
MNISVDLETNYAELVLDVGRVTLGENSRKKMKDCKLRKKQNESVSRAMCALLNSGGGVIKAEIENEDYS

SEQ ID NO: 76600 - protein, 617 aa, Homo sapiens
  Payload ID: 15291
  Gene Symbol: SLFN12L
  Gene Name: schlafen family member 12-like
  Uniprot ID: Q6IEE8
  ENSP ID: ENSP00000354412
MAMKIMEKIRNVFHCEAHRILYICESQFLRNFIRKEFLRGNGLAAGKMNISIDLDTNYAELVLNVGRVTLGENNRKKMKDCQLRKQQNENVSRAVCALLNSGGGVIKAEVENKGYSYKKDGIGLDLENSFSNMLPFVPNFLDFMQNGNYFHIFVKSWSLETSGPQIATLSSSLYKRDVTSAKVMNASAALEFLKDMEKTGGRAYLRPEFPAKRACVDVQEESNMEALAADFFNRTELGYKEKLTFTESTHVEIKNFSTEKLLQRITEILPQYVSAFANTDGGYLFVGLNEDKEVIGFKAEKSYLTKLEEVTKNSIGKLPVHHFCVEKGTINYLCKFLGVYDKGRLCGYVYALRVERFCCAVFAKKPDSWHVKDNRVKQLTEKEWIQFMVDSEPVCEELPSPASTSSPVSQSYPLREYINFKIQPLRYHLPGLSEKITCAPKTFCRNLFSQHEGLKQLICEEMGSVNKGSLIFSRSWSLDLGLQENHKVLCDALLISQDKPPVLYTFHMVQDEEFKDYSTQTAQTLKQKLAKIGGYTKKVCVMTKIFYLSPEGKTSCQYDLNSQVIYPESYYWTTAQTMKDLEKALSNILPKENQIFLFVCLFRFCLFVCWFVCFFLR

SEQ ID NO: 76601 - protein, 588 aa, Homo sapiens
  Payload ID: 15291
  Gene Symbol: SLFN12L
  Gene Name: schlafen family member 12-like
  Uniprot ID: Q6IEE8
  ENSP ID: ENSP00000437635
MDLARKEFLRGNGLAAGKMNISIDLDTNYAELVLNVGRVTLGENNRKKMKDCQLRKQQNENVSRAVCALLNSGGGVIKAEVENKGYSYKKDGIGLDLENSFSNMLPFVPNFLDFMQNGNYFHIFVKSWSLETSGPQIATLSSSLYKRDVTSAKVMNASAALEFLKDMEKTGGRAYLRPEFPAKRACVDVQEESNMEALAADFFNRTELGYKEKLTFTESTHVEIKNFSTEKLLQRITEILPQYVSAFANTDGGYLFVGLNEDKEVIGFKAEKSYLTKLEEVTKNSIGKLPVHHFCVEKGTINYLCKFLGVYDKGRLCGYVYALRVERFCCAVFAKKPDSWHVKDNRVKQLTEKEWIQFMVDSEPVCEELPSPASTSSPVSQSYPLREYINFKIQPLRYHLPGLSEKITCAPKTFCRNLFSQHEGLKQLICEEMGSVNKGSLIFSRSWSLDLGLQENHKVLCDALLISQDKPPVLYTFHMVQDEEFKDYSTQTAQTLKQKLAKIGGYTKKVCVMTKIFYLSPEGKTSCQYDLNSQVIYPESYYWTTAQTMKDLEKALSNILPKENQIFLFVCLFRFCLFVCWFVCFFLR

SEQ ID NO: 76602 - protein, 588 aa, Homo sapiens
  Payload ID: 15291
  Gene Symbol: SLFN12L
  Gene Name: schlafen family member 12-like
  ENSP ID: ENSP00000487397
DLLKRKEFLRGNGLAAGKMNISIDLDTNYAELVLNVGRVTLGENNRKKMKDCQLRKQQNENVSRAVCALLNSGGGVIKAEVENKGYSYKKDGIGLDLENSFSNMLPFVPNFLDFMQNGNYFHIFVKSWSLETSGPQIATLSSSLYKRDVTSAKVMNASAALEFLKDMEKTGGRAYLRPEFPAKRACVDVQEESNMEALAADFFNRTELGYKEKLTFTESTHVEIKNFSTEKLLQRITEILPQYVSAFANTDGGYLFVGLNEDKEVIGFKAEKSYLTKLEEVTKNSIGKLPVHHFCVEKGTINYLCKFLGVYDKGRLCGYVYALRVERFCCAVFAKKPDSWHVKDNRVKQLTEKEWIQFMVDSEPVCEELPSPASTSSPVSQSYPLREYINFKIQPLRYHLPGLSEKITCAPKTFCRNLFSQHEGLKQLICEEMGSVNKGSLIFSRSWSLDLGLQENHKVLCDALLISQDKPPVLYTFHMVQDEEFKDYSTQTAQTLKQKLAKIGGYTKKVCVMTKIFYLSPEGKTSCQYDLNSQVIYPESYYWTTAQTMKDLEKALSNILPKENQIFLFVCLFRFCLFVCWFVCFFLR

SEQ ID NO: 76603 - protein, 897 aa, Homo sapiens
  Payload ID: 15292
  Gene Symbol: SLFN13
  Gene Name: schlafen family member 13
  Uniprot ID: Q68D06
  ENSP ID: ENSP00000285013
MEANHCSLGVYPSYPDLVIDVGEVTLGEENRKKLQKTQRDQERARVIRAACALLNSGGGVIQMEMANRDERPTEMGLDLEESLRKLIQYPYLQAFFETKQHGRCFYIFVKSWSGDPFLKDGSFNSRICSLSSSLYCRSGTSVLHMNSRQAFDFLKTKERQSKYNLINEGSPPSKIMKAVYQNISESNPAYEVFQTDTIEYGEILSFPESPSIEFKQFSTKHIQQYVENIIPEYISAFANTEGGYLFIGVDDKSRKVLGCAKEQVDPDSLKNVIARAISKLPIVHFCSSKPRVEYSTKIVEVFCGKELYGYLCVIKVKAFCCVVFSEAPKSWMVREKYIRPLTTEEWVEKMMDADPEFPPDFAEAFESQLSLSDSPSLCRPVYSKKGLEHKADLQQHLFPVPPGHLECTPESLWKELSLQHEGLKELIHKQMRPFSQGIVILSRSWAVDLNLQEKPGVICDALLIAQNSTPILYTILREQDAEGQDYCTRTAFTLKQKLVNMGGYTGKVCVRAKVLCLSPESSAEALEAAVSPMDYPASYSLAGTQHMEALLQSLVIVLLGFRSLLSDQLGCEVLNLLTAQQYEIFSRSLRKNRELFVHGLPGSGKTIMAMKIMEKIRNVFHCEAHRILYVCENQPLRNFISDRNICRAETRETFLREKFEHIQHIVIDEAQNFRTEDGDWYRKAKTITQREKDCPGVLWIFLDYFQTSHLGHSGLPPLSAQYPREELTRVVRNADEIAEYIQQEMQLIIENPPINIPHGYLAILSEAKWVPGVPGNTKIIKNFTLEQIVTYVADTCRCFFERGYSPKDVAVLVSTVTEVEQYQSKLLKAMRKKMVVQLSDACDMLGVHIVLDSVRRFSGLERSIVFGIHPRTADPAILPNILICLASRAKQHLYIFL

SEQ ID NO: 76604 - protein, 106 aa, Homo sapiens
  Payload ID: 15292
  Gene Symbol: SLFN13
  Gene Name: schlafen family member 13
  ENSP ID: ENSP00000433181
MEANHCSLGVYPSYPDLVIDVGEVTLGEENRKKLQKTQRDQERARVIRAACALLNSGGGVIQMEMANRDERPTEMGLDLEESLRKLIQYPYLQAFFETKQHGRCFY

SEQ ID NO: 76605 - protein, 897 aa, Homo sapiens; identical to SEQ ID NO: 76603
  Payload ID: 15292
  Gene Symbol: SLFN13
  Gene Name: schlafen family member 13
  Uniprot ID: Q68D06
  ENSP ID: ENSP00000434439

SEQ ID NO: 76606 - protein, 130 aa, Homo sapiens
  Payload ID: 15292
  Gene Symbol: SLFN13
  Gene Name: schlafen family member 13
  ENSP ID: ENSP00000435328
MVREKYIRPLTTEEWVEKMMDADPEFPPDFAEAFESQLSLSDSPSLCRPVYSKKGLEHKADLQQHLFPVPPGHLECTPESLWKELSLQHEGLKELIHKQMRPFSQGIVILSRSWAVDLNLQEKPGVICDA

SEQ ID NO: 76607 - protein, 579 aa, Homo sapiens
  Payload ID: 15292
  Gene Symbol: SLFN13
  Gene Name: schlafen family member 13
  Uniprot ID: Q68D06
  ENSP ID: ENSP00000435442
MEANHCSLAPKSWMVREKYIRPLTTEEWVEKMMDADPEFPPDFAEAFESQLSLSDSPSLCRPVYSKKGLEHKADLQQHLFPVPPGHLECTPESLWKELSLQHEGLKELIHKQMRPFSQGIVILSRSWAVDLNLQEKPGVICDALLIAQNSTPILYTILREQDAEGQDYCTRTAFTLKQKLVNMGGYTGKVCVRAKVLCLSPESSAEALEAAVSPMDYPASYSLAGTQHMEALLQSLVIVLLGFRSLLSDQLGCEVLNLLTAQQYEIFSRSLRKNRELFVHGLPGSGKTIMAMKIMEKIRNVFHCEAHRILYVCENQPLRNFISDRNICRAETRETFLREKFEHIQHIVIDEAQNFRTEDGDWYRKAKTITQREKDCPGVLWIFLDYFQTSHLGHSGLPPLSAQYPREELTRVVRNADEIAEYIQQEMQLIIENPPINIPHGYLAILSEAKWVPGVPGNTKIIKNFTLEQIVTYVADTCRCFFERGYSPKDVAVLVSTVTEVEQYQSKLLKAMRKKMVVQLSDACDMLGVHIVLDSVRRFSGLERSIVFGIHPRTADPAILPNILICLASRAKQHLYIFL

SEQ ID NO: 76608 - protein, 119 aa, Homo sapiens
  Payload ID: 15292
  Gene Symbol: SLFN13
  Gene Name: schlafen family member 13
  ENSP ID: ENSP00000437298
MEANHCSLGVYPSYPDLVIDVGEVTLGEENRKKLQKTQRDQERARVIRAACALLNSGGGVIQMEMANRDERPTEMGLDLEESLRKLIQYPYLQAFFETKQHGSSQVMDGEGEVHPPLDN

SEQ ID NO: 76609 - protein, 897 aa, Homo sapiens; identical to SEQ ID NO: 76603
  Payload ID: 15292
  Gene Symbol: SLFN13
  Gene Name: schlafen family member 13
  Uniprot ID: Q68D06
  ENSP ID: ENSP00000444016

SEQ ID NO: 76610 - protein, 897 aa, Homo sapiens; identical to SEQ ID NO: 76603
  Payload ID: 15292
  Gene Symbol: SLFN13
  Gene Name: schlafen family member 13
  Uniprot ID: Q68D06
  ENSP ID: ENSP00000467426

SEQ ID NO: 76611 - protein, 77 aa, Homo sapiens
  Payload ID: 15292
  Gene Symbol: SLFN13
  Gene Name: schlafen family member 13
  ENSP ID: ENSP00000467557
MEANHCSLGVYPSYPDLVIDVGEVTLGEENRKKLQKTQRDQERARVIRAACALLNSGGGVIQMEMANRDERPTEMGL

SEQ ID NO: 76612 - protein, 912 aa, Homo sapiens
  Payload ID: 15293
  Gene Symbol: SLFN14
  Gene Name: schlafen family member 14
  Uniprot ID: P0C7P3
  ENSP ID: ENSP00000391101
MESLKTDTEMPYPEVIVDVGRVIFGEENRKKMTNSCLKRSENSRIIRAICALLNSGGGVIKAEIDDKTYSYQCHGLGQDLETSFQKLLPSGSQKYLDYMQQGHNLLIFVKSWSPDVFSLPLRICSLRSNLYRRDVTSAINLSASSALELLREKGFRAQRGRPRVKKLHPQQVLNRCIQEEEDMRILASEFFKKDKLMYKEKLNFTESTHVEFKRFTTKKVIPRIKEMLPHYVSAFANTQGGYVLIGVDDKSKEVVGCKWEKVNPDLLKKEIENCIEKLPTFHFCCEKPKVNFTTKILNVYQKDVLDGYVCVIQVEPFCCVVFAEAPDSWIMKDNSVTRLTAEQWVVMMLDTQSAPPSLVTDYNSCLISSASSARKSPGYPIKVHKFKEALQRHLFPVTQEEVQFKPESLCKKLFSDHKELEGLMKTLIHPCSQGIVIFSRSWAGDVGFRKEQNVLCDALLIAVNSPVVLYTILIDPNWPGGLEYARNTAHQLKQKLQTVGGYTGKVCIIPRLIHLSSTQSRPGEIPLRYPRSYRLADEEEMEDLLQALVVVSLSSRSLLSDQMGCEFFNLLIMEQSQLLSESLQKTRELFIYCFPGVRKTALAIKIMEKIKDLFHCKPKEILYVCESDSLKDFVTQQTTCQAVTRKTFMQGEFLKIKHIVMDETENFCSKYGNWYMKAKNITHPKAKGTGSENLHHGILWLFLDPFQIHHADVNGLPPPSAQFPRKTITSGIHCALEIAKVMKEEMKRIKENPPSNMSPDTLALFSETAYEEATCAQALPGVCETKTNLTTEQIANYVARKCHSLFQCGYLPKDIAILCRRGEDRGRYRLALLKAMELIETHRPSEVVFSPATGVWGSHIVLDSIQQFSGLERTVVFGLSPECDQSEEFHKLCFASRAIKHLYLLYEKRAAY

SEQ ID NO: 76613 - protein, 891 aa, Homo sapiens
  Payload ID: 15294
  Gene Symbol: SLFN5
  Gene Name: schlafen family member 5
  Uniprot ID: Q08AF3
  ENSP ID: ENSP00000299977
MSLRIDVDTNFPECVVDAGKVTLGTQQRQEMDPRLREKQNEIILRAVCALLNSGGGIIKAEIENKGYNYERHGVGLDVPPIFRSHLDKMQKENHFLIFVKSWNTEAGVPLATLCSNLYHRERTSTDVMDSQEALAFLKCRTQTPTNINVSNSLGPQAAQGSVQYEGNINVSAAALFDRKRLQYLEKLNLPESTHVEFVMFSTDVSHCVKDRLPKCVSAFANTEGGYVFFGVHDETCQVIGCEKEKIDLTSLRASIDGCIKKLPVHHFCTQRPEIKYVLNFLEVHDKGALRGYVCAIKVEKFCCAVFAKVPSSWQVKDNRVRQLPTREWTAWMMEADPDLSRCPEMVLQLSLSSATPRSKPVCIHKNSECLKEQQKRYFPVFSDRVVYTPESLYKELFSQHKGLRDLINTEMRPFSQGILIFSQSWAVDLGLQEKQGVICDALLISQNNTPILYTIFSKWDAGCKGYSMIVAYSLKQKLVNKGGYTGRLCITPLVCVLNSDRKAQSVYSSYLQIYPESYNFMTPQHMEALLQSLVIVLLGFKSFLSEELGSEVLNLLTNKQYELLSKNLRKTRELFVHGLPGSGKTILALRIMEKIRNVFHCEPANILYICENQPLKKLVSFSKKNICQPVTRKTFMKNNFEHIQHIIIDDAQNFRTEDGDWYGKAKFITQTARDGPGVLWIFLDYFQTYHLSCSGLPPPSDQYPREEINRVVRNAGPIANYLQQVMQEARQNPPPNLPPGSLVMLYEPKWAQGVPGNLEIIEDLNLEEILIYVANKCRFLLRNGYSPKDIAVLFTKASEVEKYKDRLLTAMRKRKLSQLHEESDLLLQIGDASDVLTDHIVLDSVCRFSGLERNIVFGINPGVAPPAGAYNLLLCLASRAKRHLYILKASV

SEQ ID NO: 76614 - protein, 389 aa, Homo sapiens
  Payload ID: 15294
  Gene Symbol: SLFN5
  Gene Name: schlafen family member 5
  ENSP ID: ENSP00000440537
MSLRIDVDTNFPECVVDAGKVTLGTQQRQEMDPRLREKQNEIILRAVCALLNSGGGIIKAEIENKGYNYERHGVGLDVPPIFRSHLDKMQKENHFLIFVKSWNTEAGVPLATLCSNLYHRERTSTDVMDSQEALAFLKCRTQTPTNINVSNSLGPQAAQGSVQYEGNINVSAAALFDRKRLQYLEKLNLPESTHVEFVMFSTDVSHCVKDRLPKCVSAFANTEGGYVFFGVHDETCQVIGCEKEKIDLTSLRASIDGCIKKLPVHHFCTQRPEIKYVLNFLEVHDKGALRGYVCAIKVEKFCCAVFAKVPSSWQVKDNRVRQLPTREWTAWMMEADPDLSRCPEMVLQLSLSSATPRSKPVCIHKNSECLKEQQKRYFPVSARKTSASQ

SEQ ID NO: 76615 - protein, 338 aa, Homo sapiens
  Payload ID: 15294
  Gene Symbol: SLFN5
  Gene Name: schlafen family member 5
  Uniprot ID: Q08AF3
  ENSP ID: ENSP00000466984
MSLRIDVDTNFPECVVDAGKVTLGTQQRQEMDPRLREKQNEIILRAVCALLNSGGGIIKAEIENKGYNYERHGVGLDVPPIFRSHLDKMQKENHFLIFVKSWNTEAGVPLATLCSNLYHRERTSTDVMDSQEALAFLKCRTQTPTNINVSNSLGPQAAQGSVQYEGNINVSAAALFDRKRLQYLEKLNLPESTHVEFVMFSTDVSHCVKDRLPKCVSAFANTEGGYVFFGVHDETCQVIGCEKEKIDLTSLRASIDGCIKKLPVHHFCTQRPEIKYVLNFLEVHDKGALRGYVCAIKVEKFCCAVFAKVPSSWQVKDNRVRQLPTREWTAWMMEADPG

SEQ ID NO: 76616 - protein, 407 aa, Homo sapiens
  Payload ID: 15295
  Gene Symbol: SLFNL1
  Gene Name: schlafen-like 1
  Uniprot ID: Q499Z3
  ENSP ID: ENSP00000304401
MTPMKRSVQTQVSEPFMESWGEESLPELPAEQSLTEYSDLEEAPSAHTLYVGHLNPQFSVPVLACLLRDTLERLEMPVAREHIEVVRRPRKAYALVQVTVHRDTLASLPWRLQTALEEHLILKELAARGKDLLLSEAQGPFSHREEKEEEEEDSGLSPGPSPGSGVPLPTWPTHTLPDRPQAQQLQSCQGRPSGVCSDSAIVHQQIVGKDQLFQGAFLGSETRNMEFKRGSGEYLSLAFKHHVRRYVCAFLNSEGGSLLVGVEDSGLVQGIRCSHRDEDRARLLVDSILQGFKPQIFPDAYTLTFIPVISTSETSVPLKVIRLTVHTPKAQSQPQLYQTDQGEVFLRRDGSIQGPLSASAIQEWCRQRWLVELGKLEEKMKALMMEKEQLQQQLQQHGPVSCTCCVL

SEQ ID NO: 76617 - protein, 407 aa, Homo sapiens; identical to SEQ ID NO: 76616
  Payload ID: 15295
  Gene Symbol: SLFNL1
  Gene Name: schlafen-like 1
  Uniprot ID: Q499Z3
  ENSP ID: ENSP00000352299

SEQ ID NO: 76618 - protein, 348 aa, Homo sapiens
  Payload ID: 15295
  Gene Symbol: SLFNL1
  Gene Name: schlafen-like 1
  Uniprot ID: Q499Z3
  ENSP ID: ENSP00000361694
MTPMKRSVQTQVSEPFMESWGEESLPELPAEQSLTEYSDLEEAPSAHTLYVGHLNPQFSVPVLACLLRDTLERLEMPVAREHIEVVRRPRKAYALVQVTVHRDTLASLPWRLQTALEEHLILKELAARGKDLLLSEAQGPFSHREQIVGKDQLFQGAFLGSETRNMEFKRGSGEYLSLAFKHHVRRYVCAFLNSEGGSLLVGVEDSGLVQGIRCSHRDEDRARLLVDSILQGFKPQIFPDAYTLTFIPVISTSETSVPLKVIRLTVHTPKAQSQPQLYQTDQGEVFLRRDGSIQGPLSASAIQEWCRQRWLVELGKLEEKMKALMMEKEQLQQQLQQHGPVSCTCCVL

SEQ ID NO: 76619 - protein, 359 aa, Homo sapiens
  Payload ID: 15295
  Gene Symbol: SLFNL1
  Gene Name: schlafen-like 1
  Uniprot ID: Q499Z3
  ENSP ID: ENSP00000361696
MTPMKRSVQTQVSEPFMESWGEESLPELPAEQSLTEYSDLEEAPSAHTLYVGHLNPQFSVPVLACLLRDTLERLEMPVAREHIEVVRRPRKAYALVQVTVHRDTLASLPWRLQTALEEHLILKELAARGKDLLLSEAQGPFSHREEKEEEEEDSGLSPGPSPGSGVPLPTWPTHTLPDRPQAQQLQSCQGRPSGVCSDSAIVHQQIVGKDQLFQGAFLGSETRNMEFKRGSGEYLSLAFKHHVRRYVCAFLNSEGGSLLVGVEDSGLVQGIRCSHRDEDRARLLVDSILQGFKPQIFPDAYTLTFIPVISTSETSVPLKRWLVELGKLEEKMKALMMEKEQLQQQLQQHGPVSCTCCVL

SEQ ID NO: 76620 - protein, 407 aa, Homo sapiens; identical to SEQ ID NO: 76616
  Payload ID: 15295
  Gene Symbol: SLFNL1
  Gene Name: schlafen-like 1
  Uniprot ID: Q499Z3
  ENSP ID: ENSP00000398938

SEQ ID NO: 76621 - protein, 244 aa, Homo sapiens
  Payload ID: 15296
  Gene Symbol: SCHIP1
  Gene Name: schwannomin interacting protein 1
  Uniprot ID: Q9P0W5
  ENSP ID: ENSP00000404860
MVHQDNCSYQAQKNERESIRQKLALGSFFDDGPGIYTSCSKSGKPSLSSRLQSGMNLQICFVNDSGSDKDSDADDSKTETSLDTPLSPMSKQSSSYSDRDTTEEESESLDDMDFLTRQKKLQAEAKMALAMAKPMAKMQVEVEKQNRKKSPVADLLPHMPHISECLMKRSLKPTDLRDMTIGQLQVIVNDLHSQIESLNEELVQLLLIRDELHTEQDAMLVDIEDLTRHAESQQKHMAEKMPAK

SEQ ID NO: 76622 - protein, 260 aa, Homo sapiens
  Payload ID: 15296
  Gene Symbol: SCHIP1
  Gene Name: schwannomin interacting protein 1
  ENSP ID: ENSP00000419230
MNLDSDGMDDIISQESSLDMEGNYKKAQKNERESIRQKLALGSFFDDGPGIYTSCSKSGKPSLSSRLQSGMNLQICFVNDSGSDKDSDADDSKTETSLDTPLSPMSKQSSSYSDRDTTEEESESLDDMDFLTRQKKLQAEAKMALAMAKPMAKMQVEVEKQNRKKSPVADLLPHMPHISECLMKRSLKPTDLRDMTIGQLQVIVNDLHSQIESLNEELVQLLLIRDELHTEQDAMLVDIEDLTRHAESQQKHMAEKMPAK

SEQ ID NO: 76623 - protein, 52 aa, Homo sapiens
  Payload ID: 15296
  Gene Symbol: SCHIP1
  Gene Name: schwannomin interacting protein 1
  ENSP ID: ENSP00000420376
MVHQDNCSYQAQKNERESIRQKLALGSFFDDGPGIYTSCSKSGKPSLSSRLE

SEQ ID NO: 76624 - protein, 688 aa, Homo sapiens
  Payload ID: 15297
  Gene Symbol: SCEL
  Gene Name: sciellin
  Uniprot ID: O95171
  ENSP ID: ENSP00000302579
MSNVTLRKMSPTGNEMKSTTQGTTRKQQDFHEVNKRRTFLQDNSWIKKRPEEEKDENYGRVVLNRHNSHDALDRKVNERDVPKATISRYSSDDTLDRISDRNDAAKTYKANTLDNQLTNRSMSMFRSLEVTKLQPGGSLNANTSNTIASTSATTPVKKKRQSWFPPPPPGYNASSSTGTRRREPGVHPPIPPKPSSPVSSPNQLRQDNRQIHPPKPGVYTETNRSAERNIRSQDLDNIVKVATSLQRSDKGEELDNLIKMNKSLNRNQGLDSLFRANPKVEEREKRAKSLESLIYMSTRTDKDGKGIQSLGSPIKVNQRTDKNEKGRQNLESVAKVNARMNKTSRRSEDLDNATEVNPKGHENTTGKKDLDGLIKVDPETNKNITRGQSLDNLIKVTPEVKRSNQGSKDLNNFIKVYPGTEKSTEGGQSLDSLIKVTPERNRTNQGNQDLENLIKVIPSANKSSEQGLDEHINVSPKAVKNTDGKQDLDKLIKVNPEIFTNNQRNQDLANLIKVNPAVIRNNQSQDLDNLIKVKPSALRNTNRDQNLENLIEVNSHVSENKNGSSNTGAKQAGPQDTVVYTRTYVENSKSPKDGYQENISGKYIQTVYSTSDRSVIERDMCTYCRKPLGVETKMILDELQICCHSTCFKCEICKQPLENLQAGDSIWIYRQTIHCEPCYSKIMAKWIP

SEQ ID NO: 76625 - protein, 668 aa, Homo sapiens
  Payload ID: 15297
  Gene Symbol: SCEL
  Gene Name: sciellin
  Uniprot ID: O95171
  ENSP ID: ENSP00000366454
MSNVTLRKMSPTGNEMKSTTQGTTRKQQDFHEVNKRRTFLQDNSWIKKRPEEEKDENYGRVVLNRHNSHDALDRKVNERDVPKATISRYSSDDTLDRISDRNDAAKTYKANTLDNQLTNRSMSMFRSLEVTKLQPGGSLNANTSNTIASTSATTPVKKKRQSWFPPPPPGYNASSSTGTRRREPGVHPPIPPKPSSPVSSPNQLRQDNRQIHPPKPGVYTETNRSAERNISEELDNLIKMNKSLNRNQGLDSLFRANPKVEEREKRAKSLESLIYMSTRTDKDGKGIQSLGSPIKVNQRTDKNEKGRQNLESVAKVNARMNKTSRRSEDLDNATEVNPKGHENTTGKKDLDGLIKVDPETNKNITRGQSLDNLIKVTPEVKRSNQGSKDLNNFIKVYPGTEKSTEGGQSLDSLIKVTPERNRTNQGNQDLENLIKVIPSANKSSEQGLDEHINVSPKAVKNTDGKQDLDKLIKVNPEIFTNNQRNQDLANLIKVNPAVIRNNQSQDLDNLIKVKPSALRNTNRDQNLENLIEVNSHVSENKNGSSNTGAKQAGPQDTVVYTRTYVENSKSPKDGYQENISGKYIQTVYSTSDRSVIERDMCTYCRKPLGVETKMILDELQICCHSTCFKCEICKQPLENLQAGDSIWIYRQTIHCEPCYSKIMAKWIP

SEQ ID NO: 76626 - protein, 283 aa, Homo sapiens
  Payload ID: 15297
  Gene Symbol: SCEL
  Gene Name: sciellin
  ENSP ID: ENSP00000432840
MSNVTLRKMSPTGNEMKSTTQGTTRKQQDFHEVNKRRTFLQDNSWIKKRPEEEKDENYGRVVLNRHNSHDALDRKVNERDVPKATISRYSSDDTLDRSMSMFRSLEVTKLQPGGSLNANTSNTIASTSATTPVKKKRQSWFPPPPPGYNASSSTGTRRREPGVHPPIPPKPSSPVSSPNQLRQDNRQIHPPKPGVYTETNRSAERNISEELDNLIKMNKSLNRNQGLDSLFRANPKVEEREKRAKSLESLIYMSTRTDKDGKGIQSLGSPIKVNQRTDKNEKG

SEQ ID NO: 76627 - protein, 646 aa, Homo sapiens
  Payload ID: 15297
  Gene Symbol: SCEL
  Gene Name: sciellin
  Uniprot ID: O95171
  ENSP ID: ENSP00000437895
MSNVTLRKMSPTGNEMKSTTQGTTRKQQDFHEVNKRRTFLQDNSWIKKRPEEEKDENYGRVVLNRHNSHDALDRKVNERDVPKATISRYSSDDTLDRISDRNDAAKTYKANTLDNQLTNRSMSMFRSLEVTKLQPGGSLNANTSNTIASTSATTPVKKKREPGVHPPIPPKPSSPVSSPNQLRQDNRQIHPPKPGVYTETNRSAERNIRSQDLDNIVKVATSLQRSDKGEELDNLIKMNKSLNRNQGLDSLFRANPKVEEREKRAKSLESLIYMSTRTDKDGKGIQSLGSPIKVNQRTDKNEKGRQNLESVAKVNARMNKTSRRSEDLDNATEVNPKGHENTTGGQSLDNLIKVTPEVKRSNQGSKDLNNFIKVYPGTEKSTEGGQSLDSLIKVTPERNRTNQGNQDLENLIKVIPSANKSSEQGLDEHINVSPKAVKNTDGKQDLDKLIKVNPEIFTNNQRNQDLANLIKVNPAVIRNNQSQDLDNLIKVKPSALRNTNRDQNLENLIEVNSHVSENKNGSSNTGAKQAGPQDTVVYTRTYVENSKSPKDGYQENISGKYIQTVYSTSDRSVIERDMCTYCRKPLGVETKMILDELQICCHSTCFKCEICKQPLENLQAGDSIWIYRQTIHCEPCYSKIMAKWIP

SEQ ID NO: 76628 - protein, 715 aa, Homo sapiens
  Payload ID: 15298
  Gene Symbol: SCIN
  Gene Name: scinderin
  Uniprot ID: Q9Y6U3
  ENSP ID: ENSP00000297029
MARELYHEEFARAGKQAGLQVWRIEKLELVPVPQSAHGDFYVGDAYLVLHTAKTSRGFTYHLHFWLGKECSQDESTAAAIFTVQMDDYLGGKPVQNRELQGYESNDFVSYFKGGLKYKAGGVASGLNHVLTNDLTAKRLLHVKGRRVVRATEVPLSWDSFNKGDCFIIDLGTEIYQWCGSSCNKYERLKANQVATGIRYNERKGRSELIVVEEGSEPSELIKVLGEKPELPDGGDDDDIIADISNRKMAKLYMVSDASGSMRVTVVAEENPFSMAMLLSEECFILDHGAAKQIFVWKGKDANPQERKAAMKTAEEFLQQMNYSKNTQIQVLPEGGETPIFKQFFKDWRDKDQSDGFGKVYVTEKVAQIKQIPFDASKLHSSPQMAAQHNMVDDGSGKVEIWRVENNGRIQVDQNSYGEFYGGDCYIILYTYPRGQIIYTWQGANATRDELTTSAFLTVQLDRSLGGQAVQIRVSQGKEPVHLLSLFKDKPLIIYKNGTSKKGGQAPAPPTRLFQVRRNLASITRIVEVDVDANSLNSNDVFVLKLPQNSGYIWVGKGASQEEEKGAEYVASVLKCKTLRIQEGEEPEEFWNSLGGKKDYQTSPLLETQAEDHPPRLYGCSNKTGRFVIEEIPGEFTQDDLAEDDVMLLDAWEQIFIWIGKDANEVEKKESLKSAKMYLETDPSGRDKRTPIVIIKQGHEPPTFTGWFLGWDSSKW

SEQ ID NO: 76629 - protein, 580 aa, Homo sapiens
  Payload ID: 15298
  Gene Symbol: SCIN
  Gene Name: scinderin
  Uniprot ID: Q9Y6U3
  ENSP ID: ENSP00000341375
MARELYHEEFARAGKQAGLQVWRIEKLELVPVPQSAHGDFYVGDAYLVLHTAKTSRGFTYHLHFWLGKECSQDESTAAAIFTVQMDDYLGGKPVQNRELQGYESNDFVSYFKGGLKYKAGGVASGLNHVLTNDLTAKRLLHVKGRRVVRATEVPLSWDSFNKGDCFIIDLGTEIYQWCGSSCNKYERLKANQVATGIRYNERKGRSELIVVEEGSEPSELIKVLGEKPELPDGGDDDDIIADISNRKMAKLYMVSDASGSMRVTVVAEENPFSMAMLLSEECFILDHGAAKQIFVWKGKDANPQERKAAMKTAEEFLQQMNYSKNTQIQVLPEGGETPIFKQFFKDWRDKDQSDGFGKVYVTEKVAQIKQIPFDASKLHSSPQMAAQHNMVDDGSGKVEIWRVENNGRIQVDQNSYGEFYGGDCYIILYTYPRGQIIYTWQGANATRDELTTSAFLTVQLDRSLGGQAVQIRVSQGKEPVHLLSLFKDKPLIIYKNGTSKKGGQAPAPPTRLFQVRRNLASITRIVERSSGIPLEGKKTTRPHHYWKPRLKTIHLGFTAALTKLEDLLLKRFQESSPRMI

SEQ ID NO: 76630 - protein, 160 aa, Homo sapiens
  Payload ID: 15298
  Gene Symbol: SCIN
  Gene Name: scinderin
  ENSP ID: ENSP00000404380
MARELYHEEFARAGKQAGLQVWRIEKLELVPVPQSAHGDFYVGDAYLVLHTAKTSRGFTYHLHFWLGFYPHHAACGSGRQKLRFIRKLASSDRRKECSQDESTAAAIFTVQMDDYLGGKPVQNRELQGYESNDFVSYFKGGLKYKAGGVASGLNHVLTND

SEQ ID NO: 76631 - protein, 102 aa, Homo sapiens
  Payload ID: 15298
  Gene Symbol: SCIN
  Gene Name: scinderin
  ENSP ID: ENSP00000411149
MARELYHEEFARAGKQAGLQVWRIEKLELVPVPQSAHGDFYVGDAYLVLHTAKTSRGFTYHLHFWLGIGKSRNKNRPGMVAHTCNPQQFRRPKPEDCLRPGV

SEQ ID NO: 76632 - protein, 91 aa, Homo sapiens
  Payload ID: 15298
  Gene Symbol: SCIN
  Gene Name: scinderin
  ENSP ID: ENSP00000428555
MASLMSAFTLVQQEIYQWCGSSCNKYERLKANQVATGIRYNERKGRSELIVVEEGSEPSELIKVLGEKPELPDGGDDDDIIADISNRKMAK

SEQ ID NO: 76633 - protein, 108 aa, Homo sapiens
  Payload ID: 15298
  Gene Symbol: SCIN
  Gene Name: scinderin
  ENSP ID: ENSP00000429598
MASLMSAFTLVQQEIYQWCGSSCNKYERLKANQVATGIRYNERKGRSELIVVEEGSEPSELIKVLGEKPELPDGGDDDDIIADISNRKMAKLYMVSDASGSMRVTVVA

SEQ ID NO: 76634 - protein, 468 aa, Homo sapiens
  Payload ID: 15298
  Gene Symbol: SCIN
  Gene Name: scinderin
  Uniprot ID: Q9Y6U3
  ENSP ID: ENSP00000430997
MAKLYMVSDASGSMRVTVVAEENPFSMAMLLSEECFILDHGAAKQIFVWKGKDANPQERKAAMKTAEEFLQQMNYSKNTQIQVLPEGGETPIFKQFFKDWRDKDQSDGFGKVYVTEKVAQIKQIPFDASKLHSSPQMAAQHNMVDDGSGKVEIWRVENNGRIQVDQNSYGEFYGGDCYIILYTYPRGQIIYTWQGANATRDELTTSAFLTVQLDRSLGGQAVQIRVSQGKEPVHLLSLFKDKPLIIYKNGTSKKGGQAPAPPTRLFQVRRNLASITRIVEVDVDANSLNSNDVFVLKLPQNSGYIWVGKGASQEEEKGAEYVASVLKCKTLRIQEGEEPEEFWNSLGGKKDYQTSPLLETQAEDHPPRLYGCSNKTGRFVIEEIPGEFTQDDLAEDDVMLLDAWEQIFIWIGKDANEVEKKESLKSAKMYLETDPSGRDKRTPIVIIKQGHEPPTFTGWFLGWDSSKW

SEQ ID NO: 76635 - protein, 1241 aa, Homo sapiens
  Payload ID: 15299
  Gene Symbol: STIL
  Gene Name: SCL/TAL1 interrupting locus
  ENSP ID: ENSP00000337367
MEPIYPFARPQMNTRFPSSRMVPFHFPPSKCALWNPTPTGDFIYLHLSYYRNPKLVVTEKTIRLAYRHAKQNKKNSSCFLLGSLTADEDEEGVTLTVDRFDPGREVPECLEITPTASLPGDFLIPCKVHTQELCSREMIVHSVDDFSSALKALQCHICSKDSLDCALARNLSSNLNISQVQGTYKYGYLTMDETRKLLLLLESDPKVYSLPLVGIWLSGITHIYSPQVWACCLRYIFNSSVQERVFSESGNFIIVLYSMTHKEPEFYECFPCDGKIPDFRFQLLTSKETLHLFKNVEPPDKNPIRCELSAESQNAETEFFSKASKNFSIKRSSQKLSSGKMPIHDHDSGVEDEDFSPRPIPSPHPVSQKISKIQPSVPELSLVLDGNFIESNPLPTPLEMVNNENPPLINHLEHLKPLQPQLYDEKHSPEVEAGEPSLRGIPNQLNQDKPALLRHCKVRQPPAYKKGNPHTRNSIKPSSHNGPSHDIFEKLQTVSAGNVQNEEYPIRPSTLNSRQSSLAPQSQPHDFVFSPHNSGRPMELQIPTPPLPSYCSTNVCRCCQHHSHIQYSPLNSWQGANTVGSIQDVQSEALQKHSLFHPSGCPALYCNAFCSSSSPIALRPQGDMGSCSPHSNIEPSPVARPPSHMDLCNPQPCTVCMHTPKTESDNGMMGLSPDAYRFLTEQDRQLRLLQAQIQRLLEAQSLMPCSPKTTAVEDTVQAGRQMELVSVEAQSSPGLHMRKGVSIAVSTGASLFWNAAGEDQEPDSQMKQDDTKISSEDMNFSVDINNEVTSLPGSASSLKAVDIPSFEESNIAVEEEFNQPLSVSNSSSLVVRKEPDVPVFFPSGQLAESVSMCLQTGPTGGASNNSETSEEPKIEHVMQPLLHQPSDNQKIYQDLLGQVNHLLNSSSKETEQPSTKAVIISHECTRTQNVYHTKKKTHHSRLVDKDCVLNATLKQLRSLGVKIDSPTKVKKNAHNVDHASVLACISPEAVISGLNCMSFANVGMSGLSPNGVDLSMEANAIALKYLNENQLSQLSVTRSNQNNCDPFSLLHINTDRSTVGLSLISPNNMSFATKKYMKRYGLLQSSDNSEDEEEPPDNADSKSEYLLNQNLRSIPEQLGGQKEPSKNDHEIINCSNCESVGTNADTPVLRNITNEVLQTKAKQQLTEKPAFLVKNLKPSPAVNLRTGKAEFTQHPEKENEGDITIFPESLQPSETLKQMNSMNSVGTFLDVKRLRQLPKLF

SEQ ID NO: 76636 - protein, 1287 aa, Homo sapiens
  Payload ID: 15299
  Gene Symbol: STIL
  Gene Name: SCL/TAL1 interrupting locus
  Uniprot ID: Q15468
  ENSP ID: ENSP00000353544
MEPIYPFARPQMNTRFPSSRMVPFHFPPSKCALWNPTPTGDFIYLHLSYYRNPKLVVTEKTIRLAYRHAKQNKKNSSCFLLGSLTADEDEEGVTLTVDRFDPGREVPECLEITPTASLPGDFLIPCKVHTQELCSREMIVHSVDDFSSALKALQCHICSKDSLDCGKLLSLRVHITSRESLDSVEFDLHWAAVTLANNFKCTPVKPIPIIPTALARNLSSNLNISQVQGTYKYGYLTMDETRKLLLLLESDPKVYSLPLVGIWLSGITHIYSPQVWACCLRYIFNSSVQERVFSESGNFIIVLYSMTHKEPEFYECFPCDGKIPDFRFQLLTSKETLHLFKNVEPPDKNPIRCELSAESQNAETEFFSKASKNFSIKRSSQKLSSGKMPIHDHDSGVEDEDFSPRPIPSPHPVSQKISKIQPSVPELSLVLDGNFIESNPLPTPLEMVNNENPPLINHLEHLKPLQPQLYDEKHSPEVEAGEPSLRGIPNQLNQDKPALLRHCKVRQPPAYKKGNPHTRNSIKPSSHNGPSHDIFEKLQTVSAGNVQNEEYPIRPSTLNSRQSSLAPQSQPHDFVFSPHNSGRPMELQIPTPPLPSYCSTNVCRCCQHHSHIQYSPLNSWQGANTVGSIQDVQSEALQKHSLFHPSGCPALYCNAFCSSSSPIALRPQGDMGSCSPHSNIEPSPVARPPSHMDLCNPQPCTVCMHTPKTESDNGMMGLSPDAYRFLTEQDRQLRLLQAQIQRLLEAQSLMPCSPKTTAVEDTVQAGRQMELVSVEAQSSPGLHMRKGVSIAVSTGASLFWNAAGEDQEPDSQMKQDDTKISSEDMNFSVDINNEVTSLPGSASSLKAVDIPSFEESNIAVEEEFNQPLSVSNSSLVVRKEPDVPVFFPSGQLAESVSMCLQTGPTGGASNNSETSEEPKIEHVMQPLLHQPSDNQKIYQDLLGQVNHLLNSSSKETEQPSTKAVIISHECTRTQNVYHTKKKTHHSRLVDKDCVLNATLKQLRSLGVKIDSPTKVKKNAHNVDHASVLACISPEAVISGLNCMSFANVGMSGLSPNGVDLSMEANAIALKYLNENQLSQLSVTRSNQNNCDPFSLLHINTDRSTVGLSLISPNNMSFATKKYMKRYGLLQSSDNSEDEEEPPDNADSKSEYLLNQNLRSIPEQLGGQKEPSKNDHEIINCSNCESVGTNADTPVLRNITNEVLQTKAKQQLTEKPAFLVKNLKPSPAVNLRTGKAEFTQHPEKENEGDITIFPESLQPSETLKQMNSMNSVGTFLDVKRLRQLPKLF

SEQ ID NO: 76637 - protein, 1288 aa, Homo sapiens
  Payload ID: 15299
  Gene Symbol: STIL
  Gene Name: SCL/TAL1 interrupting locus
  Uniprot ID: Q15468
  ENSP ID: ENSP00000360944
MEPIYPFARPQMNTRFPSSRMVPFHFPPSKCALWNPTPTGDFIYLHLSYYRNPKLVVTEKTIRLAYRHAKQNKKNSSCFLLGSLTADEDEEGVTLTVDRFDPGREVPECLEITPTASLPGDFLIPCKVHTQELCSREMIVHSVDDFSSALKALQCHICSKDSLDCGKLLSLRVHITSRESLDSVEFDLHWAAVTLANNFKCTPVKPIPIIPTALARNLSSNLNISQVQGTYKYGYLTMDETRKLLLLLESDPKVYSLPLVGIWLSGITHIYSPQVWACCLRYIFNSSVQERVFSESGNFIIVLYSMTHKEPEFYECFPCDGKIPDFRFQLLTSKETLHLFKNVEPPDKNPIRCELSAESQNAETEFFSKASKNFSIKRSSQKLSSGKMPIHDHDSGVEDEDFSPRPIPSPHPVSQKISKIQPSVPELSLVLDGNFIESNPLPTPLEMVNNENPPLINHLEHLKPLQPQLYDEKHSPEVEAGEPSLRGIPNQLNQDKPALLRHCKVRQPPAYKKGNPHTRNSIKPSSHNGPSHDIFEKLQTVSAGNVQNEEYPIRPSTLNSRQSSLAPQSQPHDFVFSPHNSGRPMELQIPTPPLPSYCSTNVCRCCQHHSHIQYSPLNSWQGANTVGSIQDVQSEALQKHSLFHPSGCPALYCNAFCSSSSPIALRPQGDMGSCSPHSNIEPSPVARPPSHMDLCNPQPCTVCMHTPKTESDNGMMGLSPDAYRFLTEQDRQLRLLQAQIQRLLEAQSLMPCSPKTTAVEDTVQAGRQMELVSVEAQSSPGLHMRKGVSIAVSTGASLFWNAAGEDQEPDSQMKQDDTKISSEDMNFSVDINNEVTSLPGSASSLKAVDIPSFEESNIAVEEEFNQPLSVSNSSSLVVRKEPDVPVFFPSGQLAESVSMCLQTGPTGGASNNSETSEEPKIEHVMQPLLHQPSDNQKIYQDLLGQVNHLLNSSSKETEQPSTKAVIISHECTRTQNVYHTKKKTHHSRLVDKDCVLNATLKQLRSLGVKIDSPTKVKKNAHNVDHASVLACISPEAVISGLNCMSFANVGMSGLSPNGVDLSMEANAIALKYLNENQLSQLSVTRSNQNNCDPFSLLHINTDRSTVGLSLISPNNMSFATKKYMKRYGLLQSSDNSEDEEEPPDNADSKSEYLLNQNLRSIPEQLGGQKEPSKNDHEIINCSNCESVGTNADTPVLRNITNEVLQTKAKQQLTEKPAFLVKNLKPSPAVNLRTGKAEFTQHPEKENEGDITIFPESLQPSETLKQMNSMNSVGTFLDVKRLRQLPKLF

SEQ ID NO: 76638 - protein, 1270 aa, Homo sapiens
  Payload ID: 15299
  Gene Symbol: STIL
  Gene Name: SCL/TAL1 interrupting locus
  ENSP ID: ENSP00000379523
MEPIYPFARPQMNTRFPSSRMVPFHFPPSKCALWNPTPTGDFIYLHLSYYRNPKLVVTEKTIRLAYRHAKQNKKNSSCFLLGSLTADEDEEGVTLTVDRFDPGREVPECLEITPTASLPGDFLIPCKVHTQELCSREMIVHSVDDFSSALKALQCHICSKDSLDCGKLLSLRVHITSRESLDSVEFDLHWAAVTLANNFKCTPVKPIPIIPTALARNLSSNLNISQVQGTYKYGYLTMDETRKLLLLLESDPKVYSLPLVGIWLSGITHIYSPQVWACCLRYIFNSSVQERVFSESGNFIIVLYSMTHKEPEFYECFPCDGKIPDFRFQLLTSKETLHLFKNVEPPDKNPIRCELSAESQNAETEFFSKASKNFSIKRSSQKLSSGKMPIHDHDSGVEDEDFSPRPIPSPHPVSQKISKIQPSVPELSLVLDGNFIESNPLPTPLEMVNNENPPLINHLEHLKPLQPQLYDEKHSPEVEAGEPSLRGIPNQLNQDKPALLRHCKVRQPPAYKKGNPHTRNSIKPSSHNGPSHDIFEKLQTVSAGNVQNEEYPIRPSTLNSRQSSLAPQSQPHDFVFSPHNSGRPMELQIPTPPLPSYCSTNVCRCCQHHSHIQYSPLNSWQGANTVGSIQDVQSEALQKHSLFHPSGCPALYCNAFCSSSSPIALRPQGDMGSCSPHSNIEPSPVARPPSHMDLCNPQPCTVCMHTPKTESDNGMMGLSPDAYRFLTEQDRQLRLLQAQIQRLLEAQSLMPCSPKTTAVEDTVQAGRQMELVSVEAQSSPGLHMRKGVSIAVSTGASLFWNAAGEDQEPDSQMKQDDTKISSEDMNFSVDINNEVTSLPGSASSLKAVDIPSFEESNIAVEEEFNQPLSVSNGQLAESVSMCLQTGPTGGASNNSETSEEPKIEHVMQPLLHQPSDNQKIYQDLLGQVNHLLNSSSKETEQPSTKAVIISHECTRTQNVYHTKKKTHHSRLVDKDCVLNATLKQLRSLGVKIDSPTKVKKNAHNVDHASVLACISPEAVISGLNCMSFANVGMSGLSPNGVDLSMEANAIALKYLNENQLSQLSVTRSNQNNCDPFSLLHINTDRSTVGLSLISPNNMSFATKKYMKRYGLLQSSDNSEDEEEPPDNADSKSEYLLNQNLRSIPEQLGGQKEPSKNDHEIINCSNCESVGTNADTPVLRNITNEVLQTKAKQQLTEKPAFLVKNLKPSPAVNLRTGKAEFTQHPEKENEGDITIFPESLQPSETLKQMNSMNSVGTFLDVKRLRQLPKLF

SEQ ID NO: 76639 - protein, 211 aa, Homo sapiens
  Payload ID: 15299
  Gene Symbol: STIL
  Gene Name: SCL/TAL1 interrupting locus
  ENSP ID: ENSP00000409087
  MOD_RES (1)..(1): Any amino acid
XQLYDEKHSPEVEAGEPSLRGIPNQLNQDKPALLRHCKPCTVCMHTPKTESDNGMMGLSPDAYRFLTEQDRQLRLLQAQIQRLLEAQSLMPCSPKTTAVEDTVQAGRQMELVSVEAQSSPGLHMRKGVSIAVSTGASLFWNAAGEDQEPDSQMKQDDTKISSEDMNFSVDINNEVTSLPGSASSLKAVDIPSFEESNIAVEEEFNQPLSVS

SEQ ID NO: 76640 - protein, 918 aa, Homo sapiens
  Payload ID: 15299
  Gene Symbol: STIL
  Gene Name: SCL/TAL1 interrupting locus
  ENSP ID: ENSP00000411664
MEPIYPFARPQMNTRFPSSRMVPFHFPPSKCALWNPTPTGDFIYLHLSYYRNPKLVVTEKTIRLAYRHAKQNKKNSSCFLLGSLTADEDEEGVTLTVDRFDPGREVPECLEITPTASLPGDFLIPCKVHTQELCSREMIVHSVDDFSSALKALQCHICSKDSLDCALARNLSSNLNISQVQGTYKYGYLTMDETRKLLLLLESDPKVYSLPLVGIWLSGITHIYSPQVWACCLRYIFNSSVQERVFSESGNFIIVLYSMTHKEPEFYECFPCDGKIPDFRFQLLTSKETLHLFKNVEPPDKNPIRCELSAESQNAETEFFSKASKNFSIKRSSQKLSSGKMPIHDHDSGVEDEDFSPRPIPSPHPVSQKISKIQPSVPELSLVLDGNFIESNPLPTPLEMVNNENPPLINHLEHLKPLQPQLYDEKHSPEVEAGEPSLRGIPNQLNQDKPALLRHCKVRQPPAYKKGNPHTRNSIKPSSHNGPSHDIFEKLQTVSAGNVQNEEYPIRPSTLNSRQSSLAPQSQPHDFVFSPHNSGRPMELQIPTPPLPSYCSTNVCRCCQHHSHIQYSPLNSWQGANTVGSIQDVQSEALQKHSLFHPSGCPALYCNAFCSSSSPIALRPQGDMGSCSPHSNIEPSPVARPPSHMDLCNPQPCTVCMHTPKTESDNGMMGLSPDAYRFLTEQDRQLRLLQAQIQRLLEAQSLMPCSPKTTAVEDTVQAGRQMELVSVEAQSSPGLHMRKGVSIAVSTGASLFWNAAGEDQEPDSQMKQDDTKISSEDMNFSVDINNEVTSLPGSASSLKAVDIPSFEESNIAVEEEFNQPLSVSNGQLAESVSMCLQTGPTGGASNNSETSEEPKIEHVMQPLLHQPSDNQKIYQDLLGQVNHLLNSSSKETEQPSTKAVIISHECTRTQNVYHTKKK

SEQ ID NO: 76641 - protein, 92 aa, Homo sapiens
  Payload ID: 15299
  Gene Symbol: STIL
  Gene Name: SCL/TAL1 interrupting locus
  ENSP ID: ENSP00000412019
MSTKFAIPCALILHCFFKRFPSSRMVPFHFPPSKCALWNPTPTGDFIYLHLSYYRNPKLVVTEKTIRLAYRHAKQNKKNSSCFLLGSLTADE

SEQ ID NO: 76642 - protein, 201 aa, Homo sapiens
  Payload ID: 15300
  Gene Symbol: SCX
  Gene Name: scleraxis bHLH transcription factor
  Uniprot ID: Q7RTU7
  ENSP ID: ENSP00000476384
MSFATLRPAPPGRYLYPEVSPLSEDEDRGSDSSGSDEKPCRVHAARCGLQGARRRAGGRRAGGGGPGGRPGREPRQRHTANARERDRTNSVNTAFTALRTLIPTEPADRKLSKIETLRLASSYISHLGNVLLAGEACGDGQPCHSGPAFFHAARAGSPPPPPPPPPARDGENTQPKQICTFCLSNQRKLSKDRDRKTAIRS

SEQ ID NO: 76643 - protein, 213 aa, Homo sapiens
  Payload ID: 15301
  Gene Symbol: SOST
  Gene Name: sclerostin
  Uniprot ID: Q9BQB4
  ENSP ID: ENSP00000301691
MQLPLALCLVCLLVHTAFRVVEGQGWQAFKNDATEIIPELGEYPEPPPELENNKTMNRAENGGRPPHHPFETKDVSEYSCRELHFTRYVTDGPCRSAKPVTELVCSGQCGPARLLPNAIGRGKWWRPSGPDFRCIPDRYRAQRVQLLCPGGEAPRARKVRLVASCKCKRLTRFHNQSELKDFGTEAARPQKGRKPRPRARSAKANQAELENAY

SEQ ID NO: 76644 - protein, 206 aa, Homo sapiens
  Payload ID: 15302
  Gene Symbol: SOSTDC1
  Gene Name: sclerostin domain containing 1
  Uniprot ID: Q6X4U4
  ENSP ID: ENSP00000304930
MLPPAIHFYLLPLACILMKSCLAFKNDATEILYSHVVKPVPAHPSSNSTLNQARNGGRHFSNTGLDRNTRVQVGCRELRSTKYISDGQCTSISPLKELVCAGECLPLPVLPNWIGGGYGTKYWSRRSSQEWRCVNDKTRTQRIQLQCQDGSTRTYKITVVTACKCKRYTRQHNESSHNFESMSPAKPVQHHRERKRASKSSKHSMS

SEQ ID NO: 76645 - protein, 230 aa, Homo sapiens
  Payload ID: 15302
  Gene Symbol: SOSTDC1
  Gene Name: sclerostin domain containing 1
  Uniprot ID: Q6X4U4
  ENSP ID: ENSP00000379889
MLPPAIHFYLLPLACILMKSCLAFKNDATEILYSHVVKPVPAHPSSNSTLNQARNGGRHFSNTGLDRNRTESLTRQNYFWLFPGAFLRQLQEARVQVGCRELRSTKYISDGQCTSISPLKELVCAGECLPLPVLPNWIGGGYGTKYWSRRSSQEWRCVNDKTRTQRIQLQCQDGSTRTYKITVVTACKCKRYTRQHNESSHNFESMSPAKPVQHHRERKRASKSSKHSMS

SEQ ID NO: 76646 - protein, 866 aa, Homo sapiens
  Payload ID: 15303
  Gene Symbol: SFMBT1
  Gene Name: Scm-like with four mbt domains 1
  Uniprot ID: Q9UHJ3
  ENSP ID: ENSP00000378235
MNGEQQLDADAGSGMEEVELSWEDYLEETGSTAVPYGSFKHVDTRLQNGFAPGMKLEVAVRTDPETYWVATVITTCEQLLLLRYDGYGEDRRADFWCDIRKADLYPIGWCEQNKKTLEAPEGIRDKVSDWDEFLRQTLIGACSPPVPLLEGLRNGRNPLDLIAPGSRLECQAFQDSLSTWIVTVVENIGGRLKLRYEGLESSDNYEHWLYYLDPFLHHVGWAAQQGYELQPPSAIRHLKNEAEWQEILAKVKEEEEEPLPSYLFKDKQVIGIHTFSVNMKLEAVDPWSPFGISPATVVKVFDEKYFLVEMDDLRPENHARRSFVCHADSPGIFPVQWSLKNGLHISPPPGYPSQDFDWADYLKQCGAEAAPQRCFPPLISEHEFKENMKLEAVNPILPEEVCVATITAVRGSYLWLQLEGSKKPIPECIVSVESMDIFPLGWCETNGHPLSTPRRARVYKQRKIAVVQPEKQVPSSRTVHEGLRNQELNSTESVMINGKYCCPKIYFNHRCFSGPYLNKGRIAELPQCVGPGNCVLVLREVLTLLINAAYKPSRVLRELQLDKDSVWHGCGEVLKAKYKGKSYRATVEIVKTADRVTEFCRQTCIKLECCPNLFGPRMVLDKCSENCSVLTKTKYTHYYGKKKNKRIGRPPGGHSNLACALKKASKRRKRRKNVFVHKKKRSSASVDNTPAGSPQGSGGEDEDDPDEGDDDSLSEGSTSEQQDELQEESEMSEKKSCSSSPTQSEISTSLPPDRQRRKRELRTFSFSDDENKPPSPKEIRIEVAERLHLDSNPLKWSVADVVRFIRSTDCAPLARIFLDQEIDGQALLLLTLPTVQECMDLKLGPAIKLCHHIERIKFAFYEQFAN

SEQ ID NO: 76647 - protein, 121 aa, Homo sapiens
  Payload ID: 15303
  Gene Symbol: SFMBT1
  Gene Name: Scm-like with four mbt domains 1
  ENSP ID: ENSP00000418860
MNGEQQLDADAGSGMEEVELSWEDYLEETGSTAVPYGSFKHVDTRLQNGFAPGMKLEVAVRTDPETYWVATVITTCEQLLLLRYDGYGEDRRADFWCDIRKADLYPIGWCEQNKKTLEAPE

SEQ ID NO: 76648 - protein, 94 aa, Homo sapiens
  Payload ID: 15303
  Gene Symbol: SFMBT1
  Gene Name: Scm-like with four mbt domains 1
  ENSP ID: ENSP00000418950
MNGEQQLDADAGSGMEEVELSWEDYLEETGSTAVPYGSFKHVDTRLQNGFAPGMKLEVAVRTDPETYWVATVITTCEQLLLLRYDGYGEDRRAD

SEQ ID NO: 76649 - protein, 50 aa, Homo sapiens
  Payload ID: 15303
  Gene Symbol: SFMBT1
  Gene Name: Scm-like with four mbt domains 1
  ENSP ID: ENSP00000419215
MNGEQQLDADAGSGMEEVELSWEDYLEETGSTAVPYGSFKHVDTRLQNGF

SEQ ID NO: 76650 - protein, 894 aa, Homo sapiens
  Payload ID: 15304
  Gene Symbol: SFMBT2
  Gene Name: Scm-like with four mbt domains 2
  Uniprot ID: Q5VUG0
  ENSP ID: ENSP00000355109
MESTLSASNMQDPSSSPLEKCLGSANGNGDLDSEEGSSLEETGFNWGEYLEETGASAAPHTSFKHVEISIQSNFQPGMKLEVANKNNPDTYWVATIITTCGQLLLLRYCGYGEDRRADFWCDVVIADLHPVGWCTQNNKVLMPPDAIKEKYTDWTEFLIRDLTGSRTAPANLLEGPLRGKGPIDLITVGSLIELQDSQNPFQYWIVSVIENVGGRLRLRYVGLEDTESYDQWLFYLDYRLRPVGWCQENKYRMDPPSEIYPLKMASEWKCTLEKSLIDAAKFPLPMEVFKDHADLRSHFFTVGMKLETVNMCEPFYISPASVTKVFNNHFFQVTIDDLRPEPSKLSMLCHADSLGILPVQWCLKNGVSLTPPKGYSGQDFDWADYHKQHGAQEAPPFCFRNTSFSRGFTKNMKLEAVNPRNPGELCVASVVSVKGRLMWLHLEGLQTPVPEVIVDVESMDIFPVGWCEANSYPLTAPHKTVSQKKRKIAVVQPEKQLPPTVPVKKIPHDLCLFPHLDTTGTVNGKYCCPQLFINHRCFSGPYLNKGRIAELPQSVGPGKCVLVLKEVLSMIINAAYKPGRVLRELQLVEDPHWNFQEETLKAKYRGKTYRAVVKIVRTSDQVANFCRRVCAKLECCPNLFSPVLISENCPENCSIHTKTKYTYYYGKRKKISKPPIGESNPDSGHPKPARRRKRRKSIFVQKKRRSSAVDFTAGSGEESEEEDADAMDDDTASEETGSELRDDQTDTSSAEVPSARPRRAVTLRSGSEPVRRPPPERTRRGRGAPAASSAEEGEKCPPTKPEGTEDTKQEEEERLVLESNPLEWTVTDVVRFIKLTDCAPLAKIFQEQDIDGQALLLLTLPTVQECMELKLGPAIKLCHQIERVKVAFYAQYAN

SEQ ID NO: 76651 - protein, 160 aa, Homo sapiens
  Payload ID: 15304
  Gene Symbol: SFMBT2
  Gene Name: Scm-like with four mbt domains 2
  ENSP ID: ENSP00000369033
MESTLSASNMQDPSSSPLEKCLGSANGNGDLDSEEGSSLEETGFNWGEYLEETGASAAPHTSFKHVEISIQSNFQPGMKLEVANKNNPDTYWVATIITTCGQLLLLRYCGYGEDRRADFWCDVVIADLHPVGWCTQNNKVLMPPDVESDVKPSASVQHIS

SEQ ID NO: 76652 - protein, 186 aa, Homo sapiens
  Payload ID: 15304
  Gene Symbol: SFMBT2
  Gene Name: Scm-like with four mbt domains 2
  ENSP ID: ENSP00000369035
MESTLSASNMQDPSSSPLEKCLGSANGNGDLDSEEGSSLEETGFNWGEYLEETGASAAPHTSFKHVEISIQSNFQPGMKLEVANKNNPDTYWVATIITTCGQLLLLRYCGYGEDRRADFWCDVVIADLHPVGWCTQNNKVLMPPDAIKEKYTDWTEFLIRDLTGSRTAPANLLEGVCIVVIHLMYL

SEQ ID NO: 76653 - protein, 894 aa, Homo sapiens; identical to SEQ ID NO: 76650
  Payload ID: 15304
  Gene Symbol: SFMBT2
  Gene Name: Scm-like with four mbt domains 2
  Uniprot ID: Q5VUG0
  ENSP ID: ENSP00000380353

SEQ ID NO: 76654 - protein, 301 aa, Homo sapiens
  Payload ID: 15305
  Gene Symbol: SCO1
  Gene Name: SCO1 cytochrome c oxidase assembly protein
  Uniprot ID: O75880
  ENSP ID: ENSP00000255390
MAMLVLVPGRVMRPLGGQLWRFLPRGLEFWGPAEGTARVLLRQFCARQAEAWRASGRPGYCLGTRPLSTARPPPPWSQKGPGDSTRPSKPGPVSWKSLAITFAIGGALLAGMKHVKKEKAEKLEKERQRHIGKPLLGGPFSLTTHTGERKTDKDYLGQWLLIYFGFTHCPDVCPEELEKMIQVVDEIDSITTLPDLTPLFISIDPERDTKEAIANYVKEFSPKLVGLTGTREEVDQVARAYRVYYSPGPKDEDEDYIVDHTIIMYLIGPDGEFLDYFGQNKRKGEIAASIATHMRPYRKKS

SEQ ID NO: 76655 - protein, 270 aa, Homo sapiens
  Payload ID: 15305
  Gene Symbol: SCO1
  Gene Name: SCO1 cytochrome c oxidase assembly protein
  ENSP ID: ENSP00000463387
MAMLVLVPGRVMRPLGGQLWRFLPRGLEFWGPAEGTARVLLRQFCARQAEAWRASGRPGYCLGTRPLSTARPPPPWSQKGPGDSTRPSKPGPVSWKSLAITFAIGGALLAGMKHVKKEKAEKLEKERQRHIGKPLLGGPFSLTTHTGERKTDKDYLDSITTLPDLTPLFISIDPERDTKEAIANYVKEFSPKLVGLTGTREEVDQVARAYRVYYSPGPKDEDEDYIVDHTIIMYLIGPDGEFLDYFGQNKRKGEIAASIATHMRPYRKKS

SEQ ID NO: 76656 - protein, 91 aa, Homo sapiens
  Payload ID: 15305
  Gene Symbol: SCO1
  Gene Name: SCO1 cytochrome c oxidase assembly protein
  ENSP ID: ENSP00000464032
MAMLVLVPGRVMRPLGGQLWRFLPRGLEFWGPAEGTARVLLRQFCARQAEAWRASGRPGYCLGTRPLSTARPPPPWSQKGPGDSTRPSKPG

SEQ ID NO: 76657 - protein, 266 aa, Homo sapiens
  Payload ID: 15306
  Gene Symbol: SCO2
  Gene Name: SCO2 cytochrome c oxidase assembly protein
  Uniprot ID: O43819
  ENSP ID: ENSP00000252785
MLLLTRSPTAWHRLSQLKPRVLPGTLGGQALHLRSWLLSRQGPAETGGQGQPQGPGLRTRLLITGLFGAGLGGAWLALRAEKERLQQQKRTEALRQAAVGQGDFHLLDHRGRARCKADFRGQWVLMYFGFTHCPDICPDELEKLVQVVRQLEAEPGLPPVQPVFITVDPERDDVEAMARYVQDFHPRLLGLTGSTKQVAQASHSYRVYYNAGPKDEDQDYIVDHSIAIYLLNPDGLFTDYYGRSRSAEQISDSVRRHMAAFRSVLS

SEQ ID NO: 76658 - protein, 266 aa, Homo sapiens; identical to SEQ ID NO: 76657
  Payload ID: 15306
  Gene Symbol: SCO2
  Gene Name: SCO2 cytochrome c oxidase assembly protein
  Uniprot ID: O43819
  ENSP ID: ENSP00000379046

SEQ ID NO: 76659 - protein, 136 aa, Homo sapiens
  Payload ID: 15306
  Gene Symbol: SCO2
  Gene Name: SCO2 cytochrome c oxidase assembly protein
  ENSP ID: ENSP00000403570
MLLLTRSPTAWHRLSQLKPRVLPGTLGGQALHLRSWLLSRQGPAETGGQGQPQGPGLRTRLLITGLFGAGLGGAWLALRAEKERLQQQKRTEALRQAAVGQGDFHLLDHRGRARCKADFRGQWVLMYFGFTHCPDI

SEQ ID NO: 76660 - protein, 136 aa, Homo sapiens; identical to SEQ ID NO: 76659
  Payload ID: 15306
  Gene Symbol: SCO2
  Gene Name: SCO2 cytochrome c oxidase assembly protein
  ENSP ID: ENSP00000415642

SEQ ID NO: 76661 - protein, 266 aa, Homo sapiens; identical to SEQ ID NO: 76657
  Payload ID: 15306
  Gene Symbol: SCO2
  Gene Name: SCO2 cytochrome c oxidase assembly protein
  Uniprot ID: O43819
  ENSP ID: ENSP00000444242

SEQ ID NO: 76662 - protein, 266 aa, Homo sapiens; identical to SEQ ID NO: 76657
  Payload ID: 15306
  Gene Symbol: SCO2
  Gene Name: SCO2 cytochrome c oxidase assembly protein
  Uniprot ID: O43819
  ENSP ID: ENSP00000444433

SEQ ID NO: 76663 - protein, 5150 aa, Homo sapiens
  Payload ID: 15307
  Gene Symbol: SSPO
  Gene Name: SCO-spondin
  ENSP ID: ENSP00000485256
MLLPALLFGMAWALADGRWCEWTETIRVEEEVAPRQEDLVPCASLDHYSRLGWRLDLPWSGRSGLTRSPAPGLCPIYKPPETRPAKWNRTVRTCCPGWGGAHCTEALAKASPEGHCFAMWQCQLQAGSANASAGSLEECCARPWGQSWWDGSSQACRSCSSRHLPGSASSPALLQPLAGAVGQLWSQHQRPSATCASWSGFHYRTFDGRHYHFLGRCTYLLAGAADSTWAVHLTPGDRCPQPGHCQRVTMGPEEVLIQAGNVSVKGQLVPEGQSWLLHGLSLQWLGDWLVLSGGLGVVVRLDRTGSISISVDHELWGQTQGLCGLYNGWPEDDFMEPGGGLAMLAATFGNSWRLPGSESGCLDAVEVAQGCDSPLGLIDADVEPGHLRAEAQDVCHQLLEGPFGQCHAQVSPAEYHEACLFAYCAGAMAGSGQEGRQQAVCATFASYVQACARRHIHIRWRKPGFCERLCPGGQLYSDCVSLCPPSCEAVGQGEEESCREECVSGCECPRGLFWNGTLCVPAAHCPCYYCRQRYVPGDTVRQLCNPCVCRDGRWHCAQALCPAECAVGGDGHYLTFDGRSYSFWGGQGCRYSLVQDYVKGQLLILLEHGACDAGSCLHAISVSLEDTHIQLRDSGAVLVNGQDVGLPWIGAEGLSVRRASSAFLLLRWPGAQVLWGLSDPVAYITLDPRHAHQVQGLCGTFTQNQQDDFLTPAGDVETSIAAFASKFQVAGKGRCPSEDSALLSPCTTHSQRHAFAEAACAILHSSVFQECHRLVDKEPFYLRCLAAVCGCDPGSDCLCPVLSAYARRCAQEGASPPWRNQTLCPVMCPGGQEYRECAPACGQHCGKPEDCGELGSCVAGCNCPLGLLWDPEGQCVPPSLCPCQLGARRYAPGSATMKECNRCICQERGLWNCTARHCPSQAFCPRELVYAPGACLLTCDSPSANHSCPAGSTDGCVCPPGTVLLDERCVPPDLCPCRHSGQWYLPNATIQEDCNVCVCRGRQWHCTGQRRSGRCQASGAPHYVTFDGLAFTYPGACEYLLVREASGLFTVSAQNLPCGASGLTCTKALAVRLEGTVVHMLRGRAVTVNGVSVTPPKVYTGPGLSLRRAGLFLLLSTHLGLTLLWDGGTRVLVQLSPQFRGRVAGLCGDFDGDASNDLRSRQGVLEPTAELAAHSWRLSPLCPEPGDLPHPCTMNTHRAGWARARCGALLQPLFTLCHAEVPPQQHYEWCLYDACGCDSGGDCECLCSAIATYADECARHGHHVRWRSQELCSLQCEGGQVYEACGPTCPPTCHEQHPEPGWHCQVVACVEGCFCPEGTLLHGGACLEPASCPCEWGRNSFPPGSVLQKDCGNCTCQEGQWHCGGDGGHCEELVPACAEGEALCQENGHCVPHGWLCDNQDDCGDGSDEEGCAAPGCGEGQMTCSSGHCLPLALLCDRQDDCGDGTDEPSYPCPQGLLACADGRCLPPALLCDGHPDCLDAADEESCLGQVTCVPGEVSCVDGTCLGAIQLCDGVWDCPDGADEGPGHCPLPSLPTPPASTLPGPSPGSLDTASSPLASASPAPPCGPFEFRCGSGECTPRGWRCDQEEDCADGSDERGCGGPCAPHHAPCARGPHCVSPEQLCDGVRQCPDGSDEGPDACGGLPALGGPNRTGLPCPEYTCPNGTCIGFQLVCDGQPDCGRPGQVGPSPEEQGCGAWGPWSPWGPCSRTCGPWGQGRSRRCSPLGLLVLQNCPGPEHQSQACFTAACPVDGEWSTWSPWSVCSEPCRGTMTRQRQCHSPQNGGRTCAALPGGLHSTRQTKPCPQDGCPNATCSGELMFQPCAPCPLTCDDISGQVTCPPDWPCGSPGCWCPEGQVLGSEGWCVWPRQCPCLVDGARYWPGQRIKADCQLCICQDGRPRRCRLNPDCAVDCGWSSWSPWAKCLGPCGSQSIQWSFRSSNNPRPSGRGRQCRGIHRKARRCQTEPCEGCEHQGQVHRVGERWHGGPCRVCQCLHNLTAHCSPYCPLGSCPQGWVLVEGTGESCCHCALPGENQTVQPMATPAAAPAPSPQIRFPLATYILPPSGDPCYSPLGLAGLAEGSLHASSQQLEHPTQAALLGAPTQGPSPQGWHAGGDAYAKWHTRPHYLQLDLLQPRNLTGILVPETGSSNAYASSFSLQFSSNGLHWHDYRDLLPGILPLPKLFPRNWDDLDPAVWTFGRMVQARFVRVWPHDVHHSDVPLQVELLGCEPGSPPAPLCPGVGLRCASGECVLRGGPCDGVLDCEDGSDEEGCVLLPEGTGRFHSTAKTLALSSAQPGQLLHWPREGLAETEHWPPGQESPTSPTETRPVSPGPASGVPHHGESVQMVTTTPIPQMEARTLPPGMAAVTVVPPHPVTPATPAGQSVAPGPFPPVQCGPGQTPCEVLGCVEQAQVCDGREDCLDGSDERHCARNLLMWLPSLPALWAASTVPFMMPTMALPGLPASRALCSPSQLSCGSGECLSAERRCDLRPDCQDGSDEDGCVDCVLAPWSVWSSCSRSCGLGLTFQRQELLRPPLPGGSCPRDRFRSQSCFVQACPVAGAWAMWEAWGPCSVSCGGGHQSRQRSCVDPPPKNGGAPCPGASQERAPCGLQPCSGGTDCELGRVYVSADLCQKGLVPPCPPSCLDPKANRSCSGHCVEGCRCPPGLLLHDTRCLPLSECPCLVGEELKWPGVSFLLGNCSQCVCEKGELLCQPGGCPLPCGWSAWSSWAPCDRSCGSGVRARFRSPSNPPAAWGGAPCEGDRQELQGCHTVCGTEVFGWTPWTSWSSCSQSCLAPGGGPGWRSRSRLCPSPGDSSCPGDATQEEPCSPPVCPVPSIWGLWAPWSTCSAPCDGGIQTRGRSCSSLAPGDTTCPGPHSQTRDCNTQPCTAQCPENMLFRSAEQCHQEGGPCPRLCLTQGPGIECTGFCAPGCTCPPGLFLHNASCLPRSQCPCQLHGQLYASGAMARLDSCNNCTCVSGKMACTSERCPVACGWSPWTLWSLCSCSCNVGIRRRFRAGTAPPAAFGGAECQGPTMEAEFCSLRPCPGPGGEWGPWSPCSVPCGGGYRNRTRGSSRSLMEFSTCGLQPCAGPVPGMCPRDKQWLDCAQGPASCAELSAPRGTNQTCHPGCHCPSGMLLLNNVCVPTQDCPCAHEGHLYPPGSTVVRPCENCSCVSGLIANCSSWPCAEGEPTWSPWTPWSQCSASCGPARCHRHRFCARSPSAVPSTVAPLPLPATPTPLCSGPEAEEEPCLLQGCDRAGGWGPWGPWSHCSRSCGGGLRSRTRACDQPPPQGLGDYCEGPRAQGEVCQALPCPVTNCTAIEGAEYSPCGPPCPRSCDDLVHCVWRCQPGCYCPPGQVLSSNGAICVQPGHCSCLDLLTGQRHHPGARLARPDGCNHCTCLEGRLNCTDLPCPVPGGWCPWSEWTMCSQPCRGQTRSRSRACACPTPQHGGAPCTGEAGEAGAQHQREACPSYATCPVDGAWGPWGPWSPCDMCLGQSHRSRACSRPPTPEGGRPCPGNHTQSRPCQENSTQCTDCGGGQSLHPCGQPCPRSCQDLSPGSVCQPGSVGCQPTCGCPLGQLSQDGLCVPPAHCRCQYQPGAMGIPENQSRSAGSRFSSWESLEPGEVVTGPCDNCTCVAGILQCQEVPDCPDPGVWSSWGPWEDCSVSCGGGEQLRSRRCARPPCPGPARQSRTCSTQVCREAGCPAGRLYRECQPGEGCPFSCAHVTQQVGCFSEGCEEGCHCPEGTFQHRLACVQECPCVLTAWLLQELGATIGDPGQPLGPGDELDSGQTLRTSCGNCSCAHGKLSCSLDDCFEADGGFGPWSPWGPCSRSCGGLGTRTRSRQCVLTMPTLSGQGCRGPRQDLEYCPSPDCPGAEGSTVEPVTGLPGGWGPWSSWSPCSRSCTDPARPAWRSRTRLCLANCTMGDPLQERPCNLPSCTELPVCPGPGCGAGNCSWTSWAPWEPCSRSCGVGQQRRLRAYRPPGPGGHWCPNILTAYQERRFCNLRACPVPGGWSRWSPWSWCDRSCGGGQSLRSRSCSSPPSKNGGAPCAGERHQARLCNPMPCEAGCPAGMEVVTCANRCPRRCSDLQEGIVCQDDQVCQKGCRCPKGSLEQDGGCVPIGHCDCTDAQGHSWAPGSQHQDACNNCSCQAGQLSCTAQPCPPPTHCAWSHWSAWSPCSHSCGPRGQQSRFRSSTSGSWAPECREEQSQSQPCPQPSCPPLCLQGTRSRTLGDSWLQGECQRCSCTPEGVICEDTECAVPEAWTLWSSWSDCPVSCGGGNQVRTRACRAAAPHHRSPPCLGPDTQTRQQPCPGLLEACSWGPWGPCSRSCGPGLASRSGSCPCLMAKADPTCNSTFLHLDTQGCYSGPCPEECVWSSWSSWTRCSCRVLVQQRYRHQGPASRGARAGAPCTRLDGHFRPCLISNCSEDSCTPPFEFHACGSPCAGLCATHLSHQLCQDLPPCQPGCYCPKGLLEQAGGCIPPEECNCWHTSAAGAGMTLAPGDRLQLGCKECECRRGELHCTSQGCQGLLPLSEWSEWSPCGPCLPPSALAPASRTALEEHWLRDPTGLSPTLAPLLASEQHRHRLCLDPATGRPWTGAPHLCTAPLSQQRLCPDPGACPDSCQWSLWGPWSPCQVPCSGGFRLRWREAEALCGGGCREPWAQESCNGGPCPESCEAQDTVFTLDCANQCPHSCADLWDRVQCLQGPCRPGCRCPPGQLVQDGRCVPISSCRCGLPSANASWELAPAQAVQLDCQNCTCVNESLVCPHQECPVLGPWSAWSSCSAPCGGGTMERHRTCEGGPGVAPCQAQDTEQRQECNLQPCPECPPGQVLSACATSCPCLCWHLQPGAICVQEPCQPGCGCPGGQLLHNGTCVPPTACPCTQHSLPWGLTLTLEEQAQELPPGTVLTRNCTRCVCHGGAFSCSLVDCQVPPGETWQQVAPGELGLCEQTCLEMNATKTQSNCSSARASGCVCQPGHFRSQAGPCVPEDHCECWHLGRPHLPGSEWQEACESCLCLSGRPVCTQHCSPLTCAQGEEMVLEPGSCCPSCRREAPEEQSPSCQLLTELRNFTKGTCYLDQVEVSYCSGYCPSSTHVMPEEPYLQSQCDCCSYRLDPESPVRILNLRCLGGHTEPVVLPVIHSCQCSSCQGGDFSKR

SEQ ID NO: 76664 - protein, 156 aa, Homo sapiens
  Payload ID: 15308
  Gene Symbol: SCP2D1
  Gene Name: SCP2 sterol-binding domain containing 1
  Uniprot ID: Q9UJQ7
  ENSP ID: ENSP00000366645
MWKRSDHQPKIKAEDGPLVGQFEVLGSVPEPAMPHPLELSEFESFPVFQDIRLHIREVGAQLVKKVNAVFQLDITKNGKTILRWTIDLKNGSGDMYPGPARLPADTVFTIPESVFMELVLGKMNPQKAFLAGKFKVSGKVLLSWKLERVFKDWAKF

SEQ ID NO: 76665 - protein, 348 aa, Homo sapiens
  Payload ID: 15309
  Gene Symbol: SCRT1
  Gene Name: scratch family zinc finger 1
  Uniprot ID: Q9BWW7
  ENSP ID: ENSP00000455711
MPRSFLVKKVKLDAFSSADLESAYGRARSDLGAPLHDKGYLSDYVGPSSVYDGDAEAALLKGPSPEPMYAAAVRGELGPAAAGSAPPPTPRPELATAAGGYINGDAAVSEGYAADAFFITDGRSRRKASNAGAAAAPSTASAAAPDGDAGGGGGAGGRSLGSGPGGRGGTRAGAGTEARAGPGAAGAGGRHACGECGKTYATSSNLSRHKQTHRSLDSQLARRCPTCGKVYVSMPAMAMHLLTHDLRHKCGVCGKAFSRPWLLQGHMRSHTGEKPFGCAHCGKAFADRSNLRAHMQTHSAFKHFQCKRCKKSFALKSYLNKHYESACFKGGAGGPAAPAPPQLSPVQA

SEQ ID NO: 76666 - protein, 307 aa, Homo sapiens
  Payload ID: 15310
  Gene Symbol: SCRT2
  Gene Name: scratch family zinc finger 2
  Uniprot ID: Q9NQ03
  ENSP ID: ENSP00000246104
MPRSFLVKKIKGDGFQCSGVPAPTYHPLETAYVLPGARGPPGDNGYAPHRLPPSSYDADQKPGLELAPAEPAYPPAAPEEYSDPESPQSSLSARYFRGEAAVTDSYSMDAFFISDGRSRRRRGGGGGDAGGSGDAGGAGGRAGRAGAQAGGGHRHACAECGKTYATSSNLSRHKQTHRSLDSQLARKCPTCGKAYVSMPALAMHLLTHNLRHKCGVCGKAFSRPWLLQGHMRSHTGEKPFGCAHCGKAFADRSNLRAHMQTHSAFKHYRCRQCDKSFALKSYLHKHCEAACAKAAEPPPPTPAGPAS

SEQ ID NO: 76667 - protein, 1630 aa, Homo sapiens
  Payload ID: 15311
  Gene Symbol: SCRIB
  Gene Name: scribbled planar cell polarity protein
  Uniprot ID: Q14160
  ENSP ID: ENSP00000322938
MLKCIPLWRCNRHVESVDKRHCSLQAVPEEIYRYSRSLEELLLDANQLRELPKPFFRLLNLRKLGLSDNEIQRLPPEVANFMQLVELDVSRNDIPEIPESIKFCKALEIADFSGNPLSRLPDGFTQLRSLAHLALNDVSLQALPGDVGNLANLVTLELRENLLKSLPASLSFLVKLEQLDLGGNDLEVLPDTLGALPNLRELWLDRNQLSALPPELGNLRRLVCLDVSENRLEELPAELGGLVLLTDLLLSQNLLRRLPDGIGQLKQLSILKVDQNRLCEVTEAIGDCENLSELILTENLLMALPRSLGKLTKLTNLNVDRNHLEALPPEIGGCVALSVLSLRDNRLAVLPPELAHTTELHVLDVAGNRLQSLPFALTHLNLKALWLAENQAQPMLRFQTEDDARTGEKVLTCYLLPQQPPPSLEDAGQQGSLSETWSDAPPSRVSVIQFLEAPIGDEDAEEAAAEKRGLQRRATPHPSELKVMKRSIEGRRSEACPCQPDSGSPLPAEEEKRLSAESGLSEDSRPSASTVSEAEPEGPSAEAQGGSQQEATTAGGEEDAEEDYQEPTVHFAEDALLPGDDREIEEGQPEAPWTLPGGRQRLIRKDTPHYKKHFKISKLPQPEAVVALLQGMQPDGEGPVAPGGWHNGPHAPWAPRAQKEEEEEEEGSPQEEEEEEEEENRAEEEEASTEEEDKEGAVVSAPSVKGVSFDQANNLLIEPARIEEEELTLTILRQTGGLGISIAGGKGSTPYKGDDEGIFISRVSEEGPAARAGVRVGDKLLEVNGVALQGAEHHEAVEALRGAGTAVQMRVWRERMVEPENAVTITPLRPEDDYSPRERRGGGLRLPLLPPESPGPLRQRHVACLARSERGLGFSIAGGKGSTPYRAGDAGIFVSRIAEGGAAHRAGTLQVGDRVLSINGVDVTEARHDHAVSLLTAASPTIALLLEREAGGPLPPSPLPHSSPPTAAVATTSITTATPGVPGLPSLAPSLLAAALEGPYPVEEIRLPRAGGPLGLSIVGGSDHSSHPFGVQEPGVFISKVLPRGLAARSGLRVGDRILAVNGQDVRDATHQEAVSALLRPCLELSLLVRRDPAPPGLRELCIQKAPGERLGISIRGGARGHAGNPRDPTDEGIFISKVSPTGAAGRDGRLRVGLRLLEVNQQSLLGLTHGEAVQLLRSVGDTLTVLVCDGFEASTDAALEVSPGVIANPFAAGIGHRNSLESISSIDRELSPEGPGKEKELPGQTLHWGPEATEAAGRGLQPLKLDYRALAAVPSAGSVQRVPSGAAGGKMAESPCSPSGQQPPSPPSPDELPANVKQAYRAFAAVPTSHPPEDAPAQPPTPGPAASPEQLSFRERQKYFELEVRVPQAEGPPKRVSLVGADDLRKMQEEEARKLQQKRAQMLREAAEAGAEARLALDGETLGEEEQEDEQPPWASPSPTSRQSPASPPPLGGGAPVRTAKAERRHQERLRVQSPEPPAPERALSPAELRALEAEKRALWRAARMKSLEQDALRAQMVLSRSQEGRGTRGPLERLAEAPSPAPTPSPTPVEDLGPQTSTSPGRLSPDFAEELRSLEPSPSPGPQEEDGEVALVLLGRPSPGAVGPEDVALCSSRRPVRPGRRGLGPVPS

SEQ ID NO: 76668 - protein, 1655 aa, Homo sapiens
  Payload ID: 15311
  Gene Symbol: SCRIB
  Gene Name: scribbled planar cell polarity protein
  Uniprot ID: Q14160
  ENSP ID: ENSP00000349486
MLKCIPLWRCNRHVESVDKRHCSLQAVPEEIYRYSRSLEELLLDANQLRELPKPFFRLLNLRKLGLSDNEIQRLPPEVANFMQLVELDVSRNDIPEIPESIKFCKALEIADFSGNPLSRLPDGFTQLRSLAHLALNDVSLQALPGDVGNLANLVTLELRENLLKSLPASLSFLVKLEQLDLGGNDLEVLPDTLGALPNLRELWLDRNQLSALPPELGNLRRLVCLDVSENRLEELPAELGGLVLLTDLLLSQNLLRRLPDGIGQLKQLSILKVDQNRLCEVTEAIGDCENLSELILTENLLMALPRSLGKLTKLTNLNVDRNHLEALPPEIGGCVALSVLSLRDNRLAVLPPELAHTTELHVLDVAGNRLQSLPFALTHLNLKALWLAENQAQPMLRFQTEDDARTGEKVLTCYLLPQQPPPSLEDAGQQGSLSETWSDAPPSRVSVIQFLEAPIGDEDAEEAAAEKRGLQRRATPHPSELKVMKRSIEGRRSEACPCQPDSGSPLPAEEEKRLSAESGLSEDSRPSASTVSEAEPEGPSAEAQGGSQQEATTAGGEEDAEEDYQEPTVHFAEDALLPGDDREIEEGQPEAPWTLPGGRQRLIRKDTPHYKKHFKISKLPQPEAVVALLQGMQPDGEGPVAPGGWHNGPHAPWAPRAQKEEEEEEEGSPQEEEEEEEEENRAEEEEASTEEEDKEGAVVSAPSVKGVSFDQANNLLIEPARIEEEELTLTILRQTGGLGISIAGGKGSTPYKGDDEGIFISRVSEEGPAARAGVRVGDKLLEVNGVALQGAEHHEAVEALRGAGTAVQMRVWRERMVEPENAVTITPLRPEDDYSPRERRGGGLRLPLLPPESPGPLRQRHVACLARSERGLGFSIAGGKGSTPYRAGDAGIFVSRIAEGGAAHRAGTLQVGDRVLSINGVDVTEARHDHAVSLLTAASPTIALLLEREAGGPLPPSPLPHSSPPTAAVATTSITTATPGVPGLPSLAPSLLAAALEGPYPVEEIRLPRAGGPLGLSIVGGSDHSSHPFGVQEPGVFISKVLPRGLAARSGLRVGDRILAVNGQDVRDATHQEAVSALLRPCLELSLLVRRDPAPPGLRELCIQKAPGERLGISIRGGARGHAGNPRDPTDEGIFISKVSPTGAAGRDGRLRVGLRLLEVNQQSLLGLTHGEAVQLLRSVGDTLTVLVCDGFEASTDAALEVSPGVIANPFAAGIGHRNSLESISSIDRELSPEGPGKEKELPGQTLHWGPEATEAAGRGLQPLKLDYRALAAVPSAGSVQRVPSGAAGGKMAESPCSPSGQQPPSPPSPDELPANVKQAYRAFAAVPTSHPPEDAPAQPPTPGPAASPEQLSFRERQKYFELEVRVPQAEGPPKRVSLVGADDLRKMQEEEARKLQQKRAQMLREAAEAGAEARLALDGETLGEEEQEDEQPPWASPSPTSRQSPASPPPLGGGAPVRTAKAERRHQERLRVQSPEPPAPERALSPAELRALEAEKRALWRAARMKSLEQDALRAQMVLSRSQEGRGTRGPLERLAEAPSPAPTPSPTPVEDLGPQTSTSPGRLPLSGKKFDYRAFAALPSSRPVYDIQSPDFAEELRSLEPSPSPGPQEEDGEVALVLLGRPSPGAVGPEDVALCSSRRPVRPGRRGLGPVPS

SEQ ID NO: 76669 - protein, 1549 aa, Homo sapiens
  Payload ID: 15311
  Gene Symbol: SCRIB
  Gene Name: scribbled planar cell polarity protein
  Uniprot ID: Q14160
  ENSP ID: ENSP00000366756
MQLVELDVSRNDIPEIPESIKFCKALEIADFSGNPLSRLPDGFTQLRSLAHLALNDVSLQALPGDVGNLANLVTLELRENLLKSLPASLSFLVKLEQLDLGGNDLEVLPDTLGALPNLRELWLDRNQLSALPPELGNLRRLVCLDVSENRLEELPAELGGLVLLTDLLLSQNLLRRLPDGIGQLKQLSILKVDQNRLCEVTEAIGDCENLSELILTENLLMALPRSLGKLTKLTNLNVDRNHLEALPPEIGGCVALSVLSLRDNRLAVLPPELAHTTELHVLDVAGNRLQSLPFALTHLNLKALWLAENQAQPMLRFQTEDDARTGEKVLTCYLLPQQPPPSLEDAGQQGSLSETWSDAPPSRVSVIQFLEAPIGDEDAEEAAAEKRGLQRRATPHPSELKVMKRSIEGRRSEACPCQPDSGSPLPAEEEKRLSAESGLSEDSRPSASTVSEAEPEGPSAEAQGGSQQEATTAGGEEDAEEDYQEPTVHFAEDALLPGDDREIEEGQPEAPWTLPGGRQRLIRKDTPHYKKHFKISKLPQPEAVVALLQGMQPDGEGPVAPGGWHNGPHAPWAPRAQKEEEEEEEGSPQEEEEEEEEENRAEEEEASTEEEDKEGAVVSAPSVKGVSFDQANNLLIEPARIEEEELTLTILRQTGGLGISIAGGKGSTPYKGDDEGIFISRVSEEGPAARAGVRVGDKLLEVNGVALQGAEHHEAVEALRGAGTAVQMRVWRERMVEPENAVTITPLRPEDDYSPRERRGGGLRLPLLPPESPGPLRQRHVACLARSERGLGFSIAGGKGSTPYRAGDAGIFVSRIAEGGAAHRAGTLQVGDRVLSINGVDVTEARHDHAVSLLTAASPTIALLLEREAGGPLPPSPLPHSSPPTAAVATTSITTATPGVPGLPSLAPSLLAAALEGPYPVEEIRLPRAGGPLGLSIVGGSDHSSHPFGVQEPGVFISKVLPRGLAARSGLRVGDRILAVNGQDVRDATHQEAVSALLRPCLELSLLVRRDPAPPGLRELCIQKAPGERLGISIRGGARGHAGNPRDPTDEGIFISKVSPTGAAGRDGRLRVGLRLLEVNQQSLLGLTHGEAVQLLRSVGDTLTVLVCDGFEASTDAALEVSPGVIANPFAAGIGHRNSLESISSIDRELSPEGPGKEKELPGQTLHWGPEATEAAGRGLQPLKLDYRALAAVPSAGSVQRVPSGAAGGKMAESPCSPSGQQPPSPPSPDELPANVKQAYRAFAAVPTSHPPEDAPAQPPTPGPAASPEQLSFRERQKYFELEVRVPQAEGPPKRVSLVGADDLRKMQEEEARKLQQKRAQMLREAAEAGAEARLALDGETLGEEEQEDEQPPWASPSPTSRQSPASPPPLGGGAPVRTAKAERRHQERLRVQSPEPPAPERALSPAELRALEAEKRALWRAARMKSLEQDALRAQMVLSRSQEGRGTRGPLERLAEAPSPAPTPSPTPVEDLGPQTSTSPGRLSPDFAEELRSLEPSPSPGPQEEDGEVALVLLGRPSPGAVGPEDVALCSSRRPVRPGRRGLGPVPS

SEQ ID NO: 76670 - protein, 650 aa, Homo sapiens
  Payload ID: 15311
  Gene Symbol: SCRIB
  Gene Name: scribbled planar cell polarity protein
  ENSP ID: ENSP00000431519
  MOD_RES (1)..(1): Any amino acid
XRLPRAGGPLGLSIVGGSDHSSHPFGVQEPGVFISKVLPRGLAARSGLRVGDRILAVNGQDVRDATHQEAVSALLRPCLELSLLVRRDPAPPGLRELCIQKAPGERLGISIRGGARGHAGNPRDPTDEGIFISKVSPTGAAGRDGRLRVGLRLLEVNQQSLLGLTHGEAVQLLRSVGDTLTVLVCDGFEASTDAALEVSPGVIANPFAAGIGHRNSLESISSIDRELSPEGPGKEKELPGQTLHWGPEATEAAGRGLQPLKLDYRALAAVPSAGSVQRVPSGAAGGKMAESPCSPSGQQPPSPPSPDELPANVKQAYRAFAAVPTSHPPEDAPAQPPTPGPAASPEQLSFRERQKYFELEVRVPQAEGPPKRVSLVGADDLRKMQEEEGEGHGSGVGVGSRLVWPDPPCPPAARKLQQKRAQMLREAAEAGAEARLALDGETLGEEEQEDEQPPWASPSPTSRQSPASPPPLGGGAPVRTAKAERRHQERLRVQSPEPPAPERALSPAELRALEAEKRALWRAARMKSLEQDALRAQMVLSRSQEGRGTRGPLERLAEAPSPAPTPSPTPVEDLGPQTSTSPGRLSPDFAEELRSLEPSPSPGPQEEDGEVALVLLGRPSPGAVGPEDVALCSSRRPVRPGRRGLGPVPS

SEQ ID NO: 76671 - protein, 140 aa, Homo sapiens
  Payload ID: 15311
  Gene Symbol: SCRIB
  Gene Name: scribbled planar cell polarity protein
  ENSP ID: ENSP00000433546
EEEEASTEEEDKEGAVVSAPSVKLTLTILRQTGGLGISIAGGKGSTPYKGDDEGIFISRVSEEGPAARAGVRVGDKLLEVNGVALQGAEHHEAVEALRGAGTAVQMRVWRERMVEPENAVTITPLRPEDDYSPRERRGGG

SEQ ID NO: 76672 - protein, 1549 aa, Homo sapiens; identical to SEQ ID NO: 76669
  Payload ID: 15311
  Gene Symbol: SCRIB
  Gene Name: scribbled planar cell polarity protein
  ENSP ID: ENSP00000479898

SEQ ID NO: 76673 - protein, 1630 aa, Homo sapiens; identical to SEQ ID NO: 76667
  Payload ID: 15311
  Gene Symbol: SCRIB
  Gene Name: scribbled planar cell polarity protein
  ENSP ID: ENSP00000482406

SEQ ID NO: 76674 - protein, 1655 aa, Homo sapiens; identical to SEQ ID NO: 76668
  Payload ID: 15311
  Gene Symbol: SCRIB
  Gene Name: scribbled planar cell polarity protein
  ENSP ID: ENSP00000484041

SEQ ID NO: 76675 - protein, 650 aa, Homo sapiens; identical to SEQ ID NO: 76670
  Payload ID: 15311
  Gene Symbol: SCRIB
  Gene Name: scribbled planar cell polarity protein
  ENSP ID: ENSP00000487699
  MOD_RES (1)..(1): Any amino acid

SEQ ID NO: 76676 - protein, 140 aa, Homo sapiens; identical to SEQ ID NO: 76671
  Payload ID: 15311
  Gene Symbol: SCRIB
  Gene Name: scribbled planar cell polarity protein
  ENSP ID: ENSP00000487972

SEQ ID NO: 76677 - protein, 808 aa, Homo sapiens
  Payload ID: 15312
  Gene Symbol: SCYL1
  Gene Name: SCY1-like, kinase-like 1
  Uniprot ID: Q96KG9
  ENSP ID: ENSP00000270176
MWFFARDPVRDFPFELIPEPPEGGLPGPWALHRGRKKATGSPVSIFVYDVKPGAEEQTQVAKAAFKRFKTLRHPNILAYIDGLETEKCLHVVTEAVTPLGIYLKARVEAGGLKELEISWGLHQIVKALSFLVNDCSLIHNNVCMAAVFVDRAGEWKLGGLDYMYSAQGNGGGPPRKGIPELEQYDPPELADSSGRVVREKWSADMWRLGCLIWEVFNGPLPRAAALRNPGKIPKTLVPHYCELVGANPKVRPNPARFLQNCRAPGGFMSNRFVETNLFLEEIQIKEPAEKQKFFQELSKSLDAFPEDFCRHKVLPQLLTAFEFGNAGAVVLTPLFKVGKFLSAEEYQQKIIPVVVKMFSSTDRAMRIRLLQQMEQFIQYLDEPTVNTQIFPHVVHGFLDTNPAIREQTVKSMLLLAPKLNEANLNVELMKHFARLQAKDEQGPIRCNTTVCLGKIGSYLSASTRHRVLTSAFSRATRDPFAPSRVAGVLGFAATHNLYSMNDCAQKILPVLCGLTVDPEKSVRDQAFKAIRSFLSKLESVSEDPTQLEEVEKDVHAASSPGMGGAAASWAGWAVTGVSSLTSKLIRSHPTTAPTETNIPQRPTPEGVPAPAPTPVPATPTTSGHWETQEEDKDTAEDSSTADRWDDEDWGSLEQEAESVLAQQDDWSTGGQVSRASQVSNSDHKSSKSPESDWSSWEAEGSWEQGWQEPSSQEPPPDGTRLASEYNWGGPESSDKGDPFATLSARPSTQPRPDSWGEDNWEGLETDSRQVKAELARKKREERRREMEAKRAERKVAKGPMKLGARKLD

SEQ ID NO: 76678 - protein, 270 aa, Homo sapiens [sequence omitted]

SEQ ID NO: 76679 - protein, 791 aa, Homo sapiens
  Payload ID: 15312
  Gene Symbol: SCYL1
  Gene Name: SCY1-like, kinase-like 1
  Uniprot ID: Q96KG9
  ENSP ID: ENSP00000408192
MWFFARDPVRDFPFELIPEPPEGGLPGPWALHRGRKKATGSPVSIFVYDVKPGAEEQTQVAKAAFKRFKTLRHPNILAYIDGLETEKCLHVVTEAVTPLGIYLKARVEAGGLKELEISWGLHQIVKALSFLVNDCSLIHNNVCMAAVFVDRAGEWKLGGLDYMYSAQGNGGGPPRKGIPELEQYDPPELADSSGRVVREKWSADMWRLGCLIWEVFNGPLPRAAALRNPGKIPKTLVPHYCELVGANPKVRPNPARFLQNCRAPGGFMSNRFVETNLFLEEIQIKEPAEKQKFFQELSKSLDAFPEDFCRHKVLPQLLTAFEFGNAGAVVLTPLFKVGKFLSAEEYQQKIIPVVVKMFSSTDRAMRIRLLQQMEQFIQYLDEPTVNTQIFPHVVHGFLDTNPAIREQTVKSMLLLAPKLNEANLNVELMKHFARLQAKDEQGPIRCNTTVCLGKIGSYLSASTRHRVLTSAFSRATRDPFAPSRVAGVLGFAATHNLYSMNDCAQKILPVLCGLTVDPEKSVRDQAFKAIRSFLSKLESVSEDPTQLEEVEKDVHAASSPGMGGAAASWAGWAVTGVSSLTSKLIRSHPTTAPTETNIPQRPTPEGHWETQEEDKDTAEDSSTADRWDDEDWGSLEQEAESVLAQQDDWSTGGQVSRASQVSNSDHKSSKSPESDWSSWEAEGSWEQGWQEPSSQEPPPDGTRLASEYNWGGPESSDKGDPFATLSARPSTQPRPDSWGEDNWEGLETDSRQVKAELARKKREERRREMEAKRAERKVAKGPMKLGARKLD

SEQ ID NO: 76680 - protein, 780 aa, Homo sapiens
  Payload ID: 15312
  Gene Symbol: SCYL1
  Gene Name: SCY1-like, kinase-like 1
  ENSP ID: ENSP00000431635
MWFFARDPVRDFPFELIPEPPEGGLPGPWALHRGRKKATGSPVSIFVYDVKPGAEEQTQVAKAAFKRFKTLRHPNILAYIDGLETEKCLHVVTEAVTPLGIYLKARVEAGGLKELEISWGLHQIVKALSFLVNDCSLIHNNVCMAAVFVDRAGEWKLGGLDYMYSAQGNGGGPPRKGIPELEQYDPPELADSSGRVVREKWSADMWRLGCLIWEVFNGPLPRAAALRNPGKIPKTLVPHYCELVGANPKVRPNPARFLQNCRAPGGFMSNRFVETNLFLEEIQIKEPAEKQKFFQELSKSLDAFPEDFCRHKVLPQLLTAFEFGNAGAVVLTPLFKVGKFLSAEEYQQKIIPVVVKMFSSTDRAMRIRLLQQMEQFIQYLDEPTVNTQIFPHVVHGFLDTNPAIREQTVKSMLLLAPKLNEANLNVELMKHFARLQAKDEQGPIRCNTTVCLGKIGSYLSASTRHRVLTSAFSRATRDPFAPSRVAGVLGFAATHNLYSMNDCAQKILPVLCGLTVDPEKSVRDQAFKAIRSFLSKLESVSEDPTQLEEVEKDVHAASSPGMGGAAASWAGWAVTGVSSLTSKLIRSHPTTAPTETNIPQRPTPEGVPAPAPTPVPATPTTSGHWETQEEDKDTAEDSSTADRWDDEDWGSLEEAESVLAQQDDWSTGGQVSRASQVSNSDHKSSKSPESDWSSWEAEGSWEQGWQEPSSQEPPPDGTRLASEYNWGGPESSDKGDPFATLSARPSTQDRSRLSWPGRSARSGGGRWRPNAPRGRWPRAP

SEQ ID NO: 76681 - protein, 175 aa, Homo sapiens
  Payload ID: 15312
  Gene Symbol: SCYL1
  Gene Name: SCY1-like, kinase-like 1
  ENSP ID: ENSP00000431664
  MOD_RES (1)..(1): Any amino acid
XHVVHGFLDTNPAIREQTVKSMLLLAPKLNEANLNVELMKHFARLQAKDEQGPIRCNTTVCLGKIGSYLSASTRHRVLTSAFSRATRDPFAPSRVAGVLGFAATHNLYSMNDCAQKILPVLCGLTVDPEKSVRDQAFKAIRSFLSKLESVSEDPTQLEEVGCPCSLQPWHGRSRS

SEQ ID NO: 76682 - protein, 775 aa, Homo sapiens
  Payload ID: 15312
  Gene Symbol: SCYL1
  Gene Name: SCY1-like, kinase-like 1
  ENSP ID: ENSP00000432175
MWFFARDPVRDFPFELIPEPPEGGLPGPWALHRGRKKATGSPVSIFVYDVKPGAEEQTQVAKAAFKRFKTLRHPNILAYIDGLETEKCLHVVTEAVTPLGIYLKARVEAGGLKELEISWGLHQIVKALSFLVNDCSLIHNNVCMAAVFVDRAGEWKLGGLDYMYSAQGNGGGPPRKGIPELEQYDPPELADSSGRVVREKWSADMWRLGCLIWEVFNGPLPRAAALRNPGKIPKTLVPHYCELVGANPKVRPNPARFLQNCRAPGGFMSNRFVETNLFLEEIQIKEPAEKQKFFQELSKSLDAFPEDFCRHKVLPQLLTAFEFGNAGAVVLTPLFKVGKFLSAEEYQQKIIPVVVKMFSSTDRAMRIRLLQQMEQFIQYLDEPTVNTQIFPHVVHGFLDTNPAIREQTVKSMLLLAPKLNEANLNVELMKHFARLQAKDEQGPIRCNTTVCLGKIGSYLSASTRHRVLTSAFSRATRDPFAPSRVAGVLGFAATHNLYSMNDCAQKILPVLCGLTVDPEKSVRDQAFKAIRSFLSKLESVSEDPTQLEEVEKDVHAASSPGMGGAAASWAGWAVTGVSSLTSKLIRSHPTTAPTETNIPQRPTPEGVPAPAPTPVPATPTTSGHWETQEEDKDTAEDSSTADRWDDEDWGSLEQEAESVLAQQDDWSTGGQVSRASQVSNSDHKSSKSPESDWSSWEAEGSWEQGWQEPSSQEPPPDGTRLASEYNWGGPESSDKGDPFATLSARPSTQPRPDSWGEDNWEGLETDSRKCFPWVG

SEQ ID NO: 76683 - protein, 280 aa, Homo sapiens
  Payload ID: 15312
  Gene Symbol: SCYL1
  Gene Name: SCY1-like, kinase-like 1
  ENSP ID: ENSP00000433604
KAIRSFLSKLESVSEDPTQLEEVEKDVHAASSPGMGGAAASWAGWAVTGVSSLTSKLIRSHPTTAPTETNIPQRPTPEGVPAPAPTPVPATPTTSGHWETQEEDKDTAEDSSTADRWDDEDWGSLEEAESVLAQQDDWSTGGQVSRASQVSNSDHKSSKSPESDWSSWEAEGSWEQGWQEPSSQEPPPDGTRLASEYNWGGPESSDKGDPFATLSARPSTQPRPDSWGEDNWEGLETDSRQVKAELARKKREERRREMEAKRAERKVAKGPMKLGARKLD

SEQ ID NO: 76684 - protein, 665 aa, Homo sapiens
  Payload ID: 15312
  Gene Symbol: SCYL1
  Gene Name: SCY1-like, kinase-like 1
  ENSP ID: ENSP00000436993
MAAVFVDRAGEWKLGGLDYMYSAQGNGGGPPRKGIPELEQYDPPELADSSGRVVREKWSADMWRLGCLIWEVFNGPLPRAAALRNPGKIPKTLVPHYCELVGANPKVRPNPARFLQNCRAPGGFMSNRFVETNLFLEEIQIKEPAEKQKFFQELSKSLDAFPEDFCRHKVLPQLLTAFEFGNAGAVVLTPLFKVGKFLSAEEYQQKIIPVVVKMFSSTDRAMRIRLLQQMEQFIQYLDEPTVNTQIFPHVVHGFLDTNPAIREQTVKSMLLLAPKLNEANLNVELMKHFARLQAKDEQGPIRCNTTVCLGKIGSYLSASTRHRVLTSAFSRATRDPFAPSRVAGVLGFAATHNLYSMNDCAQKILPVLCGLTVDPEKSVRDQAFKAIRSFLSKLESVSEDPTQLEEVEKDVHAASSPGMGGAAASWAGWAVTGVSSLTSKLIRSHPTTAPTETNIPQRPTPEGVPAPAPTPVPATPTTSGHWETQEEDKDTAEDSSTADRWDDEDWGSLEQEAESVLAQQDDWSTGGQVSRASQVSNSDHKSSKSPESDWSSWEAEGSWEQGWQEPSSQEPPPDGTRLASEYNWGGPESSDKGDPFATLSARPSTQPRPDSWGEDNWEGLETDSRQVKAELARKKREERRREMEAKRAERKVAKGPMKLGARKLD

SEQ ID NO: 76685 - protein, 787 aa, Homo sapiens
  Payload ID: 15312
  Gene Symbol: SCYL1
  Gene Name: SCY1-like, kinase-like 1
  Uniprot ID: Q96KG9
  ENSP ID: ENSP00000437254
MWFFARDPVRDFPFELIPEPPEGGLPGPWALHRGRKKATGSPVSIFVYDVKPGAEEQTQVAKAAFKRFKTLRHPNILAYIDGLETEKCLHVVTEAVTPLGIYLKARVEAGGLKELEISWGLHQIVKALSFLVNDCSLIHNNVCMAAVFVDRAGEWKLGGLDYMYSAQGNGGGPPRKGIPELEQYDPPELADSSGRVVREKWSADMWRLGCLIWEVFNGPLPRAAALRNPGKIPKTLVPHYCELVGANPKVRPNPARFLQNCRAPGGFMSNRFVETNLFLEEIQIKEPAEKQKFFQELSKSLDAFPEDFCRHKVLPQLLTAFEFGNAGAVVLTPLFKVGKFLSAEEYQQKIIPVVVKMFSSTDRAMRIRLLQQMEQFIQYLDEPTVNTQIFPHVVHGFLDTNPAIREQTVKSMLLLAPKLNEANLNVELMKHFARLQAKDEQGPIRCNTTVCLGKIGSYLSASTRHRVLTSAFSRATRDPFAPSRVAGVLGFAATHNLYSMNDCAQKILPVLCGLTVDPEKSVRDQAFKAIRSFLSKLESVSEDPTQLEEVEKDVHAASSPGMGGAAASWAGWAVTGVSSLTSKLIRSHPTTAPTETNIPQRPTPEGVPAPAPTPVPATPTTSGHWETQEEDKDTAEDSSTADRWDDEDWGSLEQEAESVLAQQDDWSTGGQVSRASQSPTGAAGKLRAPGNRAGRSQAPRSHLLTVHGWPASITGVAQSPATRATPSLPCLHVPAPSRGQTLGVRTTGRASRLTVDRSRLSWPGRSARSGGGRWRPNAPRGRWPRAP

SEQ ID NO: 76686 - protein, 929 aa, Homo sapiens
  Payload ID: 15313
  Gene Symbol: SCYL2
  Gene Name: SCY1-like, kinase-like 2
  Uniprot ID: Q6P3W7
  ENSP ID: ENSP00000354061
MESMLNKLKSTVTKVTADVTSAVMGNPVTREFDVGRHIASGGNGLAWKIFNGTKKSTKQEVAVFVFDKKLIDKYQKFEKDQIIDSLKRGVQQLTRLRHPRLLTVQHPLEESRDCLAFCTEPVFASLANVLGNWENLPSPISPDIKDYKLYDVETKYGLLQVSEGLSFLHSSVKMVHGNITPENIILNKSGAWKIMGFDFCVSSTNPSEQEPKFPCKEWDPNLPSLCLPNPEYLAPEYILSVSCETASDMYSLGTVMYAVFNKGKPIFEVNKQDIYKSFSRQLDQLSRLGSSSLTNIPEEVREHVKLLLNVTPTVRPDADQMTKIPFFDDVGAVTLQYFDTLFQRDNLQKSQFFKGLPKVLPKLPKRVIVQRILPCLTSEFVNPDMVPFVLPNVLLIAEECTKEEYVKLILPELGPVFKQQEPIQILLIFLQKMDLLLTKTPPDEIKNSVLPMVYRALEAPSIQIQELCLNIIPTFANLIDYPSMKNALIPRIKNACLQTSSLAVRVNSLVCLGKILEYLDKWFVLDDILPFLQQIPSKEPAVLMGILGIYKCTFTHKKLGITKEQLAGKVLPHLIPLSIENNLNLNQFNSFISVIKEMLNRLESEHKTKLEQLHIMQEQQKSLDIGNQMNVSEEMKVTNIGNQQIDKVFNNIGADLLTGSESENKEDGLQNKHKRASLTLEEKQKLAKEQEQAQKLKSQQPLKPQVHTPVATVKQTKDLTDTLMDNMSSLTSLSVSTPKSSASSTFTSVPSMGIGMMFSTPTDNTKRNLTNGLNANMGFQTSGFNMPVNTNQNFYSSPSTVGVTKMTLGTPPTLPNFNALSVPPAGAKQTQQRPTDMSALNNLFGPQKPKVSMNQLSQQKPNQWLNQFVPPQGSPTMGSSVMGTQMNVIGQSAFGMQGNPFFNPQNFAQPPTTMTNSSSASNDLKDLFG

SEQ ID NO: 76687 - protein, 681 aa, Homo sapiens
  Payload ID: 15313
  Gene Symbol: SCYL2
  Gene Name: SCY1-like, kinase-like 2
  ENSP ID: ENSP00000448366
MESMLNKLKSTVTKVTADVTSAVMGNPVTREFDVGRHIASGGNGLAWKIFNGTKKSTKQEVAVFVFDKKLIDKYQKFEKDQIIDSLKRGVQQLTRLRHPRLLTVQHPLEESRDCLAFCTEPVFASLANVLGNWENLPSPISPDIKDYKLYDVETKYGLLQVSEGLSFLHSSVKMVHGNITPENIILNKSGAWKIMGFDFCVSSTNPSEQEPKFPCKEWDPNLPSLCLPNPEYLAPEYILSVSCETASDMYSLGTVMYAVFNKGKPIFEVNKQDIYKSFSRQLDQLSRLGSSSLTNIPEEVREHVKLLLNVTPTVRPDADQMTKIPFFDDVGAVTLQYFDTLFQRDNLQKSQFFKGLPKVLPKLPKRVIVQRILPCLTSEFVNPDMVPFVLPNVLLIAEECTKEEYVKLILPELGPVFKQQEPIQILLIFLQKMDLLLTKTPPDEIKNSVLPMVYRALEAPSIQIQELCLNIIPTFANLIDYPSMKNALIPRIKNACLQTSSLAVRVNSLVCLGKILEYLDKWFVLDDILPFLQQIPSKEPAVLMGILGIYKCTFTHKKLGITKEQLAGKVLPHLIPLSIENNLNLNQFNSFISVIKEMLNRLESEHKTKLEQLHIMQEQQKSLDIGNQMNVSEEMKVTNIGNQQIDKVFNNIGADLLTGSESENKEDGLQNKHKRASLTLE

SEQ ID NO: 76688 - protein, 60 aa, Homo sapiens
  Payload ID: 15313
  Gene Symbol: SCYL2
  Gene Name: SCY1-like, kinase-like 2
  ENSP ID: ENSP00000448400
  MOD_RES (1)..(1): Any amino acid
XRIKNACLQTSSLAVRVNSLVCLGKILEYLDKWFVLDDILPFLQQIPSKEPAVLMGILGN

SEQ ID NO: 76689 - protein, 114 aa, Homo sapiens
  Payload ID: 15313
  Gene Symbol: SCYL2
  Gene Name: SCY1-like, kinase-like 2
  ENSP ID: ENSP00000449567
RVIVQRILPCLTSEFVNPDMVPFVLPNVLLIAEECTKEEYVKLILPELGPVFKQQEPIQILLIFLQKMDLLLTKTPPDEIKNSVLPMVYRALEAPSIQIQICLLKGEGMLPLSK

SEQ ID NO: 76690 - protein, 76 aa, Homo sapiens
  Payload ID: 15313
  Gene Symbol: SCYL2
  Gene Name: SCY1-like, kinase-like 2
  ENSP ID: ENSP00000450294
MVHGNITPENIILNKSGAWKIMGFDFCVSSTNPSEQEPKFPCKEWDPNLPSLCLPNPEYLAPEYILSVSCETASDM

SEQ ID NO: 76691 - protein, 933 aa, Homo sapiens
  Payload ID: 15313
  Gene Symbol: SCYL2
  Gene Name: SCY1-like, kinase-like 2
  ENSP ID: ENSP00000489123
MESMLNKLKSTVTKVTADVTSAVMGNPVTREFDVGRHIASGGNGLAWKIFNGTKKSTKQEVAVFVFDKKLIDKYQKFEKDQIIDSLKRGVQQLTRLRHPRLLTVQHPLEESRDCLAFCTEPVFASLANVLGNWENLPSPISPDIKDYKLYDVETKYGLLQVSEGLSFLHSSVKMVHGNITPENIILNKSGAWKIMGFDFCVSSTNPSEQEPKFPCKEWDPNLPSLCLPNPEYLAPEYILSVSCETASDMYSLGTVMYAVFNKGKPIFEVNKQDIYKSFSRQLDQLSRLGSSSLTNIPEEVREHVKLLLNVTPTVRPDADQMTKIPFFDDVGAVTLQYFDTLFQRDNLQKSQFFKGLPKVLPKLPKRVIVQRILPCLTSEFVNPDMVPFVLPNVLLIAEECTKEEYVKLILPELGPVFKQQEPIQASNMILLIFLQKMDLLLTKTPPDEIKNSVLPMVYRALEAPSIQIQELCLNIIPTFANLIDYPSMKNALIPRIKNACLQTSSLAVRVNSLVCLGKILEYLDKWFVLDDILPFLQQIPSKEPAVLMGILGIYKCTFTHKKLGITKEQLAGKVLPHLIPLSIENNLNLNQFNSFISVIKEMLNRLESEHKTKLEQLHIMQEQQKSLDIGNQMNVSEEMKVTNIGNQQIDKVFNNIGADLLTGSESENKEDGLQNKHKRASLTLEEKQKLAKEQEQAQKLKSQQPLKPQVHTPVATVKQTKDLTDTLMDNMSSLTSLSVSTPKSSASSTFTSVPSMGIGMMFSTPTDNTKRNLTNGLNANMGFQTSGFNMPVNTNQNFYSSPSTVGVTKMTLGTPPTLPNFNALSVPPAGAKQTQQRPTDMSALNNLFGPQKPKVSMNQLSQQKPNQWLNQFVPPQGSPTMGSSVMGTQMNVIGQSAFGMQGNPFFNPQNFAQPPTTMTNSSSASNDLKDLFG

SEQ ID NO: 76692 - protein, 742 aa, Homo sapiens
  Payload ID: 15314
  Gene Symbol: SCYL3
  Gene Name: SCY1-like, kinase-like 3
  Uniprot ID: Q8IZE3
  ENSP ID: ENSP00000356744
MGSENSALKSYTLREPPFTLPSGLAVYPAVLQDGKFASVFVYKRENEDKVNKAAKHLKTLRHPCLLRFLSCTVEADGIHLVTERVQPLEVALETLSSAEVCAGIYDILLALIFLHDRGHLTHNNVCLSSVFVSEDGHWKLGGMETVCKVSQATPEFLRSIQSIRDPASIPPEEMSPEFTTLPECHGHARDAFSFGTLVESLLTILNEQVSADVLSSFQQTLHSTLLNPIPKCRPALCTLLSHDFFRNDFLEVVNFLKSLTLKSEEEKTEFFKFLLDRVSCLSEELIASRLVPLLLNQLVFAEPVAVKSFLPYLLGPKKDHAQGETPCLLSPALFQSRVIPVLLQLFEVHEEHVRMVLLSHIEAYVEHFTQEQLKKVILPQVLLGLRDTSDSIVAITLHSLAVLVSLLGPEVVVGGERTKIFKRTAPSFTKNTDLSLEDSPMCVVCSHHSQISPILENPFSSIFPKCFFSGSTPINSKKHIQRDYYNTLLQTGDPFSQPIKFPINGLSDVKNTSEDSENFPSSSKKSEEWPDWSEPEEPENQTVNIQIWPREPCDDVKSQCTTLDVEESSWDDCEPSSLDTKVNPGGGITATKPVTSGEQKPIPALLSLTEESMPWKSSLPQKISLVQRGDDADQIEPPKVSSQERPLKVPSELGLGEEFTIQVKKKPVKDPEMDWFADMIPEIKPSAAFLILPELRTEMVPKKDDVSPVMQFSSKFAAAEITEGEAEGWEEEGELNWEDNNW

SEQ ID NO: 76693 - protein, 688 aa, Homo sapiens
  Payload ID: 15314
  Gene Symbol: SCYL3
  Gene Name: SCY1-like, kinase-like 3
  Uniprot ID: Q8IZE3
  ENSP ID: ENSP00000356745
MGSENSALKSYTLREPPFTLPSGLAVYPAVLQDGKFASVFVYKRENEDKVNKAAKHLKTLRHPCLLRFLSCTVEADGIHLVTERVQPLEVALETLSSAEVCAGIYDILLALIFLHDRGHLTHNNVCLSSVFVSEDGHWKLGGMETVCKVSQATPEFLRSIQSIRDPASIPPEEMSPEFTTLPECHGHARDAFSFGTLVESLLTILNEQVSADVLSSFQQTLHSTLLNPIPKCRPALCTLLSHDFFRNDFLEVVNFLKSLTLKSEEEKTEFFKFLLDRVSCLSEELIASRLVPLLLNQLVFAEPVAVKSFLPYLLGPKKDHAQGETPCLLSPALFQSRVIPVLLQLFEVHEEHVRMVLLSHIEAYVEHFTQEQLKKVILPQVLLGLRDTSDSIVAITLHSLAVLVSLLGPEVVVGGERTKIFKRTAPSFTKNTDLSLEGDPFSQPIKFPINGLSDVKNTSEDSENFPSSSKKSEEWPDWSEPEEPENQTVNIQIWPREPCDDVKSQCTTLDVEESSWDDCEPSSLDTKVNPGGGITATKPVTSGEQKPIPALLSLTEESMPWKSSLPQKISLVQRGDDADQIEPPKVSSQERPLKVPSELGLGEEFTIQVKKKPVKDPEMDWFADMIPEIKPSAAFLILPELRTEMVPKKDDVSPVMQFSSKFAAAEITEGEAEGWEEEGELNWEDNNW

SEQ ID NO: 76694 - protein, 742 aa, Homo sapiens; identical to SEQ ID NO: 76692
  Payload ID: 15314
  Gene Symbol: SCYL3
  Gene Name: SCY1-like, kinase-like 3
  Uniprot ID: Q8IZE3
  ENSP ID: ENSP00000356746

SEQ ID NO: 76695 - protein, 588 aa, Homo sapiens
  Payload ID: 15314
  Gene Symbol: SCYL3
  Gene Name: SCY1-like, kinase-like 3
  ENSP ID: ENSP00000407993
MGSENSALKSYTLREPPFTLPSGLAVYPAVLQDGKFASVFVYKRENEDKVNKAAKHLKTLRHPCLLRFLSCTVEADGIHLVTERVQPLEVALETLSSAEVCAGIYDILLALIFLHDRGHLTHNNVCLSSVFVSEDGHWKLGGMETVCKVSQATPEFLRSIQSIRDPASIPPEEMSPEFTTLPECHGHARDAFSFGTLVESLLTILNEQVSADVLSSFQQTLHSTLLNPIPKCRPALCTLLSHDFFRNDFLEVVNFLKSLTLKSEEEKTEFFKFLLDRVSCLSEELIASRLVPLLLNQLVFAEPVAVKSFLPYLLGPKKDHAQGETPCLLSPALFQSRVIPVLLQLFEVHEEHVRMVLLSHIEAYVEHFTQEQLKKVILPQVLLGLRDTSDSIVAITLHSLAVLVSLLGPEVVVGGERTKIFKRTAPSFTKNTDLSLEGDPFSQPIKFPINGLSDVKNTSEDSENFPSSSKKSEEWPDWSEPEEPENQTVNIQIWPREPCDDVKSQCTTLDVEESSWDDCEPSSLDTKVNPGGGITATKPVTSGEQKPIPALLSLTEESMPWKSSLPQKISLVQRGDDADQIEPPKVSS

SEQ ID NO: 76696 - protein, 687 aa, Homo sapiens
  Payload ID: 15315
  Gene Symbol: SDAD1
  Gene Name: SDA1 domain containing 1
  Uniprot ID: Q9NVU7
  ENSP ID: ENSP00000348596
MSNRNNNKLPSNLPQLQNLIKRDPPAYIEEFLQQYNHYKSNVEIFKLQPNKPSKELAELVMFMAQISHCYPEYLSNFPQEVKDLLSCNHTVLDPDLRMTFCKALILLRNKNLINPSSLLELFFELFRCHDKLLRKTLYTHIVTDIKNINAKHKNNKVNVVLQNFMYTMLRDSNATAAKMSLDVMIELYRRNIWNDAKTVNVITTACFSKVTKILVAALTFFLGKDEDEKQDSDSESEDDGPTARDLLVQYATGKKSSKNKKKLEKAMKVLKKQKKKKKPEVFNFSAIHLIHDPQDFAEKLLKQLECCKERFEVKMMLMNLISRLVGIHELFLFNFYPFLQRFLQPHQREVTKILLFAAQASHHLVPPEIIQSLLMTVANNFVTDKNSGEVMTVGINAIKEITARCPLAMTEELLQDLAQYKTHKDKNVMMSARTLIHLFRTLNPQMLQKKFRGKPTEASIEARVQEYGELDAKDYIPGAEVLEVEKEENAENDEDGWESTSLSEEEDADGEWIDVQHSSDEEQQEISKKLNSMPMEERKAKAAAISTSRVLTQEDFQKIRMAQMRKELDAAPGKSQKRKYIEIDSDEEPRGELLSLRDIERLHKKPKSDKETRLATAMAGKTDRKEFVRKKTKTNPFSSSTNKEKKKQKNFMMMRYSQNVRSKNKRSFREKQLALRDALLKKRKRMK

SEQ ID NO: 76697 - protein, 72 aa, Homo sapiens
  Payload ID: 15315
  Gene Symbol: SDAD1
  Gene Name: SDA1 domain containing 1
  ENSP ID: ENSP00000379060
MSNRNNNKLPSNLPQLQNLIKRDPPAYIEEFLQQYNHYKSNVEIFKLQPNKPSKELAELVMFMAQNILNVCI

SEQ ID NO: 76698 - protein, 650 aa, Homo sapiens
  Payload ID: 15315
  Gene Symbol: SDAD1
  Gene Name: SDA1 domain containing 1
  ENSP ID: ENSP00000379061
MSNRNNNKLPSNLPQLQNLIKRDPPAYIEEFLQQYNHYKSNVEIFKLQPNKPSKELAELVMFMAQISHCYPEYLSNFPQEVKDLLSCNHTVLDPDLRMTLYTHIVTDIKNINAKHKNNKVNVVLQNFMYTMLRDSNATAAKMSLDVMIELYRRNIWNDAKTVNVITTACFSKVTKILVAALTFFLGKDEDEKQDSDSESEDDGPTARDLLVQYATGKKSSKNKKKLEKAMKVLKKQKKKKKPEVFNFSAIHLIHDPQDFAEKLLKQLECCKERFEVKMMLMNLISRLVGIHELFLFNFYPFLQRFLQPHQREVTKILLFAAQASHHLVPPEIIQSLLMTVANNFVTDKNSGEVMTVGINAIKEITARCPLAMTEELLQDLAQYKTHKDKNVMMSARTLIHLFRTLNPQMLQKKFRGKPTEASIEARVQEYGELDAKDYIPGAEVLEVEKEENAENDEDGWESTSLSEEEDADGEWIDVQHSSDEEQQEISKKLNSMPMEERKAKAAAISTSRVLTQEDFQKIRMAQMRKELDAAPGKSQKRKYIEIDSDEEPRGELLSLRDIERLHKKPKSDKETRLATAMAGKTDRKEFVRKKTKTNPFSSSTNKEKKKQKNFMMMRYSQNVRSKNKRSFREKQLALRDALLKKRKRMK

SEQ ID NO: 76699 - protein, 88 aa, Homo sapiens
  Payload ID: 15315
  Gene Symbol: SDAD1
  Gene Name: SDA1 domain containing 1
  ENSP ID: ENSP00000422368
MSNRNNNKLPSNLPQLQNLIKRDPPAYIEEFLQQYNHYKSNVEIFKLQPNKPSKELAELVMFMAQERKRATSEEPLLCYRLVTATQST

SEQ ID NO: 76700 - protein, 47 aa, Homo sapiens
  Payload ID: 15315
  Gene Symbol: SDAD1
  Gene Name: SDA1 domain containing 1
  ENSP ID: ENSP00000427443
MVETPFLQQYNHYKSNVEIFKLQPNKPSKELAELVMFMAQNILNVCI

SEQ ID NO: 76701 - protein, 451 aa, Homo sapiens
  Payload ID: 15316
  Gene Symbol: SDE2
  Gene Name: SDE2 telomere maintenance homolog (S. pombe)
  Uniprot ID: Q6IQ49
  ENSP ID: ENSP00000272091
MAEAAALVWIRGPGFGCKAVRCASGRCTVRDFIHRHCQDQNVPVENFFVKCNGALINTSDTVQHGAVYSLEPRLCGGKGGFGSMLRALGAQIEKTTNREACRDLSGRRLRDVNHEKAMAEWVKQQAEREAEKEQKRLERLQRKLVEPKHCFTSPDYQQQCHEMAERLEDSVLKGMQAASSKMVSAEISENRKRQWPTKSQTDRGASAGKRRCFWLGMEGLETAEGSNSESSDDDSEEAPSTSGMGFHAPKIGSNGVEMAAKFPSGSQRARVVNTDHGSPEQLQIPVTDSGRHILEDSCAELGESKEHMESRMVTETEETQEKKAESKEPIEEEPTGAGLNKDKETEERTDGERVAEVAPEERENVAVAKLQESQPGNAVIDKETIDLLAFTSVAELELLGLEKLKCELMALGLKCGGTLQERAARLFSVRGLAKEQIDPALFAKPLKGKKK

SEQ ID NO: 76702 - protein, 328 aa, Homo sapiens
  Payload ID: 15317
  Gene Symbol: SUDS3
  Gene Name: SDS3 homolog, SIN3A corepressor complex component
  Uniprot ID: Q9H7L9
  ENSP ID: ENSP00000443988
MSAAGLLAPAPAQAGAPPAPEYYPEEDEELESAEDDERSCRGRESDEDTEDASETDLAKHDEEDYVEMKEQMYQDKLASLKRQLQQLQEGTLQEYQKRMKKLDQQYKERIRNAELFLQLETEQVERNYIKEKKAAVKEFEDKKVELKENLIAELEEKKKMIENEKLTMELTGDSMEVKPIMTRKLRRRPNDPVPIPDKRRKPAPAQLNYLLTDEQIMEDLRTLNKLKSPKRPASPSSPEHLPATPAESPAQRFEARIEDGKLYYDKRWYHKSQAIYLESKDNQKLSCVISSVGANEIWVRKTSDSTKMRIYLGQLQRGLFVIRRRSAA

SEQ ID NO: 76703 - protein, 216 aa, Homo sapiens
  Payload ID: 15318
  Gene Symbol: SEBOX
  Gene Name: SEBOX homeobox
  Uniprot ID: Q9HB31
  ENSP ID: ENSP00000395142
MGGSGVGTAWHGPLARPSGTLPFASSMPSPVDASSADGGSGLGSHRRKRTTFSKGQLLELERAFAAWPYPNISTHEHLAWVTCLPEAKVQVWFQKRWAKIIKNRKSGILSPGSECPQSSCSLPDTLQQPWDPQMPGQPPPSSGTPQRTSVCRHSSCPAPGLSPRQGWEGAKAVAPWGSAGASEVHPSLERATPQTSLGSLSDLIYALAIVVNVDHS

SEQ ID NO: 76704 - protein, 190 aa, Homo sapiens
  Payload ID: 15318
  Gene Symbol: SEBOX
  Gene Name: SEBOX homeobox
  ENSP ID: ENSP00000444503
MPSPVDASSADGGSGLGSHRRKRTTFSKGQLLELERAFAAWPYPNISTHEHLAWVTCLPEAKVQVWFQKRWAKIIKNRKSGILSPGSECPQSSCSLPDTLQQPWDPQMPGQPPPSSGTPQRTSVCRHSSCPAPGLSPRQGWEGAKAVAPWGSAGASEVHPSLERATPQTSLGSLSDLIYALAIVVNVDHS

SEQ ID NO: 76705 - protein, 163 aa, Homo sapiens
  Payload ID: 15319
  Gene Symbol: SCFD1
  Gene Name: sec1 family domain containing 1
  ENSP ID: ENSP00000309417
MAAAAAATAAAAASIRERQTVALKRMLNFNVPHIKNSTGEPVWKVLIYDRFGQDIISPLLSVKELRDMGITLHLLLHSDRDPIPDVPAVYFVMPTEENIDRMCQDLRNQLYESYYLNFISAISRSKLEDIANAALAASAVTQVAKPLTGQISQTRKWKLLWTL

SEQ ID NO: 76706 - protein, 550 aa, Homo sapiens
  Payload ID: 15319
  Gene Symbol: SCFD1
  Gene Name: sec1 family domain containing 1
  Uniprot ID: Q8WVM8
  ENSP ID: ENSP00000379870
MPTEENIDRMCQDLRNQLYESYYLNFISAISRSKLEDIANAALAASAVTQVAKVFDQYLNFITLEDDMFVLCNQNKELVSYRAINRPDITDTEMETVMDTIVDSLFCFFVTLGAVPIIRCSRGTAAEMVAVKLDKKLRENLRDARNSLFTGDTLGAGQFSFQRPLLVLVDRNIDLATPLHHTWTYQALVHDVLDFHLNRVNLEESSGVENSPAGARPKRKNKKSYDLTPVDKFWQKHKGSPFPEVAESVQQELESYRAQEDEVKRLKSIMGLEGEDEGAISMLSDNTAKLTSAVSSLPELLEKKRLIDLHTNVATAVLEHIKARKLDVYFEYEEKIMSKTTLDKSLLDIISDPDAGTPEDKMRLFLIYYISTQQAPSEADLEQYKKALTDAGCNLNPLQYIKQWKAFTKMASAPASYGSTTTKPMGLLSRVMNTGSQFVMEGVKNLVLKQQNLPVTRILDNLMEMKSNPETDDYRYFDPKMLRGNDSSVPRNKNPFQEAIVFVVGGGNYIEYQNLVDYIKGKQGKHILYGCSELFNATQFIKQLSQLGQK

SEQ ID NO: 76707 - protein, 642 aa, Homo sapiens
  Payload ID: 15319
  Gene Symbol: SCFD1
  Gene Name: sec1 family domain containing 1
  Uniprot ID: Q8WVM8
  ENSP ID: ENSP00000390783
MAAAAAATAAAAASIRERQTVALKRMLNFNVPHIKNSTGEPVWKVLIYDRFGQDIISPLLSVKELRDMGITLHLLLHSDRDPIPDVPAVYFVMPTEENIDRMCQDLRNQLYESYYLNFISAISRSKLEDIANAALAASAVTQVAKVFDQYLNFITLEDDMFVLCNQNKELVSYRAINRPDITDTEMETVMDTIVDSLFCFFVTLGAVPIIRCSRGTAAEMVAVKLDKKLRENLRDARNSLFTGDTLGAGQFSFQRPLLVLVDRNIDLATPLHHTWTYQALVHDVLDFHLNRVNLEESSGVENSPAGARPKRKNKKSYDLTPVDKFWQKHKGSPFPEVAESVQQELESYRAQEDEVKRLKSIMGLEGEDEGAISMLSDNTAKLTSAVSSLPELLEKKRLIDLHTNVATAVLEHIKARKLDVYFEYEEKIMSKTTLDKSLLDIISDPDAGTPEDKMRLFLIYYISTQQAPSEADLEQYKKALTDAGCNLNPLQYIKQWKAFTKMASAPASYGSTTTKPMGLLSRVMNTGSQFVMEGVKNLVLKQQNLPVTRILDNLMEMKSNPETDDYRYFDPKMLRGNDSSVPRNKNPFQEAIVFVVGGGNYIEYQNLVDYIKGKQGKHILYGCSELFNATQFIKQLSQLGQK

SEQ ID NO: 76708 - protein, 575 aa, Homo sapiens
  Payload ID: 15319
  Gene Symbol: SCFD1
  Gene Name: sec1 family domain containing 1
  Uniprot ID: Q8WVM8
  ENSP ID: ENSP00000443010
MGITLHLLLHSDRDPIPDVPAVYFVMPTEENIDRMCQDLRNQLYESYYLNFISAISRSKLEDIANAALAASAVTQVAKVFDQYLNFITLEDDMFVLCNQNKELVSYRAINRPDITDTEMETVMDTIVDSLFCFFVTLGAVPIIRCSRGTAAEMVAVKLDKKLRENLRDARNSLFTGDTLGAGQFSFQRPLLVLVDRNIDLATPLHHTWTYQALVHDVLDFHLNRVNLEESSGVENSPAGARPKRKNKKSYDLTPVDKFWQKHKGSPFPEVAESVQQELESYRAQEDEVKRLKSIMGLEGEDEGAISMLSDNTAKLTSAVSSLPELLEKKRLIDLHTNVATAVLEHIKARKLDVYFEYEEKIMSKTTLDKSLLDIISDPDAGTPEDKMRLFLIYYISTQQAPSEADLEQYKKALTDAGCNLNPLQYIKQWKAFTKMASAPASYGSTTTKPMGLLSRVMNTGSQFVMEGVKNLVLKQQNLPVTRILDNLMEMKSNPETDDYRYFDPKMLRGNDSSVPRNKNPFQEAIVFVVGGGNYIEYQNLVDYIKGKQGKHILYGCSELFNATQFIKQLSQLGQK

SEQ ID NO: 76709 - protein, 35 aa, Homo sapiens
  Payload ID: 15319
  Gene Symbol: SCFD1
  Gene Name: sec1 family domain containing 1
  ENSP ID: ENSP00000450546
AFTKMASAPASYGSTTTKPMGCDTHGSRNSQDPSV

SEQ ID NO: 76710 - protein, 198 aa, Homo sapiens
  Payload ID: 15319
  Gene Symbol: SCFD1
  Gene Name: sec1 family domain containing 1
  ENSP ID: ENSP00000450755
MLNFNVPHIKNSTGEPVWKVLIYDRFGQDIISPLLSVKELRDMGITLHLLLHSDRDPIPDVPAVYFVMPTEENIDRMCQDLRNQLYESYYLNFISAISRSKLEDIANAALAASAVTQVAKVFDQYLNFITLEDDMFVLCNQNKELVSYRAINRPDITDTEMETVMDTIVDSLFCFFVTLGAVPIIRCSRGTAAEMVAV

SEQ ID NO: 76711 - protein, 92 aa, Homo sapiens
  Payload ID: 15319
  Gene Symbol: SCFD1
  Gene Name: sec1 family domain containing 1
  ENSP ID: ENSP00000451064
MLNFNVPHIKNSTGEPVWKVLIYDRFGQDIISPLLSVKELRDMGITLHLLLHSDRDPIPDVPAVYFVMPTEENIDRMCQVESVTRVAAKVNI

SEQ ID NO: 76712 - protein, 48 aa, Homo sapiens
  Payload ID: 15319
  Gene Symbol: SCFD1
  Gene Name: sec1 family domain containing 1
  ENSP ID: ENSP00000451298
MAAAAAATAAAAASIRERQTVALKRMLNFNVPHIKNSTGEPVWKAFTL

SEQ ID NO: 76713 - protein, 75 aa, Homo sapiens
  Payload ID: 15319
  Gene Symbol: SCFD1
  Gene Name: sec1 family domain containing 1
  ENSP ID: ENSP00000451811
MAAAAAATAAAAASIRERQTVALKRMLNFNVPHIKNSTGEPVWKVLIYDRFGQDIISPLLSVKELRDMGITLHLH

SEQ ID NO: 76714 - protein, 102 aa, Homo sapiens
  Payload ID: 15319
  Gene Symbol: SCFD1
  Gene Name: sec1 family domain containing 1
  ENSP ID: ENSP00000452046
  MOD_RES (1)..(1): Any amino acid
XALKRMLNFNVPHIKNSTGEPVWKVLIYDRFGQDIISPLLSVKELRDMGITLHLLLHSDRDPIPDVPAVYFVMPTEENIDRMCQPLTGQISQTRKWKLLWTL

SEQ ID NO: 76715 - protein, 55 aa, Homo sapiens
  Payload ID: 15319
  Gene Symbol: SCFD1
  Gene Name: sec1 family domain containing 1
  ENSP ID: ENSP00000452178
MGITLHLLLHSDRDPIPDVPAVYFVMPTEENIDRMCQASNLCSHQQEEGHGLCQP

SEQ ID NO: 76716 - protein, 84 aa, Homo sapiens
  Payload ID: 15319
  Gene Symbol: SCFD1
  Gene Name: sec1 family domain containing 1
  ENSP ID: ENSP00000452308
MFVLCNQNKELVSYRAINRPDITDTEMETVMDTIVDSLFCFFVTLGAVPIIRCSRGTAAEMVAVKLDKKLRENLRDARNSLFTG

SEQ ID NO: 76717 - protein, 121 aa, Homo sapiens
  Payload ID: 15319
  Gene Symbol: SCFD1
  Gene Name: sec1 family domain containing 1
  ENSP ID: ENSP00000452323
MAAAAAATAAAAASIRERQTVALKRMLNFNVPHIKNSTGEPVWKVLIYDRFGQDIISPLLSVKELRDMGITLHLFLTNISILLLWKMICLYYVIKIRSLFHIVPLTGQISQTRKWKLLWTL

SEQ ID NO: 76718 - protein, 144 aa, Homo sapiens
  Payload ID: 15319
  Gene Symbol: SCFD1
  Gene Name: sec1 family domain containing 1
  ENSP ID: ENSP00000452448
VFDQYLNFITLEDDMFVLCNQNKELVSYRAINRPDITDTEMETVMDTIVDSLFCFFVTLGAVPIIRCSRGTAAEMVAVKLDKKLRENLRDARNSLFTGDTLGAGQFSFQRPLLVLVDRNIDLATPLHHTWTYQALVHDVLERWI

SEQ ID NO: 76719 - protein, 639 aa, Homo sapiens
  Payload ID: 15320
  Gene Symbol: SCFD2
  Gene Name: sec1 family domain containing 2
  Uniprot ID: Q8WU76
  ENSP ID: ENSP00000373592
MSASGVLSFTQQGWEQVLAKVKRAVVYLDAACAESLHWGCGSTRLLEAVGGPDCHLREFEPDAIGGGAKQPKAVFVLSCLLKGRTVEILRDIICRSHFQYCVVVTTVSHAVHLTANHVPAAAAAEMEGQQPVFEQLEEKLCEWMGNMNYTAEVFHVPLLLAPVAPHFALTPAFASLFPLLPQDVHLLNSARPDKRKLGSLGDVDSTTLTPELLLQIRCLVSGLSSLCEHLGVREECFAVGSLSQVIAADLANYAPAKNRKKTAAGRASVVFVDRTLDLTGAVGHHGDNLVEKIISALPQLPGHTNDVMVNMIALTALHTEEENYNVVAPGCLSQSSDTTAKALWEALLNTKHKEAVMEVRRHLVEAASRENLPIKMSMGRVTPGQLMSYIQLFKNNLKALMNHCGLLQLGLATAQTLKHPQTAKWDNFLAFERLLLQSIGESAMSVVLNQLLPMIKPVTQRTNEDYSPEELLILLIYIYSVTGELTVDKDLCEAEEKVKKALAQVFCEESGLSPLLQKITDWDSSINLTFHKSKIAVDELFTSLRDIAGARSLLKQFKSVYVPGNHTHQVSRPHPSDYPLLILFVVGGVTVSEVKMVKDLVASLKPGTQVIVLSTRLLKPLNIPELLFATDRLHPDLGF

SEQ ID NO: 76720 - protein, 684 aa, Homo sapiens
  Payload ID: 15320
  Gene Symbol: SCFD2
  Gene Name: sec1 family domain containing 2
  Uniprot ID: Q8WU76
  ENSP ID: ENSP00000384182
MSASGVLSFTQQGWEQVLAKVKRAVVYLDAACAESLHWGCGSTRLLEAVGGPDCHLREFEPDAIGGGAKQPKAVFVLSCLLKGRTVEILRDIICRSHFQYCVVVTTVSHAVHLTANHVPAAAAAEMEGQQPVFEQLEEKLCEWMGNMNYTAEVFHVPLLLAPVAPHFALTPAFASLFPLLPQDVHLLNSARPDKRKLGSLGDVDSTTLTPELLLQIRCLVSGLSSLCEHLGVREECFAVGSLSQVIAADLANYAPAKNRKKTAAGRASVVFVDRTLDLTGAVGHHGDNLVEKIISALPQLPGHTNDVMVNMIALTALHTEEENYNVVAPGCLSQSSDTTAKALWEALLNTKHKEAVMEVRRHLVEAASRENLPIKMSMGRVTPGQLMSYIQLFKNNLKALMNHCGLLQLGLATAQTLKHPQTAKWDNFLAFERLLLQSIGESAMSVVLNQLLPMIKPVTQRTNEDYSPEELLILLIYIYSVTGELTVDKDLCEAEEKVKKALAQVFCEESGLSPLLQKITDWDSSINLTFHKSKIAVDELFTSLRDIAGARSLLKQFKSVYVPGNHTHQASYKPLLKQVVEEIFHPERPDSVDIEHMSSGLTDLLKTGFSMFMKVSRPHPSDYPLLILFVVGGVTVSEVKMVKDLVASLKPGTQVIVLSTRLLKPLNIPELLFATDRLHPDLGF

SEQ ID NO: 76721 - protein, 28 aa, Homo sapiens
  Payload ID: 15320
  Gene Symbol: SCFD2
  Gene Name: sec1 family domain containing 2
  ENSP ID: ENSP00000427202
MVNMIALTALHTEEENYNVVAPGCLSQS

SEQ ID NO: 76722 - protein, 440 aa, Homo sapiens
  Payload ID: 15320
  Gene Symbol: SCFD2
  Gene Name: sec1 family domain containing 2
  ENSP ID: ENSP00000478569
MSASGVLSFTQQGWEQVLAKVKRAVVYLDAACAESLHWGCGSTRLLEAVGGPDCHLREFEPDAIGGGAKQPKAVFVLSCLLKGRTVEILRDIICRSHFQYCVVVTTVSHAVHLTANHVPAAAAAEMEGQQPVFEQLEEKLCEWMGNMNYTAEVFHVPLLLAPVAPHFALTPAFASLFPLLPQDVHLLNSARPDKRKLGSLGDVDSTTLTPELLLQIRCLVSGLSSLCEHLGVREECFAVGSLSQVIAADLANYAPAKNRKKTAAGRASVVFVDRTLDLTGAVGHHGDNLVEKIISALPQLPGHTNDVMVNMIALTALHTEEENYNVVAPGCLSQSSDTTAKALWEALLNTKHKEAVMEVRRHLVEAASRENLPIKMSMGRVTPGQLMSYIQLFKNNLKALMNHCGLLQLGLATAQTLKHPQTAKWDNFLAFERLLLQSIG

SEQ ID NO: 76723 - protein, 179 aa, Homo sapiens
  Payload ID: 15321
  Gene Symbol: SEC11A
  Gene Name: SEC11 homolog A, signal peptidase complex subunit
  Uniprot ID: P67812
  ENSP ID: ENSP00000268220
MLSLDFLDDVRRMNKRQLYYQVLNFGMIVSSALMIWKGLMVITGSESPIVVVLSGSMEPAFHRGDLLFLTNRVEDPIRVGEIVVFRIEGREIPIVHRVLKIHEKQNGHIKFLTKGDNNAVDDRGLYKQGQHWLEKKDVVGRARGFVPYIGIVTILMNDYPKFKYAVLFLLGLFVLVHRE

SEQ ID NO: 76724 - protein, 153 aa, Homo sapiens
  Payload ID: 15321
  Gene Symbol: SEC11A
  Gene Name: SEC11 homolog A, signal peptidase complex subunit
  Uniprot ID: P67812
  ENSP ID: ENSP00000413121
MIVSSALMIWKGLMVITGSESPIVVVLSGSMEPAFHRGDLLFLTNRVEDPIRVGEIVVFRIEGREIPIVHRVLKIHEKQNGHIKFLTKGDNNAVDDRGLYKQGQHWLEKKDVVGRARGFVPYIGIVTILMNDYPKFKYAVLFLLGLFVLVHRE

SEQ ID NO: 76725 - protein, 164 aa, Homo sapiens
  Payload ID: 15321
  Gene Symbol: SEC11A
  Gene Name: SEC11 homolog A, signal peptidase complex subunit
  Uniprot ID: P67812
  ENSP ID: ENSP00000452684
MLSLDFLDDVRRMNKRQLYYQVLNFGMIVSSALMIWKGLMVITGSESPIVVVLSGSMEPAFHRGDLLFLTNRVEDPIRVGEIVVFRIEGREIPIVHRVLKIHEKQNGHIKFLTKGDNNAVDDRGLYKQGQHWLEKKDVVGRARGFYQENSSVEDRNYLFLILEL

SEQ ID NO: 76726 - protein, 185 aa, Homo sapiens
  Payload ID: 15321
  Gene Symbol: SEC11A
  Gene Name: SEC11 homolog A, signal peptidase complex subunit
  Uniprot ID: P67812
  ENSP ID: ENSP00000452697
MLSLDFLDDVRRMNKRQLYYQVLNFGMIVSSALMIWKGLMVITGSESPIVVVLSGSMEPAFHRGDLLFLTNRVEDPIRVGEIVVFRIEGREIPIVHRVLKIHEKQNGHIKFLTKGDNNAVDDRGLYKQGQHWLEKKDVVGRARGMQFSFCWVYSCWFIVSKKPALLFLGRCHSFRYWMFGVDTGL

SEQ ID NO: 76727 - protein, 129 aa, Homo sapiens
  Payload ID: 15321
  Gene Symbol: SEC11A
  Gene Name: SEC11 homolog A, signal peptidase complex subunit
  ENSP ID: ENSP00000452932
MLSLDFLDDVRRMNKRQLYYQVLNFGMIVSSALMIWKGLMVITGSESPIVVVLRQNGHIKFLTKGDNNAVDDRGLYKQGQHWLEKKDVVGRARGFVPYIGIVTILMNDYPKFKYAVLFLLGLFVLVHRE

SEQ ID NO: 76728 - protein, 135 aa, Homo sapiens
  Payload ID: 15321
  Gene Symbol: SEC11A
  Gene Name: SEC11 homolog A, signal peptidase complex subunit
  ENSP ID: ENSP00000453930
DFLDDVRRMNKRQLYYQVLNFGMIVSSALMIWKGLMVITGSESPIVVVLSGSMEPAFHRGDLLFLTNRVEDPIRVGEIVVFRIEGREIPIVHRVLKIHEKFVPYIGIVTILMNDYPKFKYAVLFLLGLFVLVHRE

SEQ ID NO: 76729 - protein, 163 aa, Homo sapiens
  Payload ID: 15321
  Gene Symbol: SEC11A
  Gene Name: SEC11 homolog A, signal peptidase complex subunit
  ENSP ID: ENSP00000453997
MLSLDFLDDVRRMNKRQLYYQVLNFGMIVSSALMIWKGLMVITGSESPIVVVLSGSMEPAFHRGDLLFLTNRVEDPIRVGEIVVFRIEGREIPIVHRVLKIHEKQNGHIKFLTKGDNNAVDDRGLYKQGQHWLEKKDVVGRARGSSVLLRNTSPHLPQFPRCC

SEQ ID NO: 76730 - protein, 106 aa, Homo sapiens
  Payload ID: 15321
  Gene Symbol: SEC11A
  Gene Name: SEC11 homolog A, signal peptidase complex subunit
  ENSP ID: ENSP00000454193
MIVSSALMIWKGLMVITGSESPIVVVLSGSMEPAFHRGDLLFLTNRVEDPIRVGEIVVFRIEGREIPIVHRVLKIHEKQNGHIKFLTKGDNNAVDDRGLYKQGQHW

SEQ ID NO: 76731 - protein, 99 aa, Homo sapiens
  Payload ID: 15322
  Gene Symbol: SEC11C
  Gene Name: SEC11 homolog C, signal peptidase complex subunit
  ENSP ID: ENSP00000299714
MVRAGAVGAHLPASGLDIFGDLKKMNKRQLYYQVLNFAMIVSSALMIWKGLIVLTGSESPIVVVLSGSMEPAFHRGDLLFLTNFREDPIRAEIMETSNF

SEQ ID NO: 76732 - protein, 161 aa, Homo sapiens
  Payload ID: 15322
  Gene Symbol: SEC11C
  Gene Name: SEC11 homolog C, signal peptidase complex subunit
  ENSP ID: ENSP00000465281
MVRAGAVGAHLPASGLDIFGDLKKMNKRQLYYQVLNFAMIVSSALMIWKGLIVLTGSESPIVVVLSGSMEPAFHRGDLLFLTNFREDPIRAGEIVVFKVEGRDIPIVHRVIKVHEKDNGDIKFLTKGDNNEVDDRGLYKEGQNWLEKKDVVGRARGMLFWL

SEQ ID NO: 76733 - protein, 192 aa, Homo sapiens
  Payload ID: 15322
  Gene Symbol: SEC11C
  Gene Name: SEC11 homolog C, signal peptidase complex subunit
  Uniprot ID: Q9BY50
  ENSP ID: ENSP00000468633
MVRAGAVGAHLPASGLDIFGDLKKMNKRQLYYQVLNFAMIVSSALMIWKGLIVLTGSESPIVVVLSGSMEPAFHRGDLLFLTNFREDPIRAGEIVVFKVEGRDIPIVHRVIKVHEKDNGDIKFLTKGDNNEVDDRGLYKEGQNWLEKKDVVGRARGFLPYVGMVTIIMNDYPKFKYALLAVMGAYVLLKRES

SEQ ID NO: 76734 - protein, 156 aa, Homo sapiens
  Payload ID: 15322
  Gene Symbol: SEC11C
  Gene Name: SEC11 homolog C, signal peptidase complex subunit
  ENSP ID: ENSP00000482872
MVRAGAVGAHLPASGLDIFGDLKKMNKRQLYYQVLNFAMIVSSALMIWKGLIVLTGSESPIVVVLSGSMEPAFHRGDLLFLTNFREDPIRAGEIVVFKVEGRDIPIVHRVIKVHEKDNGDIKFLTKGDNNEVDDRGLYKEGQNWLEKKDVVGRARG

SEQ ID NO: 76735 - protein, 322 aa, Homo sapiens
  Payload ID: 15323
  Gene Symbol: SEC13
  Gene Name: SEC13 homolog, nuclear pore and COPII coat complex component
  Uniprot ID: P55735
  ENSP ID: ENSP00000312122
MVSVINTVDTSHEDMIHDAQMDYYGTRLATCSSDRSVKIFDVRNGGQILIADLRGHEGPVWQVAWAHPMYGNILASCSYDRKVIIWREENGTWEKSHEHAGHDSSVNSVCWAPHDYGLILACGSSDGAISLLTYTGEGQWEVKKINNAHTIGCNAVSWAPAVVPGSLIDHPSGQKPNYIKRFASGGCDNLIKLWKEEEDGQWKEEQKLEAHSDWVRDVAWAPSIGLPTSTIASCSQDGRVFIWTCDDASSNTWSPKLLHKFNDVVWHVSWSITANILAVSGGDNKVTLWKESVDGQWVCISDVNKGQGSVSASVTEGQQNEQ

SEQ ID NO: 76736 - protein, 325 aa, Homo sapiens
  Payload ID: 15323
  Gene Symbol: SEC13
  Gene Name: SEC13 homolog, nuclear pore and COPII coat complex component
  ENSP ID: ENSP00000336566
MGKMVSVINTVDTSHEDMIHDAQMDYYGTRLATCSSDRSVKIFDVRNGGQILIADLRGHEGPVWQVAWAHPMYGNILASCSYDRKVIIWREENGTWEKSHEHAGHDSSVNSVCWAPHDYGLILACGSSDGAISLLTYTGEGQWEVKKINNAHTIGCNAVSWAPAVVPGSLIDHPSGQKPNYIKRFASGGCDNLIKLWKEEEDGQWKEEQKLEAHSDWVRDVAWAPSIGLPTSTIASCSQDGRVFIWTCDDASSNTWSPKLLHKFNDVVWHVSWSITANILAVSGGDNKVTLWKESVDGQWVCISDVNKGQGSVSASVTEGQQNEQ

SEQ ID NO: 76737 - protein, 368 aa, Homo sapiens
  Payload ID: 15323
  Gene Symbol: SEC13
  Gene Name: SEC13 homolog, nuclear pore and COPII coat complex component
  Uniprot ID: P55735
  ENSP ID: ENSP00000373312
MREPVLTWCVPLELLCSHPLPLSAFLKSQVKLYTYRACAGKDEMGKMVSVINTVDTSHEDMIHDAQMDYYGTRLATCSSDRSVKIFDVRNGGQILIADLRGHEGPVWQVAWAHPMYGNILASCSYDRKVIIWREENGTWEKSHEHAGHDSSVNSVCWAPHDYGLILACGSSDGAISLLTYTGEGQWEVKKINNAHTIGCNAVSWAPAVVPGSLIDHPSGQKPNYIKRFASGGCDNLIKLWKEEEDGQWKEEQKLEAHSDWVRDVAWAPSIGLPTSTIASCSQDGRVFIWTCDDASSNTWSPKLLHKFNDVVWHVSWSITANILAVSGGDNKVTLWKESVDGQWVCISDVNKGQGSVSASVTEGQQNEQ

SEQ ID NO: 76738 - protein, 308 aa, Homo sapiens
  Payload ID: 15323
  Gene Symbol: SEC13
  Gene Name: SEC13 homolog, nuclear pore and COPII coat complex component
  Uniprot ID: P55735
  ENSP ID: ENSP00000380298
MIHDAQMDYYGTRLATCSSDRSVKIFDVRNGGQILIADLRGHEGPVWQVAWAHPMYGNILASCSYDRKVIIWREENGTWEKSHEHAGHDSSVNSVCWAPHDYGLILACGSSDGAISLLTYTGEGQWEVKKINNAHTIGCNAVSWAPAVVPGSLIDHPSGQKPNYIKRFASGGCDNLIKLWKEEEDGQWKEEQKLEAHSDWVRDVAWAPSIGLPTSTIASCSQDGRVFIWTCDDASSNTWSPKLLHKFNDVVWHVSWSITANILAVSGGDNKVTLWKESVDGQWVCISDVNKGQGSVSASVTEGQQNEQ

SEQ ID NO: 76739 - protein, 284 aa, Homo sapiens
  Payload ID: 15323
  Gene Symbol: SEC13
  Gene Name: SEC13 homolog, nuclear pore and COPII coat complex component
  ENSP ID: ENSP00000380306
MIHDAQMDYYGTRLATCSSDRSVKIFDVRNGGQILIADLRGHEGPVWQVAWAHPMYGNILASCSYDRKVIIWREENGTWEKSHEHAGHDSSVNSVCWAPHDYGLILACGSSDGAISLLTYTGEGQWEVKKINNAHTIGCNAVSWAPAVVPGSLIDHPSGQKPNYIKRFASGGCDNLIKLWKEEEDGQWKEEQKLEAHSDWVRDVAWAPSIGLPTSTIASCSQDGRVFIWTCDDASSNTWSPKLLHKFNDVVWHVSWSITANILAVSGGDNKEELQMQPQIDHLP

SEQ ID NO: 76740 - protein, 27 aa, Homo sapiens
  Payload ID: 15323
  Gene Symbol: SEC13
  Gene Name: SEC13 homolog, nuclear pore and COPII coat complex component
  ENSP ID: ENSP00000398623
MREPVLTWACAGKDEMGKMVSVINTVD

SEQ ID NO: 76741 - protein, 28 aa, Homo sapiens
  Payload ID: 15323
  Gene Symbol: SEC13
  Gene Name: SEC13 homolog, nuclear pore and COPII coat complex component
  ENSP ID: ENSP00000400260
MREPVLTWACAGKDEMGKMVSVINTVDT

SEQ ID NO: 76742 - protein, 86 aa, Homo sapiens
  Payload ID: 15323
  Gene Symbol: SEC13
  Gene Name: SEC13 homolog, nuclear pore and COPII coat complex component
  ENSP ID: ENSP00000401368
MGKMVSVINTVDTSHEDMIHDAQMDYYGTRLATCSSDRSVKIFDVRNGGQILIADLRGHEGPVWQVAWAHPMYGNILASCSYDRKV

SEQ ID NO: 76743 - protein, 24 aa, Homo sapiens
  Payload ID: 15323
  Gene Symbol: SEC13
  Gene Name: SEC13 homolog, nuclear pore and COPII coat complex component
  ENSP ID: ENSP00000404141
MREPVLTWCVPLELLCSHPLPLSA

SEQ ID NO: 76744 - protein, 106 aa, Homo sapiens
  Payload ID: 15324
  Gene Symbol: SESTD1
  Gene Name: SEC14 and spectrin domains 1
  ENSP ID: ENSP00000334183
  MOD_RES (1)..(1): Any amino acid
XTKESTSLLDELALINNGSDKGNQQEKERSVDLNFLPSVDPETVLQTGHELLSELQQRRFNGSDGGVSWSPMDDELLAQPQVMKLLDSLREQYTRYQEVCREAEKC

SEQ ID NO: 76745 - protein, 93 aa, Homo sapiens
  Payload ID: 15324
  Gene Symbol: SESTD1
  Gene Name: SEC14 and spectrin domains 1
  ENSP ID: ENSP00000387517
MEASVILPILKKKLAFLSGGKDRRSGLILTIPLCLEQTNMDELSVTLDYLLSIPSEKCKARGFTVIVDGRKSQWNVVKTVVVMLQMSCLGLAV

SEQ ID NO: 76746 - protein, 225 aa, Homo sapiens
  Payload ID: 15324
  Gene Symbol: SESTD1
  Gene Name: SEC14 and spectrin domains 1
  ENSP ID: ENSP00000391000
RSVDLNFLPSVDPETVLQTGHELLSELQQRRFNGSDGGVSWSPMDDELLAQPQVMKLLDSLREQYTRYQEVCRQRSKRTQLEEIQQKVMQVVNWLEGPGSEQLRAQWGIGDSIRASQALQQKHEEIESQHSEWFAVYVELNQQIAALLNAGDEEDLVELKSLQQQLSDVCYRQASQLEFRQNLLQAALEFHGVAQDMWDCKVCVKKVKVSWIRSPIRHPGPMERM

SEQ ID NO: 76747 - protein, 143 aa, Homo sapiens
  Payload ID: 15324
  Gene Symbol: SESTD1
  Gene Name: SEC14 and spectrin domains 1
  ENSP ID: ENSP00000410286
MEASVILPILKKKLAFLSGGKDRRSGLILTIPLCLEQTNMDELSVTLDYLLSIPSEKCKARGFTVIVDGRKSQWNVVKTVVVMLQNVVPAEVSLVCVVKPDEFWDKKVTHFCFWKEKDRLGFEVILVSANKLTRYIEPCQLTE

SEQ ID NO: 76748 - protein, 210 aa, Homo sapiens
  Payload ID: 15324
  Gene Symbol: SESTD1
  Gene Name: SEC14 and spectrin domains 1
  ENSP ID: ENSP00000410632
  MOD_RES (1)..(1): Any amino acid
XQQQLSDVCYRQASQLEFRQNLLQAALEFHGVAQDLSQQLDGLLGMLCVDVAPADGASIQQTLKLLEEKLKSVDVGLQGLREKGQGLLDQISNQASWAYGKDVTIENKENVDHIQGVMEDMQLRKQRCEDMVDVRRLKMLQMVQLFKCEEDAAQAVEWLSELLDALLKTHIRLGDDAQETKVLLEKHRKFVDVAQVQNWLSSFSTSSVFE

SEQ ID NO: 76749 - protein, 696 aa, Homo sapiens
  Payload ID: 15324
  Gene Symbol: SESTD1
  Gene Name: SEC14 and spectrin domains 1
  Uniprot ID: Q86VW0
  ENSP ID: ENSP00000415332
MEASVILPILKKKLAFLSGGKDRRSGLILTIPLCLEQTNMDELSVTLDYLLSIPSEKCKARGFTVIVDGRKSQWNVVKTVVVMLQNVVPAEVSLVCVVKPDEFWDKKVTHFCFWKEKDRLGFEVILVSANKLTRYIEPCQLTEDFGGSLTYDHMDWLNKRLVFEKFTKESTSLLDELALINNGSDKGNQQEKERSVDLNFLPSVDPETVLQTGHELLSELQQRRFNGSDGGVSWSPMDDELLAQPQVMKLLDSLREQYTRYQEVCRQRSKRTQLEEIQQKVMQVVNWLEGPGSEQLRAQWGIGDSIRASQALQQKHEEIESQHSEWFAVYVELNQQIAALLNAGDEEDLVELKSLQQQLSDVCYRQASQLEFRQNLLQAALEFHGVAQDLSQQLDGLLGMLCVDVAPADGASIQQTLKLLEEKLKSVDVGLQGLREKGQGLLDQISNQASWAYGKDVTIENKENVDHIQGVMEDMQLRKQRCEDMVDVRRLKMLQMVQLFKCEEDAAQAVEWLSELLDALLKTHIRLGDDAQETKVLLEKHRKFVDVAQSTYDYGRQLLQATVVLCQSLRCTSRSSGDTLPRLNRVWKQFTIASEERVHRLEMAIAFHSNAEKILQDCPEEPEAINDEEQFDEIEAVGKSLLDRLTVPVVYPDGTEQYFGSPSDMASTAENIRDRMKLVNLKRQQLRHPEMVTTES

SEQ ID NO: 76750 - protein, 146 aa, Homo sapiens
  Payload ID: 15324
  Gene Symbol: SESTD1
  Gene Name: SEC14 and spectrin domains 1
  ENSP ID: ENSP00000416164
MEASVILPILKKKLAFLSGGKDRRSGLILTIPLCLEQTNMDELSVTLDYLLSIPSEKCKARGFTVIVDGRKSQWNVVKTVVVMLQNVVPAEVSLVCVVKPDEFWDKKVTHFCFWKEKDRLGFEVILVSANKLTRYIEPCQLTEDFG

SEQ ID NO: 76751 - protein, 719 aa, Homo sapiens
  Payload ID: 15325
  Gene Symbol: SEC14L1
  Gene Name: SEC14-like lipid binding 1
  Uniprot ID: Q92503
  ENSP ID: ENSP00000376268
MVQKYQSPVRVYKYPFELIMAAYERRFPTCPLIPMFVGSDTVNEFKSEDGAIHVIERRCKLDVDAPRLLKKIAGVDYVYFVQKNSLNSRERTLHIEAYNETFSNRVIINEHCCYTVHPENEDWTCFEQSASLDIKSFFGFESTVEKIAMKQYTSNIKKGKEIIEYYLRQLEEEGITFVPRWSPPSITTSSETSSSSSKKQAASMAVVIPEAALKEGLSGDALSSPSAPEPVVGTPDDKLDADYIKRYLGDLTPLQESCLIRLRQWLQETHKGKIPKDEHILRFLRARDFNIDKAREIMCQSLTWRKQHQVDYILETWTPPQVLQDYYAGGWHHHDKDGRPLYVLRLGQMDTKGLVRALGEEALLRYVLSINEEGLRRCEENTKVFGRPISSWTCLVDLEGLNMRHLWRPGVKALLRIIEVVEANYPETLGRLLILRAPRVFPVLWTLVSPFIDDNTRRKFLIYAGNDYQGPGGLLDYIDKEIIPDFLSGECMCEVPEGGLVPKSLYRTAEELENEDLKLWTETIYQSASVFKGAPHEILIQIVDASSVITWDFDVCKGDIVFNIYHSKRSPQPPKKDSLGAHSITSPGGNNVQLIDKVWQLGRDYSMVESPLICKEGESVQGSHVTRWPGFYILQWKFHSMPACAASSLPRVDDVLASLQVSSHKCKVMYYTEVIGSEDFRGSMTSLESSHSGFSQLSAATTSSSQSHSSSMISRWRFC

SEQ ID NO: 76752 - protein, 681 aa, Homo sapiens
  Payload ID: 15325
  Gene Symbol: SEC14L1
  Gene Name: SEC14-like lipid binding 1
  Uniprot ID: Q92503
  ENSP ID: ENSP00000389838
MFVGSDTVNEFKSEDGAIHVIERRCKLDVDAPRLLKKIAGVDYVYFVQKNSLNSRERTLHIEAYNETFSNRVIINEHCCYTVHPENEDWTCFEQSASLDIKSFFGFESTVEKIAMKQYTSNIKKGKEIIEYYLRQLEEEGITFVPRWSPPSITTSSETSSSSSKKQAASMAVVIPEAALKEGLSGDALSSPSAPEPVVGTPDDKLDADYIKRYLGDLTPLQESCLIRLRQWLQETHKGKIPKDEHILRFLRARDFNIDKAREIMCQSLTWRKQHQVDYILETWTPPQVLQDYYAGGWHHHDKDGRPLYVLRLGQMDTKGLVRALGEEALLRYVLSINEEGLRRCEENTKVFGRPISSWTCLVDLEGLNMRHLWRPGVKALLRIIEVVEANYPETLGRLLILRAPRVFPVLWTLVSPFIDDNTRRKFLIYAGNDYQGPGGLLDYIDKEIIPDFLSGECMCEVPEGGLVPKSLYRTAEELENEDLKLWTETIYQSASVFKGAPHEILIQIVDASSVITWDFDVCKGDIVFNIYHSKRSPQPPKKDSLGAHSITSPGGNNVQLIDKVWQLGRDYSMVESPLICKEGESVQGSHVTRWPGFYILQWKFHSMPACAASSLPRVDDVLASLQVSSHKCKVMYYTEVIGSEDFRGSMTSLESSHSGFSQLSAATTSSSQSHSSSMISR

SEQ ID NO: 76753 - protein, 715 aa, Homo sapiens
  Payload ID: 15325
  Gene Symbol: SEC14L1
  Gene Name: SEC14-like lipid binding 1
  Uniprot ID: Q92503
  ENSP ID: ENSP00000390392
MVQKYQSPVRVYKYPFELIMAAYERRFPTCPLIPMFVGSDTVNEFKSEDGAIHVIERRCKLDVDAPRLLKKIAGVDYVYFVQKNSLNSRERTLHIEAYNETFSNRVIINEHCCYTVHPENEDWTCFEQSASLDIKSFFGFESTVEKIAMKQYTSNIKKGKEIIEYYLRQLEEEGITFVPRWSPPSITTSSETSSSSSKKQAASMAVVIPEAALKEGLSGDALSSPSAPEPVVGTPDDKLDADYIKRYLGDLTPLQESCLIRLRQWLQETHKGKIPKDEHILRFLRARDFNIDKAREIMCQSLTWRKQHQVDYILETWTPPQVLQDYYAGGWHHHDKDGRPLYVLRLGQMDTKGLVRALGEEALLRYVLSINEEGLRRCEENTKVFGRPISSWTCLVDLEGLNMRHLWRPGVKALLRIIEVVEANYPETLGRLLILRAPRVFPVLWTLVSPFIDDNTRRKFLIYAGNDYQGPGGLLDYIDKEIIPDFLSGECMCEVPEGGLVPKSLYRTAEELENEDLKLWTETIYQSASVFKGAPHEILIQIVDASSVITWDFDVCKGDIVFNIYHSKRSPQPPKKDSLGAHSITSPGGNNVQLIDKVWQLGRDYSMVESPLICKEGESVQGSHVTRWPGFYILQWKFHSMPACAASSLPRVDDVLASLQVSSHKCKVMYYTEVIGSEDFRGSMTSLESSHSGFSQLSAATTSSSQSHSSSMISR

SEQ ID NO: 76754 - protein, 719 aa, Homo sapiens; identical to SEQ ID NO: 76751
  Payload ID: 15325
  Gene Symbol: SEC14L1
  Gene Name: SEC14-like lipid binding 1
  Uniprot ID: Q92503
  ENSP ID: ENSP00000406030

SEQ ID NO: 76755 - protein, 715 aa, Homo sapiens; identical to SEQ ID NO: 76753
  Payload ID: 15325
  Gene Symbol: SEC14L1
  Gene Name: SEC14-like lipid binding 1
  Uniprot ID: Q92503
  ENSP ID: ENSP00000408169

SEQ ID NO: 76756 - protein, 118 aa, Homo sapiens
  Payload ID: 15325
  Gene Symbol: SEC14L1
  Gene Name: SEC14-like lipid binding 1
  ENSP ID: ENSP00000464777
YIDKEIIPDFLSGECMCEVPEGGLVPKSLYRTAEELENEDLKLWTETIYQSASVFKGAPHEILIQIVDASSVITWDFDVCKGDIVFNIYHSKRSPQPPKKDSLGAHSITSPASPTPAP

SEQ ID NO: 76757 - protein, 445 aa, Homo sapiens
  Payload ID: 15325
  Gene Symbol: SEC14L1
  Gene Name: SEC14-like lipid binding 1
  ENSP ID: ENSP00000464973
MVQKYQSPVRVYKYPFELIMAAYERRFPTCPLIPMFVGSDTVNEFKSEDGAIHVIERRCKLDVDAPRLLKKIAGVDYVYFVQKNSLNSRERTLHIEAYNETFSNRVIINEHCCYTVHPENEDWTCFEQSASLDIKSFFGFESTVEKIAMKQYTSNIKKGKEIIEYYLRQLEEEGITFVPRWSPPSITTSSETSSSSSKKQAASMAVVIPEAALKEGLSGDALSSPSAPEPVVGTPDDKLDADYIKRYLGDLTPLQESCLIRLRQWLQETHKGKIPKDEHILRFLRARDFNIDKAREIMCQSLTWRKQHQVDYILETWTPPQVLQDYYAGGWHHHDKDGRPLYVLRLGQMDTKGLVRALGEEALLRYVLSINEEGLRRCEENTKVFGRPISSWTCLVDLEGLNMRHLWRPGVKALLRIIEVVEANYPETLGRLLILRAPRVFPVLW

SEQ ID NO: 76758 - protein, 15 aa, Homo sapiens
  Payload ID: 15325
  Gene Symbol: SEC14L1
  Gene Name: SEC14-like lipid binding 1
  ENSP ID: ENSP00000465196
MVQKYQSPVRVYKYP

SEQ ID NO: 76759 - protein, 14 aa, Homo sapiens
  Payload ID: 15325
  Gene Symbol: SEC14L1
  Gene Name: SEC14-like lipid binding 1
  ENSP ID: ENSP00000466079
MVQKYQSPVRVYKY

SEQ ID NO: 76760 - protein, 143 aa, Homo sapiens
  Payload ID: 15325
  Gene Symbol: SEC14L1
  Gene Name: SEC14-like lipid binding 1
  ENSP ID: ENSP00000466137
MFVGSDTVNEFKSEDGAIHVIERRCKLDVDAPRLLKKIAGVDYVYFVQKNSLNSRERTLHIEAYNETFSNRVIINEHCCYTVHPENEDWTCFEQSASLDIKSFFGFESTVEKIAMKQYTSNIKKGKEIIEYYLRQLEEEGITF

SEQ ID NO: 76761 - protein, 71 aa, Homo sapiens
  Payload ID: 15325
  Gene Symbol: SEC14L1
  Gene Name: SEC14-like lipid binding 1
  ENSP ID: ENSP00000466220
MVQKYQSPVRVYKYPFELIMAAYERRFPTCPLIPMFVGSDTVNEFKSEDGAIHVIERRCKLDVDAPRLLKK

SEQ ID NO: 76762 - protein, 715 aa, Homo sapiens; identical to SEQ ID NO: 76753
  Payload ID: 15325
  Gene Symbol: SEC14L1
  Gene Name: SEC14-like lipid binding 1
  Uniprot ID: Q92503
  ENSP ID: ENSP00000466581

SEQ ID NO: 76763 - protein, 156 aa, Homo sapiens
  Payload ID: 15325
  Gene Symbol: SEC14L1
  Gene Name: SEC14-like lipid binding 1
  ENSP ID: ENSP00000467347
VHPENEDWTCFEQSASLDIKSFFGFESTVEKIAMKQYTSNIKKGKEIIEYYLRQLEEEGITFVPRWSPPSITTSSETSSSSSKKQAASMAVVIPEAALKEGLSGDALSSPSAPEPVVGTPDGGSGRGFIPRARLGKSALPFSLCLLCLFPLPWNIR

SEQ ID NO: 76764 - protein, 60 aa, Homo sapiens
  Payload ID: 15325
  Gene Symbol: SEC14L1
  Gene Name: SEC14-like lipid binding 1
  ENSP ID: ENSP00000467868
MVQKYQSPVRVYKYPFELIMAAYERRFPTCPLIPMFVGSDTVNEFKSEDGAIHVIERRCK

SEQ ID NO: 76765 - protein, 681 aa, Homo sapiens; identical to SEQ ID NO: 76752
  Payload ID: 15325
  Gene Symbol: SEC14L1
  Gene Name: SEC14-like lipid binding 1
  Uniprot ID: Q92503
  ENSP ID: ENSP00000467934

SEQ ID NO: 76766 - protein, 83 aa, Homo sapiens
  Payload ID: 15325
  Gene Symbol: SEC14L1
  Gene Name: SEC14-like lipid binding 1
  ENSP ID: ENSP00000468184
MVQKYQSPVRVYKYPFELIMAAYERRFPTCPLIPMFVGSDTVNEFKSEDGAIHVIERRCKLDVDAPRLLKKELIMFILSRKTH

SEQ ID NO: 76767 - protein, 89 aa, Homo sapiens
  Payload ID: 15325
  Gene Symbol: SEC14L1
  Gene Name: SEC14-like lipid binding 1
  ENSP ID: ENSP00000468727
AYERRFPTCPLIPMFVGSDTVNEFKSEDGAIHVIERRCKLDVDAPRLLKKIAGVDYVYFVQKNSLNSRERTLHIEAYNETAFSLSAGSP

SEQ ID NO: 76768 - protein, 320 aa, Homo sapiens
  Payload ID: 15326
  Gene Symbol: SEC14L2
  Gene Name: SEC14-like lipid binding 2
  Uniprot ID: O76054
  ENSP ID: ENSP00000383882
MSGRVGDLSPRQKEALAKFRENVQDVLPALPNPDDYFLLRWLRARSFDLQKSEAMLRKLGRKVETITIIYDCEGLGLKHLWKPAVEAYGEFLCMFEENYPETLKRLFVVKAPKLFPVAYNLIKPFLSEDTRKKIMVLGANWKEVLLKHISPDQVPVEYGGTMTDPDGNPKCKSKINYGGDIPRKYYVRDQVKQQYEHSVQISRGSSHQVEYEILFPGCVLRWQFMSDGADVGFGIFLKTKMGERQRAGEMTEVLPNQRYNSHLVPEDGTLTCSDPGIYVLRFDNTYSFIHAKKVNFTVEVLLPDKASEEKMKQLGAGTPK

SEQ ID NO: 76769 - protein, 392 aa, Homo sapiens
  Payload ID: 15326
  Gene Symbol: SEC14L2
  Gene Name: SEC14-like lipid binding 2
  Uniprot ID: O76054
  ENSP ID: ENSP00000385186
MSGRVGDLSPRQKEALAKFRENVQDVLPALPNPDDYFLLRWLRARSFDLQKSEAMLRKHVEFRKQKDIDNIISWQPPEVIQQYLSGGMCGYDLDGCPVWYDIIGPLDAKGLLFSASKQDLLRTKMRECELLLQECAHQTTKLGRKVETITIIYDCEGLGLKHLWKPAVEAYGEFLCMFEENYPETLKRLFVVKAPKLFPVAYNLIKPFLSEDTRKKIMVLGANWKEVLLKHISPDQVPVEYGGTMTDPDGNPKCKSKINYGGDIPRKYYVRDQVKQQYEHSVQISRGSSHQVEYEILFPGCVLRWQFMSDGADVGFGIFLKTKMGERQRAGEMTEVLPNQRYNSHLVPEDGTLTCSDPGICKYLCLGNALKPHVQLSACEVPLPPWIFGSEC

SEQ ID NO: 76770 - protein, 203 aa, Homo sapiens
  Payload ID: 15326
  Gene Symbol: SEC14L2
  Gene Name: SEC14-like lipid binding 2
  ENSP ID: ENSP00000387781
MLRKHVEFRKQKDIDNIISWQPPEVIQQYLSGGMCGYDLDGCPVWYDIIGPLDAKGLLFSASKQDLLRTKMRECELLLQECAHQTTKLGRKVETITIIYDCEGLGLKHLWKPAVEAYGEFLCMFEENYPETLKRLFVVKAPKLFPVAYNLIKPFLSEDTRKKIMVLGANWKEVLLKHISPDQVPVEYGGTMTDPDGNPKCKSK

SEQ ID NO: 76771 - protein, 84 aa, Homo sapiens
  Payload ID: 15326
  Gene Symbol: SEC14L2
  Gene Name: SEC14-like lipid binding 2
  ENSP ID: ENSP00000388719
MSGRVGDLSPRQKEALAKFRENVQDVLPALPNPDDYFLLRWLRARSFDLQKSEAMLRKHVEFRKQKDIDNIISWQPPEPPNRTC

SEQ ID NO: 76772 - protein, 53 aa, Homo sapiens
  Payload ID: 15326
  Gene Symbol: SEC14L2
  Gene Name: SEC14-like lipid binding 2
  ENSP ID: ENSP00000388888
MSGRVGDLSPRQKEALAKPEASTCRSRRPCSGSMWSSESKRTLTTSLAGSLQR

SEQ ID NO: 76773 - protein, 125 aa, Homo sapiens
  Payload ID: 15326
  Gene Symbol: SEC14L2
  Gene Name: SEC14-like lipid binding 2
  ENSP ID: ENSP00000399596
MPCFIGSRVRPPLSSLCSPANSSSFHGAEDHGGKSVCSGLRQTRFRENVQDVLPALPNPDDYFLLRWLRARSFDLQKSEAMLRKHVEFRKQKDIDNIISWQPPEVIQQYLSGGMCGYDLDGCPVW

SEQ ID NO: 76774 - protein, 84 aa, Homo sapiens
  Payload ID: 15326
  Gene Symbol: SEC14L2
  Gene Name: SEC14-like lipid binding 2
  ENSP ID: ENSP00000407857
MLLRRQEARSFDLQKSEAMLRKHVEFRKQKDIDNIISWQPPEVIQQYLSGGMCGYDLDGCPVWYDIIGPLDAKGLLFSASKQDL

SEQ ID NO: 76775 - protein, 403 aa, Homo sapiens
  Payload ID: 15326
  Gene Symbol: SEC14L2
  Gene Name: SEC14-like lipid binding 2
  Uniprot ID: O76054
  ENSP ID: ENSP00000478755
MSGRVGDLSPRQKEALAKFRENVQDVLPALPNPDDYFLLRWLRARSFDLQKSEAMLRKHVEFRKQKDIDNIISWQPPEVIQQYLSGGMCGYDLDGCPVWYDIIGPLDAKGLLFSASKQDLLRTKMRECELLLQECAHQTTKLGRKVETITIIYDCEGLGLKHLWKPAVEAYGEFLCMFEENYPETLKRLFVVKAPKLFPVAYNLIKPFLSEDTRKKIMVLGANWKEVLLKHISPDQVPVEYGGTMTDPDGNPKCKSKINYGGDIPRKYYVRDQVKQQYEHSVQISRGSSHQVEYEILFPGCVLRWQFMSDGADVGFGIFLKTKMGERQRAGEMTEVLPNQRYNSHLVPEDGTLTCSDPGIYVLRFDNTYSFIHAKKVNFTVEVLLPDKASEEKMKQLGAGTPK

SEQ ID NO: 76776 - protein, 329 aa, Homo sapiens
  Payload ID: 15326
  Gene Symbol: SEC14L2
  Gene Name: SEC14-like lipid binding 2
  ENSP ID: ENSP00000482467
MLRKVIQQYLSGGMCGYDLDGCPVWYDIIGPLDAKGLLFSASKQDLLRTKMRECELLLQECAHQTTKLGRKVETITIIYDCEGLGLKHLWKPAVEAYGEFLCMFEENYPETLKRLFVVKAPKLFPVAYNLIKPFLSEDTRKKIMVLGANWKEVLLKHISPDQVPVEYGGTMTDPDGNPKCKSKINYGGDIPRKYYVRDQVKQQYEHSVQISRGSSHQVEYEILFPGCVLRWQFMSDGADVGFGIFLKTKMGERQRAGEMTEVLPNQRYNSHLVPEDGTLTCSDPGIYVLRFDNTYSFIHAKKVNFTVEVLLPDKASEEKMKQLGAGTPK

SEQ ID NO: 76777 - protein, 400 aa, Homo sapiens
  Payload ID: 15327
  Gene Symbol: SEC14L3
  Gene Name: SEC14-like lipid binding 3
  Uniprot ID: Q9UDX4
  ENSP ID: ENSP00000215812
MSGRVGDLSPKQAETLAKFRENVQDVLPALPNPDDYFLLRWLRARNFDLQKSEALLRKYMEFRKTMDIDHILDWQPPEVIQKYMPGGLCGYDRDGCPVWYDIIGPLDPKGLLFSVTKQDLLKTKMRDCERILHECDLQTERLGKKIETIVMIFDCEGLGLKHFWKPLVEVYQEFFGLLEENYPETLKFMLIVKATKLFPVGYNLMKPFLSEDTRRKIIVLGNNWKEGLLKLISPEELPAQFGGTLTDPDGNPKCLTKINYGGEIPKSMYVRDQVKTQYEHSVQINRGSSHQVEYEILFPGCVLRWQFSSDGADIGFGVFLKTKMGERQRAGEMTDVLPSQRYNAHMVPEDGNLTCSEAGVYVLRFDNTYSFVHAKKVSFTVEVLLPDEGMQKYDKELTPV

SEQ ID NO: 76778 - protein, 341 aa, Homo sapiens
  Payload ID: 15327
  Gene Symbol: SEC14L3
  Gene Name: SEC14-like lipid binding 3
  Uniprot ID: Q9UDX4
  ENSP ID: ENSP00000383896
MEFRKTMDIDHILDWQPPEVIQKYMPGGLCGYDRDGCPVWYDIIGPLDPKGLLFSVTKQDLLKTKMRDCERILHECDLQTERLGKKIETIVMIFDCEGLGLKHFWKPLVEVYQEFFGLLEENYPETLKFMLIVKATKLFPVGYNLMKPFLSEDTRRKIIVLGNNWKEGLLKLISPEELPAQFGGTLTDPDGNPKCLTKINYGGEIPKSMYVRDQVKTQYEHSVQINRGSSHQVEYEILFPGCVLRWQFSSDGADIGFGVFLKTKMGERQRAGEMTDVLPSQRYNAHMVPEDGNLTCSEAGVYVLRFDNTYSFVHAKKVSFTVEVLLPDEGMQKYDKELTPV

SEQ ID NO: 76779 - protein, 323 aa, Homo sapiens
  Payload ID: 15327
  Gene Symbol: SEC14L3
  Gene Name: SEC14-like lipid binding 3
  Uniprot ID: Q9UDX4
  ENSP ID: ENSP00000385004
MVIQKYMPGGLCGYDRDGCPVWYDIIGPLDPKGLLFSVTKQDLLKTKMRDCERILHECDLQTERLGKKIETIVMIFDCEGLGLKHFWKPLVEVYQEFFGLLEENYPETLKFMLIVKATKLFPVGYNLMKPFLSEDTRRKIIVLGNNWKEGLLKLISPEELPAQFGGTLTDPDGNPKCLTKINYGGEIPKSMYVRDQVKTQYEHSVQINRGSSHQVEYEILFPGCVLRWQFSSDGADIGFGVFLKTKMGERQRAGEMTDVLPSQRYNAHMVPEDGNLTCSEAGVYVLRFDNTYSFVHAKKVSFTVEVLLPDEGMQKYDKELTPV

SEQ ID NO: 76780 - protein, 353 aa, Homo sapiens
  Payload ID: 15327
  Gene Symbol: SEC14L3
  Gene Name: SEC14-like lipid binding 3
  ENSP ID: ENSP00000385941
MEFRKTMDIDHILDWQPPEVIQKYMPGGLCGYDRDGCPVWYDIIGPLDPKGLLFSVTKQDLLKTKMRDCERILHECDLQTERLGKKIETIVMIFDCEGLGLKHFWKPLVEVYQEFFGLLEENYPETLKFMLIVKATKLFPVGYNLMKPFLSEDTRRKIIVLGNNWKEGLLKLISPEELPAQFGGTLTDPDGNPKCLTKINYGGEIPKSMYVRDQVKTQYEHSVQINRGSSHQVEYEILFPGCVLRWQFSSDGADIGFGVFLKTKMGERQRAGEMTDVLPSQRYNAHMVPEDGNLTCSEAGVYVESESGKSCCHLPVIICSHELQNSHSNSQVMAYQMVRKCKLSRPLPLPASN

SEQ ID NO: 76781 - protein, 231 aa, Homo sapiens
  Payload ID: 15327
  Gene Symbol: SEC14L3
  Gene Name: SEC14-like lipid binding 3
  ENSP ID: ENSP00000402986
  MOD_RES (1)..(1): Any amino acid
XKTSRMCFLPCPTLMIISFYAGSEYMEFRKTMDIDHILDWQPPEVIQKYMPGGLCGYDRDGCPVWYDIIGPLDPKGLLFSVTKQDLLKTKMRDCERILHECDLQTERLGKKIETIVMIFDCEGLGLKHFWKPLVEVYQEFFGLLEENYPETLKFMLIVKATKLFPVGYNLMKPFLSEDTRRKIIVLGNNWKEGLLKLISPEELPAQFGGTLTDPDGNPKCLTKINYGGEIP

SEQ ID NO: 76782 - protein, 51 aa, Homo sapiens
  Payload ID: 15327
  Gene Symbol: SEC14L3
  Gene Name: SEC14-like lipid binding 3
  ENSP ID: ENSP00000405055
MSGRVGDLSPKQAETLAKMESLSSRLECCGAISAHCSLCLPGSSNSPASAS

SEQ ID NO: 76783 - protein, 323 aa, Homo sapiens; identical to SEQ ID NO: 76779
  Payload ID: 15327
  Gene Symbol: SEC14L3
  Gene Name: SEC14-like lipid binding 3
  Uniprot ID: Q9UDX4
  ENSP ID: ENSP00000439752

SEQ ID NO: 76784 - protein, 406 aa, Homo sapiens
  Payload ID: 15328
  Gene Symbol: SEC14L4
  Gene Name: SEC14-like lipid binding 4
  Uniprot ID: Q9UDX3
  ENSP ID: ENSP00000255858
MSSRVGDLSPQQQEALARFRENLQDLLPILPNADDYFLLRWLRARNFDLQKSEDMLRRHMEFRKQQDLDNIVTWQPPEVIQLYDSGGLCGYDYEGCPVYFNIIGSLDPKGLLLSASKQDMIRKRIKVCELLLHECELQTQKLGRKIEMALMVFDMEGLSLKHLWKPAVEVYQQFFSILEANYPETLKNLIVIRAPKLFPVAFNLVKSFMSEETRRKIVILGDNWKQELTKFISPDQLPVEFGGTMTDPDGNPKCLTKINYGGEVPKSYYLCEQVRLQYEHTRSVGRGSSLQVENEILFPGCVLRWQFASDGGDIGFGVFLKTKMGEQQSAREMTEVLPSQRYNAHMVPEDGSLTCLQAGVYVLRFDNTYSRMHAKKLSYTVEVLLPDKASEETLQSLKAMRPSPTQ

SEQ ID NO: 76785 - protein, 38 aa, Homo sapiens
  Payload ID: 15328
  Gene Symbol: SEC14L4
  Gene Name: SEC14-like lipid binding 4
  ENSP ID: ENSP00000314163
MSSRVGDLSPQQQEALARILLRSVPGEPPGPAAHTAQC

SEQ ID NO: 76786 - protein, 93 aa, Homo sapiens
  Payload ID: 15328
  Gene Symbol: SEC14L4
  Gene Name: SEC14-like lipid binding 4
  ENSP ID: ENSP00000317617
MSSRVGDLSPQQQEALARFRENLQDLLPILPNADDYFLLRWLRARNFDLQKSEDMLRRTQVPPAHLLSPRSESLAHGVPEATRPGQHCHMAAP

SEQ ID NO: 76787 - protein, 360 aa, Homo sapiens
  Payload ID: 15328
  Gene Symbol: SEC14L4
  Gene Name: SEC14-like lipid binding 4
  Uniprot ID: Q9UDX3
  ENSP ID: ENSP00000371412
MSSRVGDLSPQQQEALARFRENLQDLLPILPNADDYFLLRWLRARNFDLQKSEDMLRRHMEFRKQQDLDNIVTWQPPEVIQLYDSGGLCGYDYEGCPVYFNIIGSLDPKGLLLSASKQDMIRKRIKVCELLLHECELQTQKLGRKIEMALMVFDMEGLSLKHLWKPAVEVYQQFFSILEANYPETLKNLIVIRAPKLFPVAFNLVKSFMSEETRRKIVILGDNWKQELTKFISPDQLPVEFGGTMTDPDGNPKCLTKINYGGEVPKSYYLCEQVRLQYEHTRSVGRGSSLQVENEILFPGCVLRWQFASDGGDIGFGVFLKTKMGEQQSAREMTEVLPSQRYNAHMVPEDGSLTCLQAGV

SEQ ID NO: 76788 - protein, 696 aa, Homo sapiens
  Payload ID: 15329
  Gene Symbol: SEC14L5
  Gene Name: SEC14-like lipid binding 5
  Uniprot ID: O43304
  ENSP ID: ENSP00000251170
MVQRYQSPVRVYKYPFELVMAAYEKRFPTCPQIPVFLGSEVLRESRSPDGAVHVVERSCRLRVDAPRLLRKIAGVEHVVFVQTNILNWKERTLLIEAHNETFANRVVVNEHCSYTVHPENEDWTCFEQSASLDIRSFFGFENALEKIAMKQYTANVKRGKEVIEHYLNELISQGTSHIPRWTPAPVREEDARNQAGPRDPSSLEAHGPRSTLGPALEAVSMDGDKLDADYIERCLGHLTPMQESCLIQLRHWLQETHKGKIPKDEHILRFLRAHDFHLDKAREMLRQSLSWRKQHQVDLLLQTWQPPALLEEFYAGGWHYQDIDGRPLYILRLGQMDTKGLMKAVGEEALLRHVLSVNEEGQKRCEGSTRQLGRPISSWTCLLDLEGLNMRHLWRPGVKALLRMIEVVEDNYPETLGRLLIVRAPRVFPVLWTLISPFINENTRRKFLIYSGSNYQGPGGLVDYLDREVIPDFLGGESVCNVPEGGLVPKSLYMTEEEQEHTDQLWQWSETYHSASVLRGAPHEVAVEILEGESVITWDFDILRGDVVFSLYHTKQAPRLGAREPGTRASGQLIDKGWVLGRDYSRVEAPLVCREGESIQGSHVTRWPGVYLLQWQMHSPPSSVACSLPGVDDVLTALHSPGPKCKLLYYCEVLASEDFRGSMSSLESCTSGFSQLSAATSSSSSGQSHSSSLVSR

SEQ ID NO: 76789 - protein, 169 aa, Homo sapiens
  Payload ID: 15329
  Gene Symbol: SEC14L5
  Gene Name: SEC14-like lipid binding 5
  ENSP ID: ENSP00000468423
MVQRYQSPVRVYKYPFELVMAAYEKRFPTCPQIPVFLGSEVLRESRSPDGAVHVVERSCRLRVDAPRLLRKIAGVEHVVFVQTNILNWKERTLLIEAHNETFANRVVVNEHCSYTVHPENEDWTCFEQSASLDIRSFFGFENALEKIAMKQYTANVKRGKEVIEHYLNE

SEQ ID NO: 76790 - protein, 397 aa, Homo sapiens
  Payload ID: 15330
  Gene Symbol: SEC14L6
  Gene Name: SEC14-like lipid binding 6
  Uniprot ID: B5MCN3
  ENSP ID: ENSP00000385695
MSGQVGDLSPSQEKSLAQFRENIQDVLSALPNPDDYFLLRWLQARSFDLQKSEDMLRKHMEFRKQQDLANILAWQPPEVVRLYNANGICGHDGEGSPVWYHIVGSLDPKGLLLSASKQELLRDSFRSCELLLRECELQSQKLGKRVEKIIAIFGLEGLGLRDLWKPGIELLQEFFSALEANYPEILKSLIVVRAPKLFAVAFNLVKSYMSEETRRKVVILGDNWKQELTKFISPDQLPVEFGGTMTDPDGNPKCLTKINYGGEVPKSYYLCKQVRLQYEHTRSVGRGSSLQVENEILFPGCVLRWQFASDGGDIGFGVFLKTKMGERQRAREMTEVLPSQRYNAHMVPEDGILTCLQAGSYVLRFYNTYSLVHSKRISYTVEVLLPDQTFMEKMEKF

SEQ ID NO: 76791 - protein, 122 aa, Homo sapiens
  Payload ID: 15330
  Gene Symbol: SEC14L6
  Gene Name: SEC14-like lipid binding 6
  ENSP ID: ENSP00000393380
  MOD_RES (1)..(1): Any amino acid
XLFAVAFNLVKSYMSEETRRKVVILGDNWKQELTKFISPDQLPVEFGGTMTDPDGNPKCLTKINYGGEVPKSYYLCKQVRLQYEHTRSVGRGSSLQVENEILFPGCVLRCPEVLQHLQPGSF

SEQ ID NO: 76792 - protein, 751 aa, Homo sapiens
  Payload ID: 15331
  Gene Symbol: SEC16A
  Gene Name: SEC16 homolog A, endoplasmic reticulum export factor
  ENSP ID: ENSP00000277537
PAAAASSLERETERFRELLLYGRKKDALESAMKNGLWGHALLLASKMDSRTHARVMTRFANSLPINDPLQTVYQLMSGRMPAASTCCGDEKWGDWRPHLAMVLSNLNNNMDVESRTMATMGDTLASRGLLDAAHFCYLMAQAGFGVYTKKTTKLVLIGSNHSLPFLKFATNEAIQRTEAYEYAQSLGAETCPLPSFQVFKFIYSCRLAEMGLATQAFHYCEAIAKSILTQPHLYSPVLISQLVQMASQLRLFDPQLKEKPEEESLAAPTWLVHLQQVERQIKEGAGVWHQDGALPQQCPGTPSSEMEQLDRPGLSQPGALGIANPLLAVPAPSPEHSSPSVRLLPSAPQTLPDGPLASPARVPMFPVPLPPGPLEPGPGCVTPGPALGFLEPSGPGLPPGVPPLQERRHLLQEARSPDPGIVPQEAPVGNSLSELSEENFDGKFANLTPSRTVPDSEAPPGWDRADSGPTQPPLSLSPAPETKRPGQAAKKETKEPKKGESWFFRWLPGKKKTEAYLPDDKNKSIVWDEKKNQWVNLNEPEEEKKAPPPPPTSMPKTVQAAPPALPGPPGAPVNMYSRRAAGTRARYVDVLNPSGTQRSEPALAPADFVAPLAPLPIPSNLFVPTPDAEEPQLPDGTGREGPAAARGLANPEPAPEPKVLSSAASLPGSELPSSRPEGSQGGELSRCSSMSSLSREVSQHFNQAPGDLPAAGGPPSGAMPFYNPAQLAQACATSGSSRLGRIGQRKHLVLN

SEQ ID NO: 76793 - protein, 2334 aa, Homo sapiens
  Payload ID: 15331
  Gene Symbol: SEC16A
  Gene Name: SEC16 homolog A, endoplasmic reticulum export factor
  ENSP ID: ENSP00000290037
MQPPPQTVPSGMAGPPPAGNPRSVFWASSPYRRRANNNAAVAPTTCPLQPVTDPFAFSRQALQSTPLGSSSKSSPPVLQGPAPAGFSQHPGLLVPHTHARDSSQGPCEPLPGPLTQPRAHASPFSGALTPSAPPGPEMNRSAEVGPSSEPEVQTLPYLPHYIPGVDPETSHGGHPHGNMPGLDRPLSRQNPHDGVVTPAASPSLPQPGLQMPGQWGPVQGGPQPSGQHRSPCPEGPVPSGVPCATSVPHFPTPSILHQGPGHEQHSPLVAPPAALPSDGRDEVSHLQSGSHLANNSDPESTFRQNPRIVNHWASPELRQNPGVKNEHRPASALVNPLARGDSPENRTHHPLGAGAGSGCAPLEADSGASGALAMFFQGGETENEENLSSEKAGLSGQADFDDFCSSPGLGRPPAPTHVGAGSLCQALLPGPSNEAAGDVWGDTASTGVPDASGSQYENVENLEFVQNQEVLPSEPLNLDPSSPSDQFRYGPLPGPAVPRHGAVCHTGAPDATLHTVHPDSVSSSYSSRSHGRLSGSARPQELVGTFIQQEVGKPEDEASGSFFKQIDSSPVGGETDETTVSQNYRGSVSQPSTPSPPKPTGIFQTSANSSFEPVKSHLVGVKPFEADRANVVGEVRETCVRQKQCRPAAALPDASPGNLEQPPDNMETLCAPQVCPLPLNSTTEAVHMLPHAGAPPLDTVYPAPEKRPSARTQGPVKCESPATTLWAQSELPDFGGNVLLAPAAPALYVCAKPQPPVVQPPEEAMSGQQSRNPSSAAPVQSRGGIGASENLENPPKMGEEEALQSQASSGYASLLSSPPTESLQNPPVLIAQPDHSYNLAQPINFSVSLSNSHEKNQSWREALVGDRPAVSSWALGGDSGENTSLSGIPTSSVLSLSLPSSVAQSNFPQGSGASEMVSNQPANLLVQPPSQPVPENLVPESQKDRKAGSALPGFANSPAGSTSVVLVPPAHGTLVPDGNKANHSSHQEDTYGALDFTLSRTLENPVNVYNPSHSDSLASQQSVASHPRQSGPGAPNLDRFYQQVTKDAQGQPGLERAQQELVPPQQQASPPQLPKAMFSELSNPESLPAQGQAQNSAQSPASLVLVDAGQQLPPRPPQSSSVSLVSSGSGQAAVPSEQPWPQPVPALAPGPPPQDLAAYYYYRPLYDAYQPQYSLPYPPEPGAASLYYQDVYSLYEPRYRPYDGAASAYAQNYRYPEPERPSSRASHSSERPPPRQGYPEGYYSSKSGWSSQSDYYASYYSSQYDYGDPGHWDRYHYSARVRDPRTYDRRYWCDAEYDAYRREHSAFGDRPEKRDNNWRYDPRFTGSFDDDPDPHRDPYGEEVDRRSVHSEHSARSLHSAHSLASRRSSLSSHSHQSQIYRSHNVAAGSYEAPLPPGSFHGDFAYGTYRSNFSSGPGFPEYGYPADTVWPAMEQVSSRPTSPEKFSVPHVCARFGPGGQLIKVIPNLPSEGQPALVEVHSMEALLQHTSEQEEMRAFPGPLAKDDTHKVDVINFAQNKAMKCLQNENLIDKESASLLWNFIVLLCRQNGTVVGTDIAELLLRDHRTVWLPGKSPNEANLIDFTNEAVEQVEEEESGEAQLSFLTGGPAAAASSLERETERFRELLLYGRKKDALESAMKNGLWGHALLLASKMDSRTHARVMTRFANSLPINDPLQTVYQLMSGRMPAASTCCGDEKWGDWRPHLAMVLSNLNNNMDVESRTMATMGDTLASRGLLDAAHFCYLMAQAGFGVYTKKTTKLVLIGSNHSLPFLKFATNEAIQRTEAYEYAQSLGAETCPLPSFQVFKFIYSCRLAEMGLATQAFHYCEAIAKSILTQPHLYSPVLISQLVQMASQLRLFDPQLKEKPEEESLAAPTWLVHLQQVERQIKEGAGVWHQDGALPQQCPGTPSSEMEQLDRPGLSQPGALGIANPLLAVPAPSPEHSSPSVRLLPSAPQTLPDGPLASPARVPMFPVPLPPGPLEPGPGCVTPGPALGFLEPSGPGLPPGVPPLQERRHLLQEARSPDPGIVPQEAPVGNSLSELSEENFDGKFANLTPSRTVPDSEAPPGWDRADSGPTQPPLSLSPAPETKRPGQAAKKETKEPKKGESWFFRWLPGKKKTEAYLPDDKNKSIVWDEKKNQWVNLNEPEEEKKAPPPPPTSMPKTVQAAPPALPGPPGAPVNMYSRRAAGTRARYVDVLNPSGTQRSEPALAPADFVAPLAPLPIPSNLFVPTPVSSVRPQGRSGRNDGLLALSSPDAEEPQLPDGTGREGPAAARGLANPEPAPEPKAPGDLPAAGGPPSGAMPFYNPAQLAQACATSGSSRLGRIGQRKHLVLN

SEQ ID NO: 76794 - protein, 385 aa, Homo sapiens
  Payload ID: 15331
  Gene Symbol: SEC16A
  Gene Name: SEC16 homolog A, endoplasmic reticulum export factor
  ENSP ID: ENSP00000317437
MDLLPTSILLASLWICSHLHPPGVSVDLPPTSILLVSLWICSHLHPPGVSVDRPPPPSSWCLCGSPPTSILLVSLWICSPPPSSWCLCGSAPTSILLVSLWIWRLWGLTEGESWFFRWLPGKKKTEAYLPDDKNKSIVWDEKKNQWVNLNEPEEEKKAPPPPPTSMPKTVQAAPPALPGPPGAPVNMYSRRAAGTRARYVDVLNPSGTQRSEPALAPADFVAPLAPLPIPSNLFVPTPVSSVRPQGRSGRNDGLLALSSPDAEEPQLPDGTGREGPAAARGLANPEPAPEPKVLSSAASLPGSELPSSRPEGSQGGELSRCSSMSSLSREVSQHFNQAPGDLPAAGGPPSGAMPFYNPAQLAQACATSGSSRLGRIGQRKHLVLN

SEQ ID NO: 76795 - protein, 2357 aa, Homo sapiens
  Payload ID: 15331
  Gene Symbol: SEC16A
  Gene Name: SEC16 homolog A, endoplasmic reticulum export factor
  ENSP ID: ENSP00000325827
MQPPPQTVPSGMAGPPPAGNPRSVFWASSPYRRRANNNAAVAPTTCPLQPVTDPFAFSRQALQSTPLGSSSKSSPPVLQGPAPAGFSQHPGLLVPHTHARDSSQGPCEPLPGPLTQPRAHASPFSGALTPSAPPGPEMNRSAEVGPSSEPEVQTLPYLPHYIPGVDPETSHGGHPHGNMPGLDRPLSRQNPHDGVVTPAASPSLPQPGLQMPGQWGPVQGGPQPSGQHRSPCPEGPVPSGVPCATSVPHFPTPSILHQGPGHEQHSPLVAPPAALPSDGRDEVSHLQSGSHLANNSDPESTFRQNPRIVNHWASPELRQNPGVKNEHRPASALVNPLARGDSPENRTHHPLGAGAGSGCAPLEADSGASGALAMFFQGGETENEENLSSEKAGLSGQADFDDFCSSPGLGRPPAPTHVGAGSLCQALLPGPSNEAAGDVWGDTASTGVPDASGSQYENVENLEFVQNQEVLPSEPLNLDPSSPSDQFRYGPLPGPAVPRHGAVCHTGAPDATLHTVHPDSVSSSYSSRSHGRLSGSARPQELVGTFIQQEVGKPEDEASGSFFKQIDSSPVGGETDETTVSQNYRGSVSQPSTPSPPKPTGIFQTSANSSFEPVKSHLVGVKPFEADRANVVGEVRETCVRQKQCRPAAALPDASPGNLEQPPDNMETLCAPQVCPLPLNSTTEAVHMLPHAGAPPLDTVYPAPEKRPSARTQGPVKCESPATTLWAQSELPDFGGNVLLAPAAPALYVCAKPQPPVVQPPEEAMSGQQSRNPSSAAPVQSRGGIGASENLENPPKMGEEEALQSQASSGYASLLSSPPTESLQNPPVLIAQPDHSYNLAQPINFSVSLSNSHEKNQSWREALVGDRPAVSSWALGGDSGENTSLSGIPTSSVLSLSLPSSVAQSNFPQGSGASEMVSNQPANLLVQPPSQPVPENLVPESQKDRKAGSALPGFANSPAGSTSVVLVPPAHGTLVPDGNKANHSSHQEDTYGALDFTLSRTLENPVNVYNPSHSDSLASQQSVASHPRQSGPGAPNLDRFYQQVTKDAQGQPGLERAQQELVPPQQQASPPQLPKAMFSELSNPESLPAQGQAQNSAQSPASLVLVDAGQQLPPRPPQSSSVSLVSSGSGQAAVPSEQPWPQPVPALAPGPPPQDLAAYYYYRPLYDAYQPQYSLPYPPEPGAASLYYQDVYSLYEPRYRPYDGAASAYAQNYRYPEPERPSSRASHSSERPPPRQGYPEGYYSSKSGWSSQSDYYASYYSSQYDYGDPGHWDRYHYSARVRDPRTYDRRYWCDAEYDAYRREHSAFGDRPEKRDNNWRYDPRFTGSFDDDPDPHRDPYGEEVDRRSVHSEHSARSLHSAHSLASRRSSLSSHSHQSQIYRSHNVAAGSYEAPLPPGSFHGDFAYGTYRSNFSSGPGFPEYGYPADTVWPAMEQVSSRPTSPEKFSVPHVCARFGPGGQLIKVIPNLPSEGQPALVEVHSMEALLQHTSEQEEMRAFPGPLAKDDTHKVDVINFAQNKAMKCLQNENLIDKESASLLWNFIVLLCRQNGTVVGTDIAELLLRDHRTVWLPGKSPNEANLIDFTNEAVEQVEEEESGEAQLSFLTGGPAAAASSLERETERFRELLLYGRKKDALESAMKNGLWGHALLLASKMDSRTHARVMTRFANSLPINDPLQTVYQLMSGRMPAASTCCGDEKWGDWRPHLAMVLSNLNNNMDVESRTMATMGDTLASRGLLDAAHFCYLMAQAGFGVYTKKTTKLVLIGSNHSLPFLKFATNEAIQRTEAYEYAQSLGAETCPLPSFQVFKFIYSCRLAEMGLATQAFHYCEAIAKSILTQPHLYSPVLISQLVQMASQLRLFDPQLKEKPEEESLAAPTWLVHLQQVERQIKEGAGVWHQDGALPQQCPGTPSSEMEQLDRPGLSQPGALGIANPLLAVPAPSPEHSSPSVRLLPSAPQTLPDGPLASPARVPMFPVPLPPGPLEPGPGCVTPGPALGFLEPSGPGLPPGVPPLQERRHLLQEARSPDPGIVPQEAPVGNSLSELSEENFDGKFANLTPSRTVPDSEAPPGWDRADSGPTQPPLSLSPAPETKRPGQAAKKETKEPKKGESWFFRWLPGKKKTEAYLPDDKNKSIVWDEKKNQWVNLNEPEEEKKAPPPPPTSMPKTVQAAPPALPGPPGAPVNMYSRRAAGTRARYVDVLNPSGTQRSEPALAPADFVAPLAPLPIPSNLFVPTPDAEEPQLPDGTGREGPAAARGLANPEPAPEPKVLSSAASLPGSELPSSRPEGSQGGELSRCSSMSSLSREVSQHFNQAPGDLPAAGGPPSGAMPFYNPAQLAQACATSGSSRLGRIGQRKHLVLN

SEQ ID NO: 76796 - protein, 2134 aa, Homo sapiens
  Payload ID: 15331
  Gene Symbol: SEC16A
  Gene Name: SEC16 homolog A, endoplasmic reticulum export factor
  Uniprot ID: O15027
  ENSP ID: ENSP00000360771
MPGLDRPLSRQNPHDGVVTPAASPSLPQPGLQMPGQWGPVQGGPQPSGQHRSPCPEGPVPSGVPCATSVPHFPTPSILHQGPGHEQHSPLVAPPAALPSDGRDEVSHLQSGSHLANNSDPESTFRQNPRIVNHWASPELRQNPGVKNEHRPASALVNPLARGDSPENRTHHPLGAGAGSGCAPLEADSGASGALAMFFQGGETENEENLSSEKAGLSGQADFDDFCSSPGLGRPPAPTHVGAGSLCQALLPGPSNEAAGDVWGDTASTGVPDASGSQYENVENLEFVQNQEVLPSEPLNLDPSSPSDQFRYGPLPGPAVPRHGAVCHTGAPDATLHTVHPDSVSSSYSSRSHGRLSGSARPQELVGTFIQQEVGKPEDEASGSFFKQIDSSPVGGETDETTVSQNYRGSVSQPSTPSPPKPTGIFQTSANSSFEPVKSHLVGVKPFEADRANVVGEVRETCVRQKQCRPAAALPDASPGNLEQPPDNMETLCAPQVCPLPLNSTTEAVHMLPHAGAPPLDTVYPAPEKRPSARTQGPVKCESPATTLWAQSELPDFGGNVLLAPAAPALYVCAKPQPPVVQPPEEAMSGQQSRNPSSAAPVQSRGGIGASENLENPPKMGEEEALQSQASSGYASLLSSPPTESLQNPPVLIAQPDHSYNLAQPINFSVSLSNSHEKNQSWREALVGDRPAVSSWALGGDSGENTSLSGIPTSSVLSLSLPSSVAQSNFPQGSGASEMVSNQPANLLVQPPSQPVPENLVPESQKDRKAGSALPGFANSPAGSTSVVLVPPAHGTLVPDGNKANHSSHQEDTYGALDFTLSRTLENPVNVYNPSHSDSLASQQSVASHPRQSGPGAPNLDRFYQQVTKDAQGQPGLERAQQELVPPQQQASPPQLPKAMFSELSNPESLPAQGQAQNSAQSPASLVLVDAGQQLPPRPPQSSSVSLVSSGSGQAAVPSEQPWPQPVPALAPGPPPQDLAAYYYYRPLYDAYQPQYSLPYPPEPGAASLYYQDVYSLYEPRYRPYDGAASAYAQNYRYPEPERPSSRASHSSERPPPRQGYPEGYYSSKSGWSSQSDYYASYYSSQYDYGDPGHWDRYHYSARVRDPRTYDRRYWCDAEYDAYRREHSAFGDRPEKRDNNWRYDPRFTGSFDDDPDPHRDPYGEEVDRRSVHSEHSARSLHSAHSLASRRSSLSSHSHQSQIYRSHNVAAGSYEAPLPPGSFHGDFAYGTYRSNFSSGPGFPEYGYPADTVWPAMEQVSSRPTSPEKFSVPHVCARFGPGGQLIKVIPNLPSEGQPALVEVHSMEALLQHTSEQEEMRAFPGPLAKDDTHKVDVINFAQNKAMKCLQNENLIDKESASLLWNFIVLLCRQNGTVVGTDIAELLLRDHRTVWLPGKSPNEANLIDFTNEAVEQVEEEESGEAQLSFLTGGPAAAASSLERETERFRELLLYGRKKDALESAMKNGLWGHALLLASKMDSRTHARVMTRFANSLPINDPLQTVYQLMSGRMPAASTCCGDEKWGDWRPHLAMVLSNLNNNMDVESRTMATMGDTLASRGLLDAAHFCYLMAQAGFGVYTKKTTKLVLIGSNHSLPFLKFATNEAIQRTEAYEYAQSLGAETCPLPSFQVFKFIYSCRLAEMGLATQAFHYCEAIAKSILTQPHLYSPVLISQLVQMASQLRLFDPQLKEKPEEESLAAPTWLVHLQQVERQIKEGAGVWHQDGALPQQCPGTPSSEMEQLDRPGLSQPGALGIANPLLAVPAPSPEHSSPSVRLLPSAPQTLPDGPLASPARVPMFPVPLPPGPLEPGPGCVTPGPALGFLEPSGPGLPPGVPPLQERRHLLQEARSPDPGIVPQEAPVGNSLSELSEENFDGKFANLTPSRTVPDSEAPPGWDRADSGPTQPPLSLSPAPETKRPGQAAKKETKEPKKGESWFFRWLPGKKKTEAYLPDDKNKSIVWDEKKNQWVNLNEPEEEKKAPPPPPTSMPKTVQAAPPALPGPPGAPVNMYSRRAAGTRARYVDVLNPSGTQRSEPALAPADFVAPLAPLPIPSNLFVPTPDAEEPQLPDGTGREGPAAARGLANPEPAPEPKAPGDLPAAGGPPSGAMPFYNPAQLAQACATSGSSRLGRIGQRKHLVLN

SEQ ID NO: 76797 - protein, 2154 aa, Homo sapiens
  Payload ID: 15331
  Gene Symbol: SEC16A
  Gene Name: SEC16 homolog A, endoplasmic reticulum export factor
  Uniprot ID: O15027
  ENSP ID: ENSP00000387583
MPGLDRPLSRQNPHDGVVTPAASPSLPQPGLQMPGQWGPVQGGPQPSGQHRSPCPEGPVPSGVPCATSVPHFPTPSILHQGPGHEQHSPLVAPPAALPSDGRDEVSHLQSGSHLANNSDPESTFRQNPRIVNHWASPELRQNPGVKNEHRPASALVNPLARGDSPENRTHHPLGAGAGSGCAPLEADSGASGALAMFFQGGETENEENLSSEKAGLSGQADFDDFCSSPGLGRPPAPTHVGAGSLCQALLPGPSNEAAGDVWGDTASTGVPDASGSQYENVENLEFVQNQEVLPSEPLNLDPSSPSDQFRYGPLPGPAVPRHGAVCHTGAPDATLHTVHPDSVSSSYSSRSHGRLSGSARPQELVGTFIQQEVGKPEDEASGSFFKQIDSSPVGGETDETTVSQNYRGSVSQPSTPSPPKPTGIFQTSANSSFEPVKSHLVGVKPFEADRANVVGEVRETCVRQKQCRPAAALPDASPGNLEQPPDNMETLCAPQVCPLPLNSTTEAVHMLPHAGAPPLDTVYPAPEKRPSARTQGPVKCESPATTLWAQSELPDFGGNVLLAPAAPALYVCAKPQPPVVQPPEEAMSGQQSRNPSSAAPVQSRGGIGASENLENPPKMGEEEALQSQASSGYASLLSSPPTESLQNPPVLIAQPDHSYNLAQPINFSVSLSNSHEKNQSWREALVGDRPAVSSWALGGDSGENTSLSGIPTSSVLSLSLPSSVAQSNFPQGSGASEMVSNQPANLLVQPPSQPVPENLVPESQKDRKAGSALPGFANSPAGSTSVVLVPPAHGTLVPDGNKANHSSHQEDTYGALDFTLSRTLENPVNVYNPSHSDSLASQQSVASHPRQSGPGAPNLDRFYQQVTKDAQGQPGLERAQQELVPPQQQASPPQLPKAMFSELSNPESLPAQGQAQNSAQSPASLVLVDAGQQLPPRPPQSSSVSLVSSGSGQAAVPSEQPWPQPVPALAPGPPPQDLAAYYYYRPLYDAYQPQYSLPYPPEPGAASLYYQDVYSLYEPRYRPYDGAASAYAQNYRYPEPERPSSRASHSSERPPPRQGYPEGYYSSKSGWSSQSDYYASYYSSQYDYGDPGHWDRYHYSARVRDPRTYDRRYWCDAEYDAYRREHSAFGDRPEKRDNNWRYDPRFTGSFDDDPDPHRDPYGEEVDRRSVHSEHSARSLHSAHSLASRRSSLSSHSHQSQIYRSHNVAAGSYEAPLPPGSFHGDFAYGTYRSNFSSGPGFPEYGYPADTVWPAMEQVSSRPTSPEKFSVPHVCARFGPGGQLIKVIPNLPSEGQPALVEVHSMEALLQHTSEQEEMRAFPGPLAKDDTHKVDVINFAQNKAMKCLQNENLIDKESASLLWNFIVLLCRQNGTVVGTDIAELLLRDHRTVWLPGKSPNEANLIDFTNEAVEQVEEEESGEAQLSFLTGGPAAAASSLERETERFRELLLYGRKKDALESAMKNGLWGHALLLASKMDSRTHARVMTRFANSLPINDPLQTVYQLMSGRMPAASTCCGDEKWGDWRPHLAMVLSNLNNNMDVESRTMATMGDTLASRGLLDAAHFCYLMAQAGFGVYTKKTTKLVLIGSNHSLPFLKFATNEAIQRTEAYEYAQSLGAETCPLPSFQVFKFIYSCRLAEMGLATQAFHYCEAIAKSILTQPHLYSPVLISQLVQMASQLRLFDPQLKEKPEEESLAAPTWLVHLQQVERQIKEGAGVWHQDGALPQQCPGTPSSEMEQLDRPGLSQPGALGIANPLLAVPAPSPEHSSPSVRLLPSAPQTLPDGPLASPARVPMFPVPLPPGPLEPGPGCVTPGPALGFLEPSGPGLPPGVPPLQERRHLLQEARSPDPGIVPQEAPVGNSLSELSEENFDGKFANLTPSRTVPDSEAPPGWDRADSGPTQPPLSLSPAPETKRPGQAAKKETKEPKKGESWFFRWLPGKKKTEAYLPDDKNKSIVWDEKKNQWVNLNEPEEEKKAPPPPPTSMPKTVQAAPPALPGPPGAPVNMYSRRAAGTRARYVDVLNPSGTQRSEPALAPADFVAPLAPLPIPSNLFVPTPDAEEPQLPDGTGREGPAAARGLANPEPAPEPKLSRCSSMSSLSREVSQHFNQAPGDLPAAGGPPSGAMPFYNPAQLAQACATSGSSRLGRIGQRKHLVLN

SEQ ID NO: 76798 - protein, 1059 aa, Homo sapiens
  Payload ID: 15331
  Gene Symbol: SEC16A
  Gene Name: SEC16 homolog A, endoplasmic reticulum export factor
  ENSP ID: ENSP00000403525
ARVRDPRTYDRRYWCDAEYDAYRREHSAFGDRPEKRDNNWRYDPRFTGSFDDDPDPHRDPYGEEVDRRSVHSEHSARSLHSAHSLASRRSSLSSHSHQSQIYRSHNVAAGSYEAPLPPGSFHGDFAYGTYRSNFSSGPGFPEYGYPADTVWPAMEQVSSRPTSPEKFSVPHVCARFGPGGQLIKVIPNLPSEGQPALVEVHSMEALLQHTSEQEEMRAFPGPLAKDDTHKVDVINFAQNKAMKCLQNENLIDKESASLLWNFIVLLCRQNGTVVGTDIAELLLRDHRTVWLPGKSPNEANLIDFTNEAVEQVEEEESGEAQLSFLTGGPAAAASSLERETERFRELLLYGRKKDALESAMKNGLWGHALLLASKMDSRTHARVMTRFANSLPINDPLQTVYQLMSGRMPAASTCCGDEKWGDWRPHLAMVLSNLNNNMDVESRTMATMGDTLASRGLLDAAHFCYLMAQAGFGVYTKKTTKLVLIGSNHSLPFLKFATNEAIQRTEAYEYAQSLGAETCPLPSFQVFKFIYSCRLAEMGLATQAFHYCEAIAKSILTQPHLYSPVLISQLVQMASQLRLFDPQLKEKPEEESLAAPTWLVHLQQVERQIKEGAGVWHQDGALPQQCPGTPSSEMEQLDRPGLSQPGALGIANPLLAVPAPSPEHSSPSVRLLPSAPQTLPDGPLASPARVPMFPVPLPPGPLEPGPGCVTPGPALGFLEPSGPGLPPGVPPLQERRHLLQEARSPDPGIVPQEAPVGNSLSELSEENFDGKFANLTPSRTVPDSEAPPGWDRADSGPTQPPLSLSPAPETKRPGQAAKKETKEPKKGESWFFRWLPGKKKTEAYLPDDKNKSIVWDEKKNQWVNLNEPEEEKKAPPPPPTSMPKTVQAAPPALPGPPGAPVNMYSRRAAGTRARYVDVLNPSGTQRSEPALAPADFVAPLAPLPIPSNLFVPTPDAEEPQLPDGTGREGPAAARGLANPEPAPEPKVLSSAASLPGSELPSSRPEGSQGGEAPGDLPAAGGPPSGAMPFYNPAQLAQACATSGSSRLGRIGQRKHLVLN

SEQ ID NO: 76799 - protein, 1060 aa, Homo sapiens
  Payload ID: 15332
  Gene Symbol: SEC16B
  Gene Name: SEC16 homolog B, endoplasmic reticulum export factor
  Uniprot ID: Q96JE7
  ENSP ID: ENSP00000308339
MELWAPQRLPQTRGKATAPSKDPDRGFRRDGHHRPVPHSWHNGERFHQWQDNRGSPQPQQEPRADHQQQPHYASRPGDWHQPVSGVDYYEGGYRNQLYSRPGYENSYQSYQSPTMREEYAYGSYYYHGHPQWLQEERVPRQRSPYIWHEDYREQKYLDEHHYENQHSPFGTNSETHFQSNSRNPCKDSPASNSGQEWPGELFPGSLLAEAQKNKPSLASESNLLQQRESGLSSSSYELSQYIRDAPERDDPPASAAWSPVQADVSSAGPKAPMKFYIPHVPVSFGPGGQLVHVGPSSPTDGQAALVELHSMEVILNDSEEQEEMRSFSGPLIREDVHKVDIMTFCQQKAAQSCKSETLGSRDSALLWQLLVLLCRQNGSMVGSDIAELLMQDCKKLEKYKRQPPVANLINLTDEDWPVLSSGTPNLLTGEIPPSVETPAQIVEKFTRLLYYGRKKEALEWAMKNHLWGHALFLSSKMDPQTYSWVMSGFTSTLALNDPLQTLFQLMSGRIPQAATCCGEKQWGDWRPHLAVILSNQAGDPELYQRAIVAIGDTLAGKGLVEAAHFCYLMAHVPFGHYTVKTDHLVLLGSSHSQEFLKFATTEAIQRTEIFEYCQMLGRPKSFIPSFQVYKLLYASRLADYGLVSQALHYCEAIGAAVLSQGESSHPVLLVELIKLAEKLKLSDPLVLERRSGDRDLEPDWLAQLRRQLEQKVAGDIGDPHPTRSDISGAGGTTTENTFYQDFSGCQGYSEAPGYRSALWLTPEQTCLLQPSPQQPFPLQPGSYPAGGGAGQTGTPRPFYSVPETHLPGTGSSVAVTEATGGTVWEEMLQTHLGPGENTVSQETSQPPDGQEVISKPQTPLAARPRSISESSASSAKEDEKESSDEADKNSPRNTAQRGKLGDGKEHTKSSGFGWFSWFRSKPTKNASPAGDEDSSDSPDSEETPRASSPHQAGLGLSLTPSPESPPLPDVSAFSRGRGGGEGRGSASSGGAAAGAGVGGLSGPESVSFELCSNPGVLLPPPALKGAVPLYNPSQVPQLPTATSLNRPNRLAQRRYPTQPC

SEQ ID NO: 76800 - protein, 625 aa, Homo sapiens
  Payload ID: 15332
  Gene Symbol: SEC16B
  Gene Name: SEC16 homolog B, endoplasmic reticulum export factor
  ENSP ID: ENSP00000431727
MELWAPQRLPQTRGKATAPSKDPDRGFRRDGHHRPVPHSWHNGERFHQWQDNRGSPQPQQEPRADHQQQPHYASRPGDWHQPVSGVDYYEGGYRNQLYSRPGYENSYQSYQSPTMREEYAYGSYYYHGHPQWLQEERVPRQRSPYIWHEDYREQKYLDEHHYENQHSPFGTNSETHFQSNSRNPCKDSPASNSGQEWPGELFPGSLLAEAQKNKPSLASESNLLQQRESGLSSSSYELSQYIRDAPERDDPPASAAWSPVQAEDVSSAGPKAPMKFYIPHVPVSFGPGGQLVHVGPSSPTDGQAALVELHSMEVILNDSEEQEEMRSFSGPLIREDVHKVDIMTFCQQKAAQSCKSETLGSRDSALLWQLLVLLCRQNGSMVGSDIAELLMQDCKKLEKYKRQPPVANLINLTDEDWPVLSSGTPNLLTGEIPPSVETPAQIVEKFTRLLYYGRKKEALEWAMKNHLWGHALFLSSKMDPQTYSWVMSGFTSTLALNDPLQTLFQLMSGRIPQAATCCGEKQWGDWRPHLAVILSNQAGDPELYQRAIVAIGDTLAGKGLVEAAHFCYLMAHVPFGHYTVKTDHLVLLGSSHRYATWEKGNSKDIFQGTVLALVGFYGSIFHFLM

SEQ ID NO: 76801 - protein, 175 aa, Homo sapiens
  Payload ID: 15332
  Gene Symbol: SEC16B
  Gene Name: SEC16 homolog B, endoplasmic reticulum export factor
  ENSP ID: ENSP00000435101
  MOD_RES (1)..(1): Any amino acid
XLGSRDSALLWQLLVLLCRQNGSMVGSDIAELLMQDCKKLEKYKRQPPVANLINLTDEDWPVLSSGTPNLLTGEIPPSVETPAQIVEKFTRLLYYGRKKCCGEKQWGDWRPHLAVILSNQAGDPELYQRAIVAIGDTLAGKGLVEAAHFCYLMAHVPFGHYTVKTDHLVLLGSSH

SEQ ID NO: 76802 - protein, 316 aa, Homo sapiens
  Payload ID: 15332
  Gene Symbol: SEC16B
  Gene Name: SEC16 homolog B, endoplasmic reticulum export factor
  ENSP ID: ENSP00000475522
MELWAPQRLPQTRGKATAPSKDPDRGFRRDGHHRPVPHSWHNGERFHQWQDNRGSPQPQQEPRADHQQQPHYASRPGDWHQPVSGVDYYEGGYRNQLYSRPGYENSYQSYQSPTMREEYAYGSYYYHGHPQWLQEERVPRQRSPYIWHEDYREQKYLDEHHYENQHSPFGTNSETHFQSNSRNPCKDSPASNSGQEWPGELFPGSLLAEAQKNKPSLASESNLLQQRESGLSSSSYELSQYIRDAPERDDPPASAAWSPVQADVSSAGPKAPMKFYIPHVPVSFGPGGQLVHVGPSSPTDGQAALVELHSMEGRCT

SEQ ID NO: 76803 - protein, 307 aa, Homo sapiens
  Payload ID: 15333
  Gene Symbol: SEC22A
  Gene Name: SEC22 homolog A, vesicle trafficking protein
  Uniprot ID: Q96IW7
  ENSP ID: ENSP00000310521
MSMILSASVIRVRDGLPLSASTDYEQSTGMQECRKYFKMLSRKLAQLPDRCTLKTGHYNINFISSLGVSYMMLCTENYPNVLAFSFLDELQKEFITTYNMMKTNTAVRPYCFIEFDNFIQRTKQRYNNPRSLSTKINLSDMQTEIKLRPPYQISMCELGSANGVTSAFSVDCKGAGKISSAHQRLEPATLSGIVGFILSLLCGALNLIRGFHAIESLLQSDGDDFNYIIAFFLGTAACLYQCYLLVYYTGWRNVKSFLTFGLICLCNMYLYELRNLWQLFFHVTVGAFVTLQIWLRQAQGKAPDYDV

SEQ ID NO: 76804 - protein, 71 aa, Homo sapiens
  Payload ID: 15333
  Gene Symbol: SEC22A
  Gene Name: SEC22 homolog A, vesicle trafficking protein
  ENSP ID: ENSP00000417200
MSMILSASVIRVRDGLPLSASTDYEQSTGMQECRKYFKMLSRKLAQLPDRCTLKTGHYNINFRRSSLLLIT

SEQ ID NO: 76805 - protein, 101 aa, Homo sapiens
  Payload ID: 15333
  Gene Symbol: SEC22A
  Gene Name: SEC22 homolog A, vesicle trafficking protein
  ENSP ID: ENSP00000417219
MSMILSASVIRVRDGLPLSASTDYEQSTGMQECRKYFKMLSRKLAQLPDRCTLKTGHYNINFISSLGVSYMMLCTENYPNVLAFSFLDELQKEFITTYNMM

SEQ ID NO: 76806 - protein, 307 aa, Homo sapiens; identical to SEQ ID NO: 76803
  Payload ID: 15333
  Gene Symbol: SEC22A
  Gene Name: SEC22 homolog A, vesicle trafficking protein
  Uniprot ID: Q96IW7
  ENSP ID: ENSP00000417972

SEQ ID NO: 76807 - protein, 108 aa, Homo sapiens
  Payload ID: 15333
  Gene Symbol: SEC22A
  Gene Name: SEC22 homolog A, vesicle trafficking protein
  ENSP ID: ENSP00000419039
MSMILSASVIRVRDGLPLSASTDYEQSTGMQECRKYFKMLSRKLAQLPDRCTLKTGHYNINFISSLGVSYMMLCTENYPNVLAFSFLDELQKEFITTYNMMKTNTAVR

SEQ ID NO: 76808 - protein, 218 aa, Homo sapiens
  Payload ID: 15333
  Gene Symbol: SEC22A
  Gene Name: SEC22 homolog A, vesicle trafficking protein
  ENSP ID: ENSP00000420015
MSMILSASVIRVRDGLPLSASTDYEQSTGMQECRKYFKMLSRKLAQLPDRCTLKTGHYNINFISSLGVSYMMLCTENYPNVLAFSFLDELQKEFITTYNMMKTNTAVRPYCFIEFDNFIQRTKQRYNNPRSLSTKINLSDMQTEIKLRPPYQISMCELGSANGVTSAFSVDCKGAGKISSAHQRLEPATLSGIVGFILSLLCGALNLIRGFHAIESLL

SEQ ID NO: 76809 - protein, 99 aa, Homo sapiens
  Payload ID: 15333
  Gene Symbol: SEC22A
  Gene Name: SEC22 homolog A, vesicle trafficking protein
  ENSP ID: ENSP00000420128
MSMILSASVIRVRDGLPLSASTDYEQSTGMQECRKYFKMLSRKLAQLPDRCTLKTGHYNIKVMVMILITSLHFSLEQQPAFTSVIYLSTTPAGGMSNLF

SEQ ID NO: 76810 - protein, 288 aa, Homo sapiens
  Payload ID: 15333
  Gene Symbol: SEC22A
  Gene Name: SEC22 homolog A, vesicle trafficking protein
  ENSP ID: ENSP00000420343
MSMILSASVIRVRDGLPLSASTDYEQSTGMQECRKYFKMLSRKLAQLPDRCTLKTGHYNINFISSLGVSYMMLCTENYPNVLAFSFLDELQKEFITTYNMMKTNTAVRPYCFIEFDNFIQRTKQRYNNPRSLSTKINLSDMQTEIKLRPPYQISMCELGSANGVTSAFSVDCKGAGKISSAHQRLEPATLSGIVGFILSLLCGALNLIRGFHAIESLLQSDGDDFNYIIAFFLGTAACLYQCYLLVYYTGWRNVKSFLTFGLICLCNMYLYELRNLWQLFFHVTVGAF

SEQ ID NO: 76811 - protein, 138 aa, Homo sapiens
  Payload ID: 15333
  Gene Symbol: SEC22A
  Gene Name: SEC22 homolog A, vesicle trafficking protein
  ENSP ID: ENSP00000420574
MSMILSASVIRVRDGLPLSASTDYEQSTGMQECRKYFKMLSRKLAQLPDRCTLKTGHYNINFISSLGVSYMMLCTENYPNVLAFSFLDELQKEFITTYNMMKTNTAVRPYCFIEFDNFIQRTKQRYNNPRSLSTKINL

SEQ ID NO: 76812 - protein, 215 aa, Homo sapiens
  Payload ID: 15334
  Gene Symbol: SEC22B
  Gene Name: SEC22 homolog B, vesicle trafficking protein (gene/pseudogene)
  Uniprot ID: O75396
  ENSP ID: ENSP00000463393
MVLLTMIARVADGLPLAASMQEDEQSGRDLQQYQSQAKQLFRKLNEQSPTRCTLEAGAMTFHYIIEQGVCYLVLCEAAFPKKLAFAYLEDLHSEFDEQHGKKVPTVSRPYSFIEFDTFIQKTKKLYIDSRARRNLGSINTELQDVQRIMVANIEEVLQRGEALSALDSKANNLSSLSKKYRQDAKYLNMRSTYAKLAAVAVFFIMLIVYVRFWWL

SEQ ID NO: 76813 - protein, 79 aa, Homo sapiens
  Payload ID: 15334
  Gene Symbol: SEC22B
  Gene Name: SEC22 homolog B, vesicle trafficking protein (gene/pseudogene)
  ENSP ID: ENSP00000484017
YIDSRARRNLGSINTELQDVQRIMVANIEEVLQRGEALSGWSAMARSWLTATTISWVQAIFPPYPPEYLGLQACATTPG

SEQ ID NO: 76814 - protein, 303 aa, Homo sapiens
  Payload ID: 15335
  Gene Symbol: SEC22C
  Gene Name: SEC22 homolog C, vesicle trafficking protein
  Uniprot ID: Q9BRL7
  ENSP ID: ENSP00000264454
MSVIFFACVVRVRDGLPLSASTDFYHTQDFLEWRRRLKSLALRLAQYPGRGSAEGCDFSIHFSSFGDVACMAICSCQCPAAMAFCFLETLWWEFTASYDTTCIGLASRPYAFLEFDSIIQKVKWHFNYVSSSQMECSLEKIQEELKLQPPAVLTLEDTDVANGVMNGHTPMHLEPAPNFRMEPVTALGILSLILNIMCAALNLIRGVHLAEHSLQVAHEEIGNILAFLVPFVACIFQCYLYLFYSPARTMKVVLMLLFICLGNMYLHGLRNLWQILFHIGVAFLSSYQILTRQLQEKQSDCGV

SEQ ID NO: 76815 - protein, 250 aa, Homo sapiens
  Payload ID: 15335
  Gene Symbol: SEC22C
  Gene Name: SEC22 homolog C, vesicle trafficking protein
  Uniprot ID: Q9BRL7
  ENSP ID: ENSP00000273156
MSVIFFACVVRVRDGLPLSASTDFYHTQDFLEWRRRLKSLALRLAQYPGRGSAEGCDFSIHFSSFGDVACMAICSCQCPAAMAFCFLETLWWEFTASYDTTCIGLASRPYAFLEFDSIIQKVKWHFNYVSSSQMECSLEKIQEELKLQPPAVLTLEDTDVANGVMNGHTPMHLEPAPNFRMEPVTALGILSLILNIMCAALNLIRGVHLAEHSLQVAHEEIGNILAFLVPFVACIFQDPRSWFCWLDQTS

SEQ ID NO: 76816 - protein, 72 aa, Homo sapiens
  Payload ID: 15335
  Gene Symbol: SEC22C
  Gene Name: SEC22 homolog C, vesicle trafficking protein
  ENSP ID: ENSP00000373256
MSVIFFACVVRVRDGLPLSASTDFYHTQDFLEWRRRLKSLALRLAQYPGRGSAEGCDFSIQDKVLPCCPGWS

SEQ ID NO: 76817 - protein, 143 aa, Homo sapiens
  Payload ID: 15335
  Gene Symbol: SEC22C
  Gene Name: SEC22 homolog C, vesicle trafficking protein
  ENSP ID: ENSP00000389589
MSVIFFACVVRVRDGLPLSASTDFYHTQDFLEWRRRLKSLALRLAQYPGRGSAEGCDFSIQHFKGSGRKTVSGIGRTEETIYLQQTATGLFKAKQVQNSVFLLSGTWPAWLSAPASVQQPWPSASWRPCGGNSQLPMTLPALA

SEQ ID NO: 76818 - protein, 236 aa, Homo sapiens
  Payload ID: 15335
  Gene Symbol: SEC22C
  Gene Name: SEC22 homolog C, vesicle trafficking protein
  ENSP ID: ENSP00000391170
MSVIFFACVVRVRDGLPLSASTDFYHTQDFLEWRRRLKSLALRLAQYPGRGSAEGCDFSIHFSSFGDVACMAICSCQCPAAMAFCFLETLWWEFTASYDTTCIGLASRPYAFLEFDSIIQKVKWHFNYVSSSQMECSLEKIQEELKLQPPAVLTLEDTDVANGVMNGHTPMHLEPAPNFRMEPVTALGILSLILNIMCAALNLIRGVHLAEHSLQVAHEEIGNILAFLVPFVACIF

SEQ ID NO: 76819 - protein, 107 aa, Homo sapiens
  Payload ID: 15335
  Gene Symbol: SEC22C
  Gene Name: SEC22 homolog C, vesicle trafficking protein
  ENSP ID: ENSP00000391957
MSVIFFACVVRVRDGLPLSASTDFYHTQDFLEWRRRLKSLALRLAQYPGRGSAEGCDFSIHFSSFGDVACMAICSCQCPAAMAFCFLETLWWEFTASYDTTCIGLAS

SEQ ID NO: 76820 - protein, 142 aa, Homo sapiens
  Payload ID: 15335
  Gene Symbol: SEC22C
  Gene Name: SEC22 homolog C, vesicle trafficking protein
  ENSP ID: ENSP00000397170
MSVIFFACVVRVRDGLPLSASTDFYHTQDFLEWRRRLKSLALRLAQYPGRGSAEGCDFSIHFSSFGDVACMAICSCQCPAAMAFCFLETLWWEFTASYDTTCIGLASRPYAFLEFDSIIQKVKWHFNYVSSSQMECSLEKIQ

SEQ ID NO: 76821 - protein, 72 aa, Homo sapiens; identical to SEQ ID NO: 76816
  Payload ID: 15335
  Gene Symbol: SEC22C
  Gene Name: SEC22 homolog C, vesicle trafficking protein
  ENSP ID: ENSP00000404987

SEQ ID NO: 76822 - protein, 250 aa, Homo sapiens; identical to SEQ ID NO: 76815
  Payload ID: 15335
  Gene Symbol: SEC22C
  Gene Name: SEC22 homolog C, vesicle trafficking protein
  Uniprot ID: Q9BRL7
  ENSP ID: ENSP00000407564

SEQ ID NO: 76823 - protein, 75 aa, Homo sapiens
  Payload ID: 15335
  Gene Symbol: SEC22C
  Gene Name: SEC22 homolog C, vesicle trafficking protein
  ENSP ID: ENSP00000408242
MSVIFFACVVRVRDGLPLSASTDFYHTQDFLEWRRRLKSLALRLAQYPGRGSAEGCDFSIQLLDILKEAEERQSQ

SEQ ID NO: 76824 - protein, 61 aa, Homo sapiens
  Payload ID: 15335
  Gene Symbol: SEC22C
  Gene Name: SEC22 homolog C, vesicle trafficking protein
  ENSP ID: ENSP00000411725
MSVIFFACVVRVRDGLPLSASTDFYHTQDFLEWRRRLKSLALRLAQYPGRGSAEGCDFSIQ

SEQ ID NO: 76825 - protein, 228 aa, Homo sapiens
  Payload ID: 15335
  Gene Symbol: SEC22C
  Gene Name: SEC22 homolog C, vesicle trafficking protein
  Uniprot ID: Q9BRL7
  ENSP ID: ENSP00000414576
MSVIFFACVVRVRDGLPLSASTDFYHTQDFLEWRRRLKSLALRLAQYPGRGSAEGCDFSIHFSSFGDVACMAICSCQCPAAMAFCFLETLWWEFTASYDTTCIGLASRPYAFLEFDSIIQKVKWHFNYVSSSQMECSLEKIQEELKLQPPAVLTLEDTDVANGVMNGHTPMHLEPAPNFRMEPVTALGILSLILNIMCAALNLIRGVHLAEHSLQDPRSWFCWLDQTS

SEQ ID NO: 76826 - protein, 225 aa, Homo sapiens
  Payload ID: 15335
  Gene Symbol: SEC22C
  Gene Name: SEC22 homolog C, vesicle trafficking protein
  ENSP ID: ENSP00000415969
  MOD_RES (1)..(1): Any amino acid
XAAMAFCFLETLWWEFTASYDTTCIGLASRPYAFLEFDSIIQKVKWHFNYVSSSQMECSLEKIQEELKLQPPAVLTLEDTDVANGVMNGHTPMHLEPAPNFRMEPVTALGILSLILNIMCAALNLIRGVHLAEHSLQVAHEEIGNILAFLVPFVACIFQCYLYLFYSPARTMKVVLMLLFICLGNMYLHGLRNLWQILFHIGVAFLSSYQILTRQLQEKQSDCGV

SEQ ID NO: 76827 - protein, 765 aa, Homo sapiens
  Payload ID: 15336
  Gene Symbol: SEC23A
  Gene Name: Sec23 homolog A, COPII coat complex component
  Uniprot ID: Q15436
  ENSP ID: ENSP00000306881
MTTYLEFIQQNEERDGVRFSWNVWPSSRLEATRMVVPVAALFTPLKERPDLPPIQYEPVLCSRTTCRAVLNPLCQVDYRAKLWACNFCYQRNQFPPSYAGISELNQPAELLPQFSSIEYVVLRGPQMPLIFLYVVDTCMEDEDLQALKESMQMSLSLLPPTALVGLITFGRMVQVHELGCEGISKSYVFRGTKDLSAKQLQEMLGLSKVPLTQATRGPQVQQPPPSNRFLQPVQKIDMNLTDLLGELQRDPWPVPQGKRPLRSSGVALSIAVGLLECTFPNTGARIMMFIGGPATQGPGMVVGDELKTPIRSWHDIDKDNAKYVKKGTKHFEALANRAATTGHVIDIYACALDQTGLLEMKCCPNLTGGYMVMGDSFNTSLFKQTFQRVFTKDMHGQFKMGFGGTLEIKTSREIKISGAIGPCVSLNSKGPCVSENEIGTGGTCQWKICGLSPTTTLAIYFEVVNQHNAPIPQGGRGAIQFVTQYQHSSGQRRIRVTTIARNWADAQTQIQNIAASFDQEAAAILMARLAIYRAETEEGPDVLRWLDRQLIRLCQKFGEYHKDDPSSFRFSETFSLYPQFMFHLRRSSFLQVFNNSPDESSYYRHHFMRQDLTQSLIMIQPILYAYSFSGPPEPVLLDSSSILADRILLMDTFFQILIYHGETIAQWRKSGYQDMPEYENFRHLLQAPVDDAQEILHSRFPMPRYIDTEHGGSQARFLLSKVNPSQTHNNMYAWGQESGAPILTDDVSLQVFMDHLKKLAVSSAA

SEQ ID NO: 76828 - protein, 563 aa, Homo sapiens
  Payload ID: 15336
  Gene Symbol: SEC23A
  Gene Name: Sec23 homolog A, COPII coat complex component
  Uniprot ID: Q15436
  ENSP ID: ENSP00000444193
MLGLSKVPLTQATRGPQVQQPPPSNRFLQPVQKIDMNLTDLLGELQRDPWPVPQGKRPLRSSGVALSIAVGLLECTFPNTGARIMMFIGGPATQGPGMVVGDELKTPIRSWHDIDKDNAKYVKKGTKHFEALANRAATTGHVIDIYACALDQTGLLEMKCCPNLTGGYMVMGDSFNTSLFKQTFQRVFTKDMHGQFKMGFGGTLEIKTSREIKISGAIGPCVSLNSKGPCVSENEIGTGGTCQWKICGLSPTTTLAIYFEVVNQHNAPIPQGGRGAIQFVTQYQHSSGQRRIRVTTIARNWADAQTQIQNIAASFDQEAAAILMARLAIYRAETEEGPDVLRWLDRQLIRLCQKFGEYHKDDPSSFRFSETFSLYPQFMFHLRRSSFLQVFNNSPDESSYYRHHFMRQDLTQSLIMIQPILYAYSFSGPPEPVLLDSSSILADRILLMDTFFQILIYHGETIAQWRKSGYQDMPEYENFRHLLQAPVDDAQEILHSRFPMPRYIDTEHGGSQARFLLSKVNPSQTHNNMYAWGQESGAPILTDDVSLQVFMDHLKKLAVSSAA

SEQ ID NO: 76829 - protein, 736 aa, Homo sapiens
  Payload ID: 15336
  Gene Symbol: SEC23A
  Gene Name: Sec23 homolog A, COPII coat complex component
  ENSP ID: ENSP00000445393
MTTYLEFIQQNEERDGVRFSWNVWPSSRLEATRMVVPVAALFTPLKERPDLPPIQYEPVLCSRTTCRAVLNPLCQVDYRAKLWACNFCYQRNQRGPQMPLIFLYVVDTCMEDEDLQALKESMQMSLSLLPPTALVGLITFGRMVQVHELGCEGISKSYVFRGTKDLSAKQLQEMLGLSKVPLTQATRGPQVQQPPPSNRFLQPVQKIDMNLTDLLGELQRDPWPVPQGKRPLRSSGVALSIAVGLLECTFPNTGARIMMFIGGPATQGPGMVVGDELKTPIRSWHDIDKDNAKYVKKGTKHFEALANRAATTGHVIDIYACALDQTGLLEMKCCPNLTGGYMVMGDSFNTSLFKQTFQRVFTKDMHGQFKMGFGGTLEIKTSREIKISGAIGPCVSLNSKGPCVSENEIGTGGTCQWKICGLSPTTTLAIYFEVVNQHNAPIPQGGRGAIQFVTQYQHSSGQRRIRVTTIARNWADAQTQIQNIAASFDQEAAAILMARLAIYRAETEEGPDVLRWLDRQLIRLCQKFGEYHKDDPSSFRFSETFSLYPQFMFHLRRSSFLQVFNNSPDESSYYRHHFMRQDLTQSLIMIQPILYAYSFSGPPEPVLLDSSSILADRILLMDTFFQILIYHGETIAQWRKSGYQDMPEYENFRHLLQAPVDDAQEILHSRFPMPRYIDTEHGGSQARFLLSKVNPSQTHNNMYAWGQESGAPILTDDVSLQVFMDHLKKLAVSSAA

SEQ ID NO: 76830 - protein, 108 aa, Homo sapiens
  Payload ID: 15336
  Gene Symbol: SEC23A
  Gene Name: Sec23 homolog A, COPII coat complex component
  ENSP ID: ENSP00000447489
MTTYLEFIQQNEERDGVRFSWNVWPSSRLEATRMVVPVAALFTPLKERPDLPPIQYEPVLCSRTTCRAVLNPLCQVDYRAKLWACNFCYQRNQVRKHPLHAGRSGSCL

SEQ ID NO: 76831 - protein, 169 aa, Homo sapiens
  Payload ID: 15336
  Gene Symbol: SEC23A
  Gene Name: Sec23 homolog A, COPII coat complex component
  ENSP ID: ENSP00000450819
MTTYLEFIQQNEERDGVRFSWNVWPSSRLEATRMVVPVAALFTPLKERPDLPPIQYEPVLCSRTTCRAVLNPLCQVDYRAKLWACNFCYQRNQFPPSYAGISELNQPAELLPQFSSIEYVVLRGPQMPLIFLYVVDTCMEDEDLQALKESMQMSLSLLPPTALVGLITF

SEQ ID NO: 76832 - protein, 140 aa, Homo sapiens
  Payload ID: 15336
  Gene Symbol: SEC23A
  Gene Name: Sec23 homolog A, COPII coat complex component
  ENSP ID: ENSP00000451230
MTTYLEFIQQNEERDGVRFSWNVWPSSRLEATRMVVPVAALFTPLKERPDLPPIQYEPVLCSRTTCRAVLNPLCQVDYRAKLWACNFCYQRNQFPPSYAGISELNQPAELLPQFSSIEYVVLRGPQMPLIFLYVVDTCME

SEQ ID NO: 76833 - protein, 86 aa, Homo sapiens
  Payload ID: 15336
  Gene Symbol: SEC23A
  Gene Name: Sec23 homolog A, COPII coat complex component
  ENSP ID: ENSP00000451924
MTTYLEFIQQNEERDGVRFSWNVWPSSRLEATRMVVPVAALFTPLKERPDLPPIQYEPVLCSRTTCRAVLNPLCSLFSTQKLEFYE

SEQ ID NO: 76834 - protein, 93 aa, Homo sapiens
  Payload ID: 15336
  Gene Symbol: SEC23A
  Gene Name: Sec23 homolog A, COPII coat complex component
  ENSP ID: ENSP00000451999
MTTYLEFIQQNEERDGVRFSWNVWPSSRLEATRMVVPVAALFTPLKERPDLPPIQYEPVLCSRTTCRAVLNPLCQVDYRAKLWACNFCYQRNQ

SEQ ID NO: 76835 - protein, 40 aa, Homo sapiens
  Payload ID: 15336
  Gene Symbol: SEC23A
  Gene Name: Sec23 homolog A, COPII coat complex component
  ENSP ID: ENSP00000452390
MTTYLEFIQQNEERDGVRFSWNVWPSSRLEATRMVVPVAA

SEQ ID NO: 76836 - protein, 85 aa, Homo sapiens
  Payload ID: 15336
  Gene Symbol: SEC23A
  Gene Name: Sec23 homolog A, COPII coat complex component
  ENSP ID: ENSP00000452575
MTTYLEFIQQNEERDGVRFSWNVWPSSRLEATRMVVPVAALFTPLKERPDLPPIQYEPVLCSRTTCRAVLNPLCLFSTQKLEFYE

SEQ ID NO: 76837 - protein, 86 aa, Homo sapiens; identical to SEQ ID NO: 76833
  Payload ID: 15336
  Gene Symbol: SEC23A
  Gene Name: Sec23 homolog A, COPII coat complex component
  ENSP ID: ENSP00000486142

SEQ ID NO: 76838 - protein, 767 aa, Homo sapiens
  Payload ID: 15337
  Gene Symbol: SEC23B
  Gene Name: Sec23 homolog B, COPII coat complex component
  Uniprot ID: Q15437
  ENSP ID: ENSP00000262544
MATYLEFIQQNEERDGVRFSWNVWPSSRLEATRMVVPLACLLTPLKERPDLPPVQYEPVLCSRPTCKAVLNPLCQVDYRAKLWACNFCFQRNQFPPAYGGISEVNQPAELMPQFSTIEYVIQRGAQSPLIFLYVVDTCLEEDDLQALKESLQMSLSLLPPDALVGLITFGRMVQVHELSCEGISKSYVFRGTKDLTAKQIQDMLGLTKPAMPMQQARPAQPQEHPFASSRFLQPVHKIDMNLTDLLGELQRDPWPVTQGKRPLRSTGVALSIAVGLLEGTFPNTGARIMLFTGGPPTQGPGMVVGDELKIPIRSWHDIEKDNARFMKKATKHYEMLANRTAANGHCIDIYACALDQTGLLEMKCCANLTGGYMVMGDSFNTSLFKQTFQRIFTKDFNGDFRMAFGATLDVKTSRELKIAGAIGPCVSLNVKGPCVSENELGVGGTSQWKICGLDPTSTLGIYFEVVNQHNTPIPQGGRGAIQFVTHYQHSSTQRRIRVTTIARNWADVQSQLRHIEAAFDQEAAAVLMARLGVFRAESEEGPDVLRWLDRQLIRLCQKFGQYNKEDPTSFRLSDSFSLYPQFMFHLRRSPFLQVFNNSPDESSYYRHHFARQDLTQSLIMIQPILYSYSFHGPPEPVLLDSSSILADRILLMDTFFQIVIYLGETIAQWRKAGYQDMPEYENFKHLLQAPLDDAQEILQARFPMPRYINTEHGGSQARFLLSKVNPSQTHNNLYAWGQETGAPILTDDVSLQVFMDHLKKLAVSSAC

SEQ ID NO: 76839 - protein, 767 aa, Homo sapiens; identical to SEQ ID NO: 76838
  Payload ID: 15337
  Gene Symbol: SEC23B
  Gene Name: Sec23 homolog B, COPII coat complex component
  Uniprot ID: Q15437
  ENSP ID: ENSP00000338844

SEQ ID NO: 76840 - protein, 767 aa, Homo sapiens; identical to SEQ ID NO: 76838
  Payload ID: 15337
  Gene Symbol: SEC23B
  Gene Name: Sec23 homolog B, COPII coat complex component
  Uniprot ID: Q15437
  ENSP ID: ENSP00000366685

SEQ ID NO: 76841 - protein, 767 aa, Homo sapiens; identical to SEQ ID NO: 76838
  Payload ID: 15337
  Gene Symbol: SEC23B
  Gene Name: Sec23 homolog B, COPII coat complex component
  Uniprot ID: Q15437
  ENSP ID: ENSP00000366695

SEQ ID NO: 76842 - protein, 331 aa, Homo sapiens
  Payload ID: 15337
  Gene Symbol: SEC23B
  Gene Name: Sec23 homolog B, COPII coat complex component
  ENSP ID: ENSP00000403971
MATYLEFIQQNEERDGVRFSWNVWPSSRLEATRMVVPLACLLTPLKERPDLPPVQYEPVLCSRPTCKAVLNPLCQVDYRAKLWACNFCFQRNQFPPAYGGISEVNQPAELMPQFSTIEYVIQRGAQSPLIFLYVVDTCLEEDDLQALKESLQMSLSLLPPDALVGLITFGRMVQVHELSCEGISKSYVFRGTKDLTAKQIQDMLGLTKPAMPMQQARPAQPQEHPFASSRFLQPVHKIDMNLTDLLGELQRDPWPVTQGKRPLRSTGVALSIAVGLLEGTFPNTGARIMLFTGGPPTQGPGMVVGDELKIPIRSWHDIEKDNARFMKKATK

SEQ ID NO: 76843 - protein, 246 aa, Homo sapiens
  Payload ID: 15337
  Gene Symbol: SEC23B
  Gene Name: Sec23 homolog B, COPII coat complex component
  ENSP ID: ENSP00000409882
QRRIRVTTIARNWADVQSQLRHIEAAFDQEAAAVLMARLGVFRAESEEGPDVLRWLDRQLIRLCQKFGQYNKEDPTSFRLSDSFSLYPQFMFHLRRSPFLQVFNNSPDESSYYRHHFARQDLTQSLIMIQPILYSYSFHGPPETIAQWRKAGYQDMPEYENFKHLLQAPLDDAQEILQARFPMPRYINTEHGGSQARFLLSKVNPSQTHNNLYAWGQETGAPILTDDVSLQVFMDHLKKLAVSSAC

SEQ ID NO: 76844 - protein, 1000 aa, Homo sapiens
  Payload ID: 15338
  Gene Symbol: SEC23IP
  Gene Name: SEC23 interacting protein
  Uniprot ID: Q9Y6Y8
  ENSP ID: ENSP00000358071
MAERKPNGGSGGASTSSSGTNLLFSSSATEFSFNVPFIPVTQASASPASLLLPGEDSTDVGEEDSFLGQTSIHTSAPQTFSYFSQVSSSSDPFGNIGQSPLTTAATSVGQSGFPKPLTALPFTTGSQDVSNAFSPSISKAQPGAPPSSLMGINSYLPSQPSSLPPSYFGNQPQGIPQPGYNPYRHTPGSSRANPYIAPPQLQQCQTPGPPAHPPPSGPPVQMYQMPPGSLPPVPSSVQSPAQQQVPARPGAPSVQVPSPFLLQNQYEPVQPHWFYCKEVEYKQLWMPFSVFDSLNLEEIYNSVQPDPESVVLGTDGGRYDVYLYDRIRKAAYWEEEPAEVRRCTWFYKGDTDSRFIPYTEEFSEKLEAEYKKAVTTNQWHRRLEFPSGETIVMHNPKVIVQFQPSSVPDEWGTTQDGQTRPRVVKRGIDDNLDEIPDGEMPQVDHLVFVVHGIGPVCDLRFRSIIECVDDFRVVSLKLLRTHFKKSLDDGKVSRVEFLPVHWHSSLGGDATGVDRNIKKITLPSIGRFRHFTNETLLDILFYNSPTYCQTIVEKVGMEINHLHALFMSRNPDFKGGVSVAGHSLGSLILFDILSNQKDLNLSKCPGPLAVANGVVKQLHFQEKQMPEEPKLTLDESYDLVVENKEVLTLQETLEALSLSEYFSTFEKEKIDMESLLMCTVDDLKEMGIPLGPRKKIANFVEHKAAKLKKAASEKKAVAATSTKGQEQSAQKTKDMASLPSESNEPKRKLPVGACVSSVCVNYESFEVGAGQVSVAYNSLDFEPEIFFALGSPIAMFLTIRGVDRIDENYSLPTCKGFFNIYHPLDPVAYRLEPMIVPDLDLKAVLIPHHKGRKRLHLELKESLSRMGSDLKQGFISSLKSAWQTLNEFARAHTSSTQLQEELEKVANQIKEEEEKQVVEAEKVVESPDFSKDEDYLGKVGMLNGGRRIDYVLQEKPIESFNEYLFALQSHLCYWESEDTALLLLKEIYRTMNISPEQPQH

SEQ ID NO: 76845 - protein, 194 aa, Homo sapiens
  Payload ID: 15338
  Gene Symbol: SEC23IP
  Gene Name: SEC23 interacting protein
  ENSP ID: ENSP00000396906
EPVQPHWFYCKEVEYKQLWMPFSVFDSLNLEEIYNSVQPDPESVVLGTDGGRYDVYLYDRIRKAAYWEEEPAEVRRCTWFYKGDTDSRFIPYTEEFSEKLEVIVQFQPSSVPDEWGTTQDGQTRPRVVKRGIDDNLDEIPDGEMPQVDHLVFVVHGIGPVCDLRFRSIIECVDDFRVVSLKLLRTHFKKSLDDG

SEQ ID NO: 76846 - protein, 153 aa, Homo sapiens
  Payload ID: 15338
  Gene Symbol: SEC23IP
  Gene Name: SEC23 interacting protein
  ENSP ID: ENSP00000416723
  MOD_RES (1)..(1): Any amino acid
XSVQSPAQQQVPARPGAPSVQVPSPFLLQNQYEPVQPHWFYCKEVEYKQLWMPFSVFDSLNLEEIYNSVQPDPESVVLGTDGGRYDVYLYDRIRKAAYWEEEPAEVRRCTWFYKGDTDSRFIPYTEEFSEKLEVRVLYFFMSFFKKCRSYIHW

SEQ ID NO: 76847 - protein, 486 aa, Homo sapiens
  Payload ID: 15338
  Gene Symbol: SEC23IP
  Gene Name: SEC23 interacting protein
  ENSP ID: ENSP00000438773
MAERKPNGGSGGASTSSSGTNLLFSSSATEFSFNVPFIPVTQASASPASLLLPGEDSTDVGEEDSFLGQTSIHTSAPQTFSYFSQVSSSSDPFGNIGQSPLTTAATSVGQSGFPKPLTALPFTTGSQDVSNAFSPSISKAQPGAPPSSLMGINSYLPSQPSSLPPSYFGNQPQGIPQPGYNPYRHTPGSSRANPYIAPPQLQQCQTPGPPAHPPPSGPPVQMYQMPPGSLPPVPSSVQSPAQQQVPARPGAPSVQVPSPFLLQNQYEPVQPHWFYCKEVEYKQLWMPFSVFDSLNLEEIYNSVQPDPESVVLGTDGGRYDVYLYDRIRKAAYWEEEPAEVRRCTWFYKGDTDSRFIPYTEEFSEKLEAEYKKAVTTNQWHRRLEFPSGETIVMHNPKVIVQFQPSSVPDEWGTTQDGQTRPRVVKRGIDDNLDEIPDGEMPQVDHLVFVVHGIGPVCDLRFRSIIECVDDLGWFLSNCCGHISRNL

SEQ ID NO: 76848 - protein, 613 aa, Homo sapiens
  Payload ID: 15339
  Gene Symbol: SEC24A
  Gene Name: SEC24 homolog A, COPII coat complex component
  Uniprot ID: O95486
  ENSP ID: ENSP00000321749
MSQPGIPASGGAPASLQAQNGAALASGSPYTNGPVQNALLSSQESVSQGYNFQLPGSYPHPIPAKTLNPVSGQSNYGGSQGSGQTLNRPPVASNPVTPSLHSGPAPRMPLPASQNPATTPMPSSSFLPEANLPPPLNWQYNYPSTASQTNHCPRASSQPTVSGNTSLTTNHQYVSSGYPSLQNSFIKSGPSVPPLVNPPLPTTFQPGAPHGPPPAGGPPPVRALTPLTSSYRDVPQPLFNSAVNQEGITSNTNNGSMVVHSSYDEIEGGGLLATPQLTNKNPKMSRSVGYSYPSLPPGYQNTTPPGATGVPPSSLNYPSGPQAFTQTPLGANHLTTSMSGLSLQPEGLRVVNLLQERNMLPSTPLKPPVPNLHEDIQKLNCNPELFRCTLTSIPQTQALLNKAKLPLGLLLHPFKDLVQLPVVTSSTIVRCRSCRTYINPFVSFLDQRRWKCNLCYRVNDVPEEFLYNPLTRVYGEPHRRPEVQNATIEFMAPSEYMLRPPQPPVYLFVFDVSHNAVETGYLNSVCQSLLDNLDLLPGNTRTKIGFITFDSTIHFYGLQESLSQPQMLIVSDIEDVFIPMPENLLVNLNESKESVIGVSSEETLITCLEIAMR

SEQ ID NO: 76849 - protein, 1093 aa, Homo sapiens
  Payload ID: 15339
  Gene Symbol: SEC24A
  Gene Name: SEC24 homolog A, COPII coat complex component
  Uniprot ID: O95486
  ENSP ID: ENSP00000381823
MSQPGIPASGGAPASLQAQNGAALASGSPYTNGPVQNALLSSQESVSQGYNFQLPGSYPHPIPAKTLNPVSGQSNYGGSQGSGQTLNRPPVASNPVTPSLHSGPAPRMPLPASQNPATTPMPSSSFLPEANLPPPLNWQYNYPSTASQTNHCPRASSQPTVSGNTSLTTNHQYVSSGYPSLQNSFIKSGPSVPPLVNPPLPTTFQPGAPHGPPPAGGPPPVRALTPLTSSYRDVPQPLFNSAVNQEGITSNTNNGSMVVHSSYDEIEGGGLLATPQLTNKNPKMSRSVGYSYPSLPPGYQNTTPPGATGVPPSSLNYPSGPQAFTQTPLGANHLTTSMSGLSLQPEGLRVVNLLQERNMLPSTPLKPPVPNLHEDIQKLNCNPELFRCTLTSIPQTQALLNKAKLPLGLLLHPFKDLVQLPVVTSSTIVRCRSCRTYINPFVSFLDQRRWKCNLCYRVNDVPEEFLYNPLTRVYGEPHRRPEVQNATIEFMAPSEYMLRPPQPPVYLFVFDVSHNAVETGYLNSVCQSLLDNLDLLPGNTRTKIGFITFDSTIHFYGLQESLSQPQMLIVSDIEDVFIPMPENLLVNLNESKELVQDLLKTLPQMFTKTLETQSALGPALQAAFKLMSPTGGRMSVFQTQLPTLGVGALKPREEPNHRSSAKDIHMTPSTDFYKKLALDCSGQQVAVDLFLLSGQYSDLASLGCISRYSAGSVYYYPSYHHQHNPVQVQKLQKELQRYLTRKIGFEAVMRIRCTKGLSIHTFHGNFFVRSTDLLSLPNVNPDAGYAVQMSVEESLTDTQLVSFQSALLYTSSKGERRIRVHTLCLPVVSTLNDVFLGADVQAISGLLANMAVDRSMTASLSDARDALVNAVIDSLSAYRSSVLSNQQPGLMVPFSLRLFPLFVLALLKQKSFQTGTNARLDERIFAMCQVKNQPLVYLMLTTHPSLYRVDNLSDEGALNISDRTIPQPPILQLSVEKLSRDGAFLMDAGSVLMLWVGKNCTQNFLSQVLGVQNYASIPQPMTDLPELDTPESARIIAFISWLREQRPFFPILYVIRDESPMKANFLQNMIEDRTESALSYYEFLLHIQQQVNK

SEQ ID NO: 76850 - protein, 150 aa, Homo sapiens
  Payload ID: 15339
  Gene Symbol: SEC24A
  Gene Name: SEC24 homolog A, COPII coat complex component
  ENSP ID: ENSP00000424273
  MOD_RES (1)..(1): Any amino acid
XYRVNDVPEEFLYNPLTRVYGEPHRRPEVQNATIEFMAPSEYMLRPPQPPVYLFVFDVSHNAVETGYLNSVCQSLLDNLDLLPGNTRTKIGFITFDSTIHFYGLQESLSQPQMLIVSDIEDVFIPMPENLLVNLNESKEVRHIFLPDMFN

SEQ ID NO: 76851 - protein, 1268 aa, Homo sapiens
  Payload ID: 15340
  Gene Symbol: SEC24B
  Gene Name: SEC24 homolog B, COPII coat complex component
  Uniprot ID: O95487
  ENSP ID: ENSP00000265175
MSAPAGSSHPAASARIPPKFGGAAVSGAAAPAGPGAGPAPHQQNGPAQNQMQVPSGYGLHHQNYIAPSGHYSQGPGKMTSLPLDTQCGDYYSALYTVPTQNVTPNTVNQQPGAQQLYSRGPPAPHIVGSTLGSFQGAASSASHLHTSASQPYSSFVNHYNSPAMYSASSSVASQGFPSTCGHYAMSTVSNAAYPSVSYPSLPAGDTYGQMFTSQNAPTVRPVKDNSFSGQNTAISHPSPLPPLPSQQHHQQQSLSGYSTLTWSSPGLPSTQDNLIRNHTGSLAVANNNPTITVADSLSCPVMQNVQPPKSSPVVSTVLSGSSGSSSTRTPPTANHPVEPVTSVTQPSELLQQKGVQYGEYVNNQASSAPTPLSSTSDDEEEEEEDEEAGVDSSSTTSSASPMPNSYDALEGGSYPDMLSSSASSPAPDPAPEPDPASAPAPASAPAPVVPQPSKMAKPFGYGYPTLQPGYQNATAPLISGVQPSNPVYSGFQQYPQQYPGVNQLSSSIGGLSLQSSPQPESLRPVNLTQERNILPMTPVWAPVPNLNADLKKLNCSPDSFRCTLTNIPQTQALLNKAKLPLGLLLHPFRDLTQLPVITSNTIVRCRSCRTYINPFVSFIDQRRWKCNLCYRVNDVPEEFMYNPLTRSYGEPHKRPEVQNSTVEFIASSDYMLRPPQPAVYLFVLDVSHNAVEAGYLTILCQSLLENLDKLPGDSRTRIGFMTFDSTIHFYNLQEGLSQPQMLIVSDIDDVFLPTPDSLLVNLYESKELIKDLLNALPNMFTNTRETHSALGPALQAAFKLMSPTGGRVSVFQTQLPSLGAGLLQSREDPNQRSSTKVVQHLGPATDFYKKLALDCSGQQTAVDLFLLSSQYSDLASLACMSKYSAGCIYYYPSFHYTHNPSQAEKLQKDLKRYLTRKIGFEAVMRIRCTKGLSMHTFHGNFFVRSTDLLSLANINPDAGFAVQLSIEESLTDTSLVCFQTALLYTSSKGERRIRVHTLCLPVVSSLADVYAGVDVQAAICLLANMAVDRSVSSSLSDARDALVNAVVDSLSAYGSTVSNLQHSALMAPSSLKLFPLYVLALLKQKAFRTGTSTRLDDRVYAMCQIKSQPLVHLMKMIHPNLYRIDRLTDEGAVHVNDRIVPQPPLQKLSAEKLTREGAFLMDCGSVFYIWVGKGCDNNFIEDVLGYTNFASIPQKMTHLPELDTLSSERARSFITWLRDSRPLSPILHIVKDESPAKAEFFQHLIEDRTEAAFSYYEFLLHVQQQICK

SEQ ID NO: 76852 - protein, 1233 aa, Homo sapiens
  Payload ID: 15340
  Gene Symbol: SEC24B
  Gene Name: SEC24 homolog B, COPII coat complex component
  Uniprot ID: O95487
  ENSP ID: ENSP00000382051
MSAPAGSSHPAASARIPPKFGGAAVSGAAAPAGPGAGPAPHQQNGPAQNQMQVPSGYGLHHQNYIAPSGHYSQGPGKMTSLPLDTQCGDYYSALYTVPTQNVTPNTVNQQPGAQQLYSRGPPAPHIVGSTLGSFQGAASSASHLHTSASQPYSSFVNHYNSPAMYSASSSVASQGFPSTCGHYAMSTVSNAAYPSVSYPSLPAGDTYGQMFTSQNAPTVRPVKDNSFSGQNTAISHPSPLPPLPSQQHHQQQSLSGYSTLTWSSPGLPSTQDNLIRNHTGSLAVANNNPTITVADSLSCPVMQNVQPPKSSPVVSTVLSGSSGSSSTRTPPTANHPVEPVTSVTQPSELLQQKGVDSSSTTSSASPMPNSYDALEGGSYPDMLSSSASSPAPDPAPEPDPASAPAPASAPAPVVPQPSKMAKPFGYGYPTLQPGYQNATAPLISGVQPSNPVYSGFQQYPQQYPGVNQLSSSIGGLSLQSSPQPESLRPVNLTQERNILPMTPVWAPVPNLNADLKKLNCSPDSFRCTLTNIPQTQALLNKAKLPLGLLLHPFRDLTQLPVITSNTIVRCRSCRTYINPFVSFIDQRRWKCNLCYRVNDVPEEFMYNPLTRSYGEPHKRPEVQNSTVEFIASSDYMLRPPQPAVYLFVLDVSHNAVEAGYLTILCQSLLENLDKLPGDSRTRIGFMTFDSTIHFYNLQEGLSQPQMLIVSDIDDVFLPTPDSLLVNLYESKELIKDLLNALPNMFTNTRETHSALGPALQAAFKLMSPTGGRVSVFQTQLPSLGAGLLQSREDPNQRSSTKVVQHLGPATDFYKKLALDCSGQQTAVDLFLLSSQYSDLASLACMSKYSAGCIYYYPSFHYTHNPSQAEKLQKDLKRYLTRKIGFEAVMRIRCTKGLSMHTFHGNFFVRSTDLLSLANINPDAGFAVQLSIEESLTDTSLVCFQTALLYTSSKGERRIRVHTLCLPVVSSLADVYAGVDVQAAICLLANMAVDRSVSSSLSDARDALVNAVVDSLSAYGSTVSNLQHSALMAPSSLKLFPLYVLALLKQKAFRTGTSTRLDDRVYAMCQIKSQPLVHLMKMIHPNLYRIDRLTDEGAVHVNDRIVPQPPLQKLSAEKLTREGAFLMDCGSVFYIWVGKGCDNNFIEDVLGYTNFASIPQKMTHLPELDTLSSERARSFITWLRDSRPLSPILHIVKDESPAKAEFFQHLIEDRTEAAFSYYEFLLHVQQQICK

SEQ ID NO: 76853 - protein, 1298 aa, Homo sapiens
  Payload ID: 15340
  Gene Symbol: SEC24B
  Gene Name: SEC24 homolog B, COPII coat complex component
  Uniprot ID: O95487
  ENSP ID: ENSP00000428564
MSAPAGSSHPAASARIPPKFGGAAVSGAAAPAGPGAGPAPHQQNETGFHHVAQASLELLDPSNLPASASQIAGSTGPAQNQMQVPSGYGLHHQNYIAPSGHYSQGPGKMTSLPLDTQCGDYYSALYTVPTQNVTPNTVNQQPGAQQLYSRGPPAPHIVGSTLGSFQGAASSASHLHTSASQPYSSFVNHYNSPAMYSASSSVASQGFPSTCGHYAMSTVSNAAYPSVSYPSLPAGDTYGQMFTSQNAPTVRPVKDNSFSGQNTAISHPSPLPPLPSQQHHQQQSLSGYSTLTWSSPGLPSTQDNLIRNHTGSLAVANNNPTITVADSLSCPVMQNVQPPKSSPVVSTVLSGSSGSSSTRTPPTANHPVEPVTSVTQPSELLQQKGVQYGEYVNNQASSAPTPLSSTSDDEEEEEEDEEAGVDSSSTTSSASPMPNSYDALEGGSYPDMLSSSASSPAPDPAPEPDPASAPAPASAPAPVVPQPSKMAKPFGYGYPTLQPGYQNATAPLISGVQPSNPVYSGFQQYPQYPGVNQLSSSIGGLSLQSSPQPESLRPVNLTQERNILPMTPVWAPVPNLNADLKKLNCSPDSFRCTLTNIPQTQALLNKAKLPLGLLLHPFRDLTQLPVITSNTIVRCRSCRTYINPFVSFIDQRRWKCNLCYRVNDVPEEFMYNPLTRSYGEPHKRPEVQNSTVEFIASSDYMLRPPQPAVYLFVLDVSHNAVEAGYLTILCQSLLENLDKLPGDSRTRIGFMTFDSTIHFYNLQEGLSQPQMLIVSDIDDVFLPTPDSLLVNLYESKELIKDLLNALPNMFTNTRETHSALGPALQAAFKLMSPTGGRVSVFQTQLPSLGAGLLQSREDPNQRSSTKVVQHLGPATDFYKKLALDCSGQQTAVDLFLLSSQYSDLASLACMSKYSAGCIYYYPSFHYTHNPSQAEKLQKDLKRYLTRKIGFEAVMRIRCTKGLSMHTFHGNFFVRSTDLLSLANINPDAGFAVQLSIEESLTDTSLVCFQTALLYTSSKGERRIRVHTLCLPVVSSLADVYAGVDVQAAICLLANMAVDRSVSSSLSDARDALVNAVVDSLSAYGSTVSNLQHSALMAPSSLKLFPLYVLALLKQKAFRTGTSTRLDDRVYAMCQIKSQPLVHLMKMIHPNLYRIDRLTDEGAVHVNDRIVPQPPLQKLSAEKLTREGAFLMDCGSVFYIWVGKGCDNNFIEDVLGYTNFASIPQKMTHLPELDTLSSERARSFITWLRDSRPLSPILHIVKDESPAKAEFFQHLIEDRTEAAFSYYEFLLHVQQQICK

SEQ ID NO: 76854 - protein, 1094 aa, Homo sapiens
  Payload ID: 15341
  Gene Symbol: SEC24C
  Gene Name: SEC24 homolog C, COPII coat complex component
  Uniprot ID: P53992
  ENSP ID: ENSP00000321845
MNVNQSVPPVPPFGQPQPIYPGYHQSSYGGQSGSTAPAIPYGAYNGPVPGYQQTPPQGMSRAPPSSGAPPASTAQAPCGQAAYGQFGQGDVQNGPSSTVQMQRLPGSQPFGSPLAPVGNQPPVLQPYGPPPTSAQVATQLSGMQISGAVAPAPPSSGLGFGPPTSLASASGSFPNSGLYGSYPQGQAPPLSQAQGHPGIQTPQRSAPSQASSFTPPASGGPRLPSMTGPLLPGQSFGGPSVSQPNHVSSPPQALPPGTQMTGPLGPLPPMHSPQQPGYQPQQNGSFGPARGPQSNYGGPYPAAPTFGSQPGPPQPLPPKRLDPDAIPSPIQVIEDDRNNRGTEPFVTGVRGQVPPLVTTNFLVKDQGNASPRYIRCTSYNIPCTSDMAKQAQVPLAAVIKPLARLPPEEASPYVVDHGESGPLRCNRCKAYMCPFMQFIEGGRRFQCCFCSCINDVPPQYFQHLDHTGKRVDAYDRPELSLGSYEFLATVDYCKNNKFPSPPAFIFMIDVSYNAIRTGLVRLLCEELKSLLDFLPREGGAEESAIRVGFVTYNKVLHFYNVKSSLAQPQMMVVSDVADMFVPLLDGFLVNVNESRAVITSLLDQIPEMFADTRETETVFVPVIQAGMEALKAAECAGKLFLFHTSLPIAEAPGKLKNRDDRKLINTDKEKTLFQPQTGAYQTLAKECVAQGCCVDLFLFPNQYVDVATLSVVPQLTGGSVYKYASFQVENDQERFLSDLRRDVQKVVGFDAVMRVRTSTGIRAVDFFGAFYMSNTTDVELAGLDGDKTVTVEFKHDDRLNEESGALLQCALLYTSCAGQRRLRIHNLALNCCTQLADLYRNCETDTLINYMAKFAYRGVLNSPVKAVRDTLITQCAQILACYRKNCASPSSAGQLILPECMKLLPVYLNCVLKSDVLQPGAEVTTDDRAYVRQLVTSMDVTETNVFFYPRLLPLTKSPVESTTEPPAVRASEERLSNGDIYLLENGLNLFLWVGASVQQGVVQSLFSVSSFSQITSGLSVLPVLDNPLSKKVRGLIDSLRAQRSRYMKLTVVKQEDKMEMLFKHFLVEDKSLSGGASYVDFLCHMHKEIRQLLS

SEQ ID NO: 76855 - protein, 1094 aa, Homo sapiens; identical to SEQ ID NO: 76854
  Payload ID: 15341
  Gene Symbol: SEC24C
  Gene Name: SEC24 homolog C, COPII coat complex component
  Uniprot ID: P53992
  ENSP ID: ENSP00000343405

SEQ ID NO: 76856 - protein, 1042 aa, Homo sapiens
  Payload ID: 15341
  Gene Symbol: SEC24C
  Gene Name: SEC24 homolog C, COPII coat complex component
  ENSP ID: ENSP00000437000
MNVNQSVPPVPPFGQPQPIYPGYHQSSYGGQSGSTAPAIPYGAYNGPVPGYQQTPPQGMSRAPPSSGAPPASTAQAPCGQAAYGQFGQGDVQNGPSSTVQMQRLPGSQPFGSPLAPVGNQPPVLQPYGPPPTSAQVATQLSGMQISGAVAPAPPSSGLGFGPPTSLASASGSFPNSGLYGSYPQGQAPPLSQAQGHPGIQTPQRSAPSQASSFTPPASGGPRLPSMTGPLLPGQSFGGPSVSQPNHVSSPPQALPPGTQMTGPLGPLPPMHSPQQPGYQPQQNGSFGPARGPQSNYGGPYPAAPTFGSQPGPPQPLPPKRLDPDAIPSPIQVIEDDRNNRGTEPFVTGVRGQVPPLVTTNFLVKDQGNASPRYIRCTSYNIPCTSDMAKQAQVPLAAVIKPLARLPPEEASPYVVDHGESGPLRCNRCKAYMCPFMQFIEGGRRFQCCFCSCINDVPPQYFQHLDHTGKRVDAYDRPELSLGSYEFLATVDYCKNNKFPSPPAFIFMIDVSYNAIRTGLVRLLCEELKSLLDFLPREGGAEESAIRVGFVTYNKVLHFYNVKSSLAQPQMMVVSDVADMFVPLLDGFLVNVNESRAVITSLLDQIPEMFADTRETETVFVPVIQAGMEALKAAECAGKLFLFHTSLPIAEAPGKLKNRDDRKLINTDKEKTLFQPQTGAYQTLAKECVAQGCCVDLFLFPNQYVDVATLSVVPQLTGGSVYKYASFQVENDQERFLSDLRRDVQKVVGFDAVMRVRTSTGIRAVDFFGAFYMSNTTDVELAGLDGDKTVTVEFKHDDRLNEESGALLQCALLYTSCAGQRRLRIHNLALNCCTQLADLYRNCETDTLINYMAKFAYRGVLNSPVKAVRDTLITQCAQILACYRKNCASPSSAGQLILPECMKLLPVYLNCVLKSDVLQPGAEVTTDDRAYVRQLVTSMDVTETNVFFYPRLLPLTKSPVESTTEPPAVRASEERLSNGDIYLLENGLNLFLWVGASVQQGVVQSLFSVSSFSQITSGLVRAGSQGEYGCGSILCETIGSQYS

SEQ ID NO: 76857 - protein, 183 aa, Homo sapiens
  Payload ID: 15341
  Gene Symbol: SEC24C
  Gene Name: SEC24 homolog C, COPII coat complex component
  ENSP ID: ENSP00000489340
QAQGHPGIQTPQRSAPSQASSFTPPASGGPRLPSMTGPLLPGQSFGGPSVSQPNHVSSPPQALPPGTQMTGPLGPLPPMHSPQQPGYQPQQNGSFGPARGPQSNYGGPYPAAPTFGSQPGPPQPLPPKRLDPDAIPSPQLSELPPQQKTRHRIDPDAIPSPIQVIEDDRNNRGTEPFVTGVRG

SEQ ID NO: 76858 - protein, 180 aa, Homo sapiens
  Payload ID: 15341
  Gene Symbol: SEC24C
  Gene Name: SEC24 homolog C, COPII coat complex component
  ENSP ID: ENSP00000489351
MNVNQSVPPVPPFGQPQPIYPGYHQSSYGGQSGSTAPAIPYGAYNGPVPGYQQTPPQGCLGLSHLGPHWPLWATSHLCFSPMALPRQVHRWLRSCLECRSAVLWPQPLLLQGWALAHQHRWLQPQEVSLTLVCMAPILRARLLPLARPKVILGSRLPSDLPHHRPPASHPQLQGVLGCLR

SEQ ID NO: 76859 - protein, 1032 aa, Homo sapiens
  Payload ID: 15342
  Gene Symbol: SEC24D
  Gene Name: SEC24 homolog D, COPII coat complex component
  Uniprot ID: O94855
  ENSP ID: ENSP00000280551
MSQQGYVATPPYSQPQPGIGLSPPHYGHYGDPSHTASPTGMMKPAGPLGATATRGMLPPGPPPPGPHQFGQNGAHATGHPPQRFPGPPPVNNVASSHAPYQPSAQSSYPGPISTSSVTQLGSQLSAMQINSYGSGMAPPSQGPPGPLSATSLQTPPRPPQPSILQPGSQVLPPPPTTLNGPGASPLPLPMYRPDGLSGPPPPNAQYQPPPLPGQTLGAGYPPQQANSGPQMAGAQLSYPGGFPGGPAQMAGPPQPQKKLDPDSIPSPIQVIENDRASRGGQVYATNTRGQIPPLVTTDCMIQDQGNASPRFIRCTTYCFPCTSDMAKQAQIPLAAVIKPFATIPSNESPLYLVNHGESGPVRCNRCKAYMCPFMQFIEGGRRYQCGFCNCVNDVPPFYFQHLDHIGRRLDHYEKPELSLGSYEYVATLDYCRKSKPPNPPAFIFMIDVSYSNIKNGLVKLICEELKTMLEKIPKEEQEETSAIRVGFITYNKVLHFFNVKSNLAQPQMMVVTDVGEVFVPLLDGFLVNYQESQSVIHNLLDQIPDMFADSNENETVFAPVIQAGMEALKAADCPGKLFIFHSSLPTAEAPGKLKNRDDKKLVNTDKEKILFQPQTNVYDSLAKDCVAHGCSVTLFLFPSQYVDVASLGLVPQLTGGTLYKYNNFQMHLDRQQFLNDLRNDIEKKIGFDAIMRVRTSTGFRATDFFGGILMNNTTDVEMAAIDCDKAVTVEFKHDDKLSEDSGALIQCAVLYTTISGQRRLRIHNLGLNCSSQLADLYKSCETDALINFFAKSAFKAVLHQPLKVIREILVNQTAHMLACYRKNCASPSAASQLILPDSMKVLPVYMNCLLKNCVLLSRPEISTDERAYQRQLVMTMGVADSQLFFYPQLLPIHTLDVKSTMLPAAVRCSESRLSEEGIFLLANGLHMFLWLGVSSPPELIQGIFNVPSFAHINTDMTLLPEVGNPYSQQLRMIMGIIQQKRPYSMKLTIVKQREQPEMVFRQFLVEDKGLYGGSSYVDFLCCVHKEICQLLN

SEQ ID NO: 76860 - protein, 393 aa, Homo sapiens
  Payload ID: 15342
  Gene Symbol: SEC24D
  Gene Name: SEC24 homolog D, COPII coat complex component
  ENSP ID: ENSP00000388324
MIDVSYSNIKNGLVKLICEELKTMLEKIPKEEQEETSAIRVGFITYNKVLHFFNVKSNLAQPQMMVVTDVGEVFVPLLDGFLVNYQESQSVIHNLLDQIPDMFADSNENETVFAPVIQAGMEALKAADCPGKLFIFHSSLPTAEAPGKLKNRDDKKLVNTDKEKILFQPQTNVYDSLAKDCVAHGCSVTLFLFPSQYVDVASLGLVPQLTGGTLYKYNNFQMHLDRQQFLNDLRNDIEKKIGFDAIMRVRTSTGFRATDFFGGILMNNTTDVEMAAIDCDKAVTVEFKHDDKLSEDSGALIQCAVLYTTISGQRRLRIHNLGLNCSSQLADLYKSCETDALINFFAKSAFKAVLHQPLKVIREILVNQTAHMLACYRKNCASPSAASQFTCEK

SEQ ID NO: 76861 - protein, 67 aa, Homo sapiens
  Payload ID: 15342
  Gene Symbol: SEC24D
  Gene Name: SEC24 homolog D, COPII coat complex component
  ENSP ID: ENSP00000422717
MSQQGYVATPPYSQPQPGIGLSPPHYGHYGDPSHTASPTGRKLRSLKISFLPRFIQLISNQWGLELL

SEQ ID NO: 76862 - protein, 211 aa, Homo sapiens
  Payload ID: 15342
  Gene Symbol: SEC24D
  Gene Name: SEC24 homolog D, COPII coat complex component
  ENSP ID: ENSP00000424085
MSQQGYVATPPYSQPQPGIGLSPPHYGHYGDPSHTASPTGMMKPAGPLGATATRGMLPPGPPPPGPHQFGQNGAHATGHPPQRFRHGSSKPGTPWPSVSHIIADSSTTSTAFHFAAWISSSSTTTHHTQWSWCLTFASTNVQTRWALWASSSKCPVPAPTSSRPDLGCWISSAAGQLWSPDGRRTTVLPRRLPWRSCTDGWSATAPEEAGS

SEQ ID NO: 76863 - protein, 663 aa, Homo sapiens
  Payload ID: 15342
  Gene Symbol: SEC24D
  Gene Name: SEC24 homolog D, COPII coat complex component
  ENSP ID: ENSP00000425491
MCPFMQFIEGGRRYQCGFCNCVNDVPPFYFQHLDHIGRRLDHYEKPELSLGSYEYVATLDYCRKSKPPNPPAFIFMIDVSYSNIKNGLVKLICEELKTMLEKIPKEEQEETSAIRVGFITYNKVLHFFNVKSNLAQPQMMVVTDVGEVFVPLLDGFLVNYQESQSVIHNLLDQIPDMFADSNENETVFAPVIQAGMEALKAADCPGKLFIFHSSLPTAEAPGKLKNRDDKKLVNTDKEKILFQPQTNVYDSLAKDCVAHGCSVTLFLFPSQYVDVASLGLVPQLTGGTLYKYNNFQMHLDRQQFLNDLRNDIEKKIGFDAIMRVRTSTGFRATDFFGGILMNNTTDVEMAAIDCDKAVTVEFKHDDKLSEDSGALIQCAVLYTTISGQRRLRIHNLGLNCSSQLADLYKSCETDALINFFAKSAFKAVLHQPLKVIREILVNQTAHMLACYRKNCASPSAASQLILPDSMKVLPVYMNCLLKNCVLLSRPEISTDERAYQRQLVMTMGVADSQLFFYPQLLPIHTLDVKSTMLPAAVRCSESRLSEEGIFLLANGLHMFLWLGVSSPPELIQGIFNVPSFAHINTDMTLLPEVGNPYSQQLRMIMGIIQQKRPYSMKLTIVKQREQPEMVFRQFLVEDKGLYGGSSYVDFLCCVHKEICQLLN

SEQ ID NO: 76864 - protein, 165 aa, Homo sapiens
  Payload ID: 15342
  Gene Symbol: SEC24D
  Gene Name: SEC24 homolog D, COPII coat complex component
  ENSP ID: ENSP00000426309
MSQQGYVATPPYSQPQPGIGLSPPHYGHYGDPSHTASPTGMMKPAGPLGATATRGMLPPGPPPPGPHQFGQNGAHATGHPPQRFPGPPPVNNVASSHAPYQPSAQSSYPGPISTSSVTQLGSQLSAMQINSYGSGMAPPSQGPPGPLSATSLQTPPRPPQPSILQ

SEQ ID NO: 76865 - protein, 305 aa, Homo sapiens
  Payload ID: 15342
  Gene Symbol: SEC24D
  Gene Name: SEC24 homolog D, COPII coat complex component
  ENSP ID: ENSP00000427249
MSQQGYVATPPYSQPQPGIGLSPPHYGHYGDPSHTASPTGMMKPAGPLGATATRGMLPPGPPPPGPHQFGQNGAHATGHPPQRFPGPPPVNNVASSHAPYQPSAQSSYPGPISTSSVTQLGSQLSAMQINSYDHGKSGSSDVVRQKREDRRGKSHSTEIYINRNAVYPVQAWLLQARDPLALCQPHHCRLLHDLHSLPFCSLDLKFFHHHPPHSMVLVPHLCLYQCTDQMGSLGLLLQMPSTSPHLFQARPWVLDILRSRPTLVPRWQAHNCLTQEASLEVLHRWLVRHSPRRSWILTLSLAQSR

SEQ ID NO: 76866 - protein, 969 aa, Homo sapiens
  Payload ID: 15343
  Gene Symbol: SEC31A
  Gene Name: SEC31 homolog A, COPII coat complex component
  ENSP ID: ENSP00000264405
MVKLVLLSIVLLKVTVPKLSNDLLQLDFMPIHRGILAIAWSMADPELLLSCGKDAKILCSNPNTGEVLYELPTNTQWCFDIQWCPRNPAVLSAASFDGRISVYSIMGGSTDGLRQKQVDKLSSSFGNLDPFGTGQPLPPLQIPQQTAQHSIVLPLKKPPKWIRRPVGASFSFGGKLVTFENVRMPSHQGAEQQQQQHHVFISQVVTEKEFLSRSDQLQQAVQSQGFINYCQKKIDASQTEFEKNVWSFLKVNFEDDSRGKYLELLGYRKEDLGKKHIKEEKEESEFLPSSGGTFNISVSGDIDGLITQALLTGNFESAVDLCLHDNRMADAIILAIAGGQELLARTQKKYFAKSQSKITRLITAVVMKNWKEIVESCDLKNWREALAAVLTYAKPDEFSALCDLLGTRLENEGDSLLQTQACLCYICAGNVEKLVACWTKAQDGSHPLSLQDLIEKVVILRKAVQLTQAMDTSTVGVLLAAKMSQYANLLAAQGSIAAALAFLPDNTNQPNIMQLRDRLCRAQGEPVAGHESPKIPYEKQQLPKGRPGPVAGHHQMPRVQTQQYYPHVRIAPTVTTWSNKTPTALPSHPPAASPSDTQGENPPPPGFIMHGNVNPNAAGQLPTSPGHMHTQVPPYPQPQPYQPAQPYPFGTGGSAMYRPQQPVAPPTSNAYPNTPYISSASSYTGQSQLYAAQHQASSPTSSPATSFPPPPSSGASFQHGGPGAPPSSSAYALPPGTTGPQNGWNDPPALNRVPKKKKMPENFMPPVPITSPIMNPLGDPQSQMLQQQPSAPVPLSSQSSFPQPHLPGGQPFHGVQQPLGQTGMPPSFSKPNIEGAPGAPIGNTFQHVQSLPTKKITKKPIPDEHLILKTTFEDLIQRCLSSATDPQTKRKLDDASKRLEFLYDKLREQTLSPTITSGLHNIARSIETRNYSEGLTMHTHIVSTSNFSETSAFMPVLKVVLTQANKLGV

SEQ ID NO: 76867 - protein, 1106 aa, Homo sapiens
  Payload ID: 15343
  Gene Symbol: SEC31A
  Gene Name: SEC31 homolog A, COPII coat complex component
  Uniprot ID: O94979
  ENSP ID: ENSP00000309070
MKLKEVDRTAMQAWSPAQNHPIYLATGTSAQQLDATFSTNASLEIFELDLSDPSLDMKSCATFSSSHRYHKLIWGPYKMDSKGDVSGVLIAGGENGNIILYDPSKIIAGDKEVVIAQNDKHTGPVRALDVNIFQTNLVASGANESEIYIWDLNNFATPMTPGAKTQPPEDISCIAWNRQVQHILASASPSGRATVWDLRKNEPIIKVSDHSNRMHCSGLAWHPDVATQMVLASEDDRLPVIQMWDLRFASSPLRVLENHARGILAIAWSMADPELLLSCGKDAKILCSNPNTGEVLYELPTNTQWCFDIQWCPRNPAVLSAASFDGRISVYSIMGGSTDGLRQKQVDKLSSSFGNLDPFGTGQPLPPLQIPQQTAQHSIVLPLKKPPKWIRRPVGASFSFGGKLVTFENVRMPSHQGAEQQQQQHHVFISQVVTEKEFLSRSDQLQQAVQSQGFINYCQKKIDASQTEFEKNVWSFLKVNFEDDSRGKYLELLGYRKEDLGKKIALALNKVDGANVALKDSDQVAQSDGEESPAAEEQLLGEHIKEEKEESEFLPSSGGTFNISVSGDIDGLITQALLTGNFESAVDLCLHDNRMADAIILAIAGGQELLARTQKKYFAKSQSKITRLITAVVMKNWKEIVESCDLKNWREALAAVLTYAKPDEFSALCDLLGTRLENEGDSLLQTQACLCYICAGNVEKLVACWTKAQDGSHPLSLQDLIEKVVILRKAVQLTQAMDTSTVGVLLAAKMSQYANLLAAQGSIAAALAFLPDNTNQPNIMQLRDRLCRAQGEPVAGHESPKIPYEKQQLPKGRPGPVAGHHQMPRVQTQQYYPHGENPPPPGFIMHGNVNPNAAGQLPTSPGHMHTQVPPYPQPQRPQNGWNDPPALNRVPKKKKMPENFMPPVPITSPIMNPLGDPQSQMLQQQPSAPVPLSSQSSFPQPHLPGGQPFHGVQQPLGQTGMPPSFSKPNIEGAPGAPIGNTFQHVQSLPTKKITKKPIPDEHLILKTTFEDLIQRCLSSATDPQTKRKLDDASKRLEFLYDKLREQTLSPTITSGLHNIARSIETRNYSEGLTMHTHIVSTSNFSETSAFMPVLKVVLTQANKLGV

SEQ ID NO: 76868 - protein, 1181 aa, Homo sapiens
  Payload ID: 15343
  Gene Symbol: SEC31A
  Gene Name: SEC31 homolog A, COPII coat complex component
  Uniprot ID: O94979
  ENSP ID: ENSP00000337602
MKLKEVDRTAMQAWSPAQNHPIYLATGTSAQQLDATFSTNASLEIFELDLSDPSLDMKSCATFSSSHRYHKLIWGPYKMDSKGDVSGVLIAGGENGNIILYDPSKIIAGDKEVVIAQNDKHTGPVRALDVNIFQTNLVASGANESEIYIWDLNNFATPMTPGAKTQPPEDISCIAWNRQVQHILASASPSGRATVWDLRKNEPIIKVSDHSNRMHCSGLAWHPDVATQMVLASEDDRLPVIQMWDLRFASSPLRVLENHARGILAIAWSMADPELLLSCGKDAKILCSNPNTGEVLYELPTNTQWCFDIQWCPRNPAVLSAASFDGRISVYSIMGGSTDGLRQKQVDKLSSSFGNLDPFGTGQPLPPLQIPQQTAQHSIVLPLKKPPKWIRRPVGASFSFGGKLVTFENVRMPSHQGAEQQQQQHHVFISQVVTEKEFLSRSDQLQQAVQSQGFINYCQKKIDASQTEFEKNVWSFLKVNFEDDSRGKYLELLGYRKEDLGKKHIKEEKEESEFLPSSGGTFNISVSGDIDGLITQALLTGNFESAVDLCLHDNRMADAIILAIAGGQELLARTQKKYFAKSQSKITRLITAVVMKNWKEIVESCDLKNWREALAAVLTYAKPDEFSALCDLLGTRLENEGDSLLQTQACLCYICAGNVEKLVACWTKAQDGSHPLSLQDLIEKVVILRKAVQLTQAMDTSTVGVLLAAKMSQYANLLAAQGSIAAALAFLPDNTNQPNIMQLRDRLCRAQGEPVAGHESPKIPYEKQQLPKGRPGPVAGHHQMPRVQTQQYYPHGENPPPPGFIMHGNVNPNAAGQLPTSPGHMHTQVPPYPQPQPYQPAQPYPFGTGGSAMYRPQQPVAPPTSNAYPNTPYISSASSYTGQSQLYAAQHQASSPTSSPATSFPPPPSSGASFQHGGPGAPPSSSAYALPPGTTGTLPAASELPASQRTGPQNGWNDPPALNRVPKKKKMPENFMPPVPITSPIMNPLGDPQSQMLQQQPSAPVPLSSQSSFPQPHLPGGQPFHGVQQPLGQTGMPPSFSKPNIEGAPGAPIGNTFQHVQSLPTKKITKKPIPDEHLILKTTFEDLIQRCLSSATDPQTKRKLDDASKRLEFLYDKLREQTLSPTITSGLHNIARSIETRNYSEGLTMHTHIVSTSNFSETSAFMPVLKVVLTQANKLGV

SEQ ID NO: 76869 - protein, 1220 aa, Homo sapiens
  Payload ID: 15343
  Gene Symbol: SEC31A
  Gene Name: SEC31 homolog A, COPII coat complex component
  Uniprot ID: O94979
  ENSP ID: ENSP00000347329
MKLKEVDRTAMQAWSPAQNHPIYLATGTSAQQLDATFSTNASLEIFELDLSDPSLDMKSCATFSSSHRYHKLIWGPYKMDSKGDVSGVLIAGGENGNIILYDPSKIIAGDKEVVIAQNDKHTGPVRALDVNIFQTNLVASGANESEIYIWDLNNFATPMTPGAKTQPPEDISCIAWNRQVQHILASASPSGRATVWDLRKNEPIIKVSDHSNRMHCSGLAWHPDVATQMVLASEDDRLPVIQMWDLRFASSPLRVLENHARGILAIAWSMADPELLLSCGKDAKILCSNPNTGEVLYELPTNTQWCFDIQWCPRNPAVLSAASFDGRISVYSIMGGSTDGLRQKQVDKLSSSFGNLDPFGTGQPLPPLQIPQQTAQHSIVLPLKKPPKWIRRPVGASFSFGGKLVTFENVRMPSHQGAEQQQQQHHVFISQVVTEKEFLSRSDQLQQAVQSQGFINYCQKKIDASQTEFEKNVWSFLKVNFEDDSRGKYLELLGYRKEDLGKKIALALNKVDGANVALKDSDQVAQSDGEESPAAEEQLLGEHIKEEKEESEFLPSSGGTFNISVSGDIDGLITQALLTGNFESAVDLCLHDNRMADAIILAIAGGQELLARTQKKYFAKSQSKITRLITAVVMKNWKEIVESCDLKNWREALAAVLTYAKPDEFSALCDLLGTRLENEGDSLLQTQACLCYICAGNVEKLVACWTKAQDGSHPLSLQDLIEKVVILRKAVQLTQAMDTSTVGVLLAAKMSQYANLLAAQGSIAAALAFLPDNTNQPNIMQLRDRLCRAQGEPVAGHESPKIPYEKQQLPKGRPGPVAGHHQMPRVQTQQYYPHGENPPPPGFIMHGNVNPNAAGQLPTSPGHMHTQVPPYPQPQPYQPAQPYPFGTGGSAMYRPQQPVAPPTSNAYPNTPYISSASSYTGQSQLYAAQHQASSPTSSPATSFPPPPSSGASFQHGGPGAPPSSSAYALPPGTTGTLPAASELPASQRTGPQNGWNDPPALNRVPKKKKMPENFMPPVPITSPIMNPLGDPQSQMLQQQPSAPVPLSSQSSFPQPHLPGGQPFHGVQQPLGQTGMPPSFSKPNIEGAPGAPIGNTFQHVQSLPTKKITKKPIPDEHLILKTTFEDLIQRCLSSATDPQTKRKLDDASKRLEFLYDKLREQTLSPTITSGLHNIARSIETRNYSEGLTMHTHIVSTSNFSETSAFMPVLKVVLTQANKLGV

SEQ ID NO: 76870 - protein, 1220 aa, Homo sapiens; identical to SEQ ID NO: 76869
  Payload ID: 15343
  Gene Symbol: SEC31A
  Gene Name: SEC31 homolog A, COPII coat complex component
  Uniprot ID: O94979
  ENSP ID: ENSP00000378721

SEQ ID NO: 76871 - protein, 1220 aa, Homo sapiens; identical to SEQ ID NO: 76869
  Payload ID: 15343
  Gene Symbol: SEC31A
  Gene Name: SEC31 homolog A, COPII coat complex component
  Uniprot ID: O94979
  ENSP ID: ENSP00000400926

SEQ ID NO: 76872 - protein, 1200 aa, Homo sapiens
  Payload ID: 15343
  Gene Symbol: SEC31A
  Gene Name: SEC31 homolog A, COPII coat complex component
  Uniprot ID: O94979
  ENSP ID: ENSP00000408027
MLGESDERCTNAGSGCRRSSPGTSAQQLDATFSTNASLEIFELDLSDPSLDMKSCATFSSSHRYHKLIWGPYKMDSKGDVSGVLIAGGENGNIILYDPSKIIAGDKEVVIAQNDKHTGPVRALDVNIFQTNLVASGANESEIYIWDLNNFATPMTPGAKTQPPEDISCIAWNRQVQHILASASPSGRATVWDLRKNEPIIKVSDHSNRMHCSGLAWHPDVATQMVLASEDDRLPVIQMWDLRFASSPLRVLENHARGILAIAWSMADPELLLSCGKDAKILCSNPNTGEVLYELPTNTQWCFDIQWCPRNPAVLSAASFDGRISVYSIMGGSTDGLRQKQVDKLSSSFGNLDPFGTGQPLPPLQIPQQTAQHSIVLPLKKPPKWIRRPVGASFSFGGKLVTFENVRMPSHQGAEQQQQQHHVFISQVVTEKEFLSRSDQLQQAVQSQGFINYCQKKIDASQTEFEKNVWSFLKVNFEDDSRGKYLELLGYRKEDLGKKIALALNKVDGANVALKDSDQVAQSDGEESPAAEEQLLGEHIKEEKEESEFLPSSGGTFNISVSGDIDGLITQALLTGNFESAVDLCLHDNRMADAIILAIAGGQELLARTQKKYFAKSQSKITRLITAVVMKNWKEIVESCDLKNWREALAAVLTYAKPDEFSALCDLLGTRLENEGDSLLQTQACLCYICAGNVEKLVACWTKAQDGSHPLSLQDLIEKVVILRKAVQLTQAMDTSTVGVLLAAKMSQYANLLAAQGSIAAALAFLPDNTNQPNIMQLRDRLCRAQGEPVAGHESPKIPYEKQQLPKGRPGPVAGHHQMPRVQTQQYYPHGENPPPPGFIMHGNVNPNAAGQLPTSPGHMHTQVPPYPQPQPYQPAQPYPFGTGGSAMYRPQQPVAPPTSNAYPNTPYISSASSYTGQSQLYAAQHQASSPTSSPATSFPPPPSSGASFQHGGPGAPPSSSAYALPPGTTGPQNGWNDPPALNRVPKKKKMPENFMPPVPITSPIMNPLGDPQSQMLQQQPSAPVPLSSQSSFPQPHLPGGQPFHGVQQPLGQTGMPPSFSKPNIEGAPGAPIGNTFQHVQSLPTKKITKKPIPDEHLILKTTFEDLIQRCLSSATDPQTKRKLDDASKRLEFLYDKLREQTLSPTITSGLHNIARSIETRNYSEGLTMHTHIVSTSNFSETSAFMPVLKVVLTQANKLGV

SEQ ID NO: 76873 - protein, 92 aa, Homo sapiens
  Payload ID: 15343
  Gene Symbol: SEC31A
  Gene Name: SEC31 homolog A, COPII coat complex component
  ENSP ID: ENSP00000421001
MKLKEVDRTAMQAWSPAQNHPIYLATGTSAQQLDATFSTNASLEIFELDLSDPSLDMKSCATFSSSHRYHKLIWGPYKMDSKGDVSGVLIAD

SEQ ID NO: 76874 - protein, 1067 aa, Homo sapiens
  Payload ID: 15343
  Gene Symbol: SEC31A
  Gene Name: SEC31 homolog A, COPII coat complex component
  Uniprot ID: O94979
  ENSP ID: ENSP00000421464
MKLKEVDRTAMQAWSPAQNHPIYLATGTSAQQLDATFSTNASLEIFELDLSDPSLDMKSCATFSSSHRYHKLIWGPYKMDSKGDVSGVLIAGGENGNIILYDPSKIIAGDKEVVIAQNDKHTGPVRALDVNIFQTNLVASGANESEIYIWDLNNFATPMTPGAKTQPPEDISCIAWNRQVQHILASASPSGRATVWDLRKNEPIIKVSDHSNRMHCSGLAWHPDVATQMVLASEDDRLPVIQMWDLRFASSPLRVLENHARGILAIAWSMADPELLLSCGKDAKILCSNPNTGEVLYELPTNTQWCFDIQWCPRNPAVLSAASFDGRISVYSIMGGSTDGLRQKQVDKLSSSFGNLDPFGTGQPLPPLQIPQQTAQHSIVLPLKKPPKWIRRPVGASFSFGGKLVTFENVRMPSHQGAEQQQQQHHVFISQVVTEKEFLSRSDQLQQAVQSQGFINYCQKKIDASQTEFEKNVWSFLKVNFEDDSRGKYLELLGYRKEDLGKKHIKEEKEESEFLPSSGGTFNISVSGDIDGLITQALLTGNFESAVDLCLHDNRMADAIILAIAGGQELLARTQKKYFAKSQSKITRLITAVVMKNWKEIVESCDLKNWREALAAVLTYAKPDEFSALCDLLGTRLENEGDSLLQTQACLCYICAGNVEKLVACWTKAQDGSHPLSLQDLIEKVVILRKAVQLTQAMDTSTVGVLLAAKMSQYANLLAAQGSIAAALAFLPDNTNQPNIMQLRDRLCRAQGEPVAGHESPKIPYEKQQLPKGRPGPVAGHHQMPRVQTQQYYPHGENPPPPGFIMHGNVNPNAAGQLPTSPGHMHTQVPPYPQPQRPQNGWNDPPALNRVPKKKKMPENFMPPVPITSPIMNPLGDPQSQMLQQQPSAPVPLSSQSSFPQPHLPGGQPFHGVQQPLGQTGMPPSFSKPNIEGAPGAPIGNTFQHVQSLPTKKITKKPIPDEHLILKTTFEDLIQRCLSSATDPQTKRKLDDASKRLEFLYDKLREQTLSPTITSGLHNIARSIETRNYSEGLTMHTHIVSTSNFSETSAFMPVLKVVLTQANKLGV

SEQ ID NO: 76875 - protein, 1251 aa, Homo sapiens
  Payload ID: 15343
  Gene Symbol: SEC31A
  Gene Name: SEC31 homolog A, COPII coat complex component
  ENSP ID: ENSP00000421633
MKLKEVDRTAMQAWSPAQNHPIYLATGTSAQQLDATFSTNASLEIFELDLSDPSLDMKSCATFSSSHRYHKLIWGPYKMDSKGDVSGVLIAGGENGNIILYDPSKIIAGDKEVVIAQNDKHTGPVRALDVNIFQTNLVASGANESEIYIWDLNNFATPMTPGAKTQPPEDISCIAWNRQVQHILASASPSGRATVWDLRKNEPIIKVSDHSNRMHCSGLAWHPDVATQMVLASEDDRLPVIQMWDLRFASSPLRVLENHARGILAIAWSMADPELLLSCGKDAKILCSNPNTGEVLYELPTNTQWCFDIQWCPRNPAVLSAASFDGRISVYSIMGGSTDGLRQKQVDKLSSSFGNLDPFGTGQPLPPLQIPQQTAQHSIVLPLKKPPKWIRRPVGASFSFGGKLVTFENVRMPSHQGAEQQQQQHHVFISQVVTEKEFLSRSDQLQQAVQSQGFINYCQKKIDASQTEFEKNVWSFLKVNFEDDSRGKYLELLGYRKEDLGKKIALALNKVDGANVALKDSDQVAQSDGEESPAAEEQLLGEHIKEEKEESEFLPSSGGTFNISVSGDIDGLITQALLTGNFESAVDLCLHDNRMADAIILAIAGGQELLARTQKKYFAKSQSKITRLITAVVMKNWKEIVESCDLKNWREALAAVLTYAKPDEFSALCDLLGTRLENEGDSLLQTQACLCYICAGNVEKLVACWTKAQDGSHPLSLQDLIEKVVILRKAVQLTQAMDTSTVGVLLAAKMSQYANLLAAQGSIAAALAFLPDNTNQPNIMQLRDRLCRAQGEPVAGHESPKIPYEKQQLPKGRPGPVAGHHQMPRVQTQQYYPHVRIAPTVTTWSNKTPTALPSHPPAASPSDTQGENPPPPGFIMHGNVNPNAAGQLPTSPGHMHTQVPPYPQPQPYQPAQPYPFGTGGSAMYRPQQPVAPPTSNAYPNTPYISSASSYTGQSQLYAAQHQASSPTSSPATSFPPPPSSGASFQHGGPGAPPSSSAYALPPGTTGTLPAASELPASQRTGPQNGWNDPPALNRVPKKKKMPENFMPPVPITSPIMNPLGDPQSQMLQQQPSAPVPLSSQSSFPQPHLPGGQPFHGVQQPLGQTGMPPSFSKPNIEGAPGAPIGNTFQHVQSLPTKKITKKPIPDEHLILKTTFEDLIQRCLSSATDPQTKRKLDDASKRLEFLYDKLREQTLSPTITSGLHNIARSIETRNYSEGLTMHTHIVSTSNFSETSAFMPVLKVVLTQANKLGV

SEQ ID NO: 76876 - protein, 285 aa, Homo sapiens
  Payload ID: 15343
  Gene Symbol: SEC31A
  Gene Name: SEC31 homolog A, COPII coat complex component
  ENSP ID: ENSP00000422267
FGGKLVTFENVRMPSHQGAEQQQQQHHVFISQVVTEKEFLSRSDQLQQAVQSQGFINYCQKKIDASQTEFEKNVWSFLKVNFEDDSRGKYLELLGYRKEDLGKKALKDSDQVAQSDGEESPAAEEQLLGEHIKEEKEESEFLPSSGGTFNISVSGDIDGLITQALLTGNFESAVDLCLHDNRMADAIILAIAGGQELLARTQKKYFAKSQSKITRLITAVVMKNWKEIVESCDLKNWREALAAVLTYAKPDEFSALCDLLGTRLENEGDSLLQTQACLCYICAGN

SEQ ID NO: 76877 - protein, 383 aa, Homo sapiens
  Payload ID: 15343
  Gene Symbol: SEC31A
  Gene Name: SEC31 homolog A, COPII coat complex component
  ENSP ID: ENSP00000422371
  MOD_RES (1)..(1): Any amino acid
XNAAGQLPTSPGHMHTQVPPYPQPQPYQPAQPYPFGTGGSAMYRPQQPVAPPTSNAYPNTPYISSASSYTGQSQLYAAQHQASSPTSSPATSFPPPPSSGASFQHGGPGAPPSSSAYALPPGTTGTLPAASELPASQRTENQSIQDQAPMLEGPQNGWNDPPALNRVPKKKKMPENFMPPVPITSPIMNPLGDPQSQMLQQQPSAPVPLSSQSSFPQPHLPGGQPFHGVQQPLGQTGMPPSFSKPNIEGAPGAPIGNTFQHVQSLPTKKITKKPIPDEHLILKTTFEDLIQRCLSSATDPQTKRKLDDASKRLEFLYDKLREQTLSPTITSGLHNIARSIETRNYSEGLTMHTHIVSTSNFSETSAFMPVLKVVLTQANKLGV

SEQ ID NO: 76878 - protein, 81 aa, Homo sapiens
  Payload ID: 15343
  Gene Symbol: SEC31A
  Gene Name: SEC31 homolog A, COPII coat complex component
  ENSP ID: ENSP00000422563
MKLKEVDRTAMQAWSPAQNHPIYLATGTSAQQLDATFSTNASLEIFELDLSDPSLDMKSCATFSSSHRYHKLIWGPYKMDS

SEQ ID NO: 76879 - protein, 68 aa, Homo sapiens
  Payload ID: 15343
  Gene Symbol: SEC31A
  Gene Name: SEC31 homolog A, COPII coat complex component
  ENSP ID: ENSP00000422797
MKLKEVDRTAMQAWSPAQNHPIYLATGTSAQQLDATFSTNASLEIFELDLSDPSLDMKSCATFSSSHS

SEQ ID NO: 76880 - protein, 237 aa, Homo sapiens
  Payload ID: 15343
  Gene Symbol: SEC31A
  Gene Name: SEC31 homolog A, COPII coat complex component
  ENSP ID: ENSP00000424336
  MOD_RES (1)..(1): Any amino acid
XAVQSQGFINYCQKKIDASQTEFEKNVWSFLKVNFEDDSRGKYLELLGYRKEDLGKKHIKEEKEESEFLPSSGGTFNISVSGDIDGLITQALLTGNFESAVDLCLHDNRMADAIILAIAGGQELLARTQKKYFAKSQSKITRLITAVVMKNWKEIVESCDLKNWREALAAVLTYAKPDEFSALCGNVEKLVACWTKAQDGSHPLSLQDLIEKVVILRKAVQLTQAMDTSTVGVLLAA

SEQ ID NO: 76881 - protein, 1166 aa, Homo sapiens
  Payload ID: 15343
  Gene Symbol: SEC31A
  Gene Name: SEC31 homolog A, COPII coat complex component
  Uniprot ID: O94979
  ENSP ID: ENSP00000424451
MKLKEVDRTAMQAWSPAQNHPIYLATGTSAQQLDATFSTNASLEIFELDLSDPSLDMKSCATFSSSHRYHKLIWGPYKMDSKGDVSGVLIAGGENGNIILYDPSKIIAGDKEVVIAQNDKHTGPVRALDVNIFQTNLVASGANESEIYIWDLNNFATPMTPGAKTQPPEDISCIAWNRQVQHILASASPSGRATVWDLRKNEPIIKVSDHSNRMHCSGLAWHPDVATQMVLASEDDRLPVIQMWDLRFASSPLRVLENHARGILAIAWSMADPELLLSCGKDAKILCSNPNTGEVLYELPTNTQWCFDIQWCPRNPAVLSAASFDGRISVYSIMGGSTDGLRQKQVDKLSSSFGNLDPFGTGQPLPPLQIPQQTAQHSIVLPLKKPPKWIRRPVGASFSFGGKLVTFENVRMPSHQGAEQQQQQHHVFISQVVTEKEFLSRSDQLQQAVQSQGFINYCQKKIDASQTEFEKNVWSFLKVNFEDDSRGKYLELLGYRKEDLGKKHIKEEKEESEFLPSSGGTFNISVSGDIDGLITQALLTGNFESAVDLCLHDNRMADAIILAIAGGQELLARTQKKYFAKSQSKITRLITAVVMKNWKEIVESCDLKNWREALAAVLTYAKPDEFSALCDLLGTRLENEGDSLLQTQACLCYICAGNVEKLVACWTKAQDGSHPLSLQDLIEKVVILRKAVQLTQAMDTSTVGVLLAAKMSQYANLLAAQGSIAAALAFLPDNTNQPNIMQLRDRLCRAQGEPVAGHESPKIPYEKQQLPKGRPGPVAGHHQMPRVQTQQYYPHGENPPPPGFIMHGNVNPNAAGQLPTSPGHMHTQVPPYPQPQPYQPAQPYPFGTGGSAMYRPQQPVAPPTSNAYPNTPYISSASSYTGQSQLYAAQHQASSPTSSPATSFPPPPSSGASFQHGGPGAPPSSSAYALPPGTTGPQNGWNDPPALNRVPKKKKMPENFMPPVPITSPIMNPLGDPQSQMLQQQPSAPVPLSSQSSFPQPHLPGGQPFHGVQQPLGQTGMPPSFSKPNIEGAPGAPIGNTFQHVQSLPTKKITKKPIPDEHLILKTTFEDLIQRCLSSATDPQTKRKLDDASKRLEFLYDKLREQTLSPTITSGLHNIARSIETRNYSEGLTMHTHIVSTSNFSETSAFMPVLKVVLTQANKLGV

SEQ ID NO: 76882 - protein, 1205 aa, Homo sapiens
  Payload ID: 15343
  Gene Symbol: SEC31A
  Gene Name: SEC31 homolog A, COPII coat complex component
  Uniprot ID: O94979
  ENSP ID: ENSP00000424635
MKLKEVDRTAMQAWSPAQNHPIYLATGTSAQQLDATFSTNASLEIFELDLSDPSLDMKSCATFSSSHRYHKLIWGPYKMDSKGDVSGVLIAGGENGNIILYDPSKIIAGDKEVVIAQNDKHTGPVRALDVNIFQTNLVASGANESEIYIWDLNNFATPMTPGAKTQPPEDISCIAWNRQVQHILASASPSGRATVWDLRKNEPIIKVSDHSNRMHCSGLAWHPDVATQMVLASEDDRLPVIQMWDLRFASSPLRVLENHARGILAIAWSMADPELLLSCGKDAKILCSNPNTGEVLYELPTNTQWCFDIQWCPRNPAVLSAASFDGRISVYSIMGGSTDGLRQKQVDKLSSSFGNLDPFGTGQPLPPLQIPQQTAQHSIVLPLKKPPKWIRRPVGASFSFGGKLVTFENVRMPSHQGAEQQQQQHHVFISQVVTEKEFLSRSDQLQQAVQSQGFINYCQKKIDASQTEFEKNVWSFLKVNFEDDSRGKYLELLGYRKEDLGKKIALALNKVDGANVALKDSDQVAQSDGEESPAAEEQLLGEHIKEEKEESEFLPSSGGTFNISVSGDIDGLITQALLTGNFESAVDLCLHDNRMADAIILAIAGGQELLARTQKKYFAKSQSKITRLITAVVMKNWKEIVESCDLKNWREALAAVLTYAKPDEFSALCDLLGTRLENEGDSLLQTQACLCYICAGNVEKLVACWTKAQDGSHPLSLQDLIEKVVILRKAVQLTQAMDTSTVGVLLAAKMSQYANLLAAQGSIAAALAFLPDNTNQPNIMQLRDRLCRAQGEPVAGHESPKIPYEKQQLPKGRPGPVAGHHQMPRVQTQQYYPHGENPPPPGFIMHGNVNPNAAGQLPTSPGHMHTQVPPYPQPQPYQPAQPYPFGTGGSAMYRPQQPVAPPTSNAYPNTPYISSASSYTGQSQLYAAQHQASSPTSSPATSFPPPPSSGASFQHGGPGAPPSSSAYALPPGTTGPQNGWNDPPALNRVPKKKKMPENFMPPVPITSPIMNPLGDPQSQMLQQQPSAPVPLSSQSSFPQPHLPGGQPFHGVQQPLGQTGMPPSFSKPNIEGAPGAPIGNTFQHVQSLPTKKITKKPIPDEHLILKTTFEDLIQRCLSSATDPQTKRKLDDASKRLEFLYDKLREQTLSPTITSGLHNIARSIETRNYSEGLTMHTHIVSTSNFSETSAFMPVLKVVLTQANKLGV

SEQ ID NO: 76883 - protein, 235 aa, Homo sapiens
  Payload ID: 15343
  Gene Symbol: SEC31A
  Gene Name: SEC31 homolog A, COPII coat complex component
  ENSP ID: ENSP00000425056
TQDPAAEGPRQQDEVKGSRSYSHAGMEPCPESPHLPSNRYHKLIWGPYKMDSKGDVSGVLIAGGENGNIILYDPSKIIAGDKEVVIAQNDKHTGPVRALDVNIFQTNLVASGANESEIYIWDLNNFATPMTPGAKTQPPEDISCIAWNRQVQHILASASPSGRATVWDLRKNEPIIKVSDHSNRMHCSGLAWHPDVATQMVLASEDDRLPVIQMWDLRFASSPLRVLENHARYRA

SEQ ID NO: 76884 - protein, 26 aa, Homo sapiens
  Payload ID: 15343
  Gene Symbol: SEC31A
  Gene Name: SEC31 homolog A, COPII coat complex component
  ENSP ID: ENSP00000425064
MKLKEVDRTAMQAWSPAQNHPIYLAT

SEQ ID NO: 76885 - protein, 66 aa, Homo sapiens
  Payload ID: 15343
  Gene Symbol: SEC31A
  Gene Name: SEC31 homolog A, COPII coat complex component
  ENSP ID: ENSP00000425095
MKLKEVDRTAMQAWSPAQNHPIYLATGTSAQQLDATFSTNASLEIFELDLSDPSLDMKSCATFSSS

SEQ ID NO: 76886 - protein, 219 aa, Homo sapiens
  Payload ID: 15343
  Gene Symbol: SEC31A
  Gene Name: SEC31 homolog A, COPII coat complex component
  ENSP ID: ENSP00000425140
  MOD_RES (1)..(1): Any amino acid
XQMPRVQTQQYYPHVRIAPTVTTWSNKTPTALPSHPPAASPSDTQGENPPPPGFIMHGNVNPNAAGQLPTSPGHMHTQVPPYPQPQRPQNGWNDPPALNRVPKKKKMPENFMPPVPITSPIMNPLGDPQSQMLQQQPSAPVPLSSQSSFPQPHLPGGQPFHGVQQPLGQTGMPPSFSKPNIEGAPGAPIGNTFQHVQSLPTKKITKKPIPDEHLILKTT

SEQ ID NO: 76887 - protein, 166 aa, Homo sapiens
  Payload ID: 15343
  Gene Symbol: SEC31A
  Gene Name: SEC31 homolog A, COPII coat complex component
  ENSP ID: ENSP00000425555
MKLKEVDRTAMQAWSPAQNHPIYLATGTSAQQLDATFSTNASLEIFELDLSDPSLDMKSCATFSSSHRYHKLIWGPYKMDSKGDVSGVLIAGGENGNIILYDPSKIIAGDKEVVIAQNDKHTGPVRALDVNIFQTNLVASGANESEIYIWDLNNFATPMTPGAKTQ

SEQ ID NO: 76888 - protein, 877 aa, Homo sapiens
  Payload ID: 15343
  Gene Symbol: SEC31A
  Gene Name: SEC31 homolog A, COPII coat complex component
  ENSP ID: ENSP00000425999
MKLKEVDRTAMQAWSPAQNHPIYLATGTSAQQLDATFSTNASLEIFELDLSDPSLDMKSCATFSSSHRYHKLIWGPYKMDSKGDVSGVLIAGGENGNIILYDPSKIIAGDKEVVIAQNDKHTGPVRALDVNIFQTNLVASGANESEIYIWDLNNFATPMTPGAKTQPPEDISCIAWNRQVQHILASASPSGRATVWDLRKNEPIIKVSDHSNRMHCSGLAWHPDVATQMVLASEDDRLPVIQMWDLRFASSPLRVLENHARGILAIAWSMADPELLLSCGKDAKILCSNPNTGEVLYELPTNTQWCFDIQWCPRNPAVLSAASFDGRISVYSIMGGSTDGLRQKQVDKLSSSFGNLDPFGTGQPLPPLQIPQQTAQHSIVLPLKKPPKWIRRPVGASFSFGGKLVTFENVRMPSHQGAEQQQQQHHVFISQVVTEKEFLSRSDQLQQAVQSQGFINYCQKKIDASQTEFEKNVWSFLKVNFEDDSRGKYLELLGYRKEDLGKKIALALNKVDGANVALKDSDQVAQSDGEESPAAEEQLLGEHIKEEKEESEFLPSSGGTFNISVSGDIDGLITQALLTGNFESAVDLCLHDNRMADAIILAIAGGQELLARTQKKYFAKSQSKITRLITAVVMKNWKEIVESCDLKNWREALAAVLTYAKPDEFSALCDLLGTRLENEGDSLLQTQACLCYICAGNVEKLVACWTKAQDGSHPLSLQDLIEKVVILRKAVQLTQAMDTSTVGVLLAAKMSQYANLLAAQGSIAAALAFLPDNTNQPNIMQLRDRLCRAQGEPVAGHESPKIPYEKQQLPKGRPGPVAGHHQMPRVQTQQYYPHGENPPPPGFIMHGNVNPNAAGQLPTSPGHMHTQVPPYPQPQRK

SEQ ID NO: 76889 - protein, 443 aa, Homo sapiens
  Payload ID: 15343
  Gene Symbol: SEC31A
  Gene Name: SEC31 homolog A, COPII coat complex component
  ENSP ID: ENSP00000426562
  MOD_RES (1)..(1): Any amino acid
XFGTGQPLPPLQIPQQTAQHSIVLPLKKPPKWIRRPVGASFSFGGKLVTFENVRMPSHQGAEQQQQQHHVFISQVVTEKEFLSRSDQLQQAVQSQGFINYCQKKIDASQTEFEKNVWSFLKVNFEDDSRGKYLELLGYRKEDLGKKIALALNKVDGANVHIKEEKEESEFLPSSGGTFNISVSGDIDGLITQALLTGNFESAVDLCLHDNRMADAIILAIAGGQELLARTQKKYFAKSQSKITRLITAVVMKNWKEIVESCDLKNWREALAAVLTYAKPDEFSALCDLLGTRLENEGDSLLQTQACLCYICAGNVEKLVACWTKAQDGSHPLSLQDLIEKVVILRKAVQLTQAMDTSTVGVLLAAKMSQYANLLAAQGSIAAALAFLPDNTNQPNIMQLRDRLCRAQGEPVAGHESPKIPYEKQQLPKGRPGPVAGHHQMPRV

SEQ ID NO: 76890 - protein, 1106 aa, Homo sapiens; identical to SEQ ID NO: 76867
  Payload ID: 15343
  Gene Symbol: SEC31A
  Gene Name: SEC31 homolog A, COPII coat complex component
  Uniprot ID: O94979
  ENSP ID: ENSP00000426569

SEQ ID NO: 76891 - protein, 1067 aa, Homo sapiens; identical to SEQ ID NO: 76874
  Payload ID: 15343
  Gene Symbol: SEC31A
  Gene Name: SEC31 homolog A, COPII coat complex component
  Uniprot ID: O94979
  ENSP ID: ENSP00000426886

SEQ ID NO: 76892 - protein, 181 aa, Homo sapiens
  Payload ID: 15343
  Gene Symbol: SEC31A
  Gene Name: SEC31 homolog A, COPII coat complex component
  ENSP ID: ENSP00000426943
  MOD_RES (1)..(1): Any amino acid
XPVPITSPIMNPLGDPQSQMLQQQPSAPVPLSSQSSFPQPHLPGGQPFHGVQQPLGQTGMPPSFSKPNIEGAPGAPIGNTFQHVQSLPTKKITKKPIPDEHLILKTTFEDLIQRCLSSATDPLSPTITSGLHNIARSIETRNYSEGLTMHTHIVSTSNFSETSAFMPVLKVVLTQANKLGV

SEQ ID NO: 76893 - protein, 164 aa, Homo sapiens
  Payload ID: 15343
  Gene Symbol: SEC31A
  Gene Name: SEC31 homolog A, COPII coat complex component
  ENSP ID: ENSP00000426950
MKLKEVDRTAMQAWSPAQNHPIYLATGTSAQQLDATFSTNASLEIFELDLSDPSLDMKSCATFSSSHRYHKLIWGPYKMDSKGDVSGVLIAGGENGNIILYDPSKIIAGDKEVVIAQNDKHTGPVRALDVNIFQTNLVASGANESEIYIWDLNNFATPMTPGAK

SEQ ID NO: 76894 - protein, 65 aa, Homo sapiens
  Payload ID: 15343
  Gene Symbol: SEC31A
  Gene Name: SEC31 homolog A, COPII coat complex component
  ENSP ID: ENSP00000475765
MKLKEVDRTAMQAWSPAQNHPIYLATGTSAQQLDATFSTNASLEIFELDLSDPSLDMKSCATFSS

SEQ ID NO: 76895 - protein, 11 aa, Homo sapiens
  Payload ID: 15343
  Gene Symbol: SEC31A
  Gene Name: SEC31 homolog A, COPII coat complex component
  ENSP ID: ENSP00000476156
MKLKEVDRTAM

SEQ ID NO: 76896 - protein, 1179 aa, Homo sapiens
  Payload ID: 15344
  Gene Symbol: SEC31B
  Gene Name: SEC31 homolog B, COPII coat complex component
  Uniprot ID: Q9NQW1
  ENSP ID: ENSP00000359370
MKLKELERPAVQAWSPASQYPLYLATGTSAQQLDSSFSTNGTLEIFEVDFRDPSLDLKHRGVLSALSRFHKLVWGSFGSGLLESSGVIVGGGDNGMLILYNVTHILSSGKEPVIAQKQKHTGAVRALDLNPFQGNLLASGASDSEIFIWDLNNLNVPMTLGSKSQQPPEDIKALSWNRQAQHILSSAHPSGKAVVWDLRKNEPIIKVSDHSNRMHCSGLAWHPDIATQLVLCSEDDRLPVIQLWDLRFASSPLKVLESHSRGILSVSWSQADAELLLTSAKDSQILCRNLGSSEVVYKLPTQSSWCFDVQWCPRDPSVFSAASFNGWISLYSVMGRSWEVQHMRQADKISSSFSKGQPLPPLQVPEQVAQAPLIPPLKKPPKWIRRPTGVSFAFGGKLVTFGLPSTPAHLVPQPCPRLVFISQVTTESEFLMRSAELQEALGSGNLLNYCQNKSQQALLQSEKMLWQFLKVTLEQDSRMKFLKLLGYSKDELQKKVATWLKSDVGLGESPQPKGNDLNSDRQQAFCSQASKHTTKEASASSAFFDELVPQNMTPWEIPITKDIDGLLSQALLLGELGPAVELCLKEERFADAIILAQAGGTDLLKQTQERYLAKKKTKISSLLACVVQKNWKDVVCTCSLKNWREALALLLTYSGTEKFPELCDMLGTRMEQEGSRALTSEARLCYVCSGSVERLVECWAKCHQALSPMALQDLMEKVMVLNRSLEQLRGPHGVSPGPATTYRVTQYANLLAAQGSLATAMSFLPRDCAQPPVQQLRDRLFHAQGSAVLGQQSPPFPFPRIVVGATLHSKETSSYRLGSQPSHQVPTPSPRPRVFTPQSSPAMPLAPSHPSPYQGPRTQNISDYRAPGPQAIQPLPLSPGVRPASSQPQLLGGQRVQVPNPVGFPGTWPLPGSPLPMACPGIMRPGSTSLPETPRLFPLLPLRPLGPGRMVSHTPAPPASFPVPYLPGDPGAPCSSVLPTTGILTPHPGPQDSWKEAPAPRGNLQRNKLPETFMPPAPITAPVMSLTPELQGILPSQPPVSSVSHAPPGVPGELSLQLQHLPPEKMERKELPPEHQSLKSSFEALLQRCSLSATDLKTKRKLEEAAQRLEYLYEKLCEGTLSPHVVAGLHEVARCVDAGSFEQGLAVHAQVAGCSSFSEVSSFMPILKAVLIIAHKLLV

SEQ ID NO: 76897 - protein, 85 aa, Homo sapiens
  Payload ID: 15344
  Gene Symbol: SEC31B
  Gene Name: SEC31 homolog B, COPII coat complex component
  ENSP ID: ENSP00000432260
MKLKELERPAVQAWSPASQYPLYLATGTSAQQLDSSFSTNGTLEIFEVDFRDPSLDLKHRGVLSALSRATSWLQGPAILKSSFGI

SEQ ID NO: 76898 - protein, 349 aa, Homo sapiens
  Payload ID: 15344
  Gene Symbol: SEC31B
  Gene Name: SEC31 homolog B, COPII coat complex component
  ENSP ID: ENSP00000435359
MKLKELERPAVQAWSPASQYPLYLATGTSAQQLDSSFSTNGTLEIFEVDFRDPSLDLKHRGVLSALSRFHKLVWGSFGSGLLESSGVIVGGGDNGMLILYNVTHILSSGKEPVIAQKQKHTGAVRALDLNPFQGNLLASGASDSEIFIWDLNNLNVPMTLGSKSQQPPEDIKALSWNRQAQHILSSAHPSGKAVVWDLRKNEPIIKVSDHSNRMHCSGLAWHPDIATQLVLCSEDDRLPVIQLWDLRFASSPLKVLESHSRGILSVSWSQADAELLLTSAKDSQILCRNLGSSEVVYKLPTQSSWCFDVQWCPRDPSVFSAASFNGWISLYSVMGRSWEVQHMRQADKV

SEQ ID NO: 76899 - protein, 85 aa, Homo sapiens; identical to SEQ ID NO: 76897
  Payload ID: 15344
  Gene Symbol: SEC31B
  Gene Name: SEC31 homolog B, COPII coat complex component
  ENSP ID: ENSP00000473769

SEQ ID NO: 76900 - protein, 85 aa, Homo sapiens; identical to SEQ ID NO: 76897
  Payload ID: 15344
  Gene Symbol: SEC31B
  Gene Name: SEC31 homolog B, COPII coat complex component
  ENSP ID: ENSP00000473995

SEQ ID NO: 76901 - protein, 348 aa, Homo sapiens
  Payload ID: 15344
  Gene Symbol: SEC31B
  Gene Name: SEC31 homolog B, COPII coat complex component
  Uniprot ID: Q9NQW1
  ENSP ID: ENSP00000474124
MKLKELERPAVQAWSPASQYPLYLATGTSAQQLDSSFSTNGTLEIFEVDFRDPSLDLKHRGVLSALSRFHKLVWGSFGSGLLESSGVIVGGGDNGMLILYNVTHILSSGKEPVIAQKQKHTGAVRALDLNPFQGNLLASGASDSEIFIWDLNNLNVPMTLGSKSQPPEDIKALSWNRQAQHILSSAHPSGKAVVWDLRKNEPIIKVSDHSNRMHCSGLAWHPDIATQLVLCSEDDRLPVIQLWDLRFASSPLKVLESHSRGILSVSWSQADAELLLTSAKDSQILCRNLGSSEVVYKLPTQSSWCFDVQWCPRDPSVFSAASFNGWISLYSVMGRSWEVQHMRQADKV

SEQ ID NO: 76902 - protein, 476 aa, Homo sapiens
  Payload ID: 15345
  Gene Symbol: SEC61A1
  Gene Name: Sec61 translocon alpha 1 subunit
  Uniprot ID: P61619
  ENSP ID: ENSP00000243253
MAIKFLEVIKPFCVILPEIQKPERKIQFKEKVLWTAITLFIFLVCCQIPLFGIMSSDSADPFYWMRVILASNRGTLMELGISPIVTSGLIMQLLAGAKIIEVGDTPKDRALFNGAQKLFGMIITIGQSIVYVMTGMYGDPSEMGAGICLLITIQLFVAGLIVLLLDELLQKGYGLGSGISLFIATNICETIVWKAFSPTTVNTGRGMEFEGAIIALFHLLATRTDKVRALREAFYRQNLPNLMNLIATIFVFAVVIYFQGFRVDLPIKSARYRGQYNTYPIKLFYTSNIPIILQSALVSNLYVISQMLSARFSGNLLVSLLGTWSDTSSGGPARAYPVGGLCYYLSPPESFGSVLEDPVHAVVYIVFMLGSCAFFSKTWIEVSGSSAKDVAKQLKEQQMVMRGHRETSMVHELNRYIPTAAAFGGLCIGALSVLADFLGAIGSGTGILLAVTIIYQYFEIFVKEQSEVGSMGALLF

SEQ ID NO: 76903 - protein, 356 aa, Homo sapiens
  Payload ID: 15345
  Gene Symbol: SEC61A1
  Gene Name: Sec61 translocon alpha 1 subunit
  Uniprot ID: P61619
  ENSP ID: ENSP00000411445
MIITIGQSIVYVMTGMYGDPSEMGAGICLLITIQLFVAGLIVLLLDELLQKGYGLGSGISLFIATNICETIVWKAFSPTTVNTGRGMEFEGAIIALFHLLATRTDKVRALREAFYRQNLPNLMNLIATIFVFAVVIYFQGFRVDLPIKSARYRGQYNTYPIKLFYTSNIPIILQSALVSNLYVISQMLSARFSGNLLVSLLGTWSDTSSGGPARAYPVGGLCYYLSPPESFGSVLEDPVHAVVYIVFMLGSCAFFSKTWIEVSGSSAKDVAKQLKEQQMVMRGHRETSMVHELNRYIPTAAAFGGLCIGALSVLADFLGAIGSGTGILLAVTIIYQYFEIFVKEQSEVGSMGALLF

SEQ ID NO: 76904 - protein, 482 aa, Homo sapiens
  Payload ID: 15345
  Gene Symbol: SEC61A1
  Gene Name: Sec61 translocon alpha 1 subunit
  ENSP ID: ENSP00000418493
MTQTARVLVKFLEVIKPFCVILPEIQKPERKIQFKEKVLWTAITLFIFLVCCQIPLFGIMSSDSADPFYWMRVILASNRGTLMELGISPIVTSGLIMQLLAGAKIIEVGDTPKDRALFNGAQKLFGMIITIGQSIVYVMTGMYGDPSEMGAGICLLITIQLFVAGLIVLLLDELLQKGYGLGSGISLFIATNICETIVWKAFSPTTVNTGRGMEFEGAIIALFHLLATRTDKVRALREAFYRQNLPNLMNLIATIFVFAVVIYFQGFRVDLPIKSARYRGQYNTYPIKLFYTSNIPIILQSALVSNLYVISQMLSARFSGNLLVSLLGTWSDTSSGGPARAYPVGGLCYYLSPPESFGSVLEDPVHAVVYIVFMLGSCAFFSKTWIEVSGSSAKDVAKQLKEQQMVMRGHRETSMVHELNRYIPTAAAFGGLCIGALSVLADFLGAIGSGTGILLAVTIIYQYFEIFVKEQSEVGSMGALLF

SEQ ID NO: 76905 - protein, 101 aa, Homo sapiens
  Payload ID: 15345
  Gene Symbol: SEC61A1
  Gene Name: Sec61 translocon alpha 1 subunit
  ENSP ID: ENSP00000419172
MSSDSADPFYWMRVILASNRGTLMELGISPIVTSGLIMQLLAGAKIIEVGDTPKDRALFNGAQKLFGMIITIGQSIVYVMTGMYGDPSEMGAGICLLITIQ

SEQ ID NO: 76906 - protein, 476 aa, Homo sapiens
  Payload ID: 15346
  Gene Symbol: SEC61A2
  Gene Name: Sec61 translocon alpha 2 subunit
  Uniprot ID: Q9H9S3
  ENSP ID: ENSP00000298428
MGIKFLEVIKPFCAVLPEIQKPERKIQFREKVLWTAITLFIFLVCCQIPLFGIMSSDSADPFYWMRVILASNRGTLMELGISPIVTSGLIMQLLAGAKIIEVGDTPKDRALFNGAQKLFGMIITIGQAIVYVMTGMYGDPAEMGAGICLLIIIQLFVAGLIVLLLDELLQKGYGLGSGISLFIATNICETIVWKAFSPTTINTGRGTEFEGAVIALFHLLATRTDKVRALREAFYRQNLPNLMNLIATVFVFAVVIYFQGFRVDLPIKSARYRGQYSSYPIKLFYTSNIPIILQSALVSNLYVISQMLSVRFSGNFLVNLLGQWADVSGGGPARSYPVGGLCYYLSPPESMGAIFEDPVHVVVYIIFMLGSCAFFSKTWIEVSGSSAKDVAKQLKEQQMVMRGHRDTSMVHELNRYIPTAAAFGGLCIGALSVLADFLGAIGSGTGILLAVTIIYQYFEIFVKEQAEVGGMGALFF

SEQ ID NO: 76907 - protein, 437 aa, Homo sapiens
  Payload ID: 15346
  Gene Symbol: SEC61A2
  Gene Name: Sec61 translocon alpha 2 subunit
  Uniprot ID: Q9H9S3
  ENSP ID: ENSP00000302048
MGIKFLEVIKPFCAVLPEIQKPERKIQFREKVLWTAITLFIFLVCCQIPLFGIMSSDSADPFYWMRVILASNRGTLMELGISPIVTSGLIMQLLAGAKIIEVGDTPKDRALFNGAQKLFGMIITIGQAIVYVMTGMYGDPAEMGAGICLLIIIQLFVAGLIVLLLDELLQKGYGLGSGISLFIATNICETIVWKAFSPTTINTGRGTEFEGAVIALFHLLATRTDKVRALREAFYRQNLPNLMNLIATVFVFAVVIYFQGFRVDLPIKSARYRGQYSSYPIKLFYTSNIPIILQSALVSNLYVISQMLSVRFSGNFLVNLLGQWADVSGGGPARSYPVGGLCYYLSPPESMGAIFEDPVHVVVYIIFMLGSCAFFSKTWIEVSGSSAKDVAKQLKEQQMVMRGHRDTSMVHELNRPKVKLRRWKGEGRHFTKRILFY

SEQ ID NO: 76908 - protein, 168 aa, Homo sapiens
  Payload ID: 15346
  Gene Symbol: SEC61A2
  Gene Name: Sec61 translocon alpha 2 subunit
  ENSP ID: ENSP00000368302
MGIKFLEVIKPFCAVLPEIQKPERKIQFREKVLWTAITLFIFLVCCQIPLFGIMSSDSADPFYWMRVILASNRGTLMELGISPIVTSGLIMQLLAGAKIIEVGDTPKDRALFNGAQKLFGMIITIGQAIVYVMTGMYGDPAEMGAGICLLIIIQALLTLKICGYTEEL

SEQ ID NO: 76909 - protein, 410 aa, Homo sapiens
  Payload ID: 15346
  Gene Symbol: SEC61A2
  Gene Name: Sec61 translocon alpha 2 subunit
  ENSP ID: ENSP00000368306
MGIKFLEVIKPFCAVLPEIQKPERKIQFREKVLWTAITLFIFLVCCQIPLFGIMSSDSADPFYWMRVILASNRGTLMELGISPIVTSGLIMQLLAGAKIIEVGDTPKDRALFNGAQKLFGMIITIGQAIVYVMTGMYGDPAEMGAGICLLIIIQLFVAGLIVLLLDELLQKGYGLGSGISLFIATNICETIVWKAFSPTTINTGRGTEFEGAVIALFHLLATRTDKVRALREAFYRQNLPNLMNLIATVFVFAVVIYFQDVSGGGPARSYPVGGLCYYLSPPESMGAIFEDPVHVVVYIIFMLGSCAFFSKTWIEVSGSSAKDVAKQLKEQQMVMRGHRDTSMVHELNRYIPTAAAFGGLCIGALSVLADFLGAIGSGTGILLAVTIIYQYFEIFVKEQAEVGGMGALFF

SEQ ID NO: 76910 - protein, 454 aa, Homo sapiens
  Payload ID: 15346
  Gene Symbol: SEC61A2
  Gene Name: Sec61 translocon alpha 2 subunit
  Uniprot ID: Q9H9S3
  ENSP ID: ENSP00000368319
MGIKFLEVIKPFCAVLPEIQKPERKIPLFGIMSSDSADPFYWMRVILASNRGTLMELGISPIVTSGLIMQLLAGAKIIEVGDTPKDRALFNGAQKLFGMIITIGQAIVYVMTGMYGDPAEMGAGICLLIIIQLFVAGLIVLLLDELLQKGYGLGSGISLFIATNICETIVWKAFSPTTINTGRGTEFEGAVIALFHLLATRTDKVRALREAFYRQNLPNLMNLIATVFVFAVVIYFQGFRVDLPIKSARYRGQYSSYPIKLFYTSNIPIILQSALVSNLYVISQMLSVRFSGNFLVNLLGQWADVSGGGPARSYPVGGLCYYLSPPESMGAIFEDPVHVVVYIIFMLGSCAFFSKTWIEVSGSSAKDVAKQLKEQQMVMRGHRDTSMVHELNRYIPTAAAFGGLCIGALSVLADFLGAIGSGTGILLAVTIIYQYFEIFVKEQAEVGGMGALFF

SEQ ID NO: 76911 - protein, 159 aa, Homo sapiens
  Payload ID: 15346
  Gene Symbol: SEC61A2
  Gene Name: Sec61 translocon alpha 2 subunit
  ENSP ID: ENSP00000368339
MGIKFLEVIKPFCAVLPEIQKPERKIQFREKVLWTAITLFIFLVCCQIPLFGIMSSDSADPFYWMRVILASNRGTLMELGISPIVTSGLIMQLLAGAKIIEVGDTPKDRALFNGAQKLFGMIITIGQAIVYVMTGMYGDPAEMGAGICLLIIIQDQHSP

SEQ ID NO: 76912 - protein, 145 aa, Homo sapiens
  Payload ID: 15346
  Gene Symbol: SEC61A2
  Gene Name: Sec61 translocon alpha 2 subunit
  ENSP ID: ENSP00000393214
  MOD_RES (1)..(1): Any amino acid
XSDSADPFYWMRVILASNRGTLMELGISPIVTSGLIMQLLAGAKIIEVGDTPKDRALFNGAQKLFGMIITIGQAIVYVMTGMYGDPAEMGAGICLLIIIQGFRVDLPIKSARYRGQYSSYPIKLFYTSNIPIILQSALVSNLYVI

SEQ ID NO: 76913 - protein, 94 aa, Homo sapiens
  Payload ID: 15346
  Gene Symbol: SEC61A2
  Gene Name: Sec61 translocon alpha 2 subunit
  ENSP ID: ENSP00000401731
  MOD_RES (1)..(1): Any amino acid
XFREKVLWTAITLFIFLVCCQIPLFGIMSSDSADPFYWMRVILASNRGTLMELGISPIVTSGLIMQLLAGAKIIEVGDTPKDRALFNGAQKREH

SEQ ID NO: 76914 - protein, 228 aa, Homo sapiens
  Payload ID: 15346
  Gene Symbol: SEC61A2
  Gene Name: Sec61 translocon alpha 2 subunit
  ENSP ID: ENSP00000402124
  MOD_RES (1)..(1): Any amino acid
XGMIITIGQAIVYVMTGMYGDPAEMGAGICLLIIIQLFVAGLIVLLLDELLQKGYGLGSGISLFIATNICETIVWKAFSPTTINTGRGTEFEGAVIALFHLLATRTDKVRALREAFYRQNLPNLMNLIATVFVFAVVIYFQVAKQLKEQQMVMRGHRDTSMVHELNRYIPTAAAFGGLCIGALSVLADFLGAIGSGTGILLAVTIIYQYFEIFVKEQAEVGGMGALFF

SEQ ID NO: 76915 - protein, 189 aa, Homo sapiens
  Payload ID: 15346
  Gene Symbol: SEC61A2
  Gene Name: Sec61 translocon alpha 2 subunit
  ENSP ID: ENSP00000404959
MGIKFLEVIKPFCAVLPEIQKPERKIQFREKVLWTAITLFIFLVCCQIPLFGIMSSDSADPFYWMRVILASNRGTLMELGISPIVTSGLIMQLLAGAKIIEVGDTPKDRALFNGAQKRTEFEGAVIALFHLLATRTDKVRALREAFYRQNLPNLMNLIATVFVFAVVIYFQGFRVDLPIKSARYRGQYS

SEQ ID NO: 76916 - protein, 162 aa, Homo sapiens
  Payload ID: 15346
  Gene Symbol: SEC61A2
  Gene Name: Sec61 translocon alpha 2 subunit
  ENSP ID: ENSP00000436294
MGIKFLEVIKPFCAVLPEIQKPERKIQFREKVLWTAITLFIFLVCCQIPLFGIMSSDSADPFYWMRVILASNRGTLMELGISPIVTSGLIMQLLAGAKIIEVGDTPKDRALFNGAQKLFGMIITIGQAIVYVMTGMYGDPAEMGAGICLLIIIQVLSLRVQS

SEQ ID NO: 76917 - protein, 418 aa, Homo sapiens
  Payload ID: 15346
  Gene Symbol: SEC61A2
  Gene Name: Sec61 translocon alpha 2 subunit
  ENSP ID: ENSP00000436749
MGIKFLEVIKPFCAVLPEIQKPERKIQFREKVLWTAITLFIFLVCCQIPLFGIMSSDSADPFYWMRVILASNRGTLMELGISPIVTSGLIMQLLAGAKIIEVGDTPKDRALFNGAQKLFGMIITIGQAIVYVMTGMYGDPAEMGAGICLLIIIQLFVAGLIVLLLDELLQKGYGLGSGISLFIATNICETIVWKAFSPTTINTGRGTEFEGAVIALFHLLATRTDKVRALREAFYRQNLPNLMNLIATVFVFAVVIYFQGFRVDLPIKSARYRGQYSSYPIKLFYTSNIPIILQSALVSNLYVISQMLSVRFSGNFLVNLLGQWADVSGGGPARSYPVGGLCYYLSPPESMGAIFEDPVHVVVYIIFMLGSCAFFSKTWIEVSGSSAKDVAKQLKEQQMVMRGHRDTSMVHELNSARA

SEQ ID NO: 76918 - protein, 96 aa, Homo sapiens
  Payload ID: 15347
  Gene Symbol: SEC61B
  Gene Name: Sec61 translocon beta subunit
  Uniprot ID: P60468
  ENSP ID: ENSP00000223641
MPGPTPSGTNVGSSGRSPSKAVAARAAGSTVRQRKNASCGTRSAGRTTSAGTGGMWRFYTEDSPGLKVGPVPVLVMSLLFIASVFMLHIWGKYTRS

SEQ ID NO: 76919 - protein, 42 aa, Homo sapiens
  Payload ID: 15347
  Gene Symbol: SEC61B
  Gene Name: Sec61 translocon beta subunit
  ENSP ID: ENSP00000474122
MWRFYTEDSPGLKVGPVPVLVMSLLFIASVFMLHIWGKYTRS

SEQ ID NO: 76920 - protein, 68 aa, Homo sapiens
  Payload ID: 15348
  Gene Symbol: SEC61G
  Gene Name: Sec61 translocon gamma subunit
  Uniprot ID: P60059
  ENSP ID: ENSP00000341538
MDQVMQFVEPSRQFVKDSIRLVKRCTKPDRKEFQKIAMATAIGFAIMGFIGFFVKLIHIPINNIIVGG

SEQ ID NO: 76921 - protein, 68 aa, Homo sapiens; identical to SEQ ID NO: 76920
  Payload ID: 15348
  Gene Symbol: SEC61G
  Gene Name: Sec61 translocon gamma subunit
  Uniprot ID: P60059
  ENSP ID: ENSP00000378906

SEQ ID NO: 76922 - protein, 68 aa, Homo sapiens; identical to SEQ ID NO: 76920
  Payload ID: 15348
  Gene Symbol: SEC61G
  Gene Name: Sec61 translocon gamma subunit
  Uniprot ID: P60059
  ENSP ID: ENSP00000388337

SEQ ID NO: 76923 - protein, 68 aa, Homo sapiens; identical to SEQ ID NO: 76920
  Payload ID: 15348
  Gene Symbol: SEC61G
  Gene Name: Sec61 translocon gamma subunit
  Uniprot ID: P60059
  ENSP ID: ENSP00000409884

SEQ ID NO: 76924 - protein, 399 aa, Homo sapiens
  Payload ID: 15349
  Gene Symbol: SEC62
  Gene Name: SEC62 homolog, preprotein translocation factor
  Uniprot ID: Q99442
  ENSP ID: ENSP00000337688
MAERRRHKKRIQEVGEPSKEEKAVAKYLRFNCPTKSTNMMGHRVDYFIASKAVDCLLDSKWAKAKKGEEALFTTRESVVDYCNRLLKKQFFHRALKVMKMKYDKDIKKEKDKGKAESGKEEDKKSKKENIKDEKTKKEKEKKKDGEKEESKKEETPGTPKKKETKKKFKLEPHDDQVFLDGNEVYVWIYDPVHFKTFVMGLILVIAVIAATLFPLWPAEMRVGVYYLSVGAGCFVASILLLAVARCILFLIIWLITGGRHHFWFLPNLTADVGFIDSFRPLYTHEYKGPKADLKKDEKSETKKQQKSDSEEKSDSEKKEDEEGKVGPGNHGTEGSGGERHSDTDSDRREDDRSQHSSGNGNDFEMITKEELEQQTDGDCEEDEEEENDGETPKSSHEKS

SEQ ID NO: 76925 - protein, 101 aa, Homo sapiens
  Payload ID: 15349
  Gene Symbol: SEC62
  Gene Name: SEC62 homolog, preprotein translocation factor
  ENSP ID: ENSP00000418342
MAERRRHKKRIQEVGEPSKEEKAVAKYLRFNCPTKSTNMMGHRVDYFIASKAVDCLLDSKWAKAKKGEEALFTTRESVVDYCNSLYLYGECNAIPVFPKGF

SEQ ID NO: 76926 - protein, 85 aa, Homo sapiens
  Payload ID: 15349
  Gene Symbol: SEC62
  Gene Name: SEC62 homolog, preprotein translocation factor
  ENSP ID: ENSP00000419319
MAERRRHKKRIQEVGEPSKEEKAVAKYLRFNCPTKSTNMMGHRVDYFIASKAVDCLLDSKWAKAKKGEEALFTTRESVVDYCNRS

SEQ ID NO: 76927 - protein, 47 aa, Homo sapiens
  Payload ID: 15349
  Gene Symbol: SEC62
  Gene Name: SEC62 homolog, preprotein translocation factor
  ENSP ID: ENSP00000420304
MAERRRHKKRIQYNFRFSCPIEVSSKRTVVTFPSWTHYWSLKTRRSW

SEQ ID NO: 76928 - protein, 399 aa, Homo sapiens; identical to SEQ ID NO: 76924
  Payload ID: 15349
  Gene Symbol: SEC62
  Gene Name: SEC62 homolog, preprotein translocation factor
  Uniprot ID: Q99442
  ENSP ID: ENSP00000420331

SEQ ID NO: 76929 - protein, 760 aa, Homo sapiens
  Payload ID: 15350
  Gene Symbol: SEC63
  Gene Name: SEC63 homolog, protein translocation regulator
  Uniprot ID: Q9UGP8
  ENSP ID: ENSP00000357998
MAGQQFQYDDSGNTFFYFLTSFVGLIVIPATYYLWPRDQNAEQIRLKNIRKVYGRCMWYRLRLLKPQPNIIPTVKKIVLLAGWALFLFLAYKVSKTDREYQEYNPYEVLNLDPGATVAEIKKQYRLLSLKYHPDKGGDEVMFMRIAKAYAALTDEESRKNWEEFGNPDGPQATSFGIALPAWIVDQKNSILVLLVYGLAFMVILPVVVGSWWYRSIRYSGDQILIRTTQIYTYFVYKTRNMDMKRLIMVLAGASEFDPQYNKDATSRPTDNILIPQLIREIGSINLKKNEPPLTCPYSLKARVLLLSHLARMKIPETLEEDQQFMLKKCPALLQEMVNVICQLIVMARNREEREFRAPTLASLENCMKLSQMAVQGLQQFKSPLLQLPHIEEDNLRRVSNHKKYKIKTIQDLVSLKESDRHTLLHFLEDEKYEEVMAVLGSFPYVTMDIKSQVLDDEDSNNITVGSLVTVLVKLTRQTMAEVFEKEQSICAAEEQPAEDGQGETNKNRTKGGWQQKSKGPKKTAKSKKKKPLKKKPTPVLLPQSKQQKQKQANGVVGNEAAVKEDEEEVSDKGSDSEEEETNRDSQSEKDDGSDRDSDREQDEKQNKDDEAEWQELQQSIQRKERALLETKSKITHPVYSLYFPEEKQEWWWLYIADRKEQTLISMPYHVCTLKDTEEVELKFPAPGKPGNYQYTVFLRSDSYMGLDQIKPLKLEVHEAKPVPENHPQWDTAIEGDEDQEDSEGFEDSFEEEEEEEEDDD

SEQ ID NO: 76930 - protein, 161 aa, Homo sapiens
  Payload ID: 15350
  Gene Symbol: SEC63
  Gene Name: SEC63 homolog, protein translocation regulator
  ENSP ID: ENSP00000403144
MWYRLRLLKPQPNIIPTVKKIVLLAGWALFLFLAYKVSKTDREYQEYNPYEVLNLDPGATVAEIKKQYRLLSLKYHPDKGGDEVMFMRIAKAYAALTDEESRKNWEEFGNPDGPQATSFGIALPAWIVDQKNSILVLLVYGLAFMVILPVVVGSWWYRSIR

SEQ ID NO: 76931 - protein, 80 aa, Homo sapiens
  Payload ID: 15350
  Gene Symbol: SEC63
  Gene Name: SEC63 homolog, protein translocation regulator
  ENSP ID: ENSP00000410968
MAGQQFQYDDSGNTFFYFLTSFVGLIVIPATYYLWPRDQNAAGRVSFTQAGLELASSHPPASAPRVAGLTDLSHCVRMDF

SEQ ID NO: 76932 - protein, 414 aa, Homo sapiens
  Payload ID: 15351
  Gene Symbol: SCRN1
  Gene Name: secernin 1
  Uniprot ID: Q12765
  ENSP ID: ENSP00000242059
MAAAPPSYCFVAFPPRAKDGLVVFGKNSARPRDEVQEVVYFSAADHEPESKVECTYISIDQVPRTYAIMISRPAWLWGAEMGANEHGVCIANEAINTREPAAEIEALLGMDLVRLGLERGETAKEALDVIVSLLEEHGQGGNYFEDANSCHSFQSAYLIVDRDEAWVLETIGKYWAAEKVTEGVRCICSQLSLTTKMDAEHPELRSYAQSQGWWTGEGEFNFSEVFSPVEDHLDCGAGKDSLEKQEESITVQTMMNTLRDKASGVCIDSEFFLTTASGVSVLPQNRSSPCIHYFTGTPDPSRSIFKPFIFVDDVKLVPKTQSPCFGDDDPAKKEPRFQEKPDRRHELYKAHEWARAIIESDQEQGRKLRSTMLELEKQGLEAMEEILTSSEPLDPAEVGDLFYDCVDTEIKFFK

SEQ ID NO: 76933 - protein, 414 aa, Homo sapiens; identical to SEQ ID NO: 76932
  Payload ID: 15351
  Gene Symbol: SCRN1
  Gene Name: secernin 1
  Uniprot ID: Q12765
  ENSP ID: ENSP00000386872

SEQ ID NO: 76934 - protein, 140 aa, Homo sapiens
  Payload ID: 15351
  Gene Symbol: SCRN1
  Gene Name: secernin 1
  ENSP ID: ENSP00000387052
MAAAPPSYCFVAFPPRAKDGLVVFGKNSARPRDEVQEVVYFSAADHEPESKVECTYISIDQVPRTYAIMISRPAWLWGAEMGANEHGVCIANEAINTREPAAEIEALLGMDLVRNGQGELDIPVRRSWAPRERFSYKTRN

SEQ ID NO: 76935 - protein, 434 aa, Homo sapiens
  Payload ID: 15351
  Gene Symbol: SCRN1
  Gene Name: secernin 1
  Uniprot ID: Q12765
  ENSP ID: ENSP00000388942
MVQDGTFKTRDSTWTCESTRMAAAPPSYCFVAFPPRAKDGLVVFGKNSARPRDEVQEVVYFSAADHEPESKVECTYISIDQVPRTYAIMISRPAWLWGAEMGANEHGVCIANEAINTREPAAEIEALLGMDLVRLGLERGETAKEALDVIVSLLEEHGQGGNYFEDANSCHSFQSAYLIVDRDEAWVLETIGKYWAAEKVTEGVRCICSQLSLTTKMDAEHPELRSYAQSQGWWTGEGEFNFSEVFSPVEDHLDCGAGKDSLEKQEESITVQTMMNTLRDKASGVCIDSEFFLTTASGVSVLPQNRSSPCIHYFTGTPDPSRSIFKPFIFVDDVKLVPKTQSPCFGDDDPAKKEPRFQEKPDRRHELYKAHEWARAIIESDQEQGRKLRSTMLELEKQGLEAMEEILTSSEPLDPAEVGDLFYDCVDTEIKFFK

SEQ ID NO: 76936 - protein, 141 aa, Homo sapiens
  Payload ID: 15351
  Gene Symbol: SCRN1
  Gene Name: secernin 1
  ENSP ID: ENSP00000406289
MAAAPPSYCFVAFPPRAKDGLVVFGKNSARPRDEVQEVVYFSAADHEPESKVECTYISIDQVPRTYAIMISRPAWLWGAEMGANEHGVCIANEAINTREPAAEIEALLGMDLVRLGLERGETAKEALDVIVSLLEEHGQGG

SEQ ID NO: 76937 - protein, 414 aa, Homo sapiens; identical to SEQ ID NO: 76932
  Payload ID: 15351
  Gene Symbol: SCRN1
  Gene Name: secernin 1
  Uniprot ID: Q12765
  ENSP ID: ENSP00000409068

SEQ ID NO: 76938 - protein, 245 aa, Homo sapiens
  Payload ID: 15351
  Gene Symbol: SCRN1
  Gene Name: secernin 1
  ENSP ID: ENSP00000413184
MAAAPPSYCFVAFPPRAKDGLVVFGKNSARPRDEVQEVVYFSAADHEPESKVECTYISIDQVPRTYAIMISRPAWLWGAEMGANEHGVCIANEAINTREPAAEIEALLGMDLVRLGLERGETAKEALDVIVSLLEEHGQGGNYFEDANSCHSFQSAYLIVDRDEAWVLETIGKYWAAEKVTEGVRCICSQLSLTTKMDAEHPELRSYAQSQGWWTGEGEFNFSEVFSPVEDHLDCGAGKDSLEKQ

SEQ ID NO: 76939 - protein, 346 aa, Homo sapiens
  Payload ID: 15351
  Gene Symbol: SCRN1
  Gene Name: secernin 1
  Uniprot ID: Q12765
  ENSP ID: ENSP00000414245
MISRPAWLWGAEMGANEHGVCIANEAINTREPAAEIEALLGMDLVRLGLERGETAKEALDVIVSLLEEHGQGGNYFEDANSCHSFQSAYLIVDRDEAWVLETIGKYWAAEKVTEGVRCICSQLSLTTKMDAEHPELRSYAQSQGWWTGEGEFNFSEVFSPVEDHLDCGAGKDSLEKQEESITVQTMMNTLRDKASGVCIDSEFFLTTASGVSVLPQNRSSPCIHYFTGTPDPSRSIFKPFIFVDDVKLVPKTQSPCFGDDDPAKKEPRFQEKPDRRHELYKAHEWARAIIESDQEQGRKLRSTMLELEKQGLEAMEEILTSSEPLDPAEVGDLFYDCVDTEIKFFK

SEQ ID NO: 76940 - protein, 140 aa, Homo sapiens; identical to SEQ ID NO: 76934
  Payload ID: 15351
  Gene Symbol: SCRN1
  Gene Name: secernin 1
  ENSP ID: ENSP00000486034

SEQ ID NO: 76941 - protein, 425 aa, Homo sapiens
  Payload ID: 15352
  Gene Symbol: SCRN2
  Gene Name: secernin 2
  Uniprot ID: Q96FV2
  ENSP ID: ENSP00000290216
MASSSPDSPCSCDCFVSVPPASAIPAVIFAKNSDRPRDEVQEVVFVPAGTHTPGSRLQCTYIEVEQVSKTHAVILSRPSWLWGAEMGANEHGVCIGNEAVWTKEPVGEGEALLGMDLLRLALERSSSAQEALHVITGLLEHYGQGGNCLEDAAPFSYHSTFLLADRTEAWVLETAGRLWAAQRIQEGARNISNQLSIGTDISAQHPELRTHAQAKGWWDGQGAFDFAQIFSLTQQPVRMEAAKARFQAGRELLRQRQGGITAEVMMGILRDKESGICMDSGGFRTTASMVSVLPQDPTQPCVHFLTATPDPSRSVFKPFIFGMGVAQAPQVLSPTFGAQDPVRTLPRFQTQVDRRHTLYRGHQAALGLMERDQDRGQQLQQKQQDLEQEGLEATQGLLAGEWAPPLWELGSLFQAFVKRESQAYA

SEQ ID NO: 76942 - protein, 378 aa, Homo sapiens
  Payload ID: 15352
  Gene Symbol: SCRN2
  Gene Name: secernin 2
  Uniprot ID: Q96FV2
  ENSP ID: ENSP00000383935
MASSSPDSPCSCDCFVSVPPASAIPAVIFAKNSDRPRDEVQEVVFVPAGTHTPGSRLQCTYIEVEQVSKTHAVILSRPSWLWGAEMGANEHGVCIGNEAVWTKEPVGEGEALLGMDLLRLALERSSSAQEALHVITGLLEHYGQGGNCLEDAAPFSYHSTFLLADRTEAWVLETAGRLWAAQRIQEGARNISNQLSIGTDISAQHPELRTHAQAKGWWDGQGAFDFAQIFSLTQQPVRMEAAKARFQAGRELLRQRQGGITAEVMMGILRDKESGICMDSGGFRTTASMVSVLPQDPTQPCVHFLTATPDPSRSVFKPFIFGMGVAQAPQVLSPTFGAQDPVRTLPRFQTQVDRRHTLYRGHQAALGLMERDQVSPRE

SEQ ID NO: 76943 - protein, 97 aa, Homo sapiens
  Payload ID: 15352
  Gene Symbol: SCRN2
  Gene Name: secernin 2
  ENSP ID: ENSP00000462318
MASSSPDSPCSCDCFVSVPPASAIPAVIFAKNSDRPRDEVQEVVFVPAGTHTPGSRLQAGFGTEQLCPGGLACDHRVTGALWAGGQLPGGCCAILLP

SEQ ID NO: 76944 - protein, 127 aa, Homo sapiens
  Payload ID: 15352
  Gene Symbol: SCRN2
  Gene Name: secernin 2
  ENSP ID: ENSP00000462845
MASSSPDSPCSCDCFVSVPPASAIPAVIFAKNSDRPRDEVQEVVFVPAGTHTPGSRLQCTYIEVEQVSKTHAVILSRPSWLWGAEMGANEHGVCIGNEAVWTKEPVGEGEALLGMDLLRPFHGTLKA

SEQ ID NO: 76945 - protein, 433 aa, Homo sapiens
  Payload ID: 15352
  Gene Symbol: SCRN2
  Gene Name: secernin 2
  ENSP ID: ENSP00000463411
MERPASPQMASSSPDSPCSCDCFVSVPPASAIPAVIFAKNSDRPRDEVQEVVFVPAGTHTPGSRLQCTYIEVEQVSKTHAVILSRPSWLWGAEMGANEHGVCIGNEAVWTKEPVGEGEALLGMDLLRLALERSSSAQEALHVITGLLEHYGQGGNCLEDAAPFSYHSTFLLADRTEAWVLETAGRLWAAQRIQEGARNISNQLSIGTDISAQHPELRTHAQAKGWWDGQGAFDFAQIFSLTQQPVRMEAAKARFQAGRELLRQRQGGITAEVMMGILRDKESGICMDSGGFRTTASMVSVLPQDPTQPCVHFLTATPDPSRSVFKPFIFGMGVAQAPQVLSPTFGAQDPVRTLPRFQTQVDRRHTLYRGHQAALGLMERDQDRGQQLQQKQQDLEQEGLEATQGLLAGEWAPPLWELGSLFQAFVKRESQAYA

SEQ ID NO: 76946 - protein, 269 aa, Homo sapiens
  Payload ID: 15352
  Gene Symbol: SCRN2
  Gene Name: secernin 2
  ENSP ID: ENSP00000463809
  MOD_RES (1)..(1): Any amino acid
XTGLLEHYGQGGNCLEDAAPFSYHSTFLLADRTEAWVLETAGRLWAAQRIQEGARNISNQLSIGTDISAQHPELRTHAQAKGWWDGQGAFDFAQIFSLTQQPVRMEAAKARFQAGRELLRQRQGGITAEVMMGILRDKESGICMDSGGFRTTASMVSVLPQDPTQPCVHFLTATPDPSRSVFKPFIFGMGVAQAPQVLSPTFGAQDPVRTLPRFQTQDRGQQLQQKQQDLEQEGLEATQGLLAGEWAPPLWELGSLFQAFVKRESQAYA

SEQ ID NO: 76947 - protein, 180 aa, Homo sapiens
  Payload ID: 15352
  Gene Symbol: SCRN2
  Gene Name: secernin 2
  ENSP ID: ENSP00000464093
MASSSPDSPCSCDCFVSVPPASAIPAVIFAKNSDRPRDEVQEVVFVPAGTHTPGSRLQCTYIEVEQVSKTHAVILSRPSWLWGAEMGANEHGVCIGNEAVWTKEPVGEGEALLGMDLLRLALERSSSAQEALHVITGLLEHYGQGGNCLEDAAPFSYHSTFLLADRTEAWVLETAGRLWA

SEQ ID NO: 76948 - protein, 97 aa, Homo sapiens; identical to SEQ ID NO: 76943
  Payload ID: 15352
  Gene Symbol: SCRN2
  Gene Name: secernin 2
  ENSP ID: ENSP00000464105

SEQ ID NO: 76949 - protein, 271 aa, Homo sapiens
  Payload ID: 15352
  Gene Symbol: SCRN2
  Gene Name: secernin 2
  ENSP ID: ENSP00000464246
MASSSPDSPCSCDCFVSVPPASAIPAVIFAKNSDRPRDEVQEVVFVPAGTHTPGSRLQCTYIEVEQVSKTHAVILSRPSWLWGAEMGANEHGVCIGNEAVWTKEPVGEGEALLGMDLLRLALERSSSAQEALHVITGLLEHYGQGGNCLEDAAPFSYHSTFLLADRTEAWVLETAGRLWAAQRIQEGARNISNQLSIGTDISAQHPELRTHAQAKGWWDGQGAFDFAQIFSLTQQPVRMEAAKARFQAGRELLRQRQASPSTPWQGASRQR

SEQ ID NO: 76950 - protein, 424 aa, Homo sapiens
  Payload ID: 15353
  Gene Symbol: SCRN3
  Gene Name: secernin 3
  Uniprot ID: Q0VDG4
  ENSP ID: ENSP00000272732
MEPFSCDTFVALPPATVDNRIIFGKNSDRLYDEVQEVVYFPAVVHDNLGERLKCTYIEIDQVPETYAVVLSRPAWLWGAEMGANEHGVCIGNEAVWGREEVCDEEALLGMDLVRLGLERADTAEKALNVIVDLLEKYGQGGNCTEGRMVFSYHNSFLIADRNEAWILETAGKYWAAEKVQEGVRNISNQLSITTKIAREHPDMRNYAKRKGWWDGKKEFDFAAAYSYLDTAKMMTSSGRYCEGYKLLNKHKGNITFETMMEILRDKPSGINMEGEFLTTASMVSILPQDSSLPCIHFFTGTPDPERSVFKPFIFVPHISQLLDTSSPTFELEDLVKKKSHFKPDRRHPLYQKHQQALEVVNNNEEKAKIMLDNMRKLEKELFREMESILQNKHLDVEKIVNLFPQCTKDEIQIYQSNLSVKVSS

SEQ ID NO: 76951 - protein, 417 aa, Homo sapiens
  Payload ID: 15353
  Gene Symbol: SCRN3
  Gene Name: secernin 3
  Uniprot ID: Q0VDG4
  ENSP ID: ENSP00000387142
MPPLATPPSVHLSLRVAGRPDRLYDEVQEVVYFPAVVHDNLGERLKCTYIEIDQVPETYAVVLSRPAWLWGAEMGANEHGVCIGNEAVWGREEVCDEEALLGMDLVRLGLERADTAEKALNVIVDLLEKYGQGGNCTEGRMVFSYHNSFLIADRNEAWILETAGKYWAAEKVQEGVRNISNQLSITTKIAREHPDMRNYAKRKGWWDGKKEFDFAAAYSYLDTAKMMTSSGRYCEGYKLLNKHKGNITFETMMEILRDKPSGINMEGEFLTTASMVSILPQDSSLPCIHFFTGTPDPERSVFKPFIFVPHISQLLDTSSPTFELEDLVKKKSHFKPDRRHPLYQKHQQALEVVNNNEEKAKIMLDNMRKLEKELFREMESILQNKHLDVEKIVNLFPQCTKDEIQIYQSNLSVKVSS

SEQ ID NO: 76952 - protein, 10 aa, Homo sapiens
  Payload ID: 15353
  Gene Symbol: SCRN3
  Gene Name: secernin 3
  ENSP ID: ENSP00000394024
MEPFSCDTFV

SEQ ID NO: 76953 - protein, 216 aa, Homo sapiens
  Payload ID: 15353
  Gene Symbol: SCRN3
  Gene Name: secernin 3
  ENSP ID: ENSP00000396884
MEPFSCDTFVALPPATVDNRIIFGKNSDRLYDEVQEVVYFPAVVHDNLGERLKCTYIEIDQVPETYAVVLSRPAWLWGAEMGANEHGVCIGNEAVWGREEVCDEEALLGMDLVRLGLERADTAEKALNVIVDLLEKYGQGGNCTEGRMVFSYHNSFLIADRNEAWILETAGKYWAAEKVQEGVRNISNQLSITTKIAREHPDMRNYAKRKGWWDGK

SEQ ID NO: 76954 - protein, 117 aa, Homo sapiens
  Payload ID: 15353
  Gene Symbol: SCRN3
  Gene Name: secernin 3
  ENSP ID: ENSP00000400421
MEPFSCDTFVALPPATVDNRIIFGKNSDRLYDEVQEVVYFPAVVHDNLGERLKCTYIEIDQVPETYAVVLSRPAWLWGAEMGANEHGVCIGNEAVWGREEVCDEEALLGMDLVRGSS

SEQ ID NO: 76955 - protein, 113 aa, Homo sapiens
  Payload ID: 15353
  Gene Symbol: SCRN3
  Gene Name: secernin 3
  ENSP ID: ENSP00000402086
MEPFSCDTFVALPPATVDNRIIFGKNSDRLYDEVQEVVYFPAVVHDNLGERLKCTYIEIDQVPETYAVVLSRPAWLWGAEMGANEHGVCIGNEAVWGREEVCDEEALLGMDLV

SEQ ID NO: 76956 - protein, 135 aa, Homo sapiens
  Payload ID: 15353
  Gene Symbol: SCRN3
  Gene Name: secernin 3
  ENSP ID: ENSP00000408376
MEPFSCDTFVALPPATVDNRIIFGKNSDRLYDEVQEVVYFPAVVHDNLGERLKCTYIEIDQVPETYAVVLSRPAWLWGAEMGANEHGVCIGNEAVWGREEVCDEEALLGMDLVRLGLERADTAEKALNVIVDLLE

SEQ ID NO: 76957 - protein, 209 aa, Homo sapiens
  Payload ID: 15353
  Gene Symbol: SCRN3
  Gene Name: secernin 3
  ENSP ID: ENSP00000446727
MEPFSCDTFVALPPATVDNRIIFGKNSDRLYDEVQEVVYFPAVVHDNLGERLKCTYIEIDQVPETYAVVLSRPAWLWGAEMGANEHGVCIGNEAVWGREEVCDEEALLGMDLVRLGLERADTAEKALNVIVDLLEKYGQGGNCTEGRMVFSYHNSFLIADRNEAWILETAGKYWAAEKVQEGVRNISNQLSITTKIAREHPDMRNYAKR

SEQ ID NO: 76958 - protein, 117 aa, Homo sapiens; identical to SEQ ID NO: 76954
  Payload ID: 15353
  Gene Symbol: SCRN3
  Gene Name: secernin 3
  ENSP ID: ENSP00000447307

SEQ ID NO: 76959 - protein, 429 aa, Homo sapiens
  Payload ID: 15353
  Gene Symbol: SCRN3
  Gene Name: secernin 3
  ENSP ID: ENSP00000479847
MEPFSCDTFVALPPATVDNRIIFGKNSDRLYDEVQEVVYFPAVVHDNLGERLKCTYIEIDQVPETYAVVLSRPAWLWGAEMGANEHGVCIGNEAVWGREEVCDEEALLGMDLVRLGLERADTAEKALNVIVDLLEKYGQGGNCTEGRMVFSYHNSFLIADRNEAWILETAGKYWAAEKVQEGVRNISNQLSITTKIAREHPDMRNYAKRKGWWDGKKEFDFAAAYSYLDTAKMMTSSGRYCEGYKLLNKHKGNITFETMMEILRDKPSGINMEGEFLTTASMVSILPQDSSLPCIHFFTGTPDPERSVFKPFIFVPHISQLLDTSSPTFELEDLVKKKSHFKPDRRHPLYQKHQQALEVVNNNEEKAKIMLDNMRKLEKELFREMESILQNKHLDVEKIVNLFPQCTKDEIQIYQSNLSKLVLSDHMVS

SEQ ID NO: 76960 - protein, 781 aa, Homo sapiens
  Payload ID: 15354
  Gene Symbol: SECISBP2
  Gene Name: SECIS binding protein 2
  Uniprot ID: Q96T21
  ENSP ID: ENSP00000364959
MVRVLRSMCLPQLCSHILSVCSGTTSDRNVYSVPGSQYLYNQPSCYRGFQTVKHRNENTCPLPQEMKALFKKKTYDEKKTYDQQKFDSERADGTISSEIKSARGSHHLSIYAENSLKSDGYHKRTDRKSRIIAKNVSTSKPEFEFTTLDFPELQGAENNMSEIQKQPKWGPVHSVSTDISLLREVVKPAAVLSKGEIVVKNNPNESVTANAATNSPSCTRELSWTPMGYVVRQTLSTELSAAPKNVTSMINLKTIASSADPKNVSIPSSEALSSDPSYNKEKHIIHPTQKSKASQGSDLEQNEASRKNKKKKEKSTSKYEVLTVQEPPRIEDAEEFPNLAVASERRDRIETPKFQSKQQPQDNFKNNVKKSQLPVQLDLGGMLTALEKKQHSQHAKQSSKPVVVSVGAVPVLSKECASGERGRRMSQMKTPHNPLDSSAPLMKKGKQREIPKAKKPTSLKKIILKERQERKQRLQENAVSPAFTSDDTQDGESGGDDQFPEQAELSGPEGMDELISTPSVEDKSEEPPGTELQRDTEASHLAPNHTTFPKIHSRRFRDYCSQMLSKEVDACVTDLLKELVRFQDRMYQKDPVKAKTKRRLVLGLREVLKHLKLKKLKCVIISPNCEKIQSKGGLDDTLHTIIDYACEQNIPFVFALNRKALGRSLNKAVPVSVVGIFSYDGAQDQFHKMVELTVAARQAYKTMLENVQQELVGEPRPQAPPSLPTQGPSCPAEDGPPALKEKEEPHYIEIWKKHLEAYSGCTLELEESLEASTSQMMNLNL

SEQ ID NO: 76961 - protein, 854 aa, Homo sapiens
  Payload ID: 15354
  Gene Symbol: SECISBP2
  Gene Name: SECIS binding protein 2
  Uniprot ID: Q96T21
  ENSP ID: ENSP00000364965
MASEGPREPESEGIKLSADVKPFVPRFAGLNVAWLESSEACVFPSSAATYYPFVQEPPVTEQKIYTEDMAFGASTFPPQYLSSEITLHPYAYSPYTLDSTQNVYSVPGSQYLYNQPSCYRGFQTVKHRNENTCPLPQEMKALFKKKTYDEKKTYDQQKFDSERADGTISSEIKSARGSHHLSIYAENSLKSDGYHKRTDRKSRIIAKNVSTSKPEFEFTTLDFPELQGAENNMSEIQKQPKWGPVHSVSTDISLLREVVKPAAVLSKGEIVVKNNPNESVTANAATNSPSCTRELSWTPMGYVVRQTLSTELSAAPKNVTSMINLKTIASSADPKNVSIPSSEALSSDPSYNKEKHIIHPTQKSKASQGSDLEQNEASRKNKKKKEKSTSKYEVLTVQEPPRIEDAEEFPNLAVASERRDRIETPKFQSKQQPQDNFKNNVKKSQLPVQLDLGGMLTALEKKQHSQHAKQSSKPVVVSVGAVPVLSKECASGERGRRMSQMKTPHNPLDSSAPLMKKGKQREIPKAKKPTSLKKIILKERQERKQRLQENAVSPAFTSDDTQDGESGGDDQFPEQAELSGPEGMDELISTPSVEDKSEEPPGTELQRDTEASHLAPNHTTFPKIHSRRFRDYCSQMLSKEVDACVTDLLKELVRFQDRMYQKDPVKAKTKRRLVLGLREVLKHLKLKKLKCVIISPNCEKIQSKGGLDDTLHTIIDYACEQNIPFVFALNRKALGRSLNKAVPVSVVGIFSYDGAQDQFHKMVELTVAARQAYKTMLENVQQELVGEPRPQAPPSLPTQGPSCPAEDGPPALKEKEEPHYIEIWKKHLEAYSGCTLELEESLEASTSQMMNLNL

SEQ ID NO: 76962 - protein, 60 aa, Homo sapiens
  Payload ID: 15354
  Gene Symbol: SECISBP2
  Gene Name: SECIS binding protein 2
  ENSP ID: ENSP00000411573
MPLPILLHVQEQILKMLVYHLLKLYLRILPTTKKNTLFILPKSLKHHKVVTLNKMKPQER

SEQ ID NO: 76963 - protein, 275 aa, Homo sapiens
  Payload ID: 15354
  Gene Symbol: SECISBP2
  Gene Name: SECIS binding protein 2
  ENSP ID: ENSP00000414288
GTISSEIKSARGSHHLSIYAENSLKSDGYHKRTDRKSRIIAKNVSTSKPEFEFTTLDFPELQGAENNMSEIQKQPKWGPVHSVSTDISLLREVVKPAAVLSKGEIVVKNNPNESVTANAATNSPSCTRADPKNVSIPSSEALSSDPSYNKEKHIIHPTQKSKASQGSDLEQNEASRKNKKKKEKSTSKYEVLTVQEPPRIEDAEEFPNLAVASERRDRIETPKFQSKQQPQDNFKNNVKKSQLPVQLDLGGMLTALEKKQHSQHAKQSSKPVVVS

SEQ ID NO: 76964 - protein, 786 aa, Homo sapiens
  Payload ID: 15354
  Gene Symbol: SECISBP2
  Gene Name: SECIS binding protein 2
  Uniprot ID: Q96T21
  ENSP ID: ENSP00000436650
MAFGASTFPPQYLSSEITLHPYAYSPYTLDSTQNVYSVPGSQYLYNQPSCYRGFQTVKHRNENTCPLPQEMKALFKKKTYDEKKTYDQQKFDSERADGTISSEIKSARGSHHLSIYAENSLKSDGYHKRTDRKSRIIAKNVSTSKPEFEFTTLDFPELQGAENNMSEIQKQPKWGPVHSVSTDISLLREVVKPAAVLSKGEIVVKNNPNESVTANAATNSPSCTRELSWTPMGYVVRQTLSTELSAAPKNVTSMINLKTIASSADPKNVSIPSSEALSSDPSYNKEKHIIHPTQKSKASQGSDLEQNEASRKNKKKKEKSTSKYEVLTVQEPPRIEDAEEFPNLAVASERRDRIETPKFQSKQQPQDNFKNNVKKSQLPVQLDLGGMLTALEKKQHSQHAKQSSKPVVVSVGAVPVLSKECASGERGRRMSQMKTPHNPLDSSAPLMKKGKQREIPKAKKPTSLKKIILKERQERKQRLQENAVSPAFTSDDTQDGESGGDDQFPEQAELSGPEGMDELISTPSVEDKSEEPPGTELQRDTEASHLAPNHTTFPKIHSRRFRDYCSQMLSKEVDACVTDLLKELVRFQDRMYQKDPVKAKTKRRLVLGLREVLKHLKLKKLKCVIISPNCEKIQSKGGLDDTLHTIIDYACEQNIPFVFALNRKALGRSLNKAVPVSVVGIFSYDGAQDQFHKMVELTVAARQAYKTMLENVQQELVGEPRPQAPPSLPTQGPSCPAEDGPPALKEKEEPHYIEIWKKHLEAYSGCTLELEESLEASTSQMMNLNL

SEQ ID NO: 76965 - protein, 1056 aa, Homo sapiens
  Payload ID: 15355
  Gene Symbol: SECISBP2L
  Gene Name: SECIS binding protein 2-like
  Uniprot ID: Q93073
  ENSP ID: ENSP00000261847
MDRAPTEQNVKLSAEVEPFIPQKKSPDTFMIPMALPNDNGSVSGVEPTPIPSYLITCYPFVQENQSNRQFPLYNNDIRWQQPNPNPTGPYFAYPIISAQPPVSTEYTYYQLMPAPCAQVMGFYHPFPTPYSNTFQAANTVNAITTECTERPSQLGQVFPLSSHRSRNSNRGSVVPKQQLLQQHIKSKRPLVKNVATQKETNAAGPDSRSKIVLLVDASQQTDFPSDIANKSLSETTATMLWKSKGRRRRASHPTAESSSEQGASEADIDSDSGYCSPKHSNNQPAAGALRNPDSGTMNHVESSMCAGGVNWSNVTCQATQKKPWMEKNQTFSRGGRQTEQRNNSQDEDGFQELNENGNAKDENIQQKLSSKVLDDLPENSPINIVQTPIPITTSVPKRAKSQKKKALAAALATAQEYSEISMEQKKLQEALSKAAGKKNKTPVQLDLGDMLAALEKQQQAMKARQITNTRPLSYTVVTAASFHTKDSTNRKPLTKSQPCLTSFNSVDIASSKAKKGKEKEIAKLKRPTALKKVILKEREEKKGRLTVDHNLLGSEEPTEMHLDFIDDLPQEIVSQEDTGLSMPSDTSLSPASQNSPYCMTPVSQGSPASSGIGSPMASSTITKIHSKRFREYCNQVLCKEIDECVTLLLQELVSFQERIYQKDPVRAKARRRLVMGLREVTKHMKLNKIKCVIISPNCEKIQSKGGLDEALYNVIAMAREQEIPFVFALGRKALGRCVNKLVPVSVVGIFNYFGAESLFNKLVELTEEARKAYKDMVAAMEQEQAEEALKNVKKVPHHMGHSRNPSAASAISFCSVISEPISEVNEKEYETNWRNMVETSDGLEASENEKEVSCKHSTSEKPSKLPFDTPPIGKQPSLVATGSTTSATSAGKSTASDKEEVKPDDLEWASQQSTETGSLDGSCRDLLNSSITSTTSTLVPGMLEEEEDEDEEEEEDYTHEPISVEVQLNSRIESWVSETQRTMETLQLGKTLNGSEEDNVEQSGEEEAEAPEVLEPGMDSEAWTADQQASPGQQKSSNCSSLNKEHSDSNYTTQTT

SEQ ID NO: 76966 - protein, 630 aa, Homo sapiens
  Payload ID: 15355
  Gene Symbol: SECISBP2L
  Gene Name: SECIS binding protein 2-like
  ENSP ID: ENSP00000370314
MLWKSKGRRRRASHPTAESSSEQGASEADIDSDSGYCSPKHSNNQPAAGALRNPDSGTMNHVESSMCAGGVNWSNVTCQATQKKPWMEKNQTFSRGGRQTEQRNNSQVGFRCRGHSTSSERRQNLQKRPDNKHLSSSQSHRSDPNSESLYFEDEDGFQELNENGNAKDENIQQKLSSKVLDDLPENSPINIVQTPIPITTSVPKRAKSQKKKALAAALATAQEYSEISMEQKKLQEALSKAAGKKNKTPVQLDLGDMLAALEKQQQAMKARQITNTRPLSYTVVTAASFHTKDSTNRKPLTKSQPCLTSFNSVDIASSKAKKGKEKEIAKLKRPTALKKVILKEREEKKGRLTVDHNLLGSEEPTEMHLDFIDDLPQEIVSQEDTGLSMPSDTSLSPASQNSPYCMTPVSQGSPASSGIGSPMASSTITKIHSKRFREYCNQVLCKEIDECVTLLLQELVSFQERIYQKDPVRAKARRRLVMGLREVTKHMKLNKIKCVIISPNCEKIQSKGGLDEALYNVIAMAREQEIPFVFALGRKALGRCVNKLVPVSVVGIFNYFGAESLFNKLVELTEEARKAYKDMVAAMEQEQAEEALKNVKKVPHHMGHSRNPSAASAISFCSVISEPISE

SEQ ID NO: 76967 - protein, 312 aa, Homo sapiens
  Payload ID: 15355
  Gene Symbol: SECISBP2L
  Gene Name: SECIS binding protein 2-like
  ENSP ID: ENSP00000452987
MDRAPTEQNVKLSAEVEPFIPQKKSPDTFMIPMALPNDNGSVSGVEPTPIPSYLITCYPFVQENQSNRQFPLYNNDIRWQQPNPNPTGPYFAYPIISAQPPVSTEYTYYQLMPAPCAQVMGFYHPFPTPYSNTFQAANTVNAITTECTERPSQLGQVFPLSSHRSRNSNRGSVVPKQQLLQQHIKSKRPLVKNVATQKETNAAGALRNPDSGTMNHVESSMCAGGVNWSNVTCQATQKKPWMEKNQTFSRGGRQTEQRNNSQDEDGFQELNENGNAKDENIQQKLSSKVLDDLPENSPINIVQTPIPITTSV

SEQ ID NO: 76968 - protein, 1101 aa, Homo sapiens
  Payload ID: 15355
  Gene Symbol: SECISBP2L
  Gene Name: SECIS binding protein 2-like
  Uniprot ID: Q93073
  ENSP ID: ENSP00000453854
MDRAPTEQNVKLSAEVEPFIPQKKSPDTFMIPMALPNDNGSVSGVEPTPIPSYLITCYPFVQENQSNRQFPLYNNDIRWQQPNPNPTGPYFAYPIISAQPPVSTEYTYYQLMPAPCAQVMGFYHPFPTPYSNTFQAANTVNAITTECTERPSQLGQVFPLSSHRSRNSNRGSVVPKQQLLQQHIKSKRPLVKNVATQKETNAAGPDSRSKIVLLVDASQQTDFPSDIANKSLSETTATMLWKSKGRRRRASHPTAESSSEQGASEADIDSDSGYCSPKHSNNQPAAGALRNPDSGTMNHVESSMCAGGVNWSNVTCQATQKKPWMEKNQTFSRGGRQTEQRNNSQVGFRCRGHSTSSERRQNLQKRPDNKHLSSSQSHRSDPNSESLYFEDEDGFQELNENGNAKDENIQQKLSSKVLDDLPENSPINIVQTPIPITTSVPKRAKSQKKKALAAALATAQEYSEISMEQKKLQEALSKAAGKKNKTPVQLDLGDMLAALEKQQQAMKARQITNTRPLSYTVVTAASFHTKDSTNRKPLTKSQPCLTSFNSVDIASSKAKKGKEKEIAKLKRPTALKKVILKEREEKKGRLTVDHNLLGSEEPTEMHLDFIDDLPQEIVSQEDTGLSMPSDTSLSPASQNSPYCMTPVSQGSPASSGIGSPMASSTITKIHSKRFREYCNQVLCKEIDECVTLLLQELVSFQERIYQKDPVRAKARRRLVMGLREVTKHMKLNKIKCVIISPNCEKIQSKGGLDEALYNVIAMAREQEIPFVFALGRKALGRCVNKLVPVSVVGIFNYFGAESLFNKLVELTEEARKAYKDMVAAMEQEQAEEALKNVKKVPHHMGHSRNPSAASAISFCSVISEPISEVNEKEYETNWRNMVETSDGLEASENEKEVSCKHSTSEKPSKLPFDTPPIGKQPSLVATGSTTSATSAGKSTASDKEEVKPDDLEWASQQSTETGSLDGSCRDLLNSSITSTTSTLVPGMLEEEEDEDEEEEEDYTHEPISVEVQLNSRIESWVSETQRTMETLQLGKTLNGSEEDNVEQSGEEEAEAPEVLEPGMDSEAWTADQQASPGQQKSSNCSSLNKEHSDSNYTTQTT

SEQ ID NO: 76969 - protein, 95 aa, Homo sapiens
  Payload ID: 15355
  Gene Symbol: SECISBP2L
  Gene Name: SECIS binding protein 2-like
  ENSP ID: ENSP00000454144
  MOD_RES (1)..(1): Any amino acid
XKNVKKVPHHMGHSRNPSAASAISFCSVISEPISEVNEKEYETNWRNMVETSDGLEASENEKEVSCKHSTSEKPSKLPFDTPPIEILQEFMTPHK

SEQ ID NO: 76970 - protein, 49 aa, Homo sapiens
  Payload ID: 15356
  Gene Symbol: SCGN
  Gene Name: secretagogin, EF-hand calcium binding protein
  ENSP ID: ENSP00000333933
MDSSREPTLGRLDAAGFWQVWQRFDADGHGHESKFAQGETAVYDYPRCL

SEQ ID NO: 76971 - protein, 276 aa, Homo sapiens
  Payload ID: 15356
  Gene Symbol: SCGN
  Gene Name: secretagogin, EF-hand calcium binding protein
  Uniprot ID: O76038
  ENSP ID: ENSP00000367197
MDSSREPTLGRLDAAGFWQVWQRFDADEKGYIEEKELDAFFLHMLMKLGTDDTVMKANLHKVKQQFMTTQDASKDGRIRMKELAGMFLSEDENFLLLFRRENPLDSSVEFMQIWRKYDADSSGFISAAELRNFLRDLFLHHKKAISEAKLEEYTGTMMKIFDRNKDGRLDLNDLARILALQENFLLQFKMDACSTEERKRDFEKIFAYYDVSKTGALEGPEVDGFVKDMMELVQPSISGVDLDKFREILLRHCDVNKDGKIQKSELALCLGLKINP

SEQ ID NO: 76972 - protein, 49 aa, Homo sapiens; identical to SEQ ID NO: 76970
  Payload ID: 15356
  Gene Symbol: SCGN
  Gene Name: secretagogin, EF-hand calcium binding protein
  ENSP ID: ENSP00000484392

SEQ ID NO: 76973 - protein, 248 aa, Homo sapiens
  Payload ID: 15357
  Gene Symbol: SECTM1
  Gene Name: secreted and transmembrane 1
  Uniprot ID: Q8WVN6
  ENSP ID: ENSP00000269389
MQTCPLAFPGHVSQALGTLLFLAASLSAQNEGWDSPICTEGVVSVSWGENTVMSCNISNAFSHVNIKLRAHGQESAIFNEVAPGYFSRDGWQLQVQGGVAQLVIKGARDSHAGLYMWHLVGHQRNNRQVTLEVSGAEPQSAPDTGFWPVPAVVTAVFILLVALVMFAWYRCRCSQQRREKKFFLLEPQMKVAALRAGAQQGLSRASAELWTPDSEPTPRPLALVFKPSPLGALELLSPQPLFPYAADP

SEQ ID NO: 76974 - protein, 85 aa, Homo sapiens
  Payload ID: 15357
  Gene Symbol: SECTM1
  Gene Name: secreted and transmembrane 1
  ENSP ID: ENSP00000462294
MQTCPLAFPGHVSQALGTLLFLAASLSAQNEGWDSPICTEGVVSVSWGENTVMSCNISNAFSHVNIKLRAHGQESAIFNEVAPGY

SEQ ID NO: 76975 - protein, 146 aa, Homo sapiens
  Payload ID: 15357
  Gene Symbol: SECTM1
  Gene Name: secreted and transmembrane 1
  ENSP ID: ENSP00000462563
MQTCPLAFPGHVSQALGTLLFLAASLSAQNEGWDSPICTEGVVSVSWGENTVMSCNISNAFSHVNIKLRAHGQESAIFNEVAPGYFSRDGWQLQVQGGVAQLVIKGARDSHAGLYMWHLVGHQRNNRQVTLEVSEPRGLKDRASAQ

SEQ ID NO: 76976 - protein, 178 aa, Homo sapiens
  Payload ID: 15357
  Gene Symbol: SECTM1
  Gene Name: secreted and transmembrane 1
  ENSP ID: ENSP00000463114
MQTCPLAFPGHVSQALGTLLFLAASLSAQNEGWDSPICTEGVVSVSWGENTVMSCNISNAFSHVNIKLRAHGQESAIFNEVAPGYFSRDGWQLQVQGGVAQLVIKGARDSHAGLYMWHLVGHQRNNRQVTLEVSGAEPQSAPDTGFWPVPAVVTAVFILLVALVMFAWYRCRCSQQRR

SEQ ID NO: 76977 - protein, 170 aa, Homo sapiens
  Payload ID: 15357
  Gene Symbol: SECTM1
  Gene Name: secreted and transmembrane 1
  ENSP ID: ENSP00000463120
MQTCPLAFPGHVSQALGTLLFLAASLSAQNEGWDSPICTEGVVSVSWGENTVMSCNISNAFSHVNIKLRAHGQESAIFNEVAPGYFSRDGWQLQVQGGVAQLVIKGARDSHAGLYMWHLVGHQRNNRQVTLEVSEPRGLKDRASAQLLGPGTSRGAEPQSAPDTGFWPVP

SEQ ID NO: 76978 - protein, 149 aa, Homo sapiens
  Payload ID: 15357
  Gene Symbol: SECTM1
  Gene Name: secreted and transmembrane 1
  ENSP ID: ENSP00000463904
MQTCPLAFPGHVSQALGTLLFLAASLSAQNEGWDSPICTEGVVSVSWGENTVMSCNISNAFSHVNIKLRAHGQESAIFNEVAPGYFSRDGWQLQVQGGVAQLVIKGARDSHAGLYMWHLVGHQRNNRQVTLEVSGAAVPSNAGRRSSSS

SEQ ID NO: 76979 - protein, 43 aa, Homo sapiens
  Payload ID: 15357
  Gene Symbol: SECTM1
  Gene Name: secreted and transmembrane 1
  ENSP ID: ENSP00000464111
MQTCPLAFPGHVSQALGTLLFLAASLSAQNEAACPRAGERHLQ

SEQ ID NO: 76980 - protein, 44 aa, Homo sapiens
  Payload ID: 15357
  Gene Symbol: SECTM1
  Gene Name: secreted and transmembrane 1
  ENSP ID: ENSP00000464385
MQTCPLAFPGHVSQALGTLLFLAASLSAQNEGWDSPICTEGVVS

SEQ ID NO: 76981 - protein, 314 aa, Homo sapiens
  Payload ID: 15358
  Gene Symbol: SFRP1
  Gene Name: secreted frizzled-related protein 1
  Uniprot ID: Q8N474
  ENSP ID: ENSP00000220772
MGIGRSEGGRRGAALGVLLALGAALLAVGSASEYDYVSFQSDIGPYQSGRFYTKPPQCVDIPADLRLCHNVGYKKMVLPNLLEHETMAEVKQQASSWVPLLNKNCHAGTQVFLCSLFAPVCLDRPIYPCRWLCEAVRDSCEPVMQFFGFYWPEMLKCDKFPEGDVCIAMTPPNATEASKPQGTTVCPPCDNELKSEAIIEHLCASEFALRMKIKEVKKENGDKKIVPKKKKPLKLGPIKKKDLKKLVLYLKNGADCPCHQLDNLSHHFLIMGRKVKSQYLLTAIHKWDKKNKEFKNFMKKMKNHECPTFQSVFK

SEQ ID NO: 76982 - protein, 178 aa, Homo sapiens
  Payload ID: 15358
  Gene Symbol: SFRP1
  Gene Name: secreted frizzled-related protein 1
  ENSP ID: ENSP00000369174
MGWGNPIIAVFRTPFAPWLQFHWSAPFSAWLGTVLTHLHSSQQRSGTTVCPPCDNELKSEAIIEHLCASEFALRMKIKEVKKENGDKKIVPKKKKPLKLGPIKKKDLKKLVLYLKNGADCPCHQLDNLSHHFLIMGRKVKSQYLLTAIHKWDKKNKEFKNFMKKMKNHECPTFQSVFK

SEQ ID NO: 76983 - protein, 295 aa, Homo sapiens
  Payload ID: 15359
  Gene Symbol: SFRP2
  Gene Name: secreted frizzled-related protein 2
  Uniprot ID: Q96HF1
  ENSP ID: ENSP00000274063
MLQGPGSLLLLFLASHCCLGSARGLFLFGQPDFSYKRSNCKPIPANLQLCHGIEYQNMRLPNLLGHETMKEVLEQAGAWIPLVMKQCHPDTKKFLCSLFAPVCLDDLDETIQPCHSLCVQVKDRCAPVMSAFGFPWPDMLECDRFPQDNDLCIPLASSDHLLPATEEAPKVCEACKNKNDDDNDIMETLCKNDFALKIKVKEITYINRDTKIILETKSKTIYKLNGVSERDLKKSVLWLKDSLQCTCEEMNDINAPYLVMGQKQGGELVITSVKRWQKGQREFKRISRSIRKLQC

SEQ ID NO: 76984 - protein, 137 aa, Homo sapiens
  Payload ID: 15360
  Gene Symbol: SFRP4
  Gene Name: secreted frizzled-related protein 4
  ENSP ID: ENSP00000402262
MQLEQSIIPDIPAKDVKWIDITPDMMVQERPLDVDCKRLSPDRCKCKKVKPTLATYLSKNYSYVIHAKIKAVQRSGCNEVTTVVDVKEIFKSSSPIPRTQVPLITNSSCQCPHILPHQDVLIMCYEWRSRMMLLENC

SEQ ID NO: 76985 - protein, 346 aa, Homo sapiens
  Payload ID: 15360
  Gene Symbol: SFRP4
  Gene Name: secreted frizzled-related protein 4
  Uniprot ID: Q6FHJ7
  ENSP ID: ENSP00000410715
MFLSILVALCLWLHLALGVRGAPCEAVRIPMCRHMPWNITRMPNHLHHSTQENAILAIEQYEELVDVNCSAVLRFFLCAMYAPICTLEFLHDPIKPCKSVCQRARDDCEPLMKMYNHSWPESLACDELPVYDRGVCISPEAIVTDLPEDVKWIDITPDMMVQERPLDVDCKRLSPDRCKCKKVKPTLATYLSKNYSYVIHAKIKAVQRSGCNEVTTVVDVKEIFKSSSPIPRTQVPLITNSSCQCPHILPHQDVLIMCYEWRSRMMLLENCLVEKWRDQLSKRSIQWEERLQEQRRTVQDKKKTAGRTSRSNPPKPKGKPPAPKPASPKKNIKTRSAQKRTNPKRV

SEQ ID NO: 76986 - protein, 317 aa, Homo sapiens
  Payload ID: 15361
  Gene Symbol: SFRP5
  Gene Name: secreted frizzled-related protein 5
  Uniprot ID: Q5T4F7
  ENSP ID: ENSP00000266066
MRAAAAGGGVRTAALALLLGALHWAPARCEEYDYYGWQAEPLHGRSYSKPPQCLDIPADLPLCHTVGYKRMRLPNLLEHESLAEVKQQASSWLPLLAKRCHSDTQVFLCSLFAPVCLDRPIYPCRSLCEAVRAGCAPLMEAYGFPWPEMLHCHKFPLDNDLCIAVQFGHLPATAPPVTKICAQCEMEHSADGLMEQMCSSDFVVKMRIKEIKIENGDRKLIGAQKKKKLLKPGPLKRKDTKRLVLHMKNGAGCPCPQLDSLAGSFLVMGRKVDGQLLLMAVYRWDKKNKEMKFAVKFMFSYPCSLYYPFFYGAAEPH

SEQ ID NO: 76987 - protein, 103 aa, Homo sapiens
  Payload ID: 15362
  Gene Symbol: SLURP1
  Gene Name: secreted LY6/PLAUR domain containing 1
  Uniprot ID: P55000
  ENSP ID: ENSP00000246515
MASRWAVQLLLVAAWSMGCGEALKCYTCKEPMTSASCRTITRCKPEDTACMTTLVTVEAEYPFNQSPVVTRSCSSSCVATDPDSIGAAHLIFCCFRDLCNSEL

SEQ ID NO: 76988 - protein, 300 aa, Homo sapiens
  Payload ID: 15363
  Gene Symbol: SPP1
  Gene Name: secreted phosphoprotein 1
  Uniprot ID: P10451
  ENSP ID: ENSP00000237623
MRIAVICFCLLGITCAIPVKQADSGSSEEKQLYNKYPDAVATWLNPDPSQKQNLLAPQTLPSKSNESHDHMDDMDDEDDDDHVDSQDSIDSNDSDDVDDTDDSHQSDESHHSDESDELVTDFPTDLPATEVFTPVVPTVDTYDGRGDSVVYGLRSKSKKFRRPDIQYPDATDEDITSHMESEELNGAYKAIPVAQDLNAPSDWDSRGKDSYETSQLDDQSAETHSHKQSRLYKRKANDESNEHSDVIDSQELSKVSREFHSHEFHSHEDMLVVDPKSKEEDKHLKFRISHELDSASSEVN

SEQ ID NO: 76989 - protein, 287 aa, Homo sapiens
  Payload ID: 15363
  Gene Symbol: SPP1
  Gene Name: secreted phosphoprotein 1
  Uniprot ID: P10451
  ENSP ID: ENSP00000354042
MRIAVICFCLLGITCAIPVKQADSGSSEEKQNAVSSEETNDFKQETLPSKSNESHDHMDDMDDEDDDDHVDSQDSIDSNDSDDVDDTDDSHQSDESHHSDESDELVTDFPTDLPATEVFTPVVPTVDTYDGRGDSVVYGLRSKSKKFRRPDIQYPDATDEDITSHMESEELNGAYKAIPVAQDLNAPSDWDSRGKDSYETSQLDDQSAETHSHKQSRLYKRKANDESNEHSDVIDSQELSKVSREFHSHEFHSHEDMLVVDPKSKEEDKHLKFRISHELDSASSEVN

SEQ ID NO: 76990 - protein, 314 aa, Homo sapiens
  Payload ID: 15363
  Gene Symbol: SPP1
  Gene Name: secreted phosphoprotein 1
  Uniprot ID: P10451
  ENSP ID: ENSP00000378517
MRIAVICFCLLGITCAIPVKQADSGSSEEKQLYNKYPDAVATWLNPDPSQKQNLLAPQNAVSSEETNDFKQETLPSKSNESHDHMDDMDDEDDDDHVDSQDSIDSNDSDDVDDTDDSHQSDESHHSDESDELVTDFPTDLPATEVFTPVVPTVDTYDGRGDSVVYGLRSKSKKFRRPDIQYPDATDEDITSHMESEELNGAYKAIPVAQDLNAPSDWDSRGKDSYETSQLDDQSAETHSHKQSRLYKRKANDESNEHSDVIDSQELSKVSREFHSHEFHSHEDMLVVDPKSKEEDKHLKFRISHELDSASSEVN

SEQ ID NO: 76991 - protein, 241 aa, Homo sapiens
  Payload ID: 15363
  Gene Symbol: SPP1
  Gene Name: secreted phosphoprotein 1
  ENSP ID: ENSP00000422973
MRIAVICFCLLGITCAIPVKQADSGSSEEKQTLPSKSNESHDHMDDMDDEDDDDHVDSQDSIDSNDSDDVDDTDDSHQSDESHHSDESDELVTDFPTDLPATEVFTPVVPTVDTYDGRGDSVVYGLRSKSKKFRRPDIQYPDATDEDITSHMESEELNGAYKAIPVAQDLNAPSDWDSRGKDSYETSQLDDQSAETHSHKQSRLYKRKANDESNEHSDVIDSQELSKVSREFHSHEFHSHE

SEQ ID NO: 76992 - protein, 292 aa, Homo sapiens
  Payload ID: 15363
  Gene Symbol: SPP1
  Gene Name: secreted phosphoprotein 1
  Uniprot ID: P10451
  ENSP ID: ENSP00000477824
MRIAVICFCLLGITCAIPVKQADSGSSEEKQLYNKYPDAVATWLNPDPSQKQNLLAPQNAVSSEETNDFKQETLPSKSNESHDHMDDMDDEDDDSHQSDESHHSDESDELVTDFPTDLPATEVFTPVVPTVDTYDGRGDSVVYGLRSKSKKFRRPDIQYPDATDEDITSHMESEELNGAYKAIPVAQDLNAPSDWDSRGKDSYETSQLDDQSAETHSHKQSRLYKRKANDESNEHSDVIDSQELSKVSREFHSHEFHSHEDMLVVDPKSKEEDKHLKFRISHELDSASSEVN

SEQ ID NO: 76993 - protein, 211 aa, Homo sapiens
  Payload ID: 15364
  Gene Symbol: SPP2
  Gene Name: secreted phosphoprotein 2, 24kDa
  Uniprot ID: Q13103
  ENSP ID: ENSP00000168148
MISRMEKMTMMMKILIMFALGMNYWSCSGFPVYDYDPSSLRDALSASVVKVNSQSLSPYLFRAFRSSLKRVEVLDENNLVMNLEFSIRETTCRKDSGEDPATCAFQRDYYVSTAVCRSTVKVSAQQVQGVHARCSWSSSTSESYSSEEMIFGDMLGSHKWRNNYLFGLISDESISEQFYDRSLGIMRRVLPPGNRRYPNHRHRARINTDFE

SEQ ID NO: 76994 - protein, 211 aa, Homo sapiens; identical to SEQ ID NO: 76993
  Payload ID: 15364
  Gene Symbol: SPP2
  Gene Name: secreted phosphoprotein 2, 24kDa
  Uniprot ID: Q13103
  ENSP ID: ENSP00000362466

SEQ ID NO: 76995 - protein, 131 aa, Homo sapiens
  Payload ID: 15364
  Gene Symbol: SPP2
  Gene Name: secreted phosphoprotein 2, 24kDa
  ENSP ID: ENSP00000417036
MNLEFSIRETTCRKDSGEDPATCAFQRDYYVSTAVCRSTVKVSAQQVQGVHARCSWSSSTSESYSSEEMIFGDMLGSHKWRNNYLFGLISDESISEQFYDRSLGIMRRVLPPGNRRYPNHRHRARINTDFE

SEQ ID NO: 76996 - protein, 303 aa, Homo sapiens
  Payload ID: 15365
  Gene Symbol: SPARC
  Gene Name: secreted protein, acidic, cysteine-rich (osteonectin)
  Uniprot ID: P09486
  ENSP ID: ENSP00000231061
MRAWIFFLLCLAGRALAAPQQEALPDETEVVEETVAEVTEVSVGANPVQVEVGEFDDGAEETEEEVVAENPCQNHHCKHGKVCELDENNTPMCVCQDPTSCPAPIGEFEKVCSNDNKTFDSSCHFFATKCTLEGTKKGHKLHLDYIGPCKYIPPCLDSELTEFPLRMRDWLKNVLVTLYERDEDNNLLTEKQKLRVKKIHENEKRLEAGDHPVELLARDFEKNYNMYIFPVHWQFGQLDQHPIDGYLSHTELAPLRAPLIPMEHCTTRFFETCDLDNDKYIALDEWAGCFGIKQKDIDKDLVI

SEQ ID NO: 76997 - protein, 115 aa, Homo sapiens
  Payload ID: 15365
  Gene Symbol: SPARC
  Gene Name: secreted protein, acidic, cysteine-rich (osteonectin)
  ENSP ID: ENSP00000428119
MCVCQDPTSCPAPIGEFEKVCSNDNKTFDSSCHFFATKCTLEGTKKGHKLHLDYIGPCKYIPPCLDSELTEFPLRMRDWLKNVLVTLYERDEDNNLLTEKQKLRVKKIHENEKRL

SEQ ID NO: 76998 - protein, 53 aa, Homo sapiens
  Payload ID: 15365
  Gene Symbol: SPARC
  Gene Name: secreted protein, acidic, cysteine-rich (osteonectin)
  ENSP ID: ENSP00000429152
MRAWIFFLLCLAGRALAAPQQEALPDETEVVEETVAEVTEVSVGANPVQVEVG

SEQ ID NO: 76999 - protein, 149 aa, Homo sapiens
  Payload ID: 15365
  Gene Symbol: SPARC
  Gene Name: secreted protein, acidic, cysteine-rich (osteonectin)
  ENSP ID: ENSP00000440127
MCVCQDPTSCPAPIGEFEKVCSNDNKTFDSSCHFFATKCTLEGTKKGHKLHLDYIGPCKYIPPCLDSELTEFPLRMRDWLKNVLVTLYERDEDNNLLTEKQKLRVKKIHENEKRLEAGDHPVELLARDFEKNYNMYIFPVHWQFGQLDQ

SEQ ID NO: 77000 - protein, 111 aa, Homo sapiens
  Payload ID: 15365
  Gene Symbol: SPARC
  Gene Name: secreted protein, acidic, cysteine-rich (osteonectin)
  ENSP ID: ENSP00000444998
MRAWIFFLLCLAGRALAAPQQEALPDETEVVEETVAEVTEVSVGANPVQVEVGEFDDGAEETEEEVVAENPCQNHHCKHGKVCELDENNTPMCVCQDPTSCPAPIGEFEKV

SEQ ID NO: 77001 - protein, 121 aa, Homo sapiens
  Payload ID: 15366
  Gene Symbol: SCT
  Gene Name: secretin
  Uniprot ID: P09683
  ENSP ID: ENSP00000176195
MAPRPLLLLLLLLGGSAARPAPPRARRHSDGTFTSELSRLREGARLQRLLQGLVGKRSEQDAENSMAWTRLSAGLLCPSGSNMPILQAWMPLDGTWSPWLPPGPMVSEPAGAAAEGTLRPR

SEQ ID NO: 77002 - protein, 121 aa, Homo sapiens; identical to SEQ ID NO: 77001
  Payload ID: 15366
  Gene Symbol: SCT
  Gene Name: secretin
  Uniprot ID: P09683
  ENSP ID: ENSP00000483559

SEQ ID NO: 77003 - protein, 440 aa, Homo sapiens
  Payload ID: 15367
  Gene Symbol: SCTR
  Gene Name: secretin receptor
  Uniprot ID: P47872
  ENSP ID: ENSP00000019103
MRPHLSPPLQQLLLPVLLACAAHSTGALPRLCDVLQVLWEEQDQCLQELSREQTGDLGTEQPVPGCEGMWDNISCWPSSVPGRMVEVECPRFLRMLTSRNGSLFRNCTQDGWSETFPRPNLACGVNVNDSSNEKRHSYLLKLKVMYTVGYSSSLVMLLVALGILCAFRRLHCTRNYIHMHLFVSFILRALSNFIKDAVLFSSDDVTYCDAHRAGCKLVMVLFQYCIMANYSWLLVEGLYLHTLLAISFFSERKYLQGFVAFGWGSPAIFVALWAIARHFLEDVGCWDINANASIWWIIRGPVILSILINFILFINILRILMRKLRTQETRGNEVSHYKRLARSTLLLIPLFGIHYIVFAFSPEDAMEIQLFFELALGSFQGLVVAVLYCFLNGEVQLEVQKKWQQWHLREFPLHPVASFSNSTKASHLEQSQGTCRTSII

SEQ ID NO: 77004 - protein, 150 aa, Homo sapiens
  Payload ID: 15367
  Gene Symbol: SCTR
  Gene Name: secretin receptor
  ENSP ID: ENSP00000486930
MWDNISCWPSSVPGRMVEVECPRFLRMLTSRNGSLFRNCTQDGWSETFPRPNLACGVNVNDSSNEKRHSYLLKLKVMYTVGYSSSLVMLLVALGILCAFRRLHCTRNYIHMHLFVSFILRALSNFIKDAVLFSSDDVTYCDAHRAGCKLV

SEQ ID NO: 77005 - protein, 243 aa, Homo sapiens
  Payload ID: 15367
  Gene Symbol: SCTR
  Gene Name: secretin receptor
  ENSP ID: ENSP00000486987
MPVIPALWEAEVRGSLEPKSSRPAWATWVFSPCSIMLEFPETMGFSKNQTGALPRLCDVLQVLWEEQDQCLQELSREQTGDLGTEQPVPGCEGMWDNISCWPSSVPGRMVEVECPRFLRMLTSRNGSLFRNCTQDGWSETFPRPNLACGVNVNDSSNEKRHSYLLKLKVMYTVGYSSSLVMLLVALGILCAFRRLHCTRNYIHMHLFVSFILRALSNFIKDAVLFSSDDVTYCDAHRAGCKLV

SEQ ID NO: 77006 - protein, 121 aa, Homo sapiens
  Payload ID: 15368
  Gene Symbol: SAR1A
  Gene Name: secretion associated, Ras related GTPase 1A
  ENSP ID: ENSP00000362333
MSFIFEWIYNGFSSVLQFLGLYKKSGKLVFLGLDNAGKTTLLHMLKDDRLGQHVPTLHPTSEELTIAGMTFTTFDLGGHEQARRVWKNYLPAINGIVFLVDCADHSRLVESKVELNVCFVL

SEQ ID NO: 77007 - protein, 198 aa, Homo sapiens
  Payload ID: 15368
  Gene Symbol: SAR1A
  Gene Name: secretion associated, Ras related GTPase 1A
  Uniprot ID: Q9NR31
  ENSP ID: ENSP00000362335
MSFIFEWIYNGFSSVLQFLGLYKKSGKLVFLGLDNAGKTTLLHMLKDDRLGQHVPTLHPTSEELTIAGMTFTTFDLGGHEQARRVWKNYLPAINGIVFLVDCADHSRLVESKVELNALMTDETISNVPILILGNKIDRTDAISEEKLREIFGLYGQTTGKGNVTLKELNARPMEVFMCSVLKRQGYGEGFRWLSQYID

SEQ ID NO: 77008 - protein, 50 aa, Homo sapiens
  Payload ID: 15368
  Gene Symbol: SAR1A
  Gene Name: secretion associated, Ras related GTPase 1A
  ENSP ID: ENSP00000362336
MSFIFEWIYNGFSSVLQFLGLYKKSGKLVFLGLDNAGKTTLLHMLKDDRL

SEQ ID NO: 77009 - protein, 198 aa, Homo sapiens; identical to SEQ ID NO: 77007
  Payload ID: 15368
  Gene Symbol: SAR1A
  Gene Name: secretion associated, Ras related GTPase 1A
  Uniprot ID: Q9NR31
  ENSP ID: ENSP00000362338

SEQ ID NO: 77010 - protein, 198 aa, Homo sapiens; identical to SEQ ID NO: 77007
  Payload ID: 15368
  Gene Symbol: SAR1A
  Gene Name: secretion associated, Ras related GTPase 1A
  Uniprot ID: Q9NR31
  ENSP ID: ENSP00000362339

SEQ ID NO: 77011 - protein, 115 aa, Homo sapiens
  Payload ID: 15368
  Gene Symbol: SAR1A
  Gene Name: secretion associated, Ras related GTPase 1A
  ENSP ID: ENSP00000398165
  MOD_RES (1)..(1): Any amino acid
XSFWWTVQIILASWNPKLSLMIYCSSLLTLAPNALMTDETISNVPILILGNKIDRTDAISEEKLREIFGLYGQTTGKGNVTLKELNARPMEVFMCSVLKRQGYGEGFRWLSQYID

SEQ ID NO: 77012 - protein, 198 aa, Homo sapiens; identical to SEQ ID NO: 77007
  Payload ID: 15368
  Gene Symbol: SAR1A
  Gene Name: secretion associated, Ras related GTPase 1A
  Uniprot ID: Q9NR31
  ENSP ID: ENSP00000399698

SEQ ID NO: 77013 - protein, 198 aa, Homo sapiens
  Payload ID: 15369
  Gene Symbol: SAR1B
  Gene Name: secretion associated, Ras related GTPase 1B
  Uniprot ID: Q9Y6B6
  ENSP ID: ENSP00000385432
MSFIFDWIYSGFSSVLQFLGLYKKTGKLVFLGLDNAGKTTLLHMLKDDRLGQHVPTLHPTSEELTIAGMTFTTFDLGGHVQARRVWKNYLPAINGIVFLVDCADHERLLESKEELDSLMTDETIANVPILILGNKIDRPEAISEERLREMFGLYGQTTGKGSISLKELNARPLEVFMCSVLKRQGYGEGFRWMAQYID

SEQ ID NO: 77014 - protein, 198 aa, Homo sapiens; identical to SEQ ID NO: 77013
  Payload ID: 15369
  Gene Symbol: SAR1B
  Gene Name: secretion associated, Ras related GTPase 1B
  Uniprot ID: Q9Y6B6
  ENSP ID: ENSP00000404997

SEQ ID NO: 77015 - protein, 103 aa, Homo sapiens
  Payload ID: 15369
  Gene Symbol: SAR1B
  Gene Name: secretion associated, Ras related GTPase 1B
  ENSP ID: ENSP00000423005
MSFIFDWIYSGFSSVLQFLGLYKKTGKLVFLGLDNAGKTTLLHMLKDDRLGQHVPTLHPTSEELTIAGMTFTTFDLGGHVQARRVWKNYLPAINGIVFLVDCA

SEQ ID NO: 77016 - protein, 118 aa, Homo sapiens
  Payload ID: 15369
  Gene Symbol: SAR1B
  Gene Name: secretion associated, Ras related GTPase 1B
  ENSP ID: ENSP00000423197
MTFTTFDLGGHVQARRVWKNYLPAINGIVFLVDCADHERLLESKEELDSLMTDETIANVPILILGNKIDRPEAISEERLREMFGLYGQTTGKGSISLKELNARPLEVFMCSVLKRQGY

SEQ ID NO: 77017 - protein, 130 aa, Homo sapiens
  Payload ID: 15369
  Gene Symbol: SAR1B
  Gene Name: secretion associated, Ras related GTPase 1B
  ENSP ID: ENSP00000424673
MTFTTFDLGGHVQARRVWKNYLPAINGIVFLVDCADHERLLESKEELDSLMTDETIANVPILILGNKIDRPEAISEERLREMFGLYGQTTGKGSISLKELNARPLEVFMCSVLKRQGYGEGFRWMAQYID

SEQ ID NO: 77018 - protein, 130 aa, Homo sapiens; identical to SEQ ID NO: 77017
  Payload ID: 15369
  Gene Symbol: SAR1B
  Gene Name: secretion associated, Ras related GTPase 1B
  ENSP ID: ENSP00000425339

SEQ ID NO: 77019 - protein, 144 aa, Homo sapiens
  Payload ID: 15369
  Gene Symbol: SAR1B
  Gene Name: secretion associated, Ras related GTPase 1B
  ENSP ID: ENSP00000425367
MSFIFDWIYSGFSSVLQFLGLYKKTGKLVFLGLDNAGKTTLLHMLKDDRLGQHVPTLHPTSEELTIAGMTFTTFDLGGHVQARRVWKNYLPAINGIVFLVDCADHERLLESKEELDVRYFVKGPNSSRQGQHQIWGHRVSRSMI

SEQ ID NO: 77020 - protein, 170 aa, Homo sapiens
  Payload ID: 15369
  Gene Symbol: SAR1B
  Gene Name: secretion associated, Ras related GTPase 1B
  ENSP ID: ENSP00000425466
MSFIFDWIYSGFSSVLQFLGLYKKTGKLVFLGLDNAGKTTLLHMLKDDRLGQHVPTLHPTSEELTIAGMTFTTFDLGGHVQARRVWKNYLPAINGIVFLVDCADHERLLESKEELDSLMTDETIANVPILILGNKIDRPEAISEERLREMFGLYGQTTGKGSISLKELNA

SEQ ID NO: 77021 - protein, 130 aa, Homo sapiens; identical to SEQ ID NO: 77017
  Payload ID: 15369
  Gene Symbol: SAR1B
  Gene Name: secretion associated, Ras related GTPase 1B
  ENSP ID: ENSP00000426335

SEQ ID NO: 77022 - protein, 458 aa, Homo sapiens [sequence omitted]

SEQ ID NO: 77023 - protein, 174 aa, Homo sapiens
  Payload ID: 15370
  Gene Symbol: SERGEF
  Gene Name: secretion regulating guanine nucleotide exchange factor
  ENSP ID: ENSP00000431314
MLTENGQVLSCGSNSFGQLGVPHGPRRCVVPQAIELHKEKVVCIAAGLRHAVAATASGIVFQWGTGLASCGRRLCPGQTLPLFFTAKEPSRVTGLENSKAMCVLAGSDHSASLTDAGEVYVWGSNKHGQLANEAAFLPVPQKIEAHCFQNEKVTAIWSGWTHLVAQTGLLWLRA

SEQ ID NO: 77024 - protein, 58 aa, Homo sapiens
  Payload ID: 15370
  Gene Symbol: SERGEF
  Gene Name: secretion regulating guanine nucleotide exchange factor
  ENSP ID: ENSP00000431490
MLTENGQVLSCGSNSFGQLGVPHGPRRCVVPQAIELHKEKVVCIAAGLRHAVAATGQH

SEQ ID NO: 77025 - protein, 126 aa, Homo sapiens
  Payload ID: 15370
  Gene Symbol: SERGEF
  Gene Name: secretion regulating guanine nucleotide exchange factor
  ENSP ID: ENSP00000432763
GRRLCPGQTLPLFFTAKEPSRVTGLENSKAMCVLAGSDHSASLTDAGEVYVWGSNKHGQLANEAAFLPVPQKIEAHCFQNEKVTAIWSGWTHLVAQTDTELHSGRCGDEFLELWSQEALQVDSASR

SEQ ID NO: 77026 - protein, 44 aa, Homo sapiens
  Payload ID: 15370
  Gene Symbol: SERGEF
  Gene Name: secretion regulating guanine nucleotide exchange factor
  ENSP ID: ENSP00000433383
PEGRRDVGAAGRGVGSSGAGRLRVQIAMGNLASAIRKMCCCPSN

SEQ ID NO: 77027 - protein, 71 aa, Homo sapiens
  Payload ID: 15370
  Gene Symbol: SERGEF
  Gene Name: secretion regulating guanine nucleotide exchange factor
  ENSP ID: ENSP00000433870
MLTENGQVLSCGSNSFGQLGVPHGPRRCVVPQAIEKYSFQKKEGQSSALSAVQPASGMLCFVVDLVLRPWA

SEQ ID NO: 77028 - protein, 40 aa, Homo sapiens
  Payload ID: 15370
  Gene Symbol: SERGEF
  Gene Name: secretion regulating guanine nucleotide exchange factor
  ENSP ID: ENSP00000433884
MEREPSASEAAPAAAALFAWVSSKTNIFKRFYFSSPGRTS

SEQ ID NO: 77029 - protein, 288 aa, Homo sapiens
  Payload ID: 15370
  Gene Symbol: SERGEF
  Gene Name: secretion regulating guanine nucleotide exchange factor
  Uniprot ID: Q9UGK8
  ENSP ID: ENSP00000434188
MEREPSASEAAPAAAALFAWGANSYGQLGLGHKEDVLLPQQLNDFCKPRSVRRITGGGGHSAVVTDGGDLFVCGLNKDGQLGLGHTEDIPYFTPCKSLFGCPIQQVACGWDFTIMLTENGQVLSCGSNSFGQLGVPHGPRRCVVPQAIELHKEKVVCIAAGLRHAVAATASGIVFQWGTGLASCGRRLCPGQTLPLFFTAKEPSRVTGLENSKAMCVLAGSDHSASLTDAGEVYVWGSNKHGQLANEAAFLPVPQKIEAHCFQNEKVTAIWSGWTHLVAQTGLLWLRA

SEQ ID NO: 77030 - protein, 354 aa, Homo sapiens
  Payload ID: 15370
  Gene Symbol: SERGEF
  Gene Name: secretion regulating guanine nucleotide exchange factor
  ENSP ID: ENSP00000434330
MEREPSASEAAPAAAALFAWGANSYGQLGLGHKEDVLLPQQLNDFCKPRSVRRITGGGGHSAVVTDGGDLFVCGLNKDGQLGLGHTEDIPYFTPCKSLFGCPIQQVACGWDFTIMLTENGQVLSCGSNSFGQLGVPHGPRRCVVPQAIELHKEKVVCIAAGLRHAVAATASGIVFQWGTGLASCGRRLCPGQTLPLFFTAKEPSRVTGLENSKAMCVLAGSDHSASLTDAGEVYVWGSNKHGQLANEAAFLPVPQKIEAHCFQNEKVTAIWSGWTHLVAQTETGKMFTWGRADYGQLGRKLETYEGWKLEKQDSFLPCSRPPNSMPSSPHCLTGATETSFRWHLLGKSSLMSRS

SEQ ID NO: 77031 - protein, 144 aa, Homo sapiens
  Payload ID: 15370
  Gene Symbol: SERGEF
  Gene Name: secretion regulating guanine nucleotide exchange factor
  ENSP ID: ENSP00000435003
  MOD_RES (1)..(1): Any amino acid
XDAGEVYVWGSNKHGQLANEAAFLPVPQKIEAHCFQNEKVTAIWSGWTHLVAQTETGKMFTWGRADYGQLGRKLETYEGWKLEKQDSFLPCSRPPNSMPSSPHCLTGATEVSCGSEHNLAIIVSLQGKYYYPSFADVEMELQRN

SEQ ID NO: 77032 - protein, 137 aa, Homo sapiens
  Payload ID: 15370
  Gene Symbol: SERGEF
  Gene Name: secretion regulating guanine nucleotide exchange factor
  ENSP ID: ENSP00000435898
MLTENGQVLSCGSNSFGQLGVPHGPRRCVVPQAIELHKEKVVCIAAGLRHAVAATASGIVFQWGTGLASCGRRLCPGQTLPLFFTAKEPSRVTGLENSKAMCVLAGSDHSASLTDAGEVYVWGSNKHGQLANEAAFL

SEQ ID NO: 77033 - protein, 164 aa, Homo sapiens
  Payload ID: 15370
  Gene Symbol: SERGEF
  Gene Name: secretion regulating guanine nucleotide exchange factor
  ENSP ID: ENSP00000436080
MLTENGQVLSCGSNSFGQLGVPHGPRRCVVPQAIELHKEKVVCIAAGLRHAVAATASGIVFQWGTGLASCGRRLCPGQTLPLFFTAKEPSRVTGLENSKAMCVLAGSDHSASLTDAGEVYVWGSNKHGQLANEAAFLPVPQKIEAHCFQNEKVTAIWSGWTHLV

SEQ ID NO: 77034 - protein, 299 aa, Homo sapiens
  Payload ID: 15370
  Gene Symbol: SERGEF
  Gene Name: secretion regulating guanine nucleotide exchange factor
  ENSP ID: ENSP00000436111
  MOD_RES (1)..(1): Any amino acid
XEVPPSPESCCHMLHKEKVVCIAAGLRHAVAATASGIVFQWGTGLASCGRRLCPGQTLPLFFTAKEPSRVTGLENSKAMCVLAGSDHSASLTDAGEVYVWGSNKHGQLANEAAFLPVPQKIEAHCFQNEKVTAIWSGWTHLVAQTETGKMFTWGRADYGQLGRKLETYEGWKLEKQDSFLPCSRPPNSMPSSPHCLTGATEVSCGSEHNLAIIGGVCYSWGWNEHGMCGDGTEANVWAPKPVQALLSSSGLLVGCGAGHSLALCQLPAHPALVQDPKVTYLSPDAIEDTESQKAMDKER

SEQ ID NO: 77035 - protein, 105 aa, Homo sapiens
  Payload ID: 15370
  Gene Symbol: SERGEF
  Gene Name: secretion regulating guanine nucleotide exchange factor
  ENSP ID: ENSP00000436648
GQLGVPHGPRRCVVPQAIELHKEKVVCIAAGLRHAVAATASGIVFQWGTGLASCGRRLCPGQTLPLFFTAKEPSRVTGLENSKAMCVLAGSDHSASLTGLLWLRA

SEQ ID NO: 77036 - protein, 228 aa, Homo sapiens
  Payload ID: 15370
  Gene Symbol: SERGEF
  Gene Name: secretion regulating guanine nucleotide exchange factor
  ENSP ID: ENSP00000437297
MLTENGQVLSCGSNSFGQLGVPHGPRRCVVPQAIELHKEKVVCIAAGLRHAVAATASGIVFQWGTGLASCGRRLCPGQTLPLFFTAKEPSRVTGLENSKAMCVLAGSDHSASLTDAGEVYVWGSNKHGQLANEAAFLPVPQKIEAHCFQNEKVTAIWSGWTHLVAQTETGKMFTWGRADYGQLGRKLETYEGWKLEKQDSFLPCSRPPNSMPSSPHCLTGATEVGSDF

SEQ ID NO: 77037 - protein, 91 aa, Homo sapiens
  Payload ID: 15371
  Gene Symbol: SCGB1A1
  Gene Name: secretoglobin, family 1A, member 1 (uteroglobin)
  Uniprot ID: P11684
  ENSP ID: ENSP00000278282
MKLAVTLTLVTLALCCSSASAEICPSFQRVIETLLMDTPSSYEAAMELFSPDQDMREAGAQLKKLVDTLPQKPRESIIKLMEKIAQSSLCN

SEQ ID NO: 77038 - protein, 56 aa, Homo sapiens
  Payload ID: 15371
  Gene Symbol: SCGB1A1
  Gene Name: secretoglobin, family 1A, member 1 (uteroglobin)
  ENSP ID: ENSP00000432866
MDTPSSYEAAMELFSPDQDMREAGAQLKKLVDTLPQKPRESIIKLMEKIAQSSLCN

SEQ ID NO: 77039 - protein, 95 aa, Homo sapiens
  Payload ID: 15372
  Gene Symbol: SCGB1C1
  Gene Name: secretoglobin, family 1C, member 1
  Uniprot ID: Q8TD33
  ENSP ID: ENSP00000344545
MKGSRALLLVALTLFCICRMATGEDNDEFFMDFLQTLLVGTPEELYEGTLGKYNVNEDAKAAMTELKSCIDGLQPMHKAELVKLLVQVLGSQDGA

SEQ ID NO: 77040 - protein, 95 aa, Homo sapiens
  Payload ID: 15373
  Gene Symbol: SCGB1C2
  Gene Name: secretoglobin, family 1C, member 2
  Uniprot ID: P0DMR2
  ENSP ID: ENSP00000471646
MKGSRALLLVALTLFCICRMATGEDNDEFFMDFLQTLLVGTPEELYEGTLGKYNVNEDAKAAMTELKSCRDGLQPMHKAELVKLLVQVLGSQDGA

SEQ ID NO: 77041 - protein, 95 aa, Homo sapiens; identical to SEQ ID NO: 77040
  Payload ID: 15373
  Gene Symbol: SCGB1C2
  Gene Name: secretoglobin, family 1C, member 2
  Uniprot ID: P0DMR2
  ENSP ID: ENSP00000479313

SEQ ID NO: 77042 - protein, 90 aa, Homo sapiens
  Payload ID: 15374
  Gene Symbol: SCGB1D1
  Gene Name: secretoglobin, family 1D, member 1
  Uniprot ID: O95968
  ENSP ID: ENSP00000303070
MRLSVCLLLLTLALCCYRANAVVCQALGSEITGFLLAGKPVFKFQLAKFKAPLEAVAAKMEVKKCVDTMAYEKRVLITKTLGKIAEKCDR

SEQ ID NO: 77043 - protein, 90 aa, Homo sapiens
  Payload ID: 15375
  Gene Symbol: SCGB1D2
  Gene Name: secretoglobin, family 1D, member 2
  Uniprot ID: O95969
  ENSP ID: ENSP00000244926
MKLSVCLLLVTLALCCYQANAEFCPALVSELLDFFFISEPLFKLSLAKFDAPPEAVAAKLGVKRCTDQMSLQKRSLIAEVLVKILKKCSV

SEQ ID NO: 77044 - protein, 83 aa, Homo sapiens
  Payload ID: 15376
  Gene Symbol: SCGB1D4
  Gene Name: secretoglobin, family 1D, member 4
  Uniprot ID: Q6XE38
  ENSP ID: ENSP00000351395
MRLSVCLLMVSLALCCYQAHALVCPAVASEITVFLFLSDAAVNLQVAKLNPPPEALAAKLEVKHCTDQISFKKRLSLKKSWWK

SEQ ID NO: 77045 - protein, 95 aa, Homo sapiens
  Payload ID: 15377
  Gene Symbol: SCGB2A1
  Gene Name: secretoglobin, family 2A, member 1
  Uniprot ID: O75556
  ENSP ID: ENSP00000244930
MKLLMVLMLAALLLHCYADSGCKLLEDMVEKTINSDISIPEYKELLQEFIDSDAAAEAMGKFKQCFLNQSHRTLKNFGLMMHTVYDSIWCNMKSN

SEQ ID NO: 77046 - protein, 93 aa, Homo sapiens
  Payload ID: 15378
  Gene Symbol: SCGB2A2
  Gene Name: secretoglobin, family 2A, member 2
  Uniprot ID: Q13296
  ENSP ID: ENSP00000227918
MKLLMVLMLAALSQHCYAGSGCPLLENVISKTINPQVSKTEYKELLQEFIDDNATTNAIDELKECFLNQTDETLSNVEVFMQLIYDSSLCDLF

SEQ ID NO: 77047 - protein, 120 aa, Homo sapiens
  Payload ID: 15378
  Gene Symbol: SCGB2A2
  Gene Name: secretoglobin, family 2A, member 2
  ENSP ID: ENSP00000431997
MKLLMVLMLAALSQHCYAGSGCPLLENVISKTINPQVSKTEYKELLQEFIDDNATTNAIDELKECFLNQTDETLSNVEVFMVISFSSYKLFKSPDQGQVGSSFLTDNAKATSEQAFSYIG

SEQ ID NO: 77048 - protein, 96 aa, Homo sapiens
  Payload ID: 15379
  Gene Symbol: SCGB2B2
  Gene Name: secretoglobin, family 2B, member 2
  Uniprot ID: Q4G0G5
  ENSP ID: ENSP00000368502
MRVTSATCALLLALICSVQLGDACLDIDKLLANVVFDVSQDLLKEELARYNPSPLTEESFLNVQQCFANVSVTERFAHSVVIKKILQSNDCIEAAF

SEQ ID NO: 77049 - protein, 96 aa, Homo sapiens; identical to SEQ ID NO: 77048
  Payload ID: 15379
  Gene Symbol: SCGB2B2
  Gene Name: secretoglobin, family 2B, member 2
  Uniprot ID: Q4G0G5
  ENSP ID: ENSP00000469876

SEQ ID NO: 77050 - protein, 104 aa, Homo sapiens
  Payload ID: 15380
  Gene Symbol: SCGB3A1
  Gene Name: secretoglobin, family 3A, member 1
  Uniprot ID: Q96QR1
  ENSP ID: ENSP00000292641
MKLAALLGLCVALSCSSAAAFLVGSAKPVAQPVAALESAAEAGAGTLANPLGTLNPLKLLLSSLGIPVNHLIEGSQKCVAELGPQAVGAVKALKALLGALTVFG

SEQ ID NO: 77051 - protein, 93 aa, Homo sapiens
  Payload ID: 15381
  Gene Symbol: SCGB3A2
  Gene Name: secretoglobin, family 3A, member 2
  Uniprot ID: Q96PL1
  ENSP ID: ENSP00000296694
MKLVTIFLLVTISLCSYSATAFLINKVPLPVDKLAPLPLDNILPFMDPLKLLLKTLGISVEHLVEGLRKCVNELGPEASEAVKKLLEALSHLV

SEQ ID NO: 77052 - protein, 48 aa, Homo sapiens
  Payload ID: 15381
  Gene Symbol: SCGB3A2
  Gene Name: secretoglobin, family 3A, member 2
  ENSP ID: ENSP00000423930
MDPLKLLLKTLGISVEHLVEGLRKCVNELGPEASEAVKKLLEALSHLV

SEQ ID NO: 77053 - protein, 617 aa, Homo sapiens
  Payload ID: 15382
  Gene Symbol: SCG2
  Gene Name: secretogranin II
  Uniprot ID: P13521
  ENSP ID: ENSP00000304133
MAEAKTHWLGAALSLIPLIFLISGAEAASFQRNQLLQKEPDLRLENVQKFPSPEMIRALEYIENLRQQAHKEESSPDYNPYQGVSVPLQQKENGDESHLPERDSLSEEDWMRIILEALRQAENEPQSAPKENKPYALNSEKNFPMDMSDDYETQQWPERKLKHMQFPPMYEENSRDNPFKRTNEIVEEQYTPQSLATLESVFQELGKLTGPNNQKRERMDEEQKLYTDDEDDIYKANNIAYEDVVGGEDWNPVEEKIESQTQEEVRDSKENIEKNEQINDEMKRSGQLGIQEEDLRKESKDQLSDDVSKVIAYLKRLVNAAGSGRLQNGQNGERATRLFEKPLDSQSIYQLIEISRNLQIPPEDLIEMLKTGEKPNGSVEPERELDLPVDLDDISEADLDHPDLFQNRMLSKSGYPKTPGRAGTEALPDGLSVEDILNLLGMESAANQKTSYFPNPYNQEKVLPRLPYGAGRSRSNQLPKAAWIPHVENRQMAYENLNDKDQELGEYLARMLVKYPEIINSNQVKRVPGQGSSEDDLQEEEQIEQAIKEHLNQGSSQETDKLAPVSKRFPVGPPKNDDTPNRQYWDEDLLMKVLEYLNQEKAEKGREHIAKRAMENM

SEQ ID NO: 77054 - protein, 144 aa, Homo sapiens
  Payload ID: 15382
  Gene Symbol: SCG2
  Gene Name: secretogranin II
  ENSP ID: ENSP00000394702
MAEAKTHWLGAALSLIPLIFLISGAEAASFQRNQLLQKEPDLRLENVQKFPSPEMIRALEYIENLRQQAHKEESSPDYNPYQGVSVPLQQKENGDESHLPERDSLSEEDWMRIILEALRQAENEPQSAPKENKPYALNSEKNFP

SEQ ID NO: 77055 - protein, 125 aa, Homo sapiens
  Payload ID: 15382
  Gene Symbol: SCG2
  Gene Name: secretogranin II
  ENSP ID: ENSP00000415468
MAEAKTHWLGAALSLIPLIFLISGAEAASFQRNQLLQKEPDLRLENVQKFPSPEMIRALEYIENLRQQAHKEESSPDYNPYQGVSVPLQQKENGDESHLPERDSLSEEDWMRIILEALRQAENEP

SEQ ID NO: 77056 - protein, 468 aa, Homo sapiens
  Payload ID: 15383
  Gene Symbol: SCG3
  Gene Name: secretogranin III
  Uniprot ID: Q8WXD2
  ENSP ID: ENSP00000220478
MGFLGTGTWILVLVLPIQAFPKPGGSQDKSLHNRELSAERPLNEQIAEAEEDKIKKTYPPENKPGQSNYSFVDNLNLLKAITEKEKIEKERQSIRSSPLDNKLNVEDVDSTKNRKLIDDYDSTKSGLDHKFQDDPDGLHQLDGTPLTAEDIVHKIAARIYEENDRAVFDKIVSKLLNLGLITESQAHTLEDEVAEVLQKLISKEANNYEEDPNKPTSWTENQAGKIPEKVTPMAAIQDGLAKGENDETVSNTLTLTNGLERRTKTYSEDNFEELQYFPNFYALLKSIDSEKEAKEKETLITIMKTLIDFVKMMVKYGTISPEEGVSYLENLDEMIALQTKNKLEKNATDNISKLFPAPSEKSHEETDSTKEEAAKMEKEYGSLKDSTKDDNSNPGGKTDEPKGKTEAYLEAIRKNIEWLKKHDKKGNKEDYDLSKMRDFINKQADAYVEKGILDKEEAEAIKRIYSSL

SEQ ID NO: 77057 - protein, 236 aa, Homo sapiens
  Payload ID: 15383
  Gene Symbol: SCG3
  Gene Name: secretogranin III
  Uniprot ID: Q8WXD2
  ENSP ID: ENSP00000445205
MAAIQDGLAKGENDETVSNTLTLTNGLERRTKTYSEDNFEELQYFPNFYALLKSIDSEKEAKEKETLITIMKTLIDFVKMMVKYGTISPEEGVSYLENLDEMIALQTKNKLEKNATDNISKLFPAPSEKSHEETDSTKEEAAKMEKEYGSLKDSTKDDNSNPGGKTDEPKGKTEAYLEAIRKNIEWLKKHDKKGNKEDYDLSKMRDFINKQADAYVEKGILDKEEAEAIKRIYSSL

SEQ ID NO: 77058 - protein, 57 aa, Homo sapiens
  Payload ID: 15383
  Gene Symbol: SCG3
  Gene Name: secretogranin III
  ENSP ID: ENSP00000452745
MAAIQDGLAKGENDETVSNTLTLTNGLERRTKTYSEDNFEELQYFPNFYALLKSIDS

SEQ ID NO: 77059 - protein, 212 aa, Homo sapiens
  Payload ID: 15384
  Gene Symbol: SCG5
  Gene Name: secretogranin V
  Uniprot ID: P05408
  ENSP ID: ENSP00000300175
MVSRMVSTMLSGLLFWLASGWTPAFAYSPRTPDRVSEADIQRLLHGVMEQLGIARPRVEYPAHQAMNLVGPQSIEGGAHEGLQHLGPFGNIPNIVAELTGDNIPKDFSEDQGYPDPPNPCPVGKTADDGCLENTPDTAEFSREFQLHQHLFDPEHDYPGLGKWNKKLLYEKMKGGERRKRRSVNPYLQGQRLDNVVAKKSVPHFSDEDKDPE

SEQ ID NO: 77060 - protein, 211 aa, Homo sapiens
  Payload ID: 15384
  Gene Symbol: SCG5
  Gene Name: secretogranin V
  Uniprot ID: P05408
  ENSP ID: ENSP00000388560
MVSRMVSTMLSGLLFWLASGWTPAFAYSPRTPDRVSEADIQRLLHGVMEQLGIARPRVEYPAHQAMNLVGPQSIEGGAHEGLQHLGPFGNIPNIVAELTGDNIPKDFSEDQGYPDPPNPCPVGKTDDGCLENTPDTAEFSREFQLHQHLFDPEHDYPGLGKWNKKLLYEKMKGGERRKRRSVNPYLQGQRLDNVVAKKSVPHFSDEDKDPE

SEQ ID NO: 77061 - protein, 193 aa, Homo sapiens
  Payload ID: 15384
  Gene Symbol: SCG5
  Gene Name: secretogranin V
  ENSP ID: ENSP00000418430
MVSRMVSTMLSGLLFWLASGWTPAFAYSPRTPDRVSEADIQRLLHGVMEQLGIARPRVEYPAHQAMNLVGPQSIEGGAHEGLQHLGPFGNIPNIVAELTGDNIPKDFSEDQGYPDPPNPCPVGKTDDGCLENTPDTAEFSREFQLHQHLFDPEHDYPGLGKWSVNPYLQGQRLDNVVAKKSVPHFSDEDKDPE

SEQ ID NO: 77062 - protein, 216 aa, Homo sapiens
  Payload ID: 15384
  Gene Symbol: SCG5
  Gene Name: secretogranin V
  ENSP ID: ENSP00000418485
SGLLFWLASGWTPAFAYSPRTPDRVSEADIQRLLHGVMEQLGIARPRVEYPAHQAMNLVGPQSIEGGAHEGLQHLGPFGNIPNIVAELTGDNIPKDFSEDQGYPDPPNPCPVGKTADDGCLENTPDTAEFSREFQLHQHLFDPEHDYPGLGKWNKKLLYEKMKGGERRKRRVTRAWLDCCGDAWSFLSGAVNRLKPSLVGKSQNPPLCSPEKHWSM

SEQ ID NO: 77063 - protein, 194 aa, Homo sapiens
  Payload ID: 15384
  Gene Symbol: SCG5
  Gene Name: secretogranin V
  ENSP ID: ENSP00000420347
MVSRMVSTMLSGLLFWLASGWTPAFAYSPRTPDRVSEADIQRLLHGVMEQLGIARPRVEYPAHQAMNLVGPQSIEGGAHEGLQHLGPFGNIPNIVAELTGDNIPKDFSEDQGYPDPPNPCPVGKTADDGCLENTPDTAEFSREFQLHQHLFDPEHDYPGLGKWSVNPYLQGQRLDNVVAKKSVPHFSDEDKDPE

SEQ ID NO: 77064 - protein, 212 aa, Homo sapiens; identical to SEQ ID NO: 77059
  Payload ID: 15384
  Gene Symbol: SCG5
  Gene Name: secretogranin V
  ENSP ID: ENSP00000482615

SEQ ID NO: 77065 - protein, 216 aa, Homo sapiens; identical to SEQ ID NO: 77062
  Payload ID: 15384
  Gene Symbol: SCG5
  Gene Name: Secretogranin V
  ENSP ID: ENSP00000487899

SEQ ID NO: 77066 - protein, 212 aa, Homo sapiens; identical to SEQ ID NO: 77059
  Payload ID: 15384
  Gene Symbol: SCG5
  Gene Name: Secretogranin V
  ENSP ID: ENSP00000488109

SEQ ID NO: 77067 - protein, 211 aa, Homo sapiens; identical to SEQ ID NO: 77060
  Payload ID: 15384
  Gene Symbol: SCG5
  Gene Name: Secretogranin V
  ENSP ID: ENSP00000488509

SEQ ID NO: 77068 - protein, 194 aa, Homo sapiens; identical to SEQ ID NO: 77063
  Payload ID: 15384
  Gene Symbol: SCG5
  Gene Name: Secretogranin V
  ENSP ID: ENSP00000488565

SEQ ID NO: 77069 - protein, 193 aa, Homo sapiens; identical to SEQ ID NO: 77061
  Payload ID: 15384
  Gene Symbol: SCG5
  Gene Name: Secretogranin V
  ENSP ID: ENSP00000488899

SEQ ID NO: 77070 - protein, 157 aa, Homo sapiens
  Payload ID: 15385
  Gene Symbol: SCAMP1
  Gene Name: secretory carrier membrane protein 1
  Uniprot ID: O15126
  ENSP ID: ENSP00000478071
MSDFDSNPFADPDLNNPFKDPSVTQVTRNVPPGLDEYNPFSDSRTPPPGGVKMPNVPNTQPAIMKPTEEHPAYTQIAKEHALAQAELLKRQEELERKAAELDRREREMQNLSQHGRKNNWPPLPSNFPVGPCFYQDFSVDIPVEFQKTVKLMYYLWM

SEQ ID NO: 77071 - protein, 42 aa, Homo sapiens
  Payload ID: 15385
  Gene Symbol: SCAMP1
  Gene Name: secretory carrier membrane protein 1
  ENSP ID: ENSP00000478205
MPNVPNTQPAIMKPTEEHPAYTQIAKEHALAQAELLKRQEEL

SEQ ID NO: 77072 - protein, 206 aa, Homo sapiens
  Payload ID: 15385
  Gene Symbol: SCAMP1
  Gene Name: secretory carrier membrane protein 1
  ENSP ID: ENSP00000478292
  MOD_RES (1)..(1): Any amino acid
XELDRREREMQNLSQHGRKNNWPPLPSNFPVGPCFYQDFSVDIPVEFQKTVKLMYYLWMFHAVTLFLNIFGCLAWFCVDSARAVDFGLSILWFLLFTPCSFVCWYRPLYGAFSGWISSLTGLNQNIPVGIMMIIIAALFTASAVISLVMFKKVHGLYRTTGASFEKAQQEFATGVMSNKTVQTAAANAASTAASSAAQNAFKGNQI

SEQ ID NO: 77073 - protein, 312 aa, Homo sapiens
  Payload ID: 15385
  Gene Symbol: SCAMP1
  Gene Name: secretory carrier membrane protein 1
  ENSP ID: ENSP00000480865
MSDFDSNPFADPDLNNPFKPPPGGVKMPNVPNTQPAIMKPTEEHPAYTQIAKEHALAQAELLKRQEELERKAAELDRREREMQNLSQHGRKNNWPPLPSNFPVGPCFYQDFSVDIPVEFQKTVKLMYYLWMFHAVTLFLNIFGCLAWFCVDSARAVDFGLSILWFLLFTPCSFVCWYRPLYGAFRSDSSFRFFVFFFVYICQFAVHVLQAAGFHNWGNCGWISSLTGLNQNIPVGIMMIIIAALFTASAVISLVMFKKVHGLYRTTGASFEKAQQEFATGVMSNKTVQTAAANAASTAASSAAQNAFKGNQI

SEQ ID NO: 77074 - protein, 338 aa, Homo sapiens
  Payload ID: 15385
  Gene Symbol: SCAMP1
  Gene Name: secretory carrier membrane protein 1
  Uniprot ID: O15126
  ENSP ID: ENSP00000481022
MSDFDSNPFADPDLNNPFKDPSVTQVTRNVPPGLDEYNPFSDSRTPPPGGVKMPNVPNTQPAIMKPTEEHPAYTQIAKEHALAQAELLKRQEELERKAAELDRREREMQNLSQHGRKNNWPPLPSNFPVGPCFYQDFSVDIPVEFQKTVKLMYYLWMFHAVTLFLNIFGCLAWFCVDSARAVDFGLSILWFLLFTPCSFVCWYRPLYGAFRSDSSFRFFVFFFVYICQFAVHVLQAAGFHNWGNCGWISSLTGLNQNIPVGIMMIIIAALFTASAVISLVMFKKVHGLYRTTGASFEKAQQEFATGVMSNKTVQTAAANAASTAASSAAQNAFKGNQI

SEQ ID NO: 77075 - protein, 119 aa, Homo sapiens
  Payload ID: 15385
  Gene Symbol: SCAMP1
  Gene Name: secretory carrier membrane protein 1
  ENSP ID: ENSP00000482491
MVTLFNHGGASRPFSKVAVPFYIPASSVWDPSVTQVTRNVPPGLDEYNPFSDSRTPPPGGVKMPNVPNTQPAIMKPTEEHPAYTQIAKEHALAQAELLKRQEELERKAAELDRREREMQ

SEQ ID NO: 77076 - protein, 329 aa, Homo sapiens
  Payload ID: 15386
  Gene Symbol: SCAMP2
  Gene Name: secretory carrier membrane protein 2
  Uniprot ID: O15127
  ENSP ID: ENSP00000268099
MSAFDTNPFADPVDVNPFQDPSVTQLTNAPQGGLAEFNPFSETNAATTVPVTQLPGSSQPAVLQPSVEPTQPTPQAVVSAAQAGLLRQQEELDRKAAELERKERELQNTVANLHVRQNNWPPLPSWCPVKPCFYQDFSTEIPADYQRICKMLYYLWMLHSVTLFLNLLACLAWFSGNSSKGVDFGLSILWFLIFTPCAFLCWYRPIYKAFRSDNSFSFFVFFFVFFCQIGIYIIQLVGIPGLGDSGWIAALSTLDNHSLAISVIMMVVAGFFTLCAVLSVFLLQRVHSLYRRTGASFQQAQEEFSQGIFSSRTFHRAASSAAQGAFQGN

SEQ ID NO: 77077 - protein, 93 aa, Homo sapiens
  Payload ID: 15386
  Gene Symbol: SCAMP2
  Gene Name: secretory carrier membrane protein 2
  ENSP ID: ENSP00000454464
MLYYLWMLHSVTLFLNLLACLAWFSGNSSKGVDFGLSILWFLIFTPCAFLCWYRPIYKAFRSDNSFSFFVFFFVFFCQIGIYIIQLVGIPGLG

SEQ ID NO: 77078 - protein, 236 aa, Homo sapiens
  Payload ID: 15386
  Gene Symbol: SCAMP2
  Gene Name: secretory carrier membrane protein 2
  ENSP ID: ENSP00000454741
MSAFDTNPFADPVDVNPFQDPSVTQLTNAPQGGLAEFNPFSETNAATTVPVTQLPGSSQPAVLQPSVEPTQPTPQAVVSAAQAGLLRQQEELDRKAAELERKERELQNTVANLHVRQNNWPPLPSWCPVKPCFYQDFSTEIPADYQRICKMLYYLWMLHSVTLFLNLLACLAWFSGNSSKGVDFGLSILWFLIFTPCAFLCWYRPIYKAFRDLHHPVGWHPWPGGQRLDCSPVYTG

SEQ ID NO: 77079 - protein, 278 aa, Homo sapiens
  Payload ID: 15386
  Gene Symbol: SCAMP2
  Gene Name: secretory carrier membrane protein 2
  ENSP ID: ENSP00000455377
SETNAATTVPVTQLPGSSQPAVLQPSVEPTQPTPQAVVSAAQAGLLRQQEELDRKAAELERKERELQNTVANLHVRQNNWPPLPSWCPVKPCFYQDFSTEIPADYQRICKMLYYLWMLHSVTLFLNLLACLAWFSGNSSKGVDFGLSILWFLIFTPCAFLCWYRPIYKAFRSDNSFSFFVFFFVFFCQIGIYIIQLVGIPGLGDSGWIAALSTLDNHSLAISVIMMVVAGFFTLCAVLSVFLLQRVSGVGRADSKWEEAGNRFLPLPRDVFHHCSWAS

SEQ ID NO: 77080 - protein, 57 aa, Homo sapiens
  Payload ID: 15386
  Gene Symbol: SCAMP2
  Gene Name: secretory carrier membrane protein 2
  ENSP ID: ENSP00000455963
MSAFDTNPFADPVDVNPFQDPSVTQLTNAPQGGLAEFNPFSEPCLHWIIIPWPYQSS

SEQ ID NO: 77081 - protein, 254 aa, Homo sapiens
  Payload ID: 15386
  Gene Symbol: SCAMP2
  Gene Name: secretory carrier membrane protein 2
  ENSP ID: ENSP00000457564
MSAFDTNPFADPVDVNPFQDPSVTQLTNAPQGGLAEFNPFSETNAATTVPVTQLPGSSQPAVLQPSVEPTQPTPQLLLRQASKFPPAQFLAVSELSERQMLLGGESILRDSYMRKLPKAVVSAAQAGLLRQQEELDRKAAELERKERELQNTVANLHVRQNNWPPLPSWCPVKPCFYQDFSTEIPADYQRICKMLYYLWMLHSVTLFLNLLACLAWFSGNSSKGVDFGLSILWFLIFTPCAFLCWYRPIYKAFR

SEQ ID NO: 77082 - protein, 194 aa, Homo sapiens
  Payload ID: 15386
  Gene Symbol: SCAMP2
  Gene Name: secretory carrier membrane protein 2
  ENSP ID: ENSP00000457890
MSAFDTNPFADPVDVNPFQTNAATTVPVTQLPGSSQPAVLQPSVEPTQPTPQAVVSAAQAGLLRQQEELDRKAAELERKERELQNTVANLHVRQNNWPPLPSWCPVKPCFYQDFSTEIPADYQRICKMLYYLWMLHSVTLFLNLLACLAWFSGNSSKGVDFGLSILWFLIFTPCAFLCWYRPIYKAFRSDNSFS

SEQ ID NO: 77083 - protein, 347 aa, Homo sapiens
  Payload ID: 15387
  Gene Symbol: SCAMP3
  Gene Name: secretory carrier membrane protein 3
  Uniprot ID: O14828
  ENSP ID: ENSP00000307275
MAQSRDGGNPFAEPSELDNPFQDPAVIQHRPSRQYATLDVYNPFETREPPPAYEPPAPAPLPPPSAPSLQPSRKLSPTEPKNYGSYSTQASAAAATAELLKKQEELNRKAEELDRRERELQHAALGGTATRQNNWPPLPSFCPVQPCFFQDISMEIPQEFQKTVSTMYYLWMCSTLALLLNFLACLASFCVETNNGAGFGLSILWVLLFTPCSFVCWYRPMYKAFRSDSSFNFFVFFFIFFVQDVLFVLQAIGIPGWGFSGWISALVVPKGNTAVSVLMLLVALLFTGIAVLGIVMLKRIHSLYRRTGASFQKAQQEFAAGVFSNPAVRTAAANAAAGAAENAFRAP

SEQ ID NO: 77084 - protein, 321 aa, Homo sapiens
  Payload ID: 15387
  Gene Symbol: SCAMP3
  Gene Name: secretory carrier membrane protein 3
  Uniprot ID: O14828
  ENSP ID: ENSP00000347540
MAQSRDGGNPFAEPSELDNPFQPPPAYEPPAPAPLPPPSAPSLQPSRKLSPTEPKNYGSYSTQASAAAATAELLKKQEELNRKAEELDRRERELQHAALGGTATRQNNWPPLPSFCPVQPCFFQDISMEIPQEFQKTVSTMYYLWMCSTLALLLNFLACLASFCVETNNGAGFGLSILWVLLFTPCSFVCWYRPMYKAFRSDSSFNFFVFFFIFFVQDVLFVLQAIGIPGWGFSGWISALVVPKGNTAVSVLMLLVALLFTGIAVLGIVMLKRIHSLYRRTGASFQKAQQEFAAGVFSNPAVRTAAANAAAGAAENAFRAP

SEQ ID NO: 77085 - protein, 321 aa, Homo sapiens; identical to SEQ ID NO: 77084
  Payload ID: 15387
  Gene Symbol: SCAMP3
  Gene Name: secretory carrier membrane protein 3
  Uniprot ID: O14828
  ENSP ID: ENSP00000458542

SEQ ID NO: 77086 - protein, 347 aa, Homo sapiens; identical to SEQ ID NO: 77083
  Payload ID: 15387
  Gene Symbol: SCAMP3
  Gene Name: secretory carrier membrane protein 3
  Uniprot ID: O14828
  ENSP ID: ENSP00000461521

SEQ ID NO: 77087 - protein, 229 aa, Homo sapiens
  Payload ID: 15388
  Gene Symbol: SCAMP4
  Gene Name: secretory carrier membrane protein 4
  Uniprot ID: Q969E2
  ENSP ID: ENSP00000316007
MSEKENNFPPLPKFIPVKPCFYQNFSDEIPVEHQVLVKRIYRLWMFYCATLGVNLIACLAWWIGGGSGTNFGLAFVWLLLFTPCGYVCWFRPVYKAFRADSSFNFMAFFFIFGAQFVLTVIQAIGFSGWGACGWLSAIGFFQYSPGAAVVMLLPAIMFSVSAAMMAIAIMKVHRIYRGAGGSFQKAQTEWNTGTWRNPPSREAQYNNFSGNSLPEYPTVPSYPGSGQWP

SEQ ID NO: 77088 - protein, 195 aa, Homo sapiens
  Payload ID: 15388
  Gene Symbol: SCAMP4
  Gene Name: secretory carrier membrane protein 4
  Uniprot ID: Q969E2
  ENSP ID: ENSP00000386865
MSEKENNFPPLPKFIPVKPCFYQNFSDEIPVEHQVLVKRIYRLWMFYCATLGVNLIACLAWWIGGGSGTNFGLAFVWLLLFTPCGYVCWFRPVYKAFRGWLSAIGFFQYSPGAAVVMLLPAIMFSVSAAMMAIAIMKVHRIYRGAGGSFQKAQTEWNTGTWRNPPSREAQYNNFSGNSLPEYPTVPSYPGSGQWP

SEQ ID NO: 77089 - protein, 123 aa, Homo sapiens
  Payload ID: 15388
  Gene Symbol: SCAMP4
  Gene Name: secretory carrier membrane protein 4
  ENSP ID: ENSP00000388185
MSEKENNFPPLPKFIPVKPCFYQNFSDEIPVEHQVLVKRIYRLWMFYCATLGVNLIACLAWWIGGGSGTNFGLAFVWLLLFTPCGYVCWFRPVYKAFRADSSFNFMAFFFIFGAQFVLTVIQA

SEQ ID NO: 77090 - protein, 57 aa, Homo sapiens
  Payload ID: 15388
  Gene Symbol: SCAMP4
  Gene Name: secretory carrier membrane protein 4
  ENSP ID: ENSP00000465199
MSEKENNFPPLPKFIPVKPCFYQNFSDEIPVEHQVLVKRIYRLWMFYCATLGVNLIA

SEQ ID NO: 77091 - protein, 22 aa, Homo sapiens
  Payload ID: 15388
  Gene Symbol: SCAMP4
  Gene Name: secretory carrier membrane protein 4
  ENSP ID: ENSP00000478264
MFYCATLGVNLIACLAWWIGGG

SEQ ID NO: 77092 - protein, 229 aa, Homo sapiens; identical to SEQ ID NO: 77087
  Payload ID: 15388
  Gene Symbol: SCAMP4
  Gene Name: secretory carrier membrane protein 4
  Uniprot ID: Q969E2
  ENSP ID: ENSP00000479083

SEQ ID NO: 77093 - protein, 140 aa, Homo sapiens
  Payload ID: 15388
  Gene Symbol: SCAMP4
  Gene Name: secretory carrier membrane protein 4
  ENSP ID: ENSP00000479672
MFYCATLGVNLIACLAWWIGGGSGTNFGLAFVWLLLFTPCGYVCWFRPVYKAFRADSSFNFMAFFFIFGAQFVLTVIQAIGFSGWGACGWLSAIGFFQYSPGAAVVMLLPAIMFSVSAAMMAIAIMKVHRIYRGAGGSFQ

SEQ ID NO: 77094 - protein, 35 aa, Homo sapiens
  Payload ID: 15388
  Gene Symbol: SCAMP4
  Gene Name: secretory carrier membrane protein 4
  ENSP ID: ENSP00000481989
MSGAQGHFLRQCWLSRSSWGAPSATLSAPKAVFPS

SEQ ID NO: 77095 - protein, 235 aa, Homo sapiens
  Payload ID: 15389
  Gene Symbol: SCAMP5
  Gene Name: secretory carrier membrane protein 5
  Uniprot ID: Q8TAC9
  ENSP ID: ENSP00000355387
MAEKVNNFPPLPKFIPLKPCFYQDFEADIPPQHVSMTKRLYYLWMLNSVTLAVNLVGCLAWLIGGGGATNFGLAFLWLILFTPCSYVCWFRPIYKAFKTDSSFSFMAFFFTFMAQLVISIIQAVGIPGWGVCGWIATISFFGTNIGSAVVMLIPTVMFTVMAVFSFIALSMVHKFYRGSGGSFSKAQEEWTTGAWKNPHVQQAAQNAAMGAAQGAMNQPQTQYSATPNYTYSNEM

SEQ ID NO: 77096 - protein, 235 aa, Homo sapiens; identical to SEQ ID NO: 77095
  Payload ID: 15389
  Gene Symbol: SCAMP5
  Gene Name: secretory carrier membrane protein 5
  Uniprot ID: Q8TAC9
  ENSP ID: ENSP00000406547

SEQ ID NO: 77097 - protein, 168 aa, Homo sapiens
  Payload ID: 15389
  Gene Symbol: SCAMP5
  Gene Name: secretory carrier membrane protein 5
  ENSP ID: ENSP00000454602
MHLNLEGLGGLEGREALALCPGDGSHLLCRRTDSSFSFMAFFFTFMAQLVISIIQAVGIPGWGVCGWIATISFFGTNIGSAVVMLIPTVMFTVMAVFSFIALSMVHKFYRGSGGSFSKAQEEWTTGAWKNPHVQQAAQNAAMGAAQGAMNQPQTQYSATPNYTYSNEM

SEQ ID NO: 77098 - protein, 95 aa, Homo sapiens
  Payload ID: 15389
  Gene Symbol: SCAMP5
  Gene Name: secretory carrier membrane protein 5
  ENSP ID: ENSP00000454766
MAEKVNNFPPLPKFIPLKPCFYQDFEADIPPQHVSMTKRLYYLWMLNSVTLAVNLVGCLAWLIGGGGATNFGLAFLWLILFTPCSYVCWFRPIYK

SEQ ID NO: 77099 - protein, 123 aa, Homo sapiens
  Payload ID: 15389
  Gene Symbol: SCAMP5
  Gene Name: secretory carrier membrane protein 5
  ENSP ID: ENSP00000454860
MAEKVNNFPPLPKFIPLKPCFYQDFEADIPPQHVSMTKRLYYLWMLNSVTLAVNLVGCLAWLIGGGGATNFGLAFLWLILFTPCSYVCWFRPIYKAFKTDSSFSFMAFFFTFMAQLVISIIQA

SEQ ID NO: 77100 - protein, 148 aa, Homo sapiens
  Payload ID: 15389
  Gene Symbol: SCAMP5
  Gene Name: secretory carrier membrane protein 5
  ENSP ID: ENSP00000455039
MAEKVNNFPPLPKFIPLKPCFYQDFEADIPPQHVSMTKRLYYLWMLNSVTLAVNLVGCLAWLIGGGGATNFGLAFLWLILFTPCSYVCWFRPIYKAFKTDSSFSFMAFFFTFMAQLVISIIQAVGIPGWGVCGWIATISFFGTNIGSA

SEQ ID NO: 77101 - protein, 45 aa, Homo sapiens
  Payload ID: 15389
  Gene Symbol: SCAMP5
  Gene Name: secretory carrier membrane protein 5
  ENSP ID: ENSP00000455203
MAEKVNNFPPLPKFIPLKPCFYQDFEADIPPQHVSMTKRLYYLWM

SEQ ID NO: 77102 - protein, 243 aa, Homo sapiens
  Payload ID: 15389
  Gene Symbol: SCAMP5
  Gene Name: secretory carrier membrane protein 5
  Uniprot ID: Q8TAC9
  ENSP ID: ENSP00000455313
MAEKVNNFPPLPKFIPLKPCFYQDFEADIPPQHVSMTKRLYYLWMLNSVTLAVNLVGCLAWLIGGGGATNFGLAFLWLILFTPCSYVCWFRPIYKAFKTDSSFSFMAFFFTFMAQLVISIIQAVGIPGWGVCPTLASSCSGWIATISFFGTNIGSAVVMLIPTVMFTVMAVFSFIALSMVHKFYRGSGGSFSKAQEEWTTGAWKNPHVQQAAQNAAMGAAQGAMNQPQTQYSATPNYTYSNEM

SEQ ID NO: 77103 - protein, 45 aa, Homo sapiens; identical to SEQ ID NO: 77101
  Payload ID: 15389
  Gene Symbol: SCAMP5
  Gene Name: secretory carrier membrane protein 5
  ENSP ID: ENSP00000455598

SEQ ID NO: 77104 - protein, 116 aa, Homo sapiens
  Payload ID: 15389
  Gene Symbol: SCAMP5
  Gene Name: secretory carrier membrane protein 5
  ENSP ID: ENSP00000456505
MAEKVNNFPPLPKFIPLKPCFYQDFEADIPPQHVSMTKRLYYLWMLNSVTLAVNLVGCLAWLIGGGGATNFGLAFLWLILFTPCSYVCWFRPIYKAFKTDSSFSFMAFFFTFMAQL

SEQ ID NO: 77105 - protein, 97 aa, Homo sapiens
  Payload ID: 15389
  Gene Symbol: SCAMP5
  Gene Name: secretory carrier membrane protein 5
  ENSP ID: ENSP00000456991
MAEKVNNFPPLPKFIPLKPCFYQDFEADIPPQHVSMTKRLYYLWMLNSVTLAVNLVGCLAWLIGGGGATNFGLAFLWLILFTPCSYVCWFRPIYKAF

SEQ ID NO: 77106 - protein, 69 aa, Homo sapiens
  Payload ID: 15389
  Gene Symbol: SCAMP5
  Gene Name: secretory carrier membrane protein 5
  ENSP ID: ENSP00000457121
MAEKVNNFPPLPKFIPLKPCFYQDFEADIPPQHVSMTKRLYYLWMLNSVTLAVNLVGCLAWLIGGGGAT

SEQ ID NO: 77107 - protein, 46 aa, Homo sapiens
  Payload ID: 15389
  Gene Symbol: SCAMP5
  Gene Name: secretory carrier membrane protein 5
  ENSP ID: ENSP00000457444
MAEKVNNFPPLPKFIPLKPCFYQDFEADIPPQHVSMTKRLYYLWMC

SEQ ID NO: 77108 - protein, 45 aa, Homo sapiens; identical to SEQ ID NO: 77101
  Payload ID: 15389
  Gene Symbol: SCAMP5
  Gene Name: secretory carrier membrane protein 5
  ENSP ID: ENSP00000457520

SEQ ID NO: 77109 - protein, 45 aa, Homo sapiens; identical to SEQ ID NO: 77101
  Payload ID: 15389
  Gene Symbol: SCAMP5
  Gene Name: secretory carrier membrane protein 5
  ENSP ID: ENSP00000458072

SEQ ID NO: 77110 - protein, 132 aa, Homo sapiens
  Payload ID: 15390
  Gene Symbol: SLPI
  Gene Name: secretory leukocyte peptidase inhibitor
  Uniprot ID: P03973
  ENSP ID: ENSP00000342082
MKSSGLFPFLVLLALGTLAPWAVEGSGKSFKAGVCPPKKSAQCLRYKKPECQSDWQCPGKKRCCPDTCGIKCLDPVDTPNPTRRKPGKCPVTYGQCLMLNPPNFCEMDGQCKRDLKCCMGMCGKSCVSPVKA

SEQ ID NO: 77111 - protein, 478 aa, Homo sapiens; identical to SEQ ID NO: 75739
  Payload ID: 15391
  Gene Symbol: SHPK
  Gene Name: sedoheptulokinase
  Uniprot ID: Q9UHJ6
  ENSP ID: ENSP00000225519

SEQ ID NO: 77112 - protein, 360 aa, Homo sapiens
  Payload ID: 15392
  Gene Symbol: SEH1L
  Gene Name: SEH1-like nucleoporin
  Uniprot ID: Q96EE3
  ENSP ID: ENSP00000262124
MFVARSIAADHKDLIHDVSFDFHGRRMATCSSDQSVKVWDKSESGDWHCTASWKTHSGSVWRVTWAHPEFGQVLASCSFDRTAAVWEEIVGESNDKLRGQSHWVKRTTLVDSRTSVTDVKFAPKHMGLMLATCSADGIVRIYEAPDVMNLSQWSLQHEISCKLSCSCISWNPSSSRAHSPMIAVGSDDSSPNAMAKVQIFEYNENTRKYAKAETLMTVTDPVHDIAFAPNLGRSFHILAIATKDVRIFTLKPVRKELTSSGGPTKFEIHIVAQFDNHNSQVWRVSWNITGTVLASSGDDGCVRLWKANYMDNWKCTGILKGNGSPVNGSSQQGTSNPSLGSTIPSLQNSLNGSSAGRKHS

SEQ ID NO: 77113 - protein, 421 aa, Homo sapiens
  Payload ID: 15392
  Gene Symbol: SEH1L
  Gene Name: SEH1-like nucleoporin
  Uniprot ID: Q96EE3
  ENSP ID: ENSP00000382779
MFVARSIAADHKDLIHDVSFDFHGRRMATCSSDQSVKVWDKSESGDWHCTASWKTHSGSVWRVTWAHPEFGQVLASCSFDRTAAVWEEIVGESNDKLRGQSHWVKRTTLVDSRTSVTDVKFAPKHMGLMLATCSADGIVRIYEAPDVMNLSQWSLQHEISCKLSCSCISWNPSSSRAHSPMIAVGSDDSSPNAMAKVQIFEYNENTRKYAKAETLMTVTDPVHDIAFAPNLGRSFHILAIATKDVRIFTLKPVRKELTSSGGPTKFEIHIVAQFDNHNSQVWRVSWNITGTVLASSGDDGCVRLWKANYMDNWKCTGILKGNGSPVNGSSQQGTSNPSLGSTIPSLQNSLNGSSAGRYFFTPLDSPRAGSRWSSYAQLLPPPPPPLVEHSCDADTANLQYPHPRRRYLSRPLNPLPENEGI

SEQ ID NO: 77114 - protein, 263 aa, Homo sapiens
  Payload ID: 15392
  Gene Symbol: SEH1L
  Gene Name: SEH1-like nucleoporin
  ENSP ID: ENSP00000466234
MFVARSIAADHKDLIHDVSFDFHGRRMATCSSDQSVKVWDKSESGDWHCTASWKTHSGSVWRVTWAHPEFGQVLASCSFDRTAAVWEEIVGESNDKLRGQSHWVKRTTLVDSRTSVTDVKFAPKHMGLMLATCSADGIVRIYEAPDVMNLSQWSLQHEISCKLSCSCISWNPSRISKLIEKMNRAHLYNFHIPSSRAHSPMIAVGSDDSSPNAMAKVQIFEYNENTRKYAKAETLMTVTDPVHDIAFAPNLGRSFHILAIATK

SEQ ID NO: 77115 - protein, 158 aa, Homo sapiens
  Payload ID: 15392
  Gene Symbol: SEH1L
  Gene Name: SEH1-like nucleoporin
  ENSP ID: ENSP00000466959
MFVARSIAADHKDLIHDVSFDFHGRRMATCSSDQSVKVWDKSESGDWHCTASWKVKRTTLVDSRTSVTDVKFAPKHMGLMLATCSADGIVRIYEAPDVMNLSQWSLQHEISCKLSCSCISWNPSSSRAHSPMIAVGSDDSSPNAMAKVQIFEYNENTR

SEQ ID NO: 77116 - protein, 189 aa, Homo sapiens
  Payload ID: 15392
  Gene Symbol: SEH1L
  Gene Name: SEH1-like nucleoporin
  ENSP ID: ENSP00000467276
MFVARSIAADHKDLIHDVSFDFHGRRMATCSSDQSVKTHSGSVWRVTWAHPEFGQVLASCSFDRTAAVWEEIVGESNDKLRGQSHWVKRTTLVDSRTSVTDVKFAPKHMGLMLATCSADGIVRIYEAPDVMNLSQWSLQHEISCKLSCSCISWNPSSSRAHSPMIAVGSDDSSPNAMAKVQIFEYNENT

SEQ ID NO: 77117 - protein, 77 aa, Homo sapiens
  Payload ID: 15392
  Gene Symbol: SEH1L
  Gene Name: SEH1-like nucleoporin
  ENSP ID: ENSP00000467605
MATCSSDQSVKVWDKSESGDWHCTASWKTHSGSVWRVTWAHPEFGQVLASCSFDRTAAVWEEIVGESNDKLRGQSHW

SEQ ID NO: 77118 - protein, 994 aa, Homo sapiens
  Payload ID: 15393
  Gene Symbol: SEZ6
  Gene Name: seizure related 6 homolog (mouse)
  Uniprot ID: Q53EL9
  ENSP ID: ENSP00000312942
MRPVALLLLPSLLALLAHGLSLEAPTVGKGQAPGIEETDGELTAAPTPEQPERGVHFVTTAPTLKLLNHHPLLEEFLQEGLEKGDEELRPALPFQPDPPAPFTPSPLPRLANQDSRPVFTSPTPAMAAVPTQPQSKEGPWSPESESPMLRITAPLPPGPSMAVPTLGPGEIASTTPPSRAWTPTQEGPGDMGRPWVAEVVSQGAGIGIQGTITSSTASGDDEETTTTTTIITTTITTVQTPGPCSWNFSGPEGSLDSPTDLSSPTDVGLDCFFYISVYPGYGVEIKVQNISLREGETVTVEGLGGPDPLPLANQSFLLRGQVIRSPTHQAALRFQSLPPPAGPGTFHFHYQAYLLSCHFPRRPAYGDVTVTSLHPGGSARFHCATGYQLKGARHLTCLNATQPFWDSKEPVCIAACGGVIRNATTGRIVSPGFPGNYSNNLTCHWLLEAPEGQRLHLHFEKVSLAEDDDRLIIRNGDNVEAPPVYDSYEVEYLPIEGLLSSGKHFFVELSTDSSGAAAGMALRYEAFQQGHCYEPFVKYGNFSSSTPTYPVGTTVEFSCDPGYTLEQGSIIIECVDPHDPQWNETEPACRAVCSGEITDSAGVVLSPNWPEPYGRGQDCIWGVHVEEDKRIMLDIRVLRIGPGDVLTFYDGDDLTARVLGQYSGPRSHFKLFTSMADVTIQFQSDPGTSVLGYQQGFVIHFFEVPRNDTCPELPEIPNGWKSPSQPELVHGTVVTYQCYPGYQVVGSSVLMCQWDLTWSEDLPSCQRVTSCHDPGDVEHSRRLISSPKFPVGATVQYICDQGFVLMGSSILTCHDRQAGSPKWSDRAPKCLLEQLKPCHGLSAPENGARSPEKQLHPAGATIHFSCAPGYVLKGQASIKCVPGHPSHWSDPPPICRAASLDGFYNSRSLDVAKAPAASSTLDAAHIAAAIFLPLVAMVLLVGGVYFYFSRLQGKSSLQLPRPRPRPYNRITIESAFDNPTYETGSLSFAGDERI

SEQ ID NO: 77119 - protein, 994 aa, Homo sapiens
  Payload ID: 15393
  Gene Symbol: SEZ6
  Gene Name: seizure related 6 homolog (mouse)
  ENSP ID: ENSP00000337407
MRPVALLLLPSLLALLAHGLSLEAPTVGKGQAPGIEETDGELTAAPTPEQPERGVHFVTTAPTLKLLNHHPLLEEFLQEGLEKGDEELRPALPFQPDPPAPFTPSPLPRLANQDSRPVFTSPTPAMAAVPTQPQSKEGPWSPESESPMLRITAPLPPGPSMAVPTLGPGEIASTTPPSRAWTPTQEGPGDMGRPWVAEVVSQGAGIGIQGTITSSTASGDDEETTTTTTIITTTITTVQTPGPCSWNFSGPEGSLDSPTDLSSPTDVGLDCFFYISVYPGYGVEIKVQNISLREGETVTVEGLGGPDPLPLANQSFLLRGQVIRSPTHQAALRFQSLPPPAGPGTFHFHYQAYLLSCHFPRRPAYGDVTVTSLHPGGSARFHCATGYQLKGARHLTCLNATQPFWDSKEPVCIGECPGVIRNATTGRIVSPGFPGNYSNNLTCHWLLEAPEGQRLHLHFEKVSLAEDDDRLIIRNGDNVEAPPVYDSYEVEYLPIEGLLSSGKHFFVELSTDSSGAAAGMALRYEAFQQGHCYEPFVKYGNFSSSTPTYPVGTTVEFSCDPGYTLEQGSIIIECVDPHDPQWNETEPACRAVCSGEITDSAGVVLSPNWPEPYGRGQDCIWGVHVEEDKRIMLDIRVLRIGPGDVLTFYDGDDLTARVLGQYSGPRSHFKLFTSMADVTIQFQSDPGTSVLGYQQGFVIHFFEVPRNDTCPELPEIPNGWKSPSQPELVHGTVVTYQCYPGYQVVGSSVLMCQWDLTWSEDLPSCQRVTSCHDPGDVEHSRRLISSPKFPVGATVQYICDQGFVLMGSSILTCHDRQAGSPKWSDRAPKCLLEQLKPCHGLSAPENGARSPEKQLHPAGATIHFSCAPGYVLKGQASIKCVPGHPSHWSDPPPICRAASLDGSTTVAAWMVAKAPAASSTLDAAHIAAAIFLPLVAMVLLVGGVYFYFSRLQGKSSLQLPRPRPRPYNRITIESAFDNPTYETGSLSFAGDERI

SEQ ID NO: 77120 - protein, 993 aa, Homo sapiens
  Payload ID: 15393
  Gene Symbol: SEZ6
  Gene Name: seizure related 6 homolog (mouse)
  Uniprot ID: Q53EL9
  ENSP ID: ENSP00000353440
MRPVALLLLPSLLALLAHGLSLEAPTVGKGQAPGIEETDGELTAAPTPEQPERGVHFVTTAPTLKLLNHHPLLEEFLQEGLEKGDEELRPALPFQPDPPAPFTPSPLPRLANQDSRPVFTSPTPAMAAVPTQPQSKEGPWSPESESPMLRITAPLPPGPSMAVPTLGPGEIASTTPPSRAWTPTQEGPGDMGRPWVAEVVSQGAGIGIQGTITSSTASGDDEETTTTTTIITTTITTVQTPGPCSWNFSGPEGSLDSPTDLSSPTDVGLDCFFYISVYPGYGVEIKVQNISLREGETVTVEGLGGPDPLPLANQSFLLRGQVIRSPTHQAALRFQSLPPPAGPGTFHFHYQAYLLSCHFPRRPAYGDVTVTSLHPGGSARFHCATGYQLKGARHLTCLNATQPFWDSKEPVCIAACGGVIRNATTGRIVSPGFPGNYSNNLTCHWLLEAPEGQRLHLHFEKVSLAEDDDRLIIRNGDNVEAPPVYDSYEVEYLPIEGLLSSGKHFFVELSTDSSGAAAGMALRYEAFQQGHCYEPFVKYGNFSSSTPTYPVGTTVEFSCDPGYTLEQGSIIIECVDPHDPQWNETEPACRAVCSGEITDSAGVVLSPNWPEPYGRGQDCIWGVHVEEDKRIMLDIRVLRIGPGDVLTFYDGDDLTARVLGQYSGPRSHFKLFTSMADVTIQFQSDPGTSVLGYQQGFVIHFFEVPRNDTCPELPEIPNGWKSPSQPELVHGTVVTYQCYPGYQVVGSSVLMCQWDLTWSEDLPSCQRVTSCHDPGDVEHSRRLISSPKFPVGATVQYICDQGFVLMGSSILTCHDRQAGSPKWSDRAPKCLLEQLKPCHGLSAPENGARSPEKQLHPAGATIHFSCAPGYVLKGQASIKCVPGHPSHWSDPPPICRAASLDGFYNSRSLDVAKAPAASSTLDAAHIAAAIFLPLVAMVLLVGGVYFYFSRLQGKSSLQLPRPRPRPYNRITIESAFDNPTYETGETREYEVSI

SEQ ID NO: 77121 - protein, 980 aa, Homo sapiens
  Payload ID: 15393
  Gene Symbol: SEZ6
  Gene Name: seizure related 6 homolog (mouse)
  ENSP ID: ENSP00000403784
MRPVALLLLPSLLALLAHGLSLEAPTVGKGQAPGIEETDGELTAAPTPEQPERGVHFVTTAPTLKLLNHHPLLEEFLQEGLEKGDEELRPALPFQPDPPAPFTPSPLPRLANQDSRPVFTSPTPAMAAVPTQPQSKEGPWSPESESPMLRITAPLPPGPSMAVPTLGPGEIASTTPPSRAWTPTQEGPGDMGRPWVAEVVSQGAGIGIQGTITSSTASGDDEETTTTTTIITTTITTVQTPGPCSWNFSGPEGSLDSPTDLSSPTDVGLDCFFYISVYPGYGVEIKVQNISLREGETVTVEGLGGPDPLPLANQSFLLRGQVIRSPTHQAALRFQSLPPPAGPGTFHFHYQAYLLSCHFPRRPAYGDVTVTSLHPGGSARFHCATGYQLKGARHLTCLNATQPFWDSKEPVCIAACGGVIRNATTGRIVSPGFPGNYSNNLTCHWLLEAPEGQRLHLHFEKVSLAEDDDRLIIRNGDNVEAPPVYDSYEVEYLPIEGLLSSGKHFFVELSTDSSGAAAGMALRYEAFQQGHCYEPFVKYGNFSSSTPTYPVGTTVEFSCDPGYTLEQGSIIIECVDPHDPQWNETEPACRAVCSGEITDSAGVVLSPNWPEPYGRGQDCIWGVHVEEDKRIMLDIRVLRIGPGDVLTFYDGDDLTARVLGQYSGPRSHFKLFTSMADVTIQFQSDPGTSVLGYQQGFVIHFFEVPRNDTCPELPEIPNGWKSPSQPELVHGTVVTYQCYPGYQVVGSSVLMCQWDLTWSEDLPSCQRVTSCHDPGDVEHSRRLISSPKFPVGATVQYICDQGFVLMGSSILTCHDRQAGSPKWSDRAPKCLLEQLKPCHGLSAPENGARSPEKQLHPAGATIHFSCAPGYVLKGQASIKCVPGHPSHWSDPPPICRAVAKAPAASSTLDAAHIAAAIFLPLVAMVLLVGGVYFYFSRLQGKSSLQLPRPRPRPYNRITIESAFDNPTYETGETREYEVSI

SEQ ID NO: 77122 - protein, 919 aa, Homo sapiens
  Payload ID: 15393
  Gene Symbol: SEZ6
  Gene Name: seizure related 6 homolog (mouse)
  ENSP ID: ENSP00000437650
EFLQEGLEKGDEELRPALPFQPDPPAPFTPSPLPRLANQDSRPVFTSPTPAMAAVPTQPQSKEGPWSPESESPMLRITAPLPPGPSMAVPTLGPGEIASTTPPSRAWTPTQEGPGDMGRPWVAEVVSQGAGIGIQGTITSSTASGDDEETTTTTTIITTTITTVQTPGPCSWNFSGPEGSLDSPTDLSSPTDVGLDCFFYISVYPGYGVEIKVQNISLREGETVTVEGLGGPDPLPLANQSFLLRGQVIRSPTHQAALRFQSLPPPAGPGTFHFHYQAYLLSCHFPRRPAYGDVTVTSLHPGGSARFHCATGYQLKGARHLTCLNATQPFWDSKEPVCIAACGGVIRNATTGRIVSPGFPGNYSNNLTCHWLLEAPEGQRLHLHFEKVSLAEDDDRLIIRNGDNVEAPPVYDSYEVEYLPIEGLLSSGKHFFVELSTDSSGAAAGMALRYEAFQQGHCYEPFVKYGNFSSSTPTYPVGTTVEFSCDPGYTLEQGSIIIECVDPHDPQWNETEPACRAVCSGEITDSAGVVLSPNWPEPYGRGQDCIWGVHVEEDKRIMLDIRVLRIGPGDVLTFYDGDDLTARVLGQYSGPRSHFKLFTSMADVTIQFQSDPGTSVLGYQQGFVIHFFEVPRNDTCPELPEIPNGWKSPSQPELVHGTVVTYQCYPGYQVVGSSVLMCQWDLTWSEDLPSCQRVTSCHDPGDVEHSRRLISSPKFPVGATVQYICDQGFVLMGSSILTCHDRQAGSPKWSDRAPKCLLEQLKPCHGLSAPENGARSPEKQLHPAGATIHFSCAPGYVLKGQASIKCVPGHPSHWSDPPPICRAASLDGFYNSRSLDVAKAPAASSTLDAAHIAAAIFLPLVAMVLLVGGVYFYFSRLQGKSSLQLPRPRPRPYNRITIESAFDNPTYETGETREYEVSI

SEQ ID NO: 77123 - protein, 101 aa, Homo sapiens
  Payload ID: 15393
  Gene Symbol: SEZ6
  Gene Name: seizure related 6 homolog (mouse)
  ENSP ID: ENSP00000440216
  MOD_RES (1)..(1): Any amino acid
XLDAAHIAAAIFLPLVAMVLLVGGVYFYFSRRRCHQALKKLCPSPPAMPTMAYFLGVIAHLGPFIGPMSGGIYLWEEHSWSTSINSQHPEPPHALDQPGTH

SEQ ID NO: 77124 - protein, 454 aa, Homo sapiens
  Payload ID: 15393
  Gene Symbol: SEZ6
  Gene Name: seizure related 6 homolog (mouse)
  ENSP ID: ENSP00000440764
  MOD_RES (1)..(1): Any amino acid
XGEIASTTPPSRAWTPTQEGPGDMGRPWVAEVVSQGAGIGIQGTITSSTASGDDEETTTTTTIITTTITTVQTPGPCSWNFSGPEGSLDSPTDLSSPTDVGLDCFFYISVYPGYGVEIKVQNISLREGETVTVEGLGGPDPLPLANQSFLLRGQVIRSPTHQAALRFQSLPPPAGPGTFHFHYQAYLLSCHFPRRPAYGDVTVTSLHPGGSARFHCATGYQLKGARHLTCLNATQPFWDSKEPVCIAACGGVIRNATTGRIVSPGFPGNYSNNLTCHWLLEAPEGQRLHLHFEKVSLAEDDDRLIIRNGDNVEAPPVYDSYEVEYLPIEGLLSSGKHFFVELSTDSSGAAAGMALRYEAAHPPTLWVPLWSSAATLATPWSRAPSSSSVLTPTTPSGMRQSQPAEPCAAGRSQTRLAWYSLPTGQSPTVVGRIVSGVCMWKRTSASCWTSECCA

SEQ ID NO: 77125 - protein, 131 aa, Homo sapiens
  Payload ID: 15393
  Gene Symbol: SEZ6
  Gene Name: seizure related 6 homolog (mouse)
  ENSP ID: ENSP00000443589
  MOD_RES (1)..(1): Any amino acid
XACGGVIRNATTGRIVSPGFPGNYSNNLTCHWLLEAPEGQRLHLHFEKVSLAEDDDRLIIRNGDNVEAPPVYDSYEVEYLPIEGLLSSGKHFFVELSTDSSGAAAGMALRYEGEPAGASLGVAGPRGWARA

SEQ ID NO: 77126 - protein, 56 aa, Homo sapiens
  Payload ID: 15393
  Gene Symbol: SEZ6
  Gene Name: seizure related 6 homolog (mouse)
  ENSP ID: ENSP00000466107
MAAVPTQPQSKEGPWSPESESPMLRITAPLPPGPSMAVPTLGPGEIASTTPPSRAW

SEQ ID NO: 77127 - protein, 1024 aa, Homo sapiens
  Payload ID: 15394
  Gene Symbol: SEZ6L
  Gene Name: seizure related 6 homolog (mouse)-like
  Uniprot ID: Q9BYH1
  ENSP ID: ENSP00000248933
MPAARPPAAGLRGISLFLALLLGSPAAALERDALPEGDASPLGPYLLPSGAPERGSPGKEHPEERVVTAPPSSSQSAEVLGELVLDGTAPSAHHDIPALSPLLPEEARPKHALPPKKKLPSLKQVNSARKQLRPKATSAATVQRAGSQPASQGLDLLSSSTEKPGPPGDPDPIVASEEASEVPLWLDRKESAVPTTPAPLQISPFTSQPYVAHTLPQRPEPGEPGPDMAQEAPQEDTSPMALMDKGENELTGSASEESQETTTSTIITTTVITTEQAPALCSVSFSNPEGYIDSSDYPLLPLNNFLECTYNVTVYTGYGVELQVKSVNLSDGELLSIRGVDGPTLTVLANQTLLVEGQVIRSPTNTISVYFRTFQDDGLGTFQLHYQAFMLSCNFPRRPDSGDVTVMDLHSGGVAHFHCHLGYELQGAKMLTCINASKPHWSSQEPICSAPCGGAVHNATIGRVLSPSYPENTNGSQFCIWTIEAPEGQKLHLHFERLLLHDKDRMTVHSGQTNKSALLYDSLQTESVPFEGLLSEGNTIRIEFTSDQARAASTFNIRFEAFEKGHCYEPYIQNGNFTTSDPTYNIGTIVEFTCDPGHSLEQGPAIIECINVRDPYWNDTEPLCRAMCGGELSAVAGVVLSPNWPEPYVEGEDCIWKIHVGEEKRIFLDIQFLNLSNSDILTIYDGDEVMPHILGQYLGNSGPQKLYSSTPDLTIQFHSDPAGLIFGKGQGFIMNYIEVSRNDSCSDLPEIQNGWKTTSHTELVRGARITYQCDPGYDIVGSDTLTCQWDLSWSSDPPFCEKIMYCTDPGEVDHSTRLISDPVLLVGTTIQYTCNPGFVLEGSSLLTCYSRETGTPIWTSRLPHCVSEESLACDNPGLPENGYQILYKRLYLPGESLTFMCYEGFELMGEVTIRCILGQPSHWNGPLPVCKVNQDSFEHALEVAEAAAETSLEGGNMALAIFIPVLIISLLLGGAYIYITRCRYYSNLRLPLMYSHPYSQITVETEFDNPIYETGETREYEVSI

SEQ ID NO: 77128 - protein, 948 aa, Homo sapiens
  Payload ID: 15394
  Gene Symbol: SEZ6L
  Gene Name: seizure related 6 homolog (mouse)-like
  Uniprot ID: Q9BYH1
  ENSP ID: ENSP00000342661
MPAARPPAAGLRGISLFLALLLGSPAAALERDALPEGDASPLGPYLLPSGAPERGSPGKEHPEERVVTAPPSSSQSAEVLGELVLDGTAPSAHHDIPALSPLLPEEARPKHALPPKKKLPSLKQVNSARKQLRPKATSAATVQRAGSQPASQGLDLLSSSTEKPGPPGDPDPIVASEEASEVPLWLDRKESAVPTTPAPLQISPFTSQPYVAHTLPQRPEPGEPGPDMAQEAPQEDTSPMALMDKGENELTGSASEESQETTTSTIITTTVITTEQAPALCSVSFSNPEGYIDSSDYPLLPLNNFLECTYNVTVYTGYGVELQVKSVNLSDGELLSIRGVDGPTLTVLANQTLLVEGQVIRSPTNTISVYFRTFQDDGLGTFQLHYQAFMLSCNFPRRPDSGDVTVMDLHSGGVAHFHCHLGYELQGAKMLTCINASKPHWSSQEPICSAPCGGAVHNATIGRVLSPSYPENTNGSQFCIWTIEAPEGQKLHLHFERLLLHDKDRMTVHSGQTNKSALLYDSLQTESVPFEGLLSEGNTIRIEFTSDQARAASTFNIRFEAFEKGHCYEPYIQNGNFTTSDPTYNIGTIVEFTCDPGHSLEQGPAIIECINVRDPYWNDTEPLCRAMCGGELSAVAGVVLSPNWPEPYVEGEDCIWKIHVGEEKRIFLDIQFLNLSNSDILTIYDGDEVMPHILGQYLGNSGPQKLYSSTPDLTIQFHSDPAGLIFGKGQGFIMNYIEVSRNDSCSDLPEIQNGWKTTSHTELVRGARITYQCDPGYDIVGSDTLTCQWDLSWSSDPPFCEKIMYCTDPGEVDHSTRLISDPVLLVGTTIQYTCNPGFVLEGSSLLTCYSRETGTPIWTSRLPHCVLAEAAAETSLEGGNMALAIFIPVLIISLLLGGAYIYITRCRYYSNLRLPLMYSHPYSQITVETEFDNPIYETGETREYEVSI

SEQ ID NO: 77129 - protein, 949 aa, Homo sapiens
  Payload ID: 15394
  Gene Symbol: SEZ6L
  Gene Name: seizure related 6 homolog (mouse)-like
  Uniprot ID: Q9BYH1
  ENSP ID: ENSP00000354185
MPAARPPAAGLRGISLFLALLLGSPAAALERDALPEGDASPLGPYLLPSGAPERGSPGKEHPEERVVTAPPSSSQSAEVLGELVLDGTAPSAHHDIPALSPLLPEEARPKHALPPKKKLPSLKQVNSARKQLRPKATSAATVQRAGSQPASQGLDLLSSSTEKPGPPGDPDPIVASEEASEVPLWLDRKESAVPTTPAPLQISPFTSQPYVAHTLPQRPEPGEPGPDMAQEAPQEDTSPMALMDKGENELTGSASEESQETTTSTIITTTVITTEQAPALCSVSFSNPEGYIDSSDYPLLPLNNFLECTYNVTVYTGYGVELQVKSVNLSDGELLSIRGVDGPTLTVLANQTLLVEGQVIRSPTNTISVYFRTFQDDGLGTFQLHYQAFMLSCNFPRRPDSGDVTVMDLHSGGVAHFHCHLGYELQGAKMLTCINASKPHWSSQEPICSAPCGGAVHNATIGRVLSPSYPENTNGSQFCIWTIEAPEGQKLHLHFERLLLHDKDRMTVHSGQTNKSALLYDSLQTESVPFEGLLSEGNTIRIEFTSDQARAASTFNIRFEAFEKGHCYEPYIQNGNFTTSDPTYNIGTIVEFTCDPGHSLEQGPAIIECINVRDPYWNDTEPLCRAMCGGELSAVAGVVLSPNWPEPYVEGEDCIWKIHVGEEKRIFLDIQFLNLSNSDILTIYDGDEVMPHILGQYLGNSGPQKLYSSTPDLTIQFHSDPAGLIFGKGQGFIMNYIEVSRNDSCSDLPEIQNGWKTTSHTELVRGARITYQCDPGYDIVGSDTLTCQWDLSWSSDPPFCEKTEESLACDNPGLPENGYQILYKRLYLPGESLTFMCYEGFELMGEVTIRCILGQPSHWNGPLPVCKVAEAAAETSLEGGNMALAIFIPVLIISLLLGGAYIYITRCRYYSNLRLPLMYSHPYSQITVETEFDNPIYETGETREYEVSI

SEQ ID NO: 77130 - protein, 796 aa, Homo sapiens
  Payload ID: 15394
  Gene Symbol: SEZ6L
  Gene Name: seizure related 6 homolog (mouse)-like
  ENSP ID: ENSP00000384733
MAQEAPQEDTSPMALMDKGENELTGSASEESQETTTSTIITTTVITTEQAPALCSVSFSNPEGYIDSSDYPLLPLNNFLECTYNVTVYTGYGVELQVKSVNLSDGELLSIRGVDGPTLTVLANQTLLVEGQVIRSPTNTISVYFRTFQDDGLGTFQLHYQAFMLSCNFPRRPDSGDVTVMDLHSGGVAHFHCHLGYELQGAKMLTCINASKPHWSSQEPICSAPCGGAVHNATIGRVLSPSYPENTNGSQFCIWTIEAPEGQKLHLHFERLLLHDKDRMTVHSGQTNKSALLYDSLQTESVPFEGLLSEGNTIRIEFTSDQARAASTFNIRFEAFEKGHCYEPYIQNGNFTTSDPTYNIGTIVEFTCDPGHSLEQGPAIIECINVRDPYWNDTEPLCRAMCGGELSAVAGVVLSPNWPEPYVEGEDCIWKIHVGEEKRIFLDIQFLNLSNSDILTIYDGDEVMPHILGQYLGNSGPQKLYSSTPDLTIQFHSDPAGLIFGKGQGFIMNYIEVSRNDSCSDLPEIQNGWKTTSHTELVRGARITYQCDPGYDIVGSDTLTCQWDLSWSSDPPFCEKIMYCTDPGEVDHSTRLISDPVLLVGTTIQYTCNPGFVLEGSSLLTCYSRETGTPIWTSRLPHCVSEESLACDNPGLPENGYQILYKRLYLPGESLTFMCYEGFELMGEVTIRCILGQPSHWNGPLPVCKVNQDSFEHALEAEAAAETSLEGGNMALAIFIPVLIISLLLGGAYIYITRCRYYSNLRLPLMYSHPYSQITVETEFDNPIYETGETREYEVSI

SEQ ID NO: 77131 - protein, 1023 aa, Homo sapiens
  Payload ID: 15394
  Gene Symbol: SEZ6L
  Gene Name: seizure related 6 homolog (mouse)-like
  Uniprot ID: Q9BYH1
  ENSP ID: ENSP00000384772
MPAARPPAAGLRGISLFLALLLGSPAAALERDALPEGDASPLGPYLLPSGAPERGSPGKEHPEERVVTAPPSSSQSAEVLGELVLDGTAPSAHHDIPALSPLLPEEARPKHALPPKKKLPSLKQVNSARKQLRPKATSAATVQRAGSQPASQGLDLLSSSTEKPGPPGDPDPIVASEEASEVPLWLDRKESAVPTTPAPLQISPFTSQPYVAHTLPQRPEPGEPGPDMAQEAPQEDTSPMALMDKGENELTGSASEESQETTTSTIITTTVITTEQAPALCSVSFSNPEGYIDSSDYPLLPLNNFLECTYNVTVYTGYGVELQVKSVNLSDGELLSIRGVDGPTLTVLANQTLLVEGQVIRSPTNTISVYFRTFQDDGLGTFQLHYQAFMLSCNFPRRPDSGDVTVMDLHSGGVAHFHCHLGYELQGAKMLTCINASKPHWSSQEPICSAPCGGAVHNATIGRVLSPSYPENTNGSQFCIWTIEAPEGQKLHLHFERLLLHDKDRMTVHSGQTNKSALLYDSLQTESVPFEGLLSEGNTIRIEFTSDQARAASTFNIRFEAFEKGHCYEPYIQNGNFTTSDPTYNIGTIVEFTCDPGHSLEQGPAIIECINVRDPYWNDTEPLCRAMCGGELSAVAGVVLSPNWPEPYVEGEDCIWKIHVGEEKRIFLDIQFLNLSNSDILTIYDGDEVMPHILGQYLGNSGPQKLYSSTPDLTIQFHSDPAGLIFGKGQGFIMNYIEVSRNDSCSDLPEIQNGWKTTSHTELVRGARITYQCDPGYDIVGSDTLTCQWDLSWSSDPPFCEKIMYCTDPGEVDHSTRLISDPVLLVGTTIQYTCNPGFVLEGSSLLTCYSRETGTPIWTSRLPHCVSEESLACDNPGLPENGYQILYKRLYLPGESLTFMCYEGFELMGEVTIRCILGQPSHWNGPLPVCKVNQDSFEHALEAEAAAETSLEGGNMALAIFIPVLIISLLLGGAYIYITRCRYYSNLRLPLMYSHPYSQITVETEFDNPIYETGETREYEVSI

SEQ ID NO: 77132 - protein, 720 aa, Homo sapiens
  Payload ID: 15394
  Gene Symbol: SEZ6L
  Gene Name: seizure related 6 homolog (mouse)-like
  ENSP ID: ENSP00000384838
MAQEAPQEDTSPMALMDKGENELTGSASEESQETTTSTIITTTVITTEQAPALCSVSFSNPEGYIDSSDYPLLPLNNFLECTYNVTVYTGYGVELQVKSVNLSDGELLSIRGVDGPTLTVLANQTLLVEGQVIRSPTNTISVYFRTFQDDGLGTFQLHYQAFMLSCNFPRRPDSGDVTVMDLHSGGVAHFHCHLGYELQGAKMLTCINASKPHWSSQEPICSAPCGGAVHNATIGRVLSPSYPENTNGSQFCIWTIEAPEGQKLHLHFERLLLHDKDRMTVHSGQTNKSALLYDSLQTESVPFEGLLSEGNTIRIEFTSDQARAASTFNIRFEAFEKGHCYEPYIQNGNFTTSDPTYNIGTIVEFTCDPGHSLEQGPAIIECINVRDPYWNDTEPLCRAMCGGELSAVAGVVLSPNWPEPYVEGEDCIWKIHVGEEKRIFLDIQFLNLSNSDILTIYDGDEVMPHILGQYLGNSGPQKLYSSTPDLTIQFHSDPAGLIFGKGQGFIMNYIEVSRNDSCSDLPEIQNGWKTTSHTELVRGARITYQCDPGYDIVGSDTLTCQWDLSWSSDPPFCEKIMYCTDPGEVDHSTRLISDPVLLVGTTIQYTCNPGFVLEGSSLLTCYSRETGTPIWTSRLPHCVSEAAAETSLEGGNMALAIFIPVLIISLLLGGAYIYITRCRYYSNLRLPLMYSHPYSQITVETEFDNPIYETGETREYEVSI

SEQ ID NO: 77133 - protein, 1011 aa, Homo sapiens
  Payload ID: 15394
  Gene Symbol: SEZ6L
  Gene Name: seizure related 6 homolog (mouse)-like
  ENSP ID: ENSP00000437037
MPAARPPAAGLRGISLFLALLLGSPAAALERDALPEGDASPLGPYLLPSGAPERGSPGKEHPEERVVTAPPSSSQSAEVLGELVLDGTAPSAHHDIPALSPLLPEEARPKHALPPKKKLPSLKQVNSARKQLRPKATSAATVQRAGSQPASQGLDLLSSSTEKPGPPGDPDPIVASEEASEVPLWLDRKESAVPTTPAPLQISPFTSQPYVAHTLPQRPEPGEPGPDMAQEAPQEDTSPMALMDKGENELTGSASEESQETTTSTIITTTVITTEQAPALCSVSFSNPEGYIDSSDYPLLPLNNFLECTYNVTVYTGYGVELQVKSVNLSDGELLSIRGVDGPTLTVLANQTLLVEGQVIRSPTNTISVYFRTFQDDGLGTFQLHYQAFMLSCNFPRRPDSGDVTVMDLHSGGVAHFHCHLGYELQGAKMLTCINASKPHWSSQEPICSAPCGGAVHNATIGRVLSPSYPENTNGSQFCIWTIEAPEGQKLHLHFERLLLHDKDRMTVHSGQTNKSALLYDSLQTESVPFEGLLSEGNTIRIEFTSDQARAASTFNIRFEAFEKGHCYEPYIQNGNFTTSDPTYNIGTIVEFTCDPGHSLEQGPAIIECINVRDPYWNDTEPLCRAMCGGELSAVAGVVLSPNWPEPYVEGEDCIWKIHVGEEKRIFLDIQFLNLSNSDILTIYDGDEVMPHILGQYLGNSGPQKLYSSTPDLTIQFHSDPAGLIFGKGQGFIMNYIEVSRNDSCSDLPEIQNGWKTTSHTELVRGARITYQCDPGYDIVGSDTLTCQWDLSWSSDPPFCEKIMYCTDPGEVDHSTRLISDPVLLVGTTIQYTCNPGFVLEGSSLLTCYSRETGTPIWTSRLPHCVSEESLACDNPGLPENGYQILYKRLYLPGESLTFMCYEGFELMGEVTIRCILGQPSHWNGPLPVCKEAAAETSLEGGNMALAIFIPVLIISLLLGGAYIYITRCRYYSNLRLPLMYSHPYSQITVETEFDNPIYETGETREYEVSI

SEQ ID NO: 77134 - protein, 1013 aa, Homo sapiens
  Payload ID: 15394
  Gene Symbol: SEZ6L
  Gene Name: seizure related 6 homolog (mouse)-like
  Uniprot ID: Q9BYH1
  ENSP ID: ENSP00000485720
MPAARPPAAGLRGISLFLALLLGSPAAALERDALPEGDASPLGPYLLPSGAPERGSPGKEHPEERVVTAPPSSSQSAEVLGELVLDGTAPSAHHDIPALSPLLPEEARPKHALPPKKKLPSLKQVNSARKQLRPKATSAATVQRAGSQPASQGLDLLSSSTEKPGPPGDPDPIVASEEASEVPLWLDRKESAVPTTPAPLQISPFTSQPYVAHTLPQRPEPGEPGPDMAQEAPQEDTSPMALMDKGENELTGSASEESQETTTSTIITTTVITTEQAPALCSVSFSNPEGYIDSSDYPLLPLNNFLECTYNVTVYTGYGVELQVKSVNLSDGELLSIRGVDGPTLTVLANQTLLVEGQVIRSPTNTISVYFRTFQDDGLGTFQLHYQAFMLSCNFPRRPDSGDVTVMDLHSGGVAHFHCHLGYELQGAKMLTCINASKPHWSSQEPICSAPCGGAVHNATIGRVLSPSYPENTNGSQFCIWTIEAPEGQKLHLHFERLLLHDKDRMTVHSGQTNKSALLYDSLQTESVPFEGLLSEGNTIRIEFTSDQARAASTFNIRFEAFEKGHCYEPYIQNGNFTTSDPTYNIGTIVEFTCDPGHSLEQGPAIIECINVRDPYWNDTEPLCRAMCGGELSAVAGVVLSPNWPEPYVEGEDCIWKIHVGEEKRIFLDIQFLNLSNSDILTIYDGDEVMPHILGQYLGNSGPQKLYSSTPDLTIQFHSDPAGLIFGKGQGFIMNYIEVSRNDSCSDLPEIQNGWKTTSHTELVRGARITYQCDPGYDIVGSDTLTCQWDLSWSSDPPFCEKIMYCTDPGEVDHSTRLISDPVLLVGTTIQYTCNPGFVLEGSSLLTCYSRETGTPIWTSRLPHCVSEESLACDNPGLPENGYQILYKRLYLPGESLTFMCYEGFELMGEVTIRCILGQPSHWNGPLPVCKVAEAAAETSLEGGNMALAIFIPVLIISLLLGGAYIYITRCRYYSNLRLPLMYSHPYSQITVETEFDNPIYETGETREYEVSI

SEQ ID NO: 77135 - protein, 853 aa, Homo sapiens
  Payload ID: 15395
  Gene Symbol: SEZ6L2
  Gene Name: seizure related 6 homolog (mouse)-like 2
  Uniprot ID: Q6UXD5
  ENSP ID: ENSP00000310206
MGTPRAQHPPPPQLLFLILLSCPWIQGLPLKEEEILPEPGSETPTVASEALAELLHGALLRRGPEMGYLPGPPLGPEGGEEETTTTIITTTTVTTTVTSPVLCNNNISEGEGYVESPDLGSPVSRTLGLLDCTYSIHVYPGYGIEIQVQTLNLSQEEELLVLAGGGSPGLAPRLLANSSMLGEGQVLRSPTNRLLLHFQSPRVPRGGGFRIHYQAYLLSCGFPPRPAHGDVSVTDLHPGGTATFHCDSGYQLQGEETLICLNGTRPSWNGETPSCMASCGGTIHNATLGRIVSPEPGGAVGPNLTCRWVIEAAEGRRLHLHFERVSLDEDNDRLMVRSGGSPLSPVIYDSDMDDVPERGLISDAQSLYVELLSETPANPLLLSLRFEAFEEDRCFAPFLAHGNVTTTDPEYRPGALATFSCLPGYALEPPGPPNAIECVDPTEPHWNDTEPACKAMCGGELSEPAGVVLSPDWPQSYSPGQDCVWGVHVQEEKRILLQVEILNVREGDMLTLFDGDGPSARVLAQLRGPQPRRRLLSSGPDLTLQFQAPPGPPNPGLGQGFVLHFKEVPRNDTCPELPPPEWGWRTASHGDLIRGTVLTYQCEPGYELLGSDILTCQWDLSWSAAPPACQKIMTCADPGEIANGHRTASDAGFPVGSHVQYRCLPGYSLEGAAMLTCYSRDTGTPKWSDRVPKCALKYEPCLNPGVPENGYQTLYKHHYQAGESLRFFCYEGFELIGEVTITCVPGHPSQWTSQPPLCKVAYEELLDNRKLEVTQTTDPSRQLEGGNLALAILLPLGLVIVLGSGVYIYYTKLQGKSLFGFSGSHSYSPITVESDFSNPLYEAGDTREYEVSI

SEQ ID NO: 77136 - protein, 910 aa, Homo sapiens
  Payload ID: 15395
  Gene Symbol: SEZ6L2
  Gene Name: seizure related 6 homolog (mouse)-like 2
  Uniprot ID: Q6UXD5
  ENSP ID: ENSP00000312550
MGTPRAQHPPPPQLLFLILLSCPWIQGLPLKEEEILPEPGSETPTVASEALAELLHGALLRRGPEMGYLPGSDRDPTLATPPAGQTLAVPSLPRATEPGTGPLTTAVTPNGVRGAGPTAPELLTPPPGTTAPPPPSPASPGPPLGPEGGEEETTTTIITTTTVTTTVTSPVLCNNNISEGEGYVESPDLGSPVSRTLGLLDCTYSIHVYPGYGIEIQVQTLNLSQEEELLVLAGGGSPGLAPRLLANSSMLGEGQVLRSPTNRLLLHFQSPRVPRGGGFRIHYQAYLLSCGFPPRPAHGDVSVTDLHPGGTATFHCDSGYQLQGEETLICLNGTRPSWNGETPSCMASCGGTIHNATLGRIVSPEPGGAVGPNLTCRWVIEAAEGRRLHLHFERVSLDEDNDRLMVRSGGSPLSPVIYDSDMDDVPERGLISDAQSLYVELLSETPANPLLLSLRFEAFEEDRCFAPFLAHGNVTTTDPEYRPGALATFSCLPGYALEPPGPPNAIECVDPTEPHWNDTEPACKAMCGGELSEPAGVVLSPDWPQSYSPGQDCVWGVHVQEEKRILLQVEILNVREGDMLTLFDGDGPSARVLAQLRGPQPRRRLLSSGPDLTLQFQAPPGPPNPGLGQGFVLHFKEVPRNDTCPELPPPEWGWRTASHGDLIRGTVLTYQCEPGYELLGSDILTCQWDLSWSAAPPACQKIMTCADPGEIANGHRTASDAGFPVGSHVQYRCLPGYSLEGAAMLTCYSRDTGTPKWSDRVPKCALKYEPCLNPGVPENGYQTLYKHHYQAGESLRFFCYEGFELIGEVTITCVPGHPSQWTSQPPLCKVTQTTDPSRQLEGGNLALAILLPLGLVIVLGSGVYIYYTKLQGKSLFGFSGSHSYSPITVESDFSNPLYEAGDTREYEVSI

SEQ ID NO: 77137 - protein, 809 aa, Homo sapiens
  Payload ID: 15395
  Gene Symbol: SEZ6L2
  Gene Name: seizure related 6 homolog (mouse)-like 2
  Uniprot ID: Q6UXD5
  ENSP ID: ENSP00000319215
MGTPRAQHPPPPQLLFLILLSCPWIQGLPLKEEEILPEPGSETPTVASEALAELLHGALLRRGPEMGYLPGSDRDPTLATPPAGQTLAVPSLPRATEPGTGPLTTAVTPNGVRGAGPTAPELLTPPPGTTAPPPPSPASPGPPLGPEGGEEETTTTIITTTTVTTTVTSPAYLLSCGFPPRPAHGDVSVTDLHPGGTATFHCDSGYQLQGEETLICLNGTRPSWNGETPSCMASCGGTIHNATLGRIVSPEPGGAVGPNLTCRWVIEAAEGRRLHLHFERVSLDEDNDRLMVRSGGSPLSPVIYDSDMDDVPERGLISDAQSLYVELLSETPANPLLLSLRFEAFEEDRCFAPFLAHGNVTTTDPEYRPGALATFSCLPGYALEPPGPPNAIECVDPTEPHWNDTEPACKAMCGGELSEPAGVVLSPDWPQSYSPGQDCVWGVHVQEEKRILLQVEILNVREGDMLTLFDGDGPSARVLAQLRGPQPRRRLLSSGPDLTLQFQAPPGPPNPGLGQGFVLHFKEVPRNDTCPELPPPEWGWRTASHGDLIRGTVLTYQCEPGYELLGSDILTCQWDLSWSAAPPACQKIMTCADPGEIANGHRTASDAGFPVGSHVQYRCLPGYSLEGAAMLTCYSRDTGTPKWSDRVPKCALKYEPCLNPGVPENGYQTLYKHHYQAGESLRFFCYEGFELIGEVTITCVPGHPSQWTSQPPLCKVAYEELLDNRKLEVTQTTDPSRQLEGGNLALAILLPLGLVIVLGSGVYIYYTKLQGKSLFGFSGSHSYSPITVESDFSNPLYEAGDTREYEVSI

SEQ ID NO: 77138 - protein, 879 aa, Homo sapiens
  Payload ID: 15395
  Gene Symbol: SEZ6L2
  Gene Name: seizure related 6 homolog (mouse)-like 2
  Uniprot ID: Q6UXD5
  ENSP ID: ENSP00000439412
MGTPRAQHPPPPQLLFLILLSCPWIQGSDRDPTLATPPAGQTLAVPSLPRATEPGTGPLTTAVTPNGVRGAGPTAPELLTPPPGTTAPPPPSPASPGPPLGPEGGEEETTTTIITTTTVTTTVTSPVLCNNNISEGEGYVESPDLGSPVSRTLGLLDCTYSIHVYPGYGIEIQVQTLNLSQEEELLVLAGGGSPGLAPRLLANSSMLGEGQVLRSPTNRLLLHFQSPRVPRGGGFRIHYQAYLLSCGFPPRPAHGDVSVTDLHPGGTATFHCDSGYQLQGEETLICLNGTRPSWNGETPSCMASCGGTIHNATLGRIVSPEPGGAVGPNLTCRWVIEAAEGRRLHLHFERVSLDEDNDRLMVRSGGSPLSPVIYDSDMDDVPERGLISDAQSLYVELLSETPANPLLLSLRFEAFEEDRCFAPFLAHGNVTTTDPEYRPGALATFSCLPGYALEPPGPPNAIECVDPTEPHWNDTEPACKAMCGGELSEPAGVVLSPDWPQSYSPGQDCVWGVHVQEEKRILLQVEILNVREGDMLTLFDGDGPSARVLAQLRGPQPRRRLLSSGPDLTLQFQAPPGPPNPGLGQGFVLHFKEVPRNDTCPELPPPEWGWRTASHGDLIRGTVLTYQCEPGYELLGSDILTCQWDLSWSAAPPACQKIMTCADPGEIANGHRTASDAGFPVGSHVQYRCLPGYSLEGAAMLTCYSRDTGTPKWSDRVPKCALKYEPCLNPGVPENGYQTLYKHHYQAGESLRFFCYEGFELIGEVTITCVPGHPSQWTSQPPLCKVAYEELLDNRKLEVTQTTDPSRQLEGGNLALAILLPLGLVIVLGSGVYIYYTKLQGKSLFGFSGSHSYSPITVESDFSNPLYEAGDTREYEVSI

SEQ ID NO: 77139 - protein, 303 aa, Homo sapiens
  Payload ID: 15395
  Gene Symbol: SEZ6L2
  Gene Name: seizure related 6 homolog (mouse)-like 2
  ENSP ID: ENSP00000454654
  MOD_RES (1)..(1): Any amino acid
XCLNGTRPSWNGETPSCMASCGGTIHNATLGRIVSPEPGGAVGPNLTCRWVIEAAEGRRLHLHFERVSLDEDNDRLMVRSGGSPLSPVIYDSDMDDVPERGLISDAQSLYVELLSETPANPLLLSLRFEAMCGGELSEPAGVVLSPDWPQSYSPGQDCVWGVHVQEEKRILLQVEILNVREGDMLTLFDGDGPSARVLAQLRGPQPRRRLLSSGPDLTLQFQAPPGPPNPGLGQGFVLHFKEVPRNDTCPELPPPEWGWRTASHGDLIRGTVLTYQCEPGYELLGSDILTCQWDLSWSAAPPA

SEQ ID NO: 77140 - protein, 80 aa, Homo sapiens
  Payload ID: 15395
  Gene Symbol: SEZ6L2
  Gene Name: seizure related 6 homolog (mouse)-like 2
  ENSP ID: ENSP00000458490
MGTPRAQHPPPPQLLFLILLSCPWIQGSDRDPTLATPPAGQTLAVPSLPRATEPGTGPLTTAVTPNGVRGAGPTAPELLT

SEQ ID NO: 77141 - protein, 923 aa, Homo sapiens
  Payload ID: 15395
  Gene Symbol: SEZ6L2
  Gene Name: seizure related 6 homolog (mouse)-like 2
  ENSP ID: ENSP00000481917
MGTPRAQHPPPPQLLFLILLSCPWIQGLPLKEEEILPEPGSETPTVASEALAELLHGALLRRGPEMGYLPGSDRDPTLATPPAGQTLAVPSLPRATEPGTGPLTTAVTPNGVRGAGPTAPELLTPPPGTTAPPPPSPASPGPPLGPEGGEEETTTTIITTTTVTTTVTSPVLCNNNISEGEGYVESPDLGSPVSRTLGLLDCTYSIHVYPGYGIEIQVQTLNLSQEEELLVLAGGGSPGLAPRLLANSSMLGEGQVLRSPTNRLLLHFQSPRVPRGGGFRIHYQAYLLSCGFPPRPAHGDVSVTDLHPGGTATFHCDSGYQLQGEETLICLNGTRPSWNGETPSCMASCGGTIHNATLGRIVSPEPGGAVGPNLTCRWVIEAAEGRRLHLHFERVSLDEDNDRLMVRSGGSPLSPVIYDSDMDDVPERGLISDAQSLYVELLSETPANPLLLSLRFEAFEEDRCFAPFLAHGNVTTTDPEYRPGALATFSCLPGYALEPPGPPNAIECVDPTEPHWNDTEPACKAMCGGELSEPAGVVLSPDWPQSYSPGQDCVWGVHVQEEKRILLQVEILNVREGDMLTLFDGDGPSARVLAQLRGPQPRRRLLSSGPDLTLQFQAPPGPPNPGLGQGFVLHFKEVPRNDTCPELPPPEWGWRTASHGDLIRGTVLTYQCEPGYELLGSDILTCQWDLSWSAAPPACQKIMTCADPGEIANGHRTASDAGFPVGSHVQYRCLPGYSLEGAAMLTCYSRDTGTPKWSDRVPKCALKYEPCLNPGVPENGYQTLYKHHYQAGESLRFFCYEGFELIGEVTITCVPGHPSQWTSQPPLCKVAYEELLDNRKLEVTQTTDPSRQLEGGNLALAILLPLGLVIVLGSGVYIYYTKLQGKSLFGFSGSHSYSPITVESDFSNPLYEAGDTREYEVSI

SEQ ID NO: 77142 - protein, 178 aa, Homo sapiens
  Payload ID: 15396
  Gene Symbol: SZT2
  Gene Name: seizure threshold 2 homolog (mouse)
  Uniprot ID: Q5T011
  ENSP ID: ENSP00000361528
MASERPEPEVEEAGQVFLLMKKDYRISRNVRLAWFLSHLHQTVQATPQEMLSEQELEVLSVLPPGWQPDEPVVPRPFLLVPSTRVTFLAWQYRFVIELDLSPSTGIVDDSTGEILFDEVFHALSRCLGGLLRPFRVPGSCIDFQPEIYVTIQAYSSIIGLQSHQRQGFTMLARLPSNF

SEQ ID NO: 77143 - protein, 168 aa, Homo sapiens
  Payload ID: 15396
  Gene Symbol: SZT2
  Gene Name: seizure threshold 2 homolog (mouse)
  ENSP ID: ENSP00000386070
MASERPEPEVEEAGQVFLLMKKDYRISRNVRLAWFLSHLHQTVQATPQEMLLQSEQELEVLSVLPPGWQPDEPVVPRPFLLVPSTRVTFLAWQYRFVIELDLSPSTGIVDDSTGEILFDEVFHALSRCLGGLLRPFRVPGSCIDFQPEIYVTIQAYSSIIGLQSHQMI

SEQ ID NO: 77144 - protein, 3375 aa, Homo sapiens
  Payload ID: 15396
  Gene Symbol: SZT2
  Gene Name: seizure threshold 2 homolog (mouse)
  Uniprot ID: Q5T011
  ENSP ID: ENSP00000457168
MASERPEPEVEEAGQVFLLMKKDYRISRNVRLAWFLSHLHQTVQATPQEMLLQSEQELEVLSVLPPGWQPDEPVVPRPFLLVPSTRVTFLAWQYRFVIELDLSPSTGIVDDSTGEILFDEVFHALSRCLGGLLRPFRVPGSCIDFQPEIYVTIQAYSSIIGLQSHQVLVQGCLLDPSQREVFLQQIYEQLCLFEDKVATMLQQQYDPQSQAEDQSPDSGDLLGRKVGVSMVTADLGLVSMIRQGILALQLLPSNSSAGIIVITDGVTSVPDVAVCETLLNQLRSGTVACSFVQVGGVYSYDCSFGHVPNVELMKFIAMATFGSYLSTCPEPEPGNLGLTVYHRAFLLYSFLRSGEALNPEYYCGSQHRLFNEHLVSASSNPALALRRKKHTEKEVPADLVSTVSVRLREGYSVREVTLAKGGSQLEVKLVLLWKHNMRIEYVAMAPWPLEPEGPRVTRVEVTMEGGYDILHDVSCALRQPIRSLYRTHVIRRFWNTLQSINQTDQMLAHLQSFSSVPEHFTLPDSTKSGVPLFYIPPGSTTPVLSLQPSGSDSSHAQFAAYWKPVLSMDANSWQRWLHMHRLVLILEHDTPIPKHLHTPGSNGRYSTIQCRISHSSLTSLLRDWSSFVLVEGYSYVKLLSSAPDQPPNSFYMVRIISKAPCMVLRLGFPIGTPAPARHKIVSGLREEILRLRFPHRVQSKEPTPKVKRKGLGGAGGGSSPSKSPPVLGPQQALSDRPCLVVLHKPLDKLLIRYEKLPLDYRAPFLLTLEPPGPLPLVSGRSASSSLASLSRYLYHQRWLWSVPSGLAPALPLSAIAQLLSILTEVRLSEGFHFACSGEGIINMVLELPIQNEPPGQAAAEEKHTCVVQYILFPPHSTSTKDSFSTDDDNDVEVEALEGDSELNLVTEVWVEPQYGRVGPGPGIWKHLQDLTYSEIPQALHPRDAACIGSMLSFEYLIQLCQSKEWGPLPPEPRVSDGLDQGGDTCVHEIPFHFDLMGLLPQCQQLQMFFLLLARGAEGPLLGVHGIPKEQAVGSTQATGDSAFTSLSVGLPETLKPLISAQPPQWRCYARLVNPQHVFLTFLPATFSDVQRLAACGLEGPPQEETKPKFGDWSGAPSLKDLGGTGIKATKSHVPVLSVTLASDNAQNQGELSPPFRRDLQAYAGRQASQTESADGPRTRCPVYIYSCSLEALREQMVGMQPPQAPRDLIFRTQFLDHPSPSSAWMEPRYKEAANHCALLQEHAQRCYVRGLFRSLQQAQSVTSQDLLTAVDACEELLQEIDITPFLLALCGHTWGLPHAPPSPGPLSPGPFSSSMEEGAEPRERAILASESSIETEDLSEPEFQSTRVPGIPDPGPEISLTDVCQLRGEAHGALHSVIQEKFLEISRLHFRTVPSNPHYFFYCPPSSRREDEGPRDTVDRKISDLEFSEAELMGEEGDTSACCVVTESDPELEVEYRESRESDLGPAGLDSASLSDVDTVNPDEDSFSILGGDSPTGPESFLHDLPPLFLHLTCSVRLRGQHSSVPVCSLPTCLGQVLSSLEGPPVGGRVPLRDLSVTLDVFMLTLPLEVELPTASDPQHHRSTSESSASFPRSPGQPSSLRSDDGLGPPLPPPEEERHPGLSNLATPHRLAIETTMNEIRWLLEDEMVGALRRGGIPQSPALHRAAAHIHSSPGRSTCLRQTLPLSFVFGPERSLTQFKEEFRRLHLPGHVLLEDPDSGFFFVAAGQQPGGSHGEPSSAAWAWHSHEDRAEGIEGETLTASPQAPGSPEDSEGVPLISLPRVPQGGSQPGPSRGLSLMSSQGSVDSDHLGYDGGSSGSDSEGPNDTLGEKAPFTLRTPPGPAPPQPSLSGLPGPCLPDFWLIVRVLQDRVEVYAHARSLIREDGGPGTECRHLQQLLVRRVGEICREVNQRLLLQDLHDSHVCNSLLVAESEEDLWRSETPFHSRQRAPLPSDDYAADESCAPRGYLAATMQFVPGHFSCDVVWGTVIRVHSRLKMGPSMGVSRAIQALRSVLNAFSVVNRKNMFVYQERATKAVYYLRLLETSCSDRPWKGDALPPSLALSRSQEPIYSEEASGPRSPLDMVSSRSSDAARPVGQVDRHIQLLVHGVGQAGPEITDELVRVLCRRLDEATLDVITVMLVRNCKLTPADVEFIQPPGSLPSEVLHLALPTSCRPWLPALAWYLRQNLLIFLHSPKYTDSNSRNHFQHPLPPQGGLPDLDIYLYNKPGGQGTGGKGVACITLAFVDEGGAPLSLALWPPSSPGPPDPLREEEFEQLTQVIRCPVVVDSSSAQNGAPRLRLDVWEKGNISIVQLEEKLRGAARQALADAIIELQLLPASLCTEDTPTGSLRNGSLETKSSAGRASTFPPAPVPGEPVTPPSKAGRRSFWDMLSKTECGDLGSPKTTDDIVLDRPEDTRGRRRHKTESVRTPGGAERAPGSDSGAQRQKRRTTQLEEGEVGTLHPVFARVAQRWMEFMVQIGCASVSRSSAHMVSRFLLPSILSEFTALVTSMAGDTSVRIFEQHLGSEPEIFGPCSPGQLGPSPRPAAERHLLLLGRNFLQWRRPTQQAAKAMQRFEPGGDGSSGRNAPRQRLLLLEVVDKKLQLLTYNWAPDLGAALGRALVRLVQWQNARAHLIFCLLSQKLGLFHHYGQLDFPVRDEKEPNPFLLPTMEVETLIRSASPPLSREQGRLSGSSRGGGPLPLDTFPFDEALRDITAARPSSVLGPVPRPPDPVTYHGQQFLEIKMAERRELERQMKMENLFVTWQQRSTPATMPISAGELETLKQSSRLVHYCATAMLFDPAAWLHGPPETSGPPDGQRRHRPESGSGSREAPTSCESLDVSPPGAREEPWLKELSLAFLQQYVQYLQSIGFVLVPLRPPSPARSTSRPRAMAILGTEGRGSFSCPKTKTDGSPKSTSSPVTTYHLQRALPGGIILMELAFQGCYFCVKQFALECSRIPMGQAVNSQLSMLFTEECDKVRDLMHVHSFSYDFHLRLVHQHVLGAHLVLRHGYHLTTFLRHFLAHHPDGPHFGRNHIYQGTLELPTPLIAAHQLYNYVADHASSYHMKPLRMARPGGPEHNEYALVSAWHSSGSYLDSEGLRHQDDFDVSLLVCHCAAPFEEQGEAERHVLRLQFFVVLTSQRELFPRLTADMRRFRKPPRLPPEPEAPGSSAGSPGEASGLILAPGPAPLFPPLAAEVGMARARLAQLVRLAGGHCRRDTLWKRLFLLEPPGPDRLRLGGRLALAELEELLEAVHAKSIGDIDPQLDCFLSMTVSWYQSLIKVLLSRFPQSCRHFQSPDLGTQYLVVLNQKFTDCFVLVFLDSHLGKTSLTVVFREPFPVQPQDSESPPAQLVSTYHHLESVINTACFTLWTRLL

SEQ ID NO: 77145 - protein, 3432 aa, Homo sapiens
  Payload ID: 15396
  Gene Symbol: SZT2
  Gene Name: seizure threshold 2 homolog (mouse)
  ENSP ID: ENSP00000489255
MASERPEPEVEEAGQVFLLMKKDYRISRNVRLAWFLSHLHQTVQATPQEMLLQSEQELEVLSVLPPGWQPDEPVVPRPFLLVPSTRVTFLAWQYRFVIELDLSPSTGIVDDSTGEILFDEVFHALSRCLGGLLRPFRVPGSCIDFQPEIYVTIQAYSSIIGLQSHQVLVQGCLLDPSQREVFLQQIYEQLCLFEDKVATMLQQQYDPQSQAEDQSPDSGDLLGRKVGVSMVTADLGLVSMIRQGILALQLLPSNSSAGIIVITDGVTSVPDVAVCETLLNQLRSGTVACSFVQVGGVYSYDCSFGHVPNVELMKFIAMATFGSYLSTCPEPEPGNLGLTVYHRAFLLYSFLRSGEALNPEYYCGSQHRLFNEHLVSASSNPALALRRKKHTEKEVPADLVSTVSVRLREGYSVREVTLAKGGSQLEVKLVLLWKHNMRIEYVAMAPWPLEPEGPRVTRVEVTMEGGYDILHDVSCALRQPIRSLYRTHVIRRFWNTLQSINQTDQMLAHLQSFSSVPEHFTLPDSTKSGVPLFYIPPGSTTPVLSLQPSGSDSSHAQFAAYWKPVLSMDANSWQRWLHMHRLVLILEHDTPIPKHLHTPGSNGRYSTIQCRISHSSLTSLLRDWSSFVLVEGYSYVKLLSSAPDQPPNSFYMVRIISKAPCMVLRLGFPIGTPAPARHKIVSGLREEILRLRFPHRVQSKEPTPKVKRKGLGGAGGGSSPSKSPPVLGPQQALSDRPCLVVLHKPLDKLLIRYEKLPLDYRAPFLLTLEPPGPLPLVSGRSASSSLASLSRYLYHQRWLWSVPSGLAPALPLSAIAQLLSILTEVRLSEGFHFACSGEGIINMVLELPIQNEPPGQAAAEEKHTCVVQYILFPPHSTSTKDSFSTDDDNDVEVEALEGDSELNLVTEVWVEPQYGRVGPGPGIWKHLQDLTYSEIPQALHPRDAACIGSMLSFEYLIQLCQSKEWGPLPPEPRVSDGLDQGGDTCVHEIPFHFDLMGLLPQCQQLQMFFLLLAREPEGVPFAEGSCPANDMVLCLLHSCLGQELSDREIPLTPVDQAAFLSEVLRRTCHVPGAEGPLLGVHGIPKEQAVGSTQATGDSAFTSLSVGLPETLKPLISAQPPQWRCYARLVNPQHVFLTFLPATFSDVQRLAACGLEGPPQEETKPKFGDWSGAPSLKDLGGTGIKATKSHVPVLSVTLASDNAQNQGELSPPFRRDLQAYAGRQASQTESADGPRTRCPVYIYSCSLEALREQMVGMQPPQAPRDLIFRTQFLDHPSPSSAWMEPRYKEAANHCALLQEHAQRCYVRGLFRSLQQAQSVTSQDLLTAVDACEELLQEIDITPFLLALCGHTWGLPHAPPSPGPLSPGPFSSSMEEGAEPRERAILASESSIETEDLSEPEFQSTRVPGIPDPGPEISLTDVCQLRGEAHGALHSVIQEKFLEISRLHFRTVPSNPHYFFYCPPSSRREDEGPRDTVDRKISDLEFSEAELMGEEGDTSACCVVTESDPELEVEYRESRESDLGPAGLDSASLSDVDTVNPDEDSFSILGGDSPTGPESFLHDLPPLFLHLTCSVRLRGQHSSVPVCSLPTCLGQVLSSLEGPPVGGRVPLRDLSVTLDVFMLTLPLEVELPTASDPQHHRSTSESSASFPRSPGQPSSLRSDDGLGPPLPPPEEERHPGLSNLATPHRLAIETTMNEIRWLLEDEMVGALRRGGIPQSPALHRAAAHIHSSPGRSTCLRQTLPLSFVFGPERSLTQFKEEFRRLHLPGHVLLEDPDSGFFFVAAGQQPGGSHGEPSSAAWAWHSHEDRAEGIEGETLTASPQAPGSPEDSEGVPLISLPRVPQGGSQPGPSRGLSLMSSQGSVDSDHLGYDGGSSGSDSEGPNDTLGEKAPFTLRTPPGPAPPQPSLSGLPGPCLPDFWLIVRVLQDRVEVYAHARSLIREDGGPGTECRHLQQLLVRRVGEICREVNQRLLLQDLHDSHVCNSLLVAESEEDLWRSETPFHSRQRAPLPSDDYAADESCAPRGYLAATMQFVPGHFSCDVVWGTVIRVHSRLKMGPSMGVSRAIQALRSVLNAFSVVNRKNMFVYQERATKAVYYLRLLETSCSDRPWKGDALPPSLALSRSQEPIYSEEASGPRSPLDMVSSRSSDAARPVGQVDRHIQLLVHGVGQAGPEITDELVRVLCRRLDEATLDVITVMLVRNCKLTPADVEFIQPPGSLPSEVLHLALPTSCRPWLPALAWYLRQNLLIFLHSPKYTDSNSRNHFQHPLPPQGGLPDLDIYLYNKPGGQGTGGKGVACITLAFVDEGGAPLSLALWPPSSPGPPDPLREEEFEQLTQVIRCPVVVDSSSAQNGAPRLRLDVWEKGNISIVQLEEKLRGAARQALADAIIELQLLPASLCTEDTPTGSLRNGSLETKSSAGRASTFPPAPVPGEPVTPPSKAGRRSFWDMLSKTECGDLGSPKTTDDIVLDRPEDTRGRRRHKTESVRTPGGAERAPGSDSGAQRQKRRTTQLEEGEVGTLHPVFARVAQRWMEFMVQIGCASVSRSSAHMVSRFLLPSILSEFTALVTSMAGDTSVRIFEQHLGSEPEIFGPCSPGQLGPSPRPAAERHLLLLGRNFLQWRRPTQQAAKAMQRFEPGGDGSSGRNAPRQRLLLLEVVDKKLQLLTYNWAPDLGAALGRALVRLVQWQNARAHLIFCLLSQKLGLFHHYGQLDFPVRDEKEPNPFLLPTMEVETLIRSASPPLSREQGRLSGSSRGGGPLPLDTFPFDEALRDITAARPSSVLGPVPRPPDPVTYHGQQFLEIKMAERRELERQMKMENLFVTWQQRSTPATMPISAGELETLKQSSRLVHYCATAMLFDPAAWLHGPPETSGPPDGQRRHRPESGSGSREAPTSCESLDVSPPGAREEPWLKELSLAFLQQYVQYLQSIGFVLVPLRPPSPARSTSRPRAMAILGTEGRGSFSCPKTKTDGSPKSTSSPVTTYHLQRALPGGIILMELAFQGCYFCVKQFALECSRIPMGQAVNSQLSMLFTEECDKVRDLMHVHSFSYDFHLRLVHQHVLGAHLVLRHGYHLTTFLRHFLAHHPDGPHFGRNHIYQGTLELPTPLIAAHQLYNYVADHASSYHMKPLRMARPGGPEHNEYALVSAWHSSGSYLDSEGLRHQDDFDVSLLVCHCAAPFEEQGEAERHVLRLQFFVVLTSQRELFPRLTADMRRFRKPPRLPPEPEAPGSSAGSPGEASGLILAPGPAPLFPPLAAEVGMARARLAQLVRLAGGHCRRDTLWKRLFLLEPPGPDRLRLGGRLALAELEELLEAVHAKSIGDIDPQLDCFLSMTVSWYQSLIKVLLSRFPQSCRHFQSPDLGTQYLVVLNQKFTDCFVLVFLDSHLGKTSLTVVFREPFPVQPQDSESPPAQLVSTYHHLESVINTACFTLWTRLL

SEQ ID NO: 77146 - protein, 794 aa, Homo sapiens
  Payload ID: 15397
  Gene Symbol: SEL1L
  Gene Name: sel-1 suppressor of lin-12-like (C. elegans)
  Uniprot ID: Q9UBV2
  ENSP ID: ENSP00000337053
MRVRIGLTLLLCAVLLSLASASSDEEGSQDESLDSKTTLTSDESVKDHTTAGRVVAGQIFLDSEESELESSIQEEEDSLKSQEGESVTEDISFLESPNPENKDYEEPKKVRKPALTAIEGTAHGEPCHFPFLFLDKEYDECTSDGREDGRLWCATTYDYKADEKWGFCETEEEAAKRRQMQEAEMMYQTGMKILNGSNKKSQKREAYRYLQKAASMNHTKALERVSYALLFGDYLPQNIQAAREMFEKLTEEGSPKGQTALGFLYASGLGVNSSQAKALVYYTFGALGGNLIAHMVLGYRYWAGIGVLQSCESALTHYRLVANHVASDISLTGGSVVQRIRLPDEVENPGMNSGMLEEDLIQYYQFLAEKGDVQAQVGLGQLHLHGGRGVEQNHQRAFDYFNLAANAGNSHAMAFLGKMYSEGSDIVPQSNETALHYFKKAADMGNPVGQSGLGMAYLYGRGVQVNYDLALKYFQKAAEQGWVDGQLQLGSMYYNGIGVKRDYKQALKYFNLASQGGHILAFYNLAQMHASGTGVMRSCHTAVELFKNVCERGRWSERLMTAYNSYKDGDYNAAVIQYLLLAEQGYEVAQSNAAFILDQREASIVGENETYPRALLHWNRAASQGYTVARIKLGDYHFYGFGTDVDYETAFIHYRLASEQQHSAQAMFNLGYMHEKGLGIKQDIHLAKRFYDMAAEASPDAQVPVFLALCKLGVVYFLQYIRETNIRDMFTQLDMDQLLGPEWDLYLMTIIALLLGTVIAYRQRQHQDMPAPRPPGPRPAPPQQEGPPEQQPPQ

SEQ ID NO: 77147 - protein, 301 aa, Homo sapiens
  Payload ID: 15397
  Gene Symbol: SEL1L
  Gene Name: sel-1 suppressor of lin-12-like (C. elegans)
  Uniprot ID: Q9UBV2
  ENSP ID: ENSP00000450709
MRVRIGLTLLLCAVLLSLASASSDEEGSQDESLDSKTTLTSDESVKDHTTAGRVVAGQIFLDSEESELESSIQEEEDSLKSQEGESVTEDISFLESPNPENKDYEEPKKVRKPALTAIEGTAHGEPCHFPFLFLDKEYDECTSDGREDGRLWCATTYDYKADEKWGFCETEEEAAKRRQMQEAEMMYQTGMKILNGSNKKSQKREAYRYLQKAASMNHTKALERVSYALLFGDYLPQNIQAAREMFEKLTEEGSPKGQTALGFLYASGLGVNSSQAKALVYYTFGALGGNLIAHMVLVSRL

SEQ ID NO: 77148 - protein, 163 aa, Homo sapiens
  Payload ID: 15397
  Gene Symbol: SEL1L
  Gene Name: sel-1 suppressor of lin-12-like (C. elegans)
  ENSP ID: ENSP00000451144
MRVRIGLTLLLCAVLLSLASASSDEEGSQDESLDSKTTLTSDESVKDHTTAGRVVAGQIFLDSEESELESSIQEEEDSLKSQEGESVTEDISFLESPNPENKDYEEPKKVRKPDKEYDECTSDGREDGRLWCATTYDYKADEKWGFCETEEEAAKRRQMQEAE

SEQ ID NO: 77149 - protein, 688 aa, Homo sapiens
  Payload ID: 15398
  Gene Symbol: SEL1L2
  Gene Name: sel-1 suppressor of lin-12-like 2 (C. elegans)
  Uniprot ID: Q5TEA6
  ENSP ID: ENSP00000284951
MKPLSLLIEILIILGVTIKTIKAEEHNKRQKERNVTTQVSVNEIKQYLSHILEQRTSSNVINKRENLLEKKKNQRKIRIKGIQNKDILKRNKNHLQKQAEKNFTDEGDQLFKMGIKVLQQSKSQKQKEEAYLLFAKAADMGNLKAMEKMADALLFGNFGVQNITAAIQLYESLAKEGSCKAQNALGFLSSYGIGMEYDQAKALIYYTFGSAGGNMMSQMILGYRYLSGINVLQNCEVALSYYKKVADYIADTFEKSEGVPVEKVRLTERPENLSSNSEILDWDIYQYYKFLAERGDVQIQVSLGQLHLIGRKGLDQDYYKALHYFLKAAKAGSANAMAFIGKMYLEGNAAVPQNNATAFKYFSMAASKGNAIGLHGLGLLYFHGKGVPLNYAEALKYFQKAAEKGWPDAQFQLGFMYYSGSGIWKDYKLAFKYFYLASQSGQPLAIYYLAKMYATGTGVVRSCRTAVELYKGVCELGHWAEKFLTAYFAYKDGDIDSSLVQYALLAEMGYEVAQSNSAFILESKKANILEKEKMYPMALLLWNRAAIQGNAFARVKIGDYHYYGYGTKKDYQTAATHYSIAANKYHNAQAMFNLAYMYEHGLGITKDIHLARRLYDMAAQTSPDAHIPVLFAVMKLETTHLLRDILFFNFTTRWNWLKLDNTIGPHWDLFVIGLIVPGLILLLRNHHG

SEQ ID NO: 77150 - protein, 575 aa, Homo sapiens
  Payload ID: 15398
  Gene Symbol: SEL1L2
  Gene Name: sel-1 suppressor of lin-12-like 2 (C. elegans)
  Uniprot ID: Q5TEA6
  ENSP ID: ENSP00000367312
MKPLSLLIEILIILGVTIKTIKAEEHNKRQKERNVTTQVSVNEIKQYLSHILEQRTSSNVINKRENLLEKKKNQRKIRIKGIQNKDILKRNKNHLQKQAEKNFTDEGDQLFKMGIKVLQQSKSQKQKEEAYLLFAKAADMGNLKAMEKMADALLFGNFGVQNITAAIQLYESLAKEGSCKAQNALGFLSSYGIGMEYDQAKALIYYTFGSAGGNMMSQMILGYRYLSGINVLQNCEVALSYYKKVADYIADTFEKSEGVPVEKVRLTERPENLSSNSEILDWDIYQYYKFLAERGDVQIQVSLGQLHLIGRKGLDQDYYKALHYFLKAAKAGSANAMAFIGKMYLEGNAAVPQNNATAFKYFSMAASKGNAIGLHGLGLLYFHGKGVPLNYAEALKYFQKAAEKGWPDAQFQLGFMYYSGSGIWKDYKLAFKYFYLASQSGQPLAIYYLAKMYATGTGVVRSCRTAVEKRLTFLKKRRCIQWRFSYGIELPFKDIHLARRLYDMAAQTSPDAHIPVLFAVMKLETTHLLRDILFFNFTTRWNWLKLDNTIGPHWDLFVIGLIVPGLILLLRNHHG

SEQ ID NO: 77151 - protein, 178 aa, Homo sapiens
  Payload ID: 15398
  Gene Symbol: SEL1L2
  Gene Name: sel-1 suppressor of lin-12-like 2 (C. elegans)
  ENSP ID: ENSP00000394598
MKPLSLLIEILIILGVTIKTIKAEEHNKRQKERNVTTQVSVNEIKQYLSHILEQRTSSNVINKRENLLEKKKNQRKIRIKGIQNKDILKRNKNHLQKQAEKNFTDEGDQLFKMGIKVLQQSKSQKQKEEILMPTWMFLCLRSFLPGLLCSSFCPRAAYFSLSMDGLYIKSLPTFCQSS

SEQ ID NO: 77152 - protein, 44 aa, Homo sapiens
  Payload ID: 15398
  Gene Symbol: SEL1L2
  Gene Name: sel-1 suppressor of lin-12-like 2 (C. elegans)
  ENSP ID: ENSP00000418040
  MOD_RES (1)..(1): Any amino acid
XGLGLLYFHGKGVPLNYAEALKYFQKAAEKGWPDAQFQLGFMYY

SEQ ID NO: 77153 - protein, 44 aa, Homo sapiens
  Payload ID: 15398
  Gene Symbol: SEL1L2
  Gene Name: sel-1 suppressor of lin-12-like 2 (C. elegans)
  ENSP ID: ENSP00000420372
MGIKVLQQSKSQKQKEEAYLLFAKAADMGNLKAMEKMADALLFG

SEQ ID NO: 77154 - protein, 1097 aa, Homo sapiens
  Payload ID: 15399
  Gene Symbol: SEL1L3
  Gene Name: sel-1 suppressor of lin-12-like 3 (C. elegans)
  Uniprot ID: Q68CR1
  ENSP ID: ENSP00000264868
MAPRPKKQPDKNPLHGRELNVVPSLGRQTSLTTSVIPKAEQSVAYKDFIYFTVFEGNVRNVSEVSVEYLCSQPCVVNLEAVVSSEFRSSIPVYKKRWKNEKHLHTSRTQIVHVKFPSIMVYRDDYFIRHSISVSAVIVRAWITHKYSGRDWNVKWEENLLHAVAKNYTLLQTIPPFERPFKDHQVCLEWNMGYIWNLRANRIPQCPLENDVVALLGFPYASSGENTGIVKKFPRFRNRELEATRRQRMDYPVFTVSLWLYLLHYCKANLCGILYFVDSNEMYGTPSVFLTEEGYLHIQMHLVKGEDLAVKTKFIIPLKEWFRLDISFNGGQIVVTTSIGQDLKSYHNQTISFREDFHYNDTAGYFIIGGSRYVAGIEGFFGPLKYYRLRSLHPAQIFNPLLEKQLAEQIKLYYERCAEVQEIVSVYASAAKHGGERQEACHLHNSYLDLQRRYGRPSMCRAFPWEKELKDKHPSLFQALLEMDLLTVPRNQNESVSEIGGKIFEKAVKRLSSIDGLHQISSIVPFLTDSSCCGYHKASYYLAVFYETGLNVPRDQLQGMLYSLVGGQGSERLSSMNLGYKHYQGIDNYPLDWELSYAYYSNIATKTPLDQHTLQGDQAYVETIRLKDDEILKVQTKEDGDVFMWLKHEATRGNAAAQQRLAQMLFWGQQGVAKNPEAAIEWYAKGALETEDPALIYDYAIVLFKGQGVKKNRRLALELMKKAASKGLHQAVNGLGWYYHKFKKNYAKAAKYWLKAEEMGNPDASYNLGVLHLDGIFPGVPGRNQTLAGEYFHKAAQGGHMEGTLWCSLYYITGNLETFPRDPEKAVVWAKHVAEKNGYLGHVIRKGLNAYLEGSWHEALLYYVLAAETGIEVSQTNLAHICEERPDLARRYLGVNCVWRYYNFSVFQIDAPSFAYLKMGDLYYYGHQNQSQDLELSVQMYAQAALDGDSQGFFNLALLIEEGTIIPHHILDFLEIDSTLHSNNISILQELYERCWSHSNEESFSPCSLAWLYLHLRLLWGAILHSALIYFLGTFLLSILIAWTVQYFQSVSASDPPPRPSQASPDTATSTASPAVTPAADASDQDQPTVTNNPEPRG

SEQ ID NO: 77155 - protein, 1132 aa, Homo sapiens
  Payload ID: 15399
  Gene Symbol: SEL1L3
  Gene Name: sel-1 suppressor of lin-12-like 3 (C. elegans)
  Uniprot ID: Q68CR1
  ENSP ID: ENSP00000382767
MQRRGAGLGWPRQQQQQPPPLAVGPRAAAMVPSGGVPQGLGGRSACALLLLCYLNVVPSLGRQTSLTTSVIPKAEQSVAYKDFIYFTVFEGNVRNVSEVSVEYLCSQPCVVNLEAVVSSEFRSSIPVYKKRWKNEKHLHTSRTQIVHVKFPSIMVYRDDYFIRHSISVSAVIVRAWITHKYSGRDWNVKWEENLLHAVAKNYTLLQTIPPFERPFKDHQVCLEWNMGYIWNLRANRIPQCPLENDVVALLGFPYASSGENTGIVKKFPRFRNRELEATRRQRMDYPVFTVSLWLYLLHYCKANLCGILYFVDSNEMYGTPSVFLTEEGYLHIQMHLVKGEDLAVKTKFIIPLKEWFRLDISFNGGQIVVTTSIGQDLKSYHNQTISFREDFHYNDTAGYFIIGGSRYVAGIEGFFGPLKYYRLRSLHPAQIFNPLLEKQLAEQIKLYYERCAEVQEIVSVYASAAKHGGERQEACHLHNSYLDLQRRYGRPSMCRAFPWEKELKDKHPSLFQALLEMDLLTVPRNQNESVSEIGGKIFEKAVKRLSSIDGLHQISSIVPFLTDSSCCGYHKASYYLAVFYETGLNVPRDQLQGMLYSLVGGQGSERLSSMNLGYKHYQGIDNYPLDWELSYAYYSNIATKTPLDQHTLQGDQAYVETIRLKDDEILKVQTKEDGDVFMWLKHEATRGNAAAQQRLAQMLFWGQQGVAKNPEAAIEWYAKGALETEDPALIYDYAIVLFKGQGVKKNRRLALELMKKAASKGLHQAVNGLGWYYHKFKKNYAKAAKYWLKAEEMGNPDASYNLGVLHLDGIFPGVPGRNQTLAGEYFHKAAQGGHMEGTLWCSLYYITGNLETFPRDPEKAVVWAKHVAEKNGYLGHVIRKGLNAYLEGSWHEALLYYVLAAETGIEVSQTNLAHICEERPDLARRYLGVNCVWRYYNFSVFQIDAPSFAYLKMGDLYYYGHQNQSQDLELSVQMYAQAALDGDSQGFFNLALLIEEGTIIPHHILDFLEIDSTLHSNNISILQELYERCWSHSNEESFSPCSLAWLYLHLRLLWGAILHSALIYFLGTFLLSILIAWTVQYFQSVSASDPPPRPSQASPDTATSTASPAVTPAADASDQDQPTVTNNPEPRG

SEQ ID NO: 77156 - protein, 35 aa, Homo sapiens
  Payload ID: 15399
  Gene Symbol: SEL1L3
  Gene Name: sel-1 suppressor of lin-12-like 3 (C. elegans)
  ENSP ID: ENSP00000420951
MVYRDDYFIRHSISVSAVIVRAWITHKYSGRDWNV

SEQ ID NO: 77157 - protein, 62 aa, Homo sapiens
  Payload ID: 15399
  Gene Symbol: SEL1L3
  Gene Name: sel-1 suppressor of lin-12-like 3 (C. elegans)
  ENSP ID: ENSP00000421567
MVYRDDYFIRHSISVSAVIVRAWITHKYSGRDWNVKWEENLLHAVAKNYTLLQTIPPFERPF

SEQ ID NO: 77158 - protein, 130 aa, Homo sapiens
  Payload ID: 15399
  Gene Symbol: SEL1L3
  Gene Name: sel-1 suppressor of lin-12-like 3 (C. elegans)
  ENSP ID: ENSP00000421701
  MOD_RES (1)..(1): Any amino acid
XYAQAALDGDSQGFFNLALLIEEGTIIPHHILDFLEIDSTLHSNNISILQELYERCWSHSNEESFSPCSLAWLYLHLRLLWGAILHSALIYFLGTFLLSILIAWTVQYFQSVSEFCLCVPENTAPKLLAA

SEQ ID NO: 77159 - protein, 75 aa, Homo sapiens
  Payload ID: 15399
  Gene Symbol: SEL1L3
  Gene Name: sel-1 suppressor of lin-12-like 3 (C. elegans)
  ENSP ID: ENSP00000423743
MVYRDDYFIRHSISVSAVIVRAWITHKYSGRDWNVKWEENLLHAVAKNYTLLQTIPPFERPFKDHQVCLEWNMGY

SEQ ID NO: 77160 - protein, 77 aa, Homo sapiens
  Payload ID: 15399
  Gene Symbol: SEL1L3
  Gene Name: sel-1 suppressor of lin-12-like 3 (C. elegans)
  ENSP ID: ENSP00000424564
TLAGEYFHKAAQGGHMEGTLWCSLYYITGNLETFPRDPEKAVVKSLSTSVLGHPHTDTLALQKIVLHNTFGFKFNLT

SEQ ID NO: 77161 - protein, 979 aa, Homo sapiens
  Payload ID: 15399
  Gene Symbol: SEL1L3
  Gene Name: sel-1 suppressor of lin-12-like 3 (C. elegans)
  Uniprot ID: Q68CR1
  ENSP ID: ENSP00000425438
MVYRDDYFIRHSISVSAVIVRAWITHKYSGRDWNVKWEENLLHAVAKNYTLLQTIPPFERPFKDHQVCLEWNMGYIWNLRANRIPQCPLENDVVALLGFPYASSGENTGIVKKFPRFRNRELEATRRQRMDYPVFTVSLWLYLLHYCKANLCGILYFVDSNEMYGTPSVFLTEEGYLHIQMHLVKGEDLAVKTKFIIPLKEWFRLDISFNGGQIVVTTSIGQDLKSYHNQTISFREDFHYNDTAGYFIIGGSRYVAGIEGFFGPLKYYRLRSLHPAQIFNPLLEKQLAEQIKLYYERCAEVQEIVSVYASAAKHGGERQEACHLHNSYLDLQRRYGRPSMCRAFPWEKELKDKHPSLFQALLEMDLLTVPRNQNESVSEIGGKIFEKAVKRLSSIDGLHQISSIVPFLTDSSCCGYHKASYYLAVFYETGLNVPRDQLQGMLYSLVGGQGSERLSSMNLGYKHYQGIDNYPLDWELSYAYYSNIATKTPLDQHTLQGDQAYVETIRLKDDEILKVQTKEDGDVFMWLKHEATRGNAAAQQRLAQMLFWGQQGVAKNPEAAIEWYAKGALETEDPALIYDYAIVLFKGQGVKKNRRLALELMKKAASKGLHQAVNGLGWYYHKFKKNYAKAAKYWLKAEEMGNPDASYNLGVLHLDGIFPGVPGRNQTLAGEYFHKAAQGGHMEGTLWCSLYYITGNLETFPRDPEKAVVWAKHVAEKNGYLGHVIRKGLNAYLEGSWHEALLYYVLAAETGIEVSQTNLAHICEERPDLARRYLGVNCVWRYYNFSVFQIDAPSFAYLKMGDLYYYGHQNQSQDLELSVQMYAQAALDGDSQGFFNLALLIEEGTIIPHHILDFLEIDSTLHSNNISILQELYERCWSHSNEESFSPCSLAWLYLHLRLLWGAILHSALIYFLGTFLLSILIAWTVQYFQSVSASDPPPRPSQASPDTATSTASPAVTPAADASDQDQPTVTNNPEPRG

SEQ ID NO: 77162 - protein, 130 aa, Homo sapiens
  Payload ID: 15399
  Gene Symbol: SEL1L3
  Gene Name: sel-1 suppressor of lin-12-like 3 (C. elegans)
  ENSP ID: ENSP00000426050
TNLAHICEERPDLARRYLGVNCVWRYYNFSVFQIDAPSFAYLKMGDLYYYGHQNQSQDLELSVQMYAQAALDGDSQGFFNLALLIEEGTIIPHHILDFLEIDSTLHSNNISILQELYERSTFWEPFCYPY

SEQ ID NO: 77163 - protein, 610 aa, Homo sapiens
  Payload ID: 15400
  Gene Symbol: SELE
  Gene Name: selectin E
  Uniprot ID: P16581
  ENSP ID: ENSP00000331736
MIASQFLSALTLVLLIKESGAWSYNTSTEAMTYDEASAYCQQRYTHLVAIQNKEEIEYLNSILSYSPSYYWIGIRKVNNVWVWVGTQKPLTEEAKNWAPGEPNNRQKDEDCVEIYIKREKDVGMWNDERCSKKKLALCYTAACTNTSCSGHGECVETINNYTCKCDPGFSGLKCEQIVNCTALESPEHGSLVCSHPLGNFSYNSSCSISCDRGYLPSSMETMQCMSSGEWSAPIPACNVVECDAVTNPANGFVECFQNPGSFPWNTTCTFDCEEGFELMGAQSLQCTSSGNWDNEKPTCKAVTCRAVRQPQNGSVRCSHSPAGEFTFKSSCNFTCEEGFMLQGPAQVECTTQGQWTQQIPVCEAFQCTALSNPERGYMNCLPSASGSFRYGSSCEFSCEQGFVLKGSKRLQCGPTGEWDNEKPTCEAVRCDAVHQPPKGLVRCAHSPIGEFTYKSSCAFSCEEGFELHGSTQLECTSQGQWTEEVPSCQVVKCSSLAVPGKINMSCSGEPVFGTVCKFACPEGWTLNGSAARTCGATGHWSGLLPTCEAPTESNIPLVAGLSAAGLSLLTLAPFLLWLRKCLRKAKKFVPASSCQSLESDGSYQKPSYIL

SEQ ID NO: 77164 - protein, 484 aa, Homo sapiens
  Payload ID: 15400
  Gene Symbol: SELE
  Gene Name: selectin E
  ENSP ID: ENSP00000356748
MIASQFLSALTLVLLIKESGAWSYNTSTEAMTYDEASAYCQQRYTHLVAIQNKEEIEYLNSILSYSPSYYWIGIRKVNNVWVWVGTQKPLTEEAKNWAPGEPNNRQKDEDCVEIYIKREKDVGMWNDERCSKKKLALCYTAACTNTSCSGHGECVETINNYTCKCDPGFSGLKCEQIVNCTALESPEHGSLVCSHPLGNFSYNSSCSISCDRGYLPSSMETMQCMSSGEWSAPIPACNVVECDAVTNPANGFVECFQNPGSFPWNTTCTFDCEEGFELMGAQSLQCTSSGNWDNEKPTCKAVTCRAVRQPQNGSVRCSHSPAGEFTFKSSCNFTCEEGFMLQGPAQVECTTQGQWTQQIPVCEVVKCSSLAVPGKINMSCSGEPVFGTVCKFACPEGWTLNGSAARTCGATGHWSGLLPTCEAPTESNIPLVAGLSAAGLSLLTLAPFLLWLRKCLRKAKKFVPASSCQSLESDGSYQKPSYIL

SEQ ID NO: 77165 - protein, 485 aa, Homo sapiens
  Payload ID: 15400
  Gene Symbol: SELE
  Gene Name: selectin E
  ENSP ID: ENSP00000356749
MIASQFLSALTLVLLIKESGAWSYNTSTEAMTYDEASAYCQQRYTHLVAIQNKEEIEYLNSILSYSPSYYWIGIRKVNNVWVWVGTQKPLTEEAKNWAPGEPNNRQKDEDCVEIYIKREKDVGMWNDERCSKKKLALCYTAACTNTSCSGHGECVETINNYTCKCDPGFSGLKCEQMVECDAVTNPANGFVECFQNPGSFPWNTTCTFDCEEGFELMGAQSLQCTSSGNWDNEKPTCKAVTCRAVRQPQNGSVRCSHSPAGEFTFKSSCNFTCEEGFMLQGPAQVECTTQGQWTQQIPVCEAVRCDAVHQPPKGLVRCAHSPIGEFTYKSSCAFSCEEGFELHGSTQLECTSQGQWTEEVPSCQVVKCSSLAVPGKINMSCSGEPVFGTVCKFACPEGWTLNGSAARTCGATGHWSGLLPTCEAPTESNIPLVAGLSAAGLSLLTLAPFLLWLRKCLRKAKKFVPASSCQSLESDGSYQKPSYIL

SEQ ID NO: 77166 - protein, 547 aa, Homo sapiens
  Payload ID: 15400
  Gene Symbol: SELE
  Gene Name: selectin E
  ENSP ID: ENSP00000356750
MIASQFLSALTLVLLIKESGAWSYNTSTEAMTYDEASAYCQQRYTHLVAIQNKEEIEYLNSILSYSPSYYWIGIRKVNNVWVWVGTQKPLTEEAKNWAPGEPNNRQKDEDCVEIYIKREKDVGMWNDERCSKKKLALCYTAACTNTSCSGHGECVETINNYTCKCDPGFSGLKCEQIVNCTALESPEHGSLVCSHPLGNFSYNSSCSISCDRGYLPSSMETMQCMSSGEWSAPIPACNVVECDAVTNPANGFVECFQNPGSFPWNTTCTFDCEEGFELMGAQSLQCTSSGNWDNEKPTCKAVTCRAVRQPQNGSVRCSHSPAGEFTFKSSCNFTCEEGFMLQGPAQVECTTQGQWTQQIPVCEAVRCDAVHQPPKGLVRCAHSPIGEFTYKSSCAFSCEEGFELHGSTQLECTSQGQWTEEVPSCQVVKCSSLAVPGKINMSCSGEPVFGTVCKFACPEGWTLNGSAARTCGATGHWSGLLPTCEAPTESNIPLVAGLSAAGLSLLTLAPFLLWLRKCLRKAKKFVPASSCQSLESDGSYQKPSYIL

SEQ ID NO: 77167 - protein, 547 aa, Homo sapiens
  Payload ID: 15400
  Gene Symbol: SELE
  Gene Name: selectin E
  ENSP ID: ENSP00000356751
MIASQFLSALTLVLLIKESGAWSYNTSTEAMTYDEASAYCQQRYTHLVAIQNKEEIEYLNSILSYSPSYYWIGIRKVNNVWVWVGTQKPLTEEAKNWAPGEPNNRQKDEDCVEIYIKREKDVGMWNDERCSKKKLALCYTAACTNTSCSGHGECVETINNYTCKCDPGFSGLKCEQIVNCTALESPEHGSLVCSHPLGNFSYNSSCSISCDRGYLPSSMETMQCMSSGEWSAPIPACNVVECDAVTNPANGFVECFQNPGSFPWNTTCTFDCEEGFELMGAQSLQCTSSGNWDNEKPTCKAVTCRAVRQPQNGSVRCSHSPAGEFTFKSSCNFTCEEGFMLQGPAQVECTTQGQWTQQIPVCEAFQCTALSNPERGYMNCLPSASGSFRYGSSCEFSCEQGFVLKGSKRLQCGPTGEWDNEKPTCEVVKCSSLAVPGKINMSCSGEPVFGTVCKFACPEGWTLNGSAARTCGATGHWSGLLPTCEAPTESNIPLVAGLSAAGLSLLTLAPFLLWLRKCLRKAKKFVPASSCQSLESDGSYQKPSYIL

SEQ ID NO: 77168 - protein, 12 aa, Homo sapiens
  Payload ID: 15400
  Gene Symbol: SELE
  Gene Name: selectin E
  ENSP ID: ENSP00000476784
MIASQFLSALTL

SEQ ID NO: 77169 - protein, 385 aa, Homo sapiens
  Payload ID: 15401
  Gene Symbol: SELL
  Gene Name: selectin L
  Uniprot ID: P14151
  ENSP ID: ENSP00000236147
MGCRRTREGPSKAMIFPWKCQSTQRDLWNIFKLWGWTMLCCDFLAHHGTDCWTYHYSEKPMNWQRARRFCRDNYTDLVAIQNKAEIEYLEKTLPFSRSYYWIGIRKIGGIWTWVGTNKSLTEEAENWGDGEPNNKKNKEDCVEIYIKRNKDAGKWNDDACHKLKAALCYTASCQPWSCSGHGECVEIINNYTCNCDVGYYGPQCQFVIQCEPLEAPELGTMDCTHPLGNFSFSSQCAFSCSEGTNLTGIEETTCGPFGNWSSPEPTCQVIQCEPLSAPDLGIMNCSHPLASFSFTSACTFICSEGTELIGKKKTICESSGIWSNPSPICQKLDKSFSMIKEGDYNPLFIPVAVMVTAFSGLAFIIWLARRLKKGKKSKRSMNDPY

SEQ ID NO: 77170 - protein, 830 aa, Homo sapiens
  Payload ID: 15402
  Gene Symbol: SELP
  Gene Name: selectin P (granule membrane protein 140kDa, antigen CD62)
  Uniprot ID: P16109
  ENSP ID: ENSP00000263686
MANCQIAILYQRFQRVVFGISQLLCFSALISELTNQKEVAAWTYHYSTKAYSWNISRKYCQNRYTDLVAIQNKNEIDYLNKVLPYYSSYYWIGIRKNNKTWTWVGTKKALTNEAENWADNEPNNKRNNEDCVEIYIKSPSAPGKWNDEHCLKKKHALCYTASCQDMSCSKQGECLETIGNYTCSCYPGFYGPECEYVRECGELELPQHVLMNCSHPLGNFSFNSQCSFHCTDGYQVNGPSKLECLASGIWTNKPPQCLAAQCPPLKIPERGNMTCLHSAKAFQHQSSCSFSCEEGFALVGPEVVQCTASGVWTAPAPVCKAVQCQHLEAPSEGTMDCVHPLTAFAYGSSCKFECQPGYRVRGLDMLRCIDSGHWSAPLPTCEAISCEPLESPVHGSMDCSPSLRAFQYDTNCSFRCAEGFMLRGADIVRCDNLGQWTAPAPVCQALQCQDLPVPNEARVNCSHPFGAFRYQSVCSFTCNEGLLLVGASVLQCLATGNWNSVPPECQAIPCTPLLSPQNGTMTCVQPLGSSSYKSTCQFICDEGYSLSGPERLDCTRSGRWTDSPPMCEAIKCPELFAPEQGSLDCSDTRGEFNVGSTCHFSCDNGFKLEGPNNVECTTSGRWSATPPTCKGIASLPTPGVQCPALTTPGQGTMYCRHHPGTFGFNTTCYFGCNAGFTLIGDSTLSCRPSGQWTAVTPACRAVKCSELHVNKPIAMNCSNLWGNFSYGSICSFHCLEGQLLNGSAQTACQENGHWSTTVPTCQAGPLTIQEALTYFGGAVASTIGLIMGGTLLALLRKRFRQKDDGKCPLNPHSHLGTYGVFTNAAFDPSP

SEQ ID NO: 77171 - protein, 768 aa, Homo sapiens
  Payload ID: 15402
  Gene Symbol: SELP
  Gene Name: selectin P (granule membrane protein 140kDa, antigen CD62)
  ENSP ID: ENSP00000356760
MANCQIAILYQRFQRVVFGISQLLCFSALISELTNQKEVAAWTYHYSTKAYSWNISRKYCQNRYTDLVAIQNKNEIDYLNKVLPYYSSYYWIGIRKNNKTWTWVGTKKALTNEAENWADNEPNNKRNNEDCVEIYIKSPSAPGKWNDEHCLKKKHALCYTASCQDMSCSKQGECLETIGNYTCSCYPGFYGPECEYVRECGELELPQHVLMNCSHPLGNFSFNSQCSFHCTDGYQVNGPSKLECLASGIWTNKPPQCLAAQCPPLKIPERGNMTCLHSAKAFQHQSSCSFSCEEGFALVGPEVVQCTASGVWTAPAPVCKAISCEPLESPVHGSMDCSPSLRAFQYDTNCSFRCAEGFMLRGADIVRCDNLGQWTAPAPVCQALQCQDLPVPNEARVNCSHPFGAFRYQSVCSFTCNEGLLLVGASVLQCLATGNWNSVPPECQAIPCTPLLSPQNGTMTCVQPLGSSSYKSTCQFICDEGYSLSGPERLDCTRSGRWTDSPPMCEAIKCPELFAPEQGSLDCSDTRGEFNVGSTCHFSCDNGFKLEGPNNVECTTSGRWSATPPTCKGIASLPTPGVQCPALTTPGQGTMYCRHHPGTFGFNTTCYFGCNAGFTLIGDSTLSCRPSGQWTAVTPACRAVKCSELHVNKPIAMNCSNLWGNFSYGSICSFHCLEGQLLNGSAQTACQENGHWSTTVPTCQAGPLTIQEALTYFGGAVASTIGLIMGGTLLALLRKRFRQKDDGKCPLNPHSHLGTYGVFTNAAFDPSP

SEQ ID NO: 77172 - protein, 768 aa, Homo sapiens
  Payload ID: 15402
  Gene Symbol: SELP
  Gene Name: selectin P (granule membrane protein 140kDa, antigen CD62)
  ENSP ID: ENSP00000356762
MANCQIAILYQRFQRVVFGISQLLCFSALISELTNQKEVAAWTYHYSTKAYSWNISRKYCQNRYTDLVAIQNKNEIDYLNKVLPYYSSYYWIGIRKNNKTWTWVGTKKALTNEAENWADNEPNNKRNNEDCVEIYIKSPSAPGKWNDEHCLKKKHALCYTASCQDMSCSKQGECLETIGNYTCSCYPGFYGPECEYVRECGELELPQHVLMNCSHPLGNFSFNSQCSFHCTDGYQVNGPSKLECLASGIWTNKPPQCLAVQCQHLEAPSEGTMDCVHPLTAFAYGSSCKFECQPGYRVRGLDMLRCIDSGHWSAPLPTCEAISCEPLESPVHGSMDCSPSLRAFQYDTNCSFRCAEGFMLRGADIVRCDNLGQWTAPAPVCQALQCQDLPVPNEARVNCSHPFGAFRYQSVCSFTCNEGLLLVGASVLQCLATGNWNSVPPECQAIPCTPLLSPQNGTMTCVQPLGSSSYKSTCQFICDEGYSLSGPERLDCTRSGRWTDSPPMCEAIKCPELFAPEQGSLDCSDTRGEFNVGSTCHFSCDNGFKLEGPNNVECTTSGRWSATPPTCKGIASLPTPGVQCPALTTPGQGTMYCRHHPGTFGFNTTCYFGCNAGFTLIGDSTLSCRPSGQWTAVTPACRAVKCSELHVNKPIAMNCSNLWGNFSYGSICSFHCLEGQLLNGSAQTACQENGHWSTTVPTCQAGPLTIQEALTYFGGAVASTIGLIMGGTLLALLRKRFRQKDDGKCPLNPHSHLGTYGVFTNAAFDPSP

SEQ ID NO: 77173 - protein, 444 aa, Homo sapiens
  Payload ID: 15402
  Gene Symbol: SELP
  Gene Name: selectin P (granule membrane protein 140kDa, antigen CD62)
  ENSP ID: ENSP00000356769
MANCQIAILYQRFQRVVFGISQLLCFSALISELTNQKEVAAWTYHYSTKAYSWNISRKYCQNRYTDLVAIQNKNEIDYLNKVLPYYSSYYWIGIRKNNKTWTWVGTKKALTNEAENWADNEPNNKRNNEDCVEIYIKSPSAPGKWNDEHCLKKKHALCYTASCQDMSCSKQGECLETIGNYTCSCYPGFYGPECEYVRECGELELPQHVLMNCSHPLGNFSFNSQCSFHCTDGYQVNGPSKLECLASGIWTNKPPQCLAAQCPPLKIPERGNMTCLHSAKAFQHQSSCSFSCEEGFALVGPEVVQCTASGVWTAPAPVCKALQCQDLPVPNEARVNCSHPFGAFRYQSVCSFTCNEGLLLVGASVLQCLATGNWNSVPPECQAIPCTPLLSPQNGTMTCVQPLGSSSYKSTCQFICDEGYSLSGPERLDCTRSGRWTDSPPMCE

SEQ ID NO: 77174 - protein, 789 aa, Homo sapiens
  Payload ID: 15402
  Gene Symbol: SELP
  Gene Name: selectin P (granule membrane protein 140kDa, antigen CD62)
  ENSP ID: ENSP00000391694
ANCQIAILYQRFQRVVFGISQLLCFSALISELTNQKEVAAWTYHYSTKAYSWNISRKYCQNRYTDLVAIQNKNEIDYLNKVLPYYSSYYWIGIRKNNKTWTWVGTKKALTNEAENWADNEPNNKRNNEDCVEIYIKSPSAPGKWNDEHCLKKKHALCYTASCQDMSCSKQGECLETIGNYTCSCYPGFYGPECEYVRECGELELPQHVLMNCSHPLGNFSFNSQCSFHCTDGYQVNGPSKLECLASGIWTNKPPQCLAAQCPPLKIPERGNMTCLHSAKAFQHQSSCSFSCEEGFALVGPEVVQCTASGVWTAPAPVCKAVQCQHLEAPSEGTMDCVHPLTAFAYGSSCKFECQPGYRVRGLDMLRCIDSGHWSAPLPTCEAISCEPLESPVHGSMDCSPSLRAFQYDTNCSFRCAEGFMLRGADIVRCDNLGQWTAPAPVCQALQCQDLPVPNEARVNCSHPFGAFRYQSVCSFTCNEGLLLVGASVLQCLATGNWNSVPPECQAIPCTPLLSPQNGTMTCVQPLGSSSYKSTCQFICDEGYSLSGPERLDCTRSGRWTDSPPMCEAIKCPELFAPEQGSLDCSDTRGEFNVGSTCHFSCDNGFKLEGPNNVECTTSGRWSATPPTCKGIASLPTPGVQCPALTTPGQGTMYCRHHPGTFGFNTTCYFGCNAGFTLIGDSTLSCRPSGQWTAVTPACRAVKCSELHVNKPIAMNCSNLWGNFSYGSICSFHCLEGQLLNGSAQTACQENGHWSTTVPTCQDDGKCPLNPHSHLGTYGVFTNAAFDPSP

SEQ ID NO: 77175 - protein, 646 aa, Homo sapiens
  Payload ID: 15402
  Gene Symbol: SELP
  Gene Name: selectin P (granule membrane protein 140kDa, antigen CD62)
  ENSP ID: ENSP00000399368
MANCQIAILYQRFQRVVFGISQLLCFSALISELTNQKEVAAWTYHYSTKAYSWNISRKYCQNRYTDLVAIQNKNEIDYLNKVLPYYSSYYWIGIRKNNKTWTWVGTKKALTNEAENWADNEPNNKRNNEDCVEIYIKSPSAPGKWNDEHCLKKKHALCYTASCQDMSCSKQGECLETIGNYTCSCYPGFYGPECEYVRECGELELPQHVLMNCSHPLGNFSFNSQCSFHCTDGYQVNGPSKLECLASGIWTNKPPQCLAAQCPPLKIPERGNMTCLHSAKAFQHQSSCSFSCEEGFALVGPEVVQCTASGVWTAPAPVCKAISCEPLESPVHGSMDCSPSLRAFQYDTNCSFRCAEGFMLRGADIVRCDNLGQWTAPAPVCQALQCQDLPVPNEARVNCSHPFGAFRYQSVCSFTCNEGLLLVGASVLQCLATGNWNSVPPECQGKSIASLPTPGVQCPALTTPGQGTMYCRHHPGTFGFNTTCYFGCNAGFTLIGDSTLSCRPSGQWTAVTPACRAVKCSELHVNKPIAMNCSNLWGNFSYGSICSFHCLEGQLLNGSAQTACQENGHWSTTVPTCQAGPLTIQEALTYFGGAVASTIGLIMGGTLLALLRKRFRQKDDGKCPLNPHSHLGTYGVFTNAAFDPSP

SEQ ID NO: 77176 - protein, 428 aa, Homo sapiens
  Payload ID: 15403
  Gene Symbol: SELPLG
  Gene Name: selectin P ligand
  Uniprot ID: Q14242
  ENSP ID: ENSP00000228463
MAVGASGLEGDKMAGAMPLQLLLLLILLGPGNSLQLWDTWADEAEKALGPLLARDRRQATEYEYLDYDFLPETEPPEMLRNSTDTTPLTGPGTPESTTVEPAARRSTGLDAGGAVTELTTELANMGNLSTDSAAMEIQTTQPAATEAQTTQPVPTEAQTTPLAATEAQTTRLTATEAQTTPLAATEAQTTPPAATEAQTTQPTGLEAQTTAPAAMEAQTTAPAAMEAQTTPPAAMEAQTTQTTAMEAQTTAPEATEAQTTQPTATEAQTTPLAAMEALSTEPSATEALSMEPTTKRGLFIPFSVSSVTHKGIPMAASNLSVNYPVGAPDHISVKQCLLAILILALVATIFFVCTVVLAVRLSRKGHMYPVRNYSPTEMVCISSLLPDGGEGPSATANGGLSKAKSPGLTPEPREDREGDDLTLHSFLP

SEQ ID NO: 77177 - protein, 402 aa, Homo sapiens
  Payload ID: 15403
  Gene Symbol: SELPLG
  Gene Name: selectin P ligand
  ENSP ID: ENSP00000373614
MPLQLLLLLILLGPGNSLQLWDTWADEAEKALGPLLARDRRQATEYEYLDYDFLPETEPPEMLRNSTDTTPLTGPGTPESTTVEPAARRSTGLDAGGAVTELTTELANMGNLSTDSAAMEIQTTQPAATEAQTTPLAATEAQTTRLTATEAQTTPLAATEAQTTPPAATEAQTTQPTGLEAQTTAPAAMEAQTTAPAAMEAQTTPPAAMEAQTTQTTAMEAQTTAPEATEAQTTQPTATEAQTTPLAAMEALSTEPSATEALSMEPTTKRGLFIPFSVSSVTHKGIPMAASNLSVNYPVGAPDHISVKQCLLAILILALVATIFFVCTVVLAVRLSRKGHMYPVRNYSPTEMVCISSLLPDGGEGPSATANGGLSKAKSPGLTPEPREDREGDDLTLHSFLP

SEQ ID NO: 77178 - protein, 412 aa, Homo sapiens
  Payload ID: 15403
  Gene Symbol: SELPLG
  Gene Name: selectin P ligand
  Uniprot ID: Q14242
  ENSP ID: ENSP00000447752
MPLQLLLLLILLGPGNSLQLWDTWADEAEKALGPLLARDRRQATEYEYLDYDFLPETEPPEMLRNSTDTTPLTGPGTPESTTVEPAARRSTGLDAGGAVTELTTELANMGNLSTDSAAMEIQTTQPAATEAQTTQPVPTEAQTTPLAATEAQTTRLTATEAQTTPLAATEAQTTPPAATEAQTTQPTGLEAQTTAPAAMEAQTTAPAAMEAQTTPPAAMEAQTTQTTAMEAQTTAPEATEAQTTQPTATEAQTTPLAAMEALSTEPSATEALSMEPTTKRGLFIPFSVSSVTHKGIPMAASNLSVNYPVGAPDHISVKQCLLAILILALVATIFFVCTVVLAVRLSRKGHMYPVRNYSPTEMVCISSLLPDGGEGPSATANGGLSKAKSPGLTPEPREDREGDDLTLHSFLP

SEQ ID NO: 77179 - protein, 472 aa, Homo sapiens
  Payload ID: 15404
  Gene Symbol: SELENBP1
  Gene Name: selenium binding protein 1
  Uniprot ID: Q13228
  ENSP ID: ENSP00000357861
MATKCGNCGPGYSTPLEAMKGPREEIVYLPCIYRNTGTEAPDYLATVDVDPKSPQYCQVIHRLPMPNLKDELHHSGWNTCSSCFGDSTKSRTKLVLPSLISSRIYVVDVGSEPRAPKLHKVIEPKDIHAKCELAFLHTSHCLASGEVMISSLGDVKGNGKGGFVLLDGETFEVKGTWERPGGAAPLGYDFWYQPRHNVMISTEWAAPNVLRDGFNPADVEAGLYGSHLYVWDWQRHEIVQTLSLKDGLIPLEIRFLHNPDAAQGFVGCALSSTIQRFYKNEGGTWSVEKVIQVPPKKVKGWLLPEMPGLITDILLSLDDRFLYFSNWLHGDLRQYDISDPQRPRLTGQLFLGGSIVKGGPVQVLEDEELKSQPEPLVVKGKRVAGGPQMIQLSLDGKRLYITTSLYSAWDKQFYPDLIREGSVMLQVDVDTVKGGLKLNPNFLVDFGKEPLGPALAHELRYPGGDCSSDIWI

SEQ ID NO: 77180 - protein, 47 aa, Homo sapiens
  Payload ID: 15404
  Gene Symbol: SELENBP1
  Gene Name: selenium binding protein 1
  ENSP ID: ENSP00000390433
MATKCGNCGPGYSTPLEAMKGHPPAAHAQPEGRAASLRMEHLQQLLR

SEQ ID NO: 77181 - protein, 123 aa, Homo sapiens
  Payload ID: 15404
  Gene Symbol: SELENBP1
  Gene Name: selenium binding protein 1
  ENSP ID: ENSP00000395637
MATKCGNCGPGYSTPLEAMKGPREEIVYLPCIYRNTGTEAPDYLATVDVDPKSPQYCQVIHRLPMPNLKDELHHSGWNTCSSCFGDSTKSRTKLVLPSLISSRIYVVDVGSEPRAPKLHKACH

SEQ ID NO: 77182 - protein, 305 aa, Homo sapiens
  Payload ID: 15404
  Gene Symbol: SELENBP1
  Gene Name: selenium binding protein 1
  ENSP ID: ENSP00000396209
  MOD_RES (1)..(1): Any amino acid
XAERAEGAFTLQSVAQPMRPIASTATKCGNCGPGYSTPLEAMKGPREEIVYLPCIYRNTGTEAPDYLATVDVDPKSPQYCQVIEPKDIHAKCELAFLHTSHCLASGEVMISSLGDVKGNGKGGFVLLDGETFEVKGTWERPGGAAPLGYDFWYQPRHNVMISTEWAAPNVLRDGFNPADVEAGLYGSHLYVWDWQRHEIVQTLSLKDGLIPLEIRFLHNPDAAQGFVGCALSSTIQRFYKNEGGTWSVEKVIQVPPKKVKGWLLPEMPGLITDILLSLDDRFLYFSNWLHGDLRQYDISDPQRPR

SEQ ID NO: 77183 - protein, 514 aa, Homo sapiens
  Payload ID: 15404
  Gene Symbol: SELENBP1
  Gene Name: selenium binding protein 1
  Uniprot ID: Q13228
  ENSP ID: ENSP00000397261
MRLEWGPRPAALPWPAGMCAAERAEGAFTLQSVAQPMRPIASTATKCGNCGPGYSTPLEAMKGPREEIVYLPCIYRNTGTEAPDYLATVDVDPKSPQYCQVIHRLPMPNLKDELHHSGWNTCSSCFGDSTKSRTKLVLPSLISSRIYVVDVGSEPRAPKLHKVIEPKDIHAKCELAFLHTSHCLASGEVMISSLGDVKGNGKGGFVLLDGETFEVKGTWERPGGAAPLGYDFWYQPRHNVMISTEWAAPNVLRDGFNPADVEAGLYGSHLYVWDWQRHEIVQTLSLKDGLIPLEIRFLHNPDAAQGFVGCALSSTIQRFYKNEGGTWSVEKVIQVPPKKVKGWLLPEMPGLITDILLSLDDRFLYFSNWLHGDLRQYDISDPQRPRLTGQLFLGGSIVKGGPVQVLEDEELKSQPEPLVVKGKRVAGGPQMIQLSLDGKRLYITTSLYSAWDKQFYPDLIREGSVMLQVDVDTVKGGLKLNPNFLVDFGKEPLGPALAHELRYPGGDCSSDIWI

SEQ ID NO: 77184 - protein, 80 aa, Homo sapiens
  Payload ID: 15404
  Gene Symbol: SELENBP1
  Gene Name: selenium binding protein 1
  ENSP ID: ENSP00000400841
MKGPREEIVYLPCIYRNTGTEAPDYLATVDVDPKSPQYCQVIHRLPMPNLKDELHHSGWNTCSSCFGDSTKSRTKLVLPS

SEQ ID NO: 77185 - protein, 123 aa, Homo sapiens; identical to SEQ ID NO: 77181
  Payload ID: 15404
  Gene Symbol: SELENBP1
  Gene Name: selenium binding protein 1
  ENSP ID: ENSP00000402531

SEQ ID NO: 77186 - protein, 295 aa, Homo sapiens
  Payload ID: 15404
  Gene Symbol: SELENBP1
  Gene Name: selenium binding protein 1
  ENSP ID: ENSP00000406222
MATKCGNCGPGYSTPLEAMKGTEAPDYLATVDVDPKSPQYCQVIHRLPMPNLKDELHHSGWNTCSSCFGDSTKSRTKLVLPSLISSRIYVVDVGSEPRAPKLHKVIEPKDIHAKCELAFLHTSHCLASGEVMISSLGDVKGNGKGGFVLLDGETFEVKGTWERPGGAAPLGYDFWYQPRHNVMISTEWAAPNVLRDGFNPADVEAGLYGSHLYVWDWQRHEIVQTLSLKDGLIPLEIRFLHNPDAAQGFVGCALSSTIQRFYKNEGGTWSVEKVIQVPPKKVKGWLLPEMPGLIT

SEQ ID NO: 77187 - protein, 123 aa, Homo sapiens; identical to SEQ ID NO: 77181
  Payload ID: 15404
  Gene Symbol: SELENBP1
  Gene Name: selenium binding protein 1
  ENSP ID: ENSP00000412816

SEQ ID NO: 77188 - protein, 410 aa, Homo sapiens
  Payload ID: 15404
  Gene Symbol: SELENBP1
  Gene Name: selenium binding protein 1
  Uniprot ID: Q13228
  ENSP ID: ENSP00000413960
MATKCGNCGPGYSTPLEAMKGPREEIVYLPCIYRNTGTEAPDYLATVDVDPKSPQYCQVIEPKDIHAKCELAFLHTSHCLASGEVMISSLGDVKGNGKGGFVLLDGETFEVKGTWERPGGAAPLGYDFWYQPRHNVMISTEWAAPNVLRDGFNPADVEAGLYGSHLYVWDWQRHEIVQTLSLKDGLIPLEIRFLHNPDAAQGFVGCALSSTIQRFYKNEGGTWSVEKVIQVPPKKVKGWLLPEMPGLITDILLSLDDRFLYFSNWLHGDLRQYDISDPQRPRLTGQLFLGGSIVKGGPVQVLEDEELKSQPEPLVVKGKRVAGGPQMIQLSLDGKRLYITTSLYSAWDKQFYPDLIREGSVMLQVDVDTVKGGLKLNPNFLVDFGKEPLGPALAHELRYPGGDCSSDIWI

SEQ ID NO: 77189 - protein, 165 aa, Homo sapiens
  Payload ID: 15404
  Gene Symbol: SELENBP1
  Gene Name: selenium binding protein 1
  ENSP ID: ENSP00000416206
MRLEWGPRPAALPWPAGMCAAERAEGAFTLQSVAQPMRPIASTATKCGNCGPGYSTPLEAMKGPREEIVYLPCIYRNTGTEAPDYLATVDVDPKSPQYCQVIHRLPMPNLKDELHHSGWNTCSSCFGDSTKSRTKLVLPSLISSRIYVVDVGSEPRAPKLHKACH

SEQ ID NO: 77190 - protein, 453 aa, Homo sapiens
  Payload ID: 15405
  Gene Symbol: SCLY
  Gene Name: selenocysteine lyase
  ENSP ID: ENSP00000254663
MPGSSGAGMEAAVAPGRDAPAPAASQPSGCGKHNSPERKVYMDYNATTPLEPEVIQAMTKAMWEAWGNPSSPYSAGRKAKDIINAARESLAKMIGGKPQDIIFTSGGTESNNLVIHSVVKHFHANQTSKGHTGGHHSPVKGAKPHFITSSVEHDSIRLPLEHLVEEQVAAVTFVPVSKVSGQAEVDDILAAVRPTTRLVTIMLANNETGIVMPVPEISQRIKALNQERVAAGLPPILVHTDAAQALGKQRVDVEDLGVDFLTIVGHKFYGPRIGALYIRGLGEFTPLYPMLFGGGQERNFRPGTENTPMIAGLGKAAELVTQNCEAYEAHMRDVRDYLEERLEAEFGQKRIHLNSQFPGTQRLPNTCNFSIRGPRLQGHVVLAQCRVLMASVGAACHSDHGDQPSPVLLSYGVPFDVARNALRLSVGRSTTRAEVDLVVQDLKQAVAQLEDQA

SEQ ID NO: 77191 - protein, 317 aa, Homo sapiens
  Payload ID: 15405
  Gene Symbol: SCLY
  Gene Name: selenocysteine lyase
  Uniprot ID: Q96I15
  ENSP ID: ENSP00000387162
MEAAVAPGRDAPAPAASQPSGCGKHNSPERKVYMDYNATTPLEPEVIQAMTKAMWEAWGNPSSPYSAGRKAKDIINAARESLAKMIGGKPQDIIFTSGGTESNNLVIHSVVKHFHANQTSKGHTGGHHSPVKGAKPHFITSSVEHDSIRLPLEHLVEEQVAAVTFVPVSKVSGQAEVDDILAAVRPTTRLVTIMLANNETGIVMPVPEISQRIKALNQERVAAGLPPILVHTDAAQALGKQRVDVEDLGVDFLTIVGHKFYGPRIGALYIRGLGEFTPLYPMLFGGGQERNFRPGTENTPMIAGLGKVSPGELEEMS

SEQ ID NO: 77192 - protein, 73 aa, Homo sapiens
  Payload ID: 15405
  Gene Symbol: SCLY
  Gene Name: selenocysteine lyase
  ENSP ID: ENSP00000391361
MEAAVAPGRDAPAPAASQPSGCGKHNSPERKVYMDYNATTPLEPEVIQAMTKAMWEAWGNPSSPYSAERPRIL

SEQ ID NO: 77193 - protein, 71 aa, Homo sapiens
  Payload ID: 15405
  Gene Symbol: SCLY
  Gene Name: selenocysteine lyase
  ENSP ID: ENSP00000392517
MEAAVAPGRDAPAPAASQPSGCGKHNSPERKVYMDYNATTPLEPEVIQAMTKAMWEAWGNPSSPYSAAYSM

SEQ ID NO: 77194 - protein, 122 aa, Homo sapiens
  Payload ID: 15405
  Gene Symbol: SCLY
  Gene Name: selenocysteine lyase
  ENSP ID: ENSP00000401401
  MOD_RES (1)..(1): Any amino acid
XFYGPRIGALYIRGLGEFTPLYPMLFGGGQERNFRPGTENTPMIAGLGKAAELVTQNCEAYEAHMRDVRDYLEERLEAEFGQKRIHLNSQFPGTQRLPNTCNFSIRGPRLQGDGPSPWSFRV

SEQ ID NO: 77195 - protein, 168 aa, Homo sapiens
  Payload ID: 15405
  Gene Symbol: SCLY
  Gene Name: selenocysteine lyase
  ENSP ID: ENSP00000402078
  MOD_RES (1)..(1): Any amino acid
XVEEQVAAVTFVPVSKVSGQAEVDDILAAVRPTTRLVTIMLANNETGIVMPVPEISQRIKALNQERVAAGLPPILVHTDAAQALGKQRVDVEDLGVDFLTIVGHKGRAACHRAEHESLAPALPPRLGFHPAPKAFVTLRVKRGGTQRRHKEAAGLCIAEHFSCVPLST

SEQ ID NO: 77196 - protein, 251 aa, Homo sapiens
  Payload ID: 15405
  Gene Symbol: SCLY
  Gene Name: selenocysteine lyase
  ENSP ID: ENSP00000404444
  MOD_RES (1)..(1): Any amino acid
XEQVAAVTFVPVSKVSGQAEVDDILAAVRPTTRLVTIMLANNETGIVMPVPEISQRIKALNQERVAAGLPPILVHTDAAQALGKQRVDVEDLGVDFLTIVGHKFYGPRIGALYIRGLGEFTPLYPMLFGGGQERNFRPGTENTPMIAGLGKAEFGQKRIHLNSQFPGTQRLPNTCNFSIRGPRLQGHVVLAQCRVLMASVGAACHSDHGDQGFFSQNALAFGHTSHVDICIGVIFSGITFLMCGFTVQGTT

SEQ ID NO: 77197 - protein, 151 aa, Homo sapiens
  Payload ID: 15405
  Gene Symbol: SCLY
  Gene Name: selenocysteine lyase
  ENSP ID: ENSP00000404473
APAASQPSGCGKHNSPERKVYMDYNATTPLEPEVIQAMTKAMWEAWGNPSSPYSAGRKAKDIINAARESLAKMIGGKPQDIIFTSGGTESNNLVIHSVVKHFHANQTSKGHTGGHHSPVKGAKPHFITSSVEHDSIRLPLEHLVEEQVAGE

SEQ ID NO: 77198 - protein, 59 aa, Homo sapiens
  Payload ID: 15405
  Gene Symbol: SCLY
  Gene Name: selenocysteine lyase
  ENSP ID: ENSP00000405907
  MOD_RES (1)..(1): Any amino acid
XGYLPSSCTRMLHRPWGSSAWMWRTWAWTSLQSWGTRTENTPMIAGLGKVSPGELEEMS

SEQ ID NO: 77199 - protein, 109 aa, Homo sapiens
  Payload ID: 15405
  Gene Symbol: SCLY
  Gene Name: selenocysteine lyase
  ENSP ID: ENSP00000406710
DAPAPAASQPSGCGKHNSPERCAPLGQGWGAAGACRRLSRAGGRRGLPACGRSRVGRPARGCPRGRPKSGMRASRRSGCELWPRKGPRRGKFIWTIMQRLPWSQKLSRP

SEQ ID NO: 77200 - protein, 241 aa, Homo sapiens
  Payload ID: 15405
  Gene Symbol: SCLY
  Gene Name: selenocysteine lyase
  ENSP ID: ENSP00000414053
VSGQAEVDDILAAVRPTTRLVTIMLANNETGIVMPVPEISQRIKALNQERVAAGLPPILVHTDAAQALGKQRVDVEDLGVDFLTIVGHKFYGPRIGALYIRGLGEFTPLYPMLFGGGQERNFRPGTENTPMIAGLGKAAELVTQNCEAYEAHMRDVRDYLEERLEAEFGQKRIHLNSQFPGTQRLPNTCNFSIRGPRLQGHVVLAQCRVLMASVGAACHSDHGDHSSCSSVSPSPGRPQCC

SEQ ID NO: 77201 - protein, 170 aa, Homo sapiens
  Payload ID: 15405
  Gene Symbol: SCLY
  Gene Name: selenocysteine lyase
  ENSP ID: ENSP00000414165
MPGSSGAGMEAAVAPGRDAPAPAASQPSGCGKHNSPERKVYMDYNATTPLEPEVIQAMTKAMWEAWGNPSSPYSAAVTFVPVSKVSGQAEVDDILAAVRPTTRLVTIMLANNETGIVMPVPEISQRIKALNQERVAAGLPPILVHTDAAQALGKQRVDVEDLGVDFLTIV

SEQ ID NO: 77202 - protein, 195 aa, Homo sapiens
  Payload ID: 15405
  Gene Symbol: SCLY
  Gene Name: selenocysteine lyase
  ENSP ID: ENSP00000416344
  MOD_RES (1)..(1): Any amino acid
XMEAAVAPGRDAPAPAASQPSGCGKHNSPERKVYMDYNATTPLEPEVIQAMTKAMWEAWGNPSSPYSAGRKAKDIINAARESLAKMIGGKPQDIIFTSGGTEAAELVTQNCEAYEAHMRDVRDYLEERLEAEFGQKRIHLNSQFPGTQRLPNTCNFSIRGPRLQGHVVLAQCRVLMASVGAACHSDHGDQPSPVL

SEQ ID NO: 77203 - protein, 321 aa, Homo sapiens
  Payload ID: 15406
  Gene Symbol: SEPHS1
  Gene Name: selenophosphate synthetase 1
  Uniprot ID: P49903
  ENSP ID: ENSP00000367877
MSTRESFNPESYELDKSFRLTRFTELKGTGCKVPQDVLQKLLESLQENHFQEDEQFLGAVMPRLGIGMDTCVIPLRHGGLSLVQTTDYIYPIVDDPYMMGRIACANVLSDLYAMGVTECDNMLMLLGVSNKMTDRERDKVMPLIIQGFKDAAEEAGTSVTGGQTVLNPWIVLGGVATTVCQPNEFIMPDNAVPGDVLVLTKPLGTQVAVAVHQWLDIPEKWNKIKLVVTQEDVELAYQEAMMNMARLNRTGGLLICLPREQAARFCAEIKSPKYGEGHQAWIIGIVEKGNRTARIIDKPRIIEVAPQVATQNVNPTPGATS

SEQ ID NO: 77204 - protein, 392 aa, Homo sapiens
  Payload ID: 15406
  Gene Symbol: SEPHS1
  Gene Name: selenophosphate synthetase 1
  Uniprot ID: P49903
  ENSP ID: ENSP00000367893
MSTRESFNPESYELDKSFRLTRFTELKGTGCKVPQDVLQKLLESLQENHFQEDEQFLGAVMPRLGIGMDTCVIPLRHGGLSLVQTTDYIYPIVDDPYMMGRIACANVLSDLYAMGVTECDNMLMLLGVSNKMTDRERDKVMPLIIQGFKDAAEEAGTSVTGGQTVLNPWIVLGGVATTVCQPNEFIMPDNAVPGDVLVLTKPLGTQVAVAVHQWLDIPEKWNKIKLVVTQEDVELAYQEAMMNMARLNRTAAGLMHTFNAHAATDITGFGILGHAQNLAKQQRNEVSFVIHNLPVLAKMAAVSKACGNMFGLMHGTCPETSGGLLICLPREQAARFCAEIKSPKYGEGHQAWIIGIVEKGNRTARIIDKPRIIEVAPQVATQNVNPTPGATS

SEQ ID NO: 77205 - protein, 91 aa, Homo sapiens
  Payload ID: 15406
  Gene Symbol: SEPHS1
  Gene Name: selenophosphate synthetase 1
  ENSP ID: ENSP00000400418
MDTCVIPLRHGGLSLVQTTDYIYPIVDDPYMMGRIACANVLSDLYAMGVTECDNMLMLLGVSNKMTDRERDKVMPLIIQGFKDAAEEAGTS

SEQ ID NO: 77206 - protein, 166 aa, Homo sapiens
  Payload ID: 15406
  Gene Symbol: SEPHS1
  Gene Name: selenophosphate synthetase 1
  ENSP ID: ENSP00000401732
MSTRESFNPESYELDKSFRLTRFTELKGTGCKVPQDVLQKLLESLQENHFQEDEQFLGAVMPRLGIGMDTCVIPLRHGGLSLVQTTDYIYPIVDDPYMMGRIACANVLSDLYAMGVTECDNMLMLLGVSNKMTDRERDKVMPLIIQGFKDAAEEAGTSVTGGQTVL

SEQ ID NO: 77207 - protein, 325 aa, Homo sapiens
  Payload ID: 15406
  Gene Symbol: SEPHS1
  Gene Name: selenophosphate synthetase 1
  Uniprot ID: P49903
  ENSP ID: ENSP00000441119
MDTCVIPLRHGGLSLVQTTDYIYPIVDDPYMMGRIACANVLSDLYAMGVTECDNMLMLLGVSNKMTDRERDKVMPLIIQGFKDAAEEAGTSVTGGQTVLNPWIVLGGVATTVCQPNEFIMPDNAVPGDVLVLTKPLGTQVAVAVHQWLDIPEKWNKIKLVVTQEDVELAYQEAMMNMARLNRTAAGLMHTFNAHAATDITGFGILGHAQNLAKQQRNEVSFVIHNLPVLAKMAAVSKACGNMFGLMHGTCPETSGGLLICLPREQAARFCAEIKSPKYGEGHQAWIIGIVEKGNRTARIIDKPRIIEVAPQVATQNVNPTPGATS

SEQ ID NO: 77208 - protein, 448 aa, Homo sapiens
  Payload ID: 15407
  Gene Symbol: SEPHS2
  Gene Name: selenophosphate synthetase 2
  ENSP ID: ENSP00000418669
  MOD_RES (60)..(60): Selenocysteine
MAEASATGACGEAMAAAEGSSGPAGLTLGRSFSNYRPFEPQALGLSPSWRLTGFSGMKGXGCKVPQEALLKLLAGLTRPDVRPPLGRGLVGGQEEASQEAGLPAGAGPSPTFPALGIGMDSCVIPLRHGGLSLVQTTDFFYPLVEDPYMMGRIACANVLSDLYAMGITECDNMLMLLSVSQSMSEEEREKVTPLMVKGFRDAAEEGGTAVTGGQTVVNPWIIIGGVATVVCQPNEFIMPDSAVVGDVLVLTKPLGTQVAVNAHQWLDNPERWNKVKMVVSREEVELAYQEAMFNMATLNRTAAGLMHTFNAHAATDITGFGILGHSQNLAKQQRNEVSFVIHNLPIIAKMAAVSKASGRFGLLQGTSAETSGGLLICLPREQAARFCSEIKSSKYGEGHQAWIVGIVEKGNRTARIIDKPRVIEVLPRGATAAVLAPDSSNASSEPSS

SEQ ID NO: 77209 - protein, 72 aa, Homo sapiens
  Payload ID: 15408
  Gene Symbol:
  Gene Name: selenoprotein K [Source:EntrezGene
  Acc:58515]
  ENSP ID: ENSP00000417272
MVYISNGQVLDSRSQSPWRLSLITDFFWGIAEFVVLFFKTLLQQDVKKRRSYGNSSDSRYDDGRGKPSPKNG

SEQ ID NO: 77210 - protein, 94 aa, Homo sapiens
  Payload ID: 15408
  Gene Symbol:
  Gene Name: selenoprotein K [Source:EntrezGene
  Acc:58515]
  ENSP ID: ENSP00000418813
  MOD_RES (92)..(92): Selenocysteine
MVYISNGQVLDSRSQSPWRLSLITDFFWGIAEFVVLFFKTLLQQDVKKRRSYGNSSDSRYDDGRGPPGNPPRRMGRINHLRGPSPPPMAGGXGR

SEQ ID NO: 77211 - protein, 93 aa, Homo sapiens
  Payload ID: 15408
  Gene Symbol:
  Gene Name: selenoprotein K [Source:EntrezGene
  Acc:58515]
  ENSP ID: ENSP00000443164
MVYISNGQVLDSRSQSPWRLSLITDFFWGIAEFVVLFFKTLLQQDVKKRRSYGNSSDSRYDDGRGPPGNPPRRMGRINHLRGPSPPPMAGGGR

SEQ ID NO: 77212 - protein, 145 aa, Homo sapiens
  Payload ID: 15409
  Gene Symbol:
  Gene Name: selenoprotein M [Source:EntrezGene
  Acc:140606]
  ENSP ID: ENSP00000383155
  MOD_RES (48)..(48): Selenocysteine
MSLLLPPLALLLLLAALVAPATAATAYRPDWNRLSGLTRARVETCGGXQLNRLKEVKAFVTQDIPFYHNLVMKHLPGADPELVLLGRRYEELERIPLSEMTREEINALVQELGFYRKAAPDAQVPPEYVWAPAKPPEETSDHADL

SEQ ID NO: 77213 - protein, 145 aa, Homo sapiens; identical to SEQ ID NO: 77212
  Payload ID: 15409
  Gene Symbol:
  Gene Name: selenoprotein M [Source:EntrezGene
  Acc:140606]
  ENSP ID: ENSP00000384564
  MOD_RES (48)..(48): Selenocysteine

SEQ ID NO: 77214 - protein, 144 aa, Homo sapiens
  Payload ID: 15409
  Gene Symbol:
  Gene Name: selenoprotein M [Source:EntrezGene
  Acc:140606]
  ENSP ID: ENSP00000480176
MSLLLPPLALLLLLAALVAPATAATAYRPDWNRLSGLTRARVETCGGQLNRLKEVKAFVTQDIPFYHNLVMKHLPGADPELVLLGRRYEELERIPLSEMTREEINALVQELGFYRKAAPDAQVPPEYVWAPAKPPEETSDHADL

SEQ ID NO: 77215 - protein, 556 aa, Homo sapiens
  Payload ID: 15410
  Gene Symbol: SEPN1
  Gene Name: selenoprotein N, 1
  ENSP ID: ENSP00000346109
MGRARPGQRGPPSPGPAAQPPAPPRRRARSLALLGALLAAAAAAAVRVCARHAEAQAAARQELALKTLGTDGLFLFSSLDTDGDMYISPEEFKPIAEKLTGSTPAASCEEEELPPDPSEETLTIEARFQPLLPETMTKSKDGFLGVSRLALSGLRNWTAAASPSAVFATRHFQPFLPPPGQELGEPWWIIPSELSMFTGYLSNNRFYPPPPKGKEVIIHRLLSMFHPRPFVKTRFAPQGAVACLTAISDFYYTVMFRIHAEFQLSEPPDFPFWFSPAQFTGHIILSKDATHVRDFRLFVPNHRSLNVDMEWLYGASESSNMEVDIGYIPQMELEATGPSVPSVILDEDGSMIDSHLPSGEPLQFVFEEIKWQQELSWEEAARRLEVAMYPFKKVSYLPFTEAFDRAKAENKLVHSILLWGALDDQSCHCSGRTLRETVLESSPILTLLNESFISTWSLVKELEELQNNQENSSHQKLAGLHLEKYSFPVEMMICLPNGTVVHHINANYFLDITSVKPEEIESNLFSFSSTFEDPSTATYMQFLKEGLRRGLPLLQP

SEQ ID NO: 77216 - protein, 590 aa, Homo sapiens
  Payload ID: 15410
  Gene Symbol: SEPN1
  Gene Name: selenoprotein N, 1
  Uniprot ID: Q9NZV5
  ENSP ID: ENSP00000355141
  MOD_RES (127)..(127): Selenocysteine
  MOD_RES (462)..(462): Selenocysteine
MGRARPGQRGPPSPGPAAQPPAPPRRRARSLALLGALLAAAAAAAVRVCARHAEAQAAARQELALKTLGTDGLFLFSSLDTDGDMYISPEEFKPIAEKLTGSCSVTQTGVQWCSHSSLQPQLPWLNXSSCLSLLRSTPAASCEEEELPPDPSEETLTIEARFQPLLPETMTKSKDGFLGVSRLALSGLRNWTAAASPSAVFATRHFQPFLPPPGQELGEPWWIIPSELSMFTGYLSNNRFYPPPPKGKEVIIHRLLSMFHPRPFVKTRFAPQGAVACLTAISDFYYTVMFRIHAEFQLSEPPDFPFWFSPAQFTGHIILSKDATHVRDFRLFVPNHRSLNVDMEWLYGASESSNMEVDIGYIPQMELEATGPSVPSVILDEDGSMIDSHLPSGEPLQFVFEEIKWQQELSWEEAARRLEVAMYPFKKVSYLPFTEAFDRAKAENKLVHSILLWGALDDQSCXGSGRTLRETVLESSPILTLLNESFISTWSLVKELEELQNNQENSSHQKLAGLHLEKYSFPVEMMICLPNGTVVHHINANYFLDITSVKPEEIESNLFSFSSTFEDPSTATYMQFLKEGLRRGLPLLQP

SEQ ID NO: 77217 - protein, 556 aa, Homo sapiens
  Payload ID: 15410
  Gene Symbol: SEPN1
  Gene Name: selenoprotein N, 1
  Uniprot ID: Q9NZV5
  ENSP ID: ENSP00000363434
  MOD_RES (428)..(428): Selenocysteine
MGRARPGQRGPPSPGPAAQPPAPPRRRARSLALLGALLAAAAAAAVRVCARHAEAQAAARQELALKTLGTDGLFLFSSLDTDGDMYISPEEFKPIAEKLTGSTPAASCEEEELPPDPSEETLTIEARFQPLLPETMTKSKDGFLGVSRLALSGLRNWTAAASPSAVFATRHFQPFLPPPGQELGEPWWIIPSELSMFTGYLSNNRFYPPPPKGKEVIIHRLLSMFHPRPFVKTRFAPQGAVACLTAISDFYYTVMFRIHAEFQLSEPPDFPFWFSPAQFTGHIILSKDATHVRDFRLFVPNHRSLNVDMEWLYGASESSNMEVDIGYIPQMELEATGPSVPSVILDEDGSMIDSHLPSGEPLQFVFEEIKWQQELSWEEAARRLEVAMYPFKKVSYLPFTEAFDRAKAENKLVHSILLWGALDDQSCXGSGRTLRETVLESSPILTLLNESFISTWSLVKELEELQNNQENSSHQKLAGLHLEKYSFPVEMMICLPNGTVVHHINANYFLDITSVKPEEIESNLFSFSSTFEDPSTATYMQFLKEGLRRGLPLLQP

SEQ ID NO: 77218 - protein, 66 aa, Homo sapiens
  Payload ID: 15410
  Gene Symbol: SEPN1
  Gene Name: selenoprotein N, 1
  ENSP ID: ENSP00000487549
MMICLPNGTVVHHINANYFLDITSVKPEEIESNLFSFSSTFEDPSTATYMQFLKEGLRRGLPLLQP

SEQ ID NO: 77219 - protein, 669 aa, Homo sapiens
  Payload ID: 15411
  Gene Symbol:
  Gene Name: selenoprotein O [Source:EntrezGene
  Acc:83642]
  ENSP ID: ENSP00000370288
  MOD_RES (667)..(667): Selenocysteine
MAVYRAALGASLAAARLLPLGRCSPSPAPRSTLSGAAMEPAPRWLAGLRFDNRALRALPVEAPPPGPEGAPSAPRPVPGACFTRVQPTPLRQPRLVALSEPALALLGLGAPPAREAEAEAALFFSGNALLPGAEPAAHCYCGHQFGQFAGQLGDGAAMYLGEVCTATGERWELQLKGAGPTPFSRQADGRKVLRSSIREFLCSEAMFHLGVPTTRAGACVTSESTVVRDVFYDGNPKYEQCTVVLRVASTFIRFGSFEIFKSADEHTGRAGPSVGRNDIRVQLLDYVISSFYPEIQAAHASDSVQRNAAFFREVTRRTARMVAEWQCVGFCHGVLNTDNMSILGLTIDYGPFGFLDRYDPDHVCNASDNTGRYAYSKQPEVCRWNLRKLAEALQPELPLELGEAILAEEFDAEFQRHYLQKMRRKLGLVQVELEEDGALVSKLLETMHLTGADFTNTFYLLSSFPVELESPGLAEFLARLMEQCASLEELRLAFRPQMDPRQLSMMLMLAQSNPQLFALMGTRAGIARELERVEQQSRLEQLSAAELQSRNQGHWADWLQAYRARLDKDLEGAGDAAAWQAEHVRVMHANNPKYVLRNYIAQNAIEAAERGDFSEVRRVLKLLETPYHCEAGAATDAEATEADGADGRQRSYSSKPPLWAAELCVTXSS

SEQ ID NO: 77220 - protein, 668 aa, Homo sapiens
  Payload ID: 15411
  Gene Symbol:
  Gene Name: selenoprotein O [Source:EntrezGene
  Acc:83642]
  ENSP ID: ENSP00000483593
MAVYRAALGASLAAARLLPLGRCSPSPAPRSTLSGAAMEPAPRWLAGLRFDNRALRALPVEAPPPGPEGAPSAPRPVPGACFTRVQPTPLRQPRLVALSEPALALLGLGAPPAREAEAEAALFFSGNALLPGAEPAAHCYCGHQFGQFAGQLGDGAAMYLGEVCTATGERWELQLKGAGPTPFSRQADGRKVLRSSIREFLCSEAMFHLGVPTTRAGACVTSESTVVRDVFYDGNPKYEQCTVVLRVASTFIRFGSFEIFKSADEHTGRAGPSVGRNDIRVQLLDYVISSFYPEIQAAHASDSVQRNAAFFREVTRRTARMVAEWQCVGFCHGVLNTDNMSILGLTIDYGPFGFLDRYDPDHVCNASDNTGRYAYSKQPEVCRWNLRKLAEALQPELPLELGEAILAEEFDAEFQRHYLQKMRRKLGLVQVELEEDGALVSKLLETMHLTGADFTNTFYLLSSFPVELESPGLAEFLARLMEQCASLEELRLAFRPQMDPRQLSMMLMLAQSNPQLFALMGTRAGIARELERVEQQSRLEQLSAAELQSRNQGHWADWLQAYRARLDKDLEGAGDAAAWQAEHVRVMHANNPKYVLRNYIAQNAIEAAERGDFSEVRRVLKLLETPYHCEAGAATDAEATEADGADGRQRSYSSKPPLWAAELCVTSS

SEQ ID NO: 77221 - protein, 381 aa, Homo sapiens
  Payload ID: 15412
  Gene Symbol: SEPP1
  Gene Name: selenoprotein P, plasma, 1
  Uniprot ID: P49908
  ENSP ID: ENSP00000420939
  MOD_RES (59)..(59): Selenocysteine
  MOD_RES (300)..(300): Selenocysteine
  MOD_RES (318)..(318): Selenocysteine
  MOD_RES (330)..(330): Selenocysteine
  MOD_RES (345)..(345): Selenocysteine
  MOD_RES (352)..(352): Selenocysteine
  MOD_RES (367)..(367): Selenocysteine
  MOD_RES (369)..(369): Selenocysteine
  MOD_RES (376)..(376): Selenocysteine
  MOD_RES (378)..(378): Selenocysteine
MWRSLGLALALCLLPSGGTESQDQSSLCKQPPAWSIRDQDPMLNSNGSVTVVALLQASXYLCILQASKLEDLRVKLKKEGYSNISYIVVNHQGISSRLKYTHLKNKVSEHIPVYQQEENQTDVWTLLNGSKDDFLIYDRCGRLVYHLGLPFSFLTFPYVEEAIKIAYCEKKCGNCSLTTLKDEDFCKRVSLATVDKTVETPSPHYHHEHHHNHGHQHLGSSELSENQQPGAPNAPTHPAPPGLHHHHKHKGQHRQGHPENRDMPASEDLQDLQKKLCRKRCINQLLCKLPTDSELAPRSXCCHCRHLIFEKTGSAITXQCKENLPSLCSXQGLRAEENITESCQXRLPPAAXQISQQLIPTEASASXRXKNQAKKXEXPSN

SEQ ID NO: 77222 - protein, 310 aa, Homo sapiens
  Payload ID: 15412
  Gene Symbol: SEPP1
  Gene Name: selenoprotein P, plasma, 1
  ENSP ID: ENSP00000421626
  MOD_RES (59)..(59): Selenocysteine
  MOD_RES (300)..(300): Selenocysteine
MWRSLGLALALCLLPSGGTESQDQSSLCKQPPAWSIRDQDPMLNSNGSVTVVALLQASXYLCILQASKLEDLRVKLKKEGYSNISYIVVNHQGISSRLKYTHLKNKVSEHIPVYQQEENQTDVWTLLNGSKDDFLIYDRCGRLVYHLGLPFSFLTFPYVEEAIKIAYCEKKCGNCSLTTLKDEDFCKRVSLATVDKTVETPSPHYHHEHHHNHGHQHLGSSELSENQQPGAPNAPTHPAPPGLHHHHKHKGQHRQGHPENRDMPASEDLQDLQKKLCRKRCINQLLCKLPTDSELAPRSXCCHCRHLIFE

SEQ ID NO: 77223 - protein, 381 aa, Homo sapiens; identical to SEQ ID NO: 77221
  Payload ID: 15412
  Gene Symbol: SEPP1
  Gene Name: selenoprotein P, plasma, 1
  Uniprot ID: P49908
  ENSP ID: ENSP00000425915
  MOD_RES (59)..(59): Selenocysteine
  MOD_RES (300)..(300): Selenocysteine
  MOD_RES (318)..(318): Selenocysteine
  MOD_RES (330)..(330): Selenocysteine
  MOD_RES (345)..(345): Selenocysteine
  MOD_RES (352)..(352): Selenocysteine
  MOD_RES (367)..(367): Selenocysteine
  MOD_RES (369)..(369): Selenocysteine
  MOD_RES (376)..(376): Selenocysteine
  MOD_RES (378)..(378): Selenocysteine

SEQ ID NO: 77224 - protein, 209 aa, Homo sapiens
  Payload ID: 15412
  Gene Symbol: SEPP1
  Gene Name: selenoprotein P, plasma, 1
  ENSP ID: ENSP00000427414
  MOD_RES (59)..(59): Selenocysteine
MWRSLGLALALCLLPSGGTESQDQSSLCKQPPAWSIRDQDPMLNSNGSVTVVALLQASXYLCILQASKLEDLRVKLKKEGYSNISYIVVNHQGISSRLKYTHLKNKVSEHIPVYQQEENQTDVWTLLNGSKDDFLIYDRCGRLVYHLGLPFSFLTFPYVEEAIKIAYCEKKCGNCSLTTLKDEDFCKRVSLATVDKTVETPSPHYHHEH

SEQ ID NO: 77225 - protein, 381 aa, Homo sapiens; identical to SEQ ID NO: 77221
  Payload ID: 15412
  Gene Symbol: SEPP1
  Gene Name: selenoprotein P, plasma, 1
  Uniprot ID: P49908
  ENSP ID: ENSP00000427671
  MOD_RES (59)..(59): Selenocysteine
  MOD_RES (300)..(300): Selenocysteine
  MOD_RES (318)..(318): Selenocysteine
  MOD_RES (330)..(330): Selenocysteine
  MOD_RES (345)..(345): Selenocysteine
  MOD_RES (352)..(352): Selenocysteine
  MOD_RES (367)..(367): Selenocysteine
  MOD_RES (369)..(369): Selenocysteine
  MOD_RES (376)..(376): Selenocysteine
  MOD_RES (378)..(378): Selenocysteine

SEQ ID NO: 77226 - protein, 171 aa, Homo sapiens
  Payload ID: 15412
  Gene Symbol: SEPP1
  Gene Name: selenoprotein P, plasma, 1
  ENSP ID: ENSP00000473340
  MOD_RES (59)..(59): Selenocysteine
MWRSLGLALALCLLPSGGTESQDQSSLCKQPPAWSIRDQDPMLNSNGSVTVVALLQASXYLCILQASKLSKMKTFVNVYLWLLWIKQLKLHRLITIMSIITIMDISTLAAVSFQRISNQEHQMLLLILLLQAFITTISTRVSIGRVTQRTEICQQVKIYKIYKRSSVERDV

SEQ ID NO: 77227 - protein, 45 aa, Homo sapiens
  Payload ID: 15413
  Gene Symbol:
  Gene Name: selenoprotein T [Source:EntrezGene
  Acc:51714]
  ENSP ID: ENSP00000417703
MRLLLLLLVAASAMVRSEASANLGGVPSKRLKMQYATGPLLKFQI

SEQ ID NO: 77228 - protein, 137 aa, Homo sapiens
  Payload ID: 15413
  Gene Symbol:
  Gene Name: selenoprotein T [Source:EntrezGene
  Acc:51714]
  ENSP ID: ENSP00000417762
MRVISQRYPDIRIEGENYLPQPIYRHIASFLSVFKLVLIGLIIVGKDPFAFFGMQAPSIWQWGQENKVYACMMVFFLSNMIENQCMSTGAFEITLNDVPVWSKLESGHLPSMQQLVQILDNEMKLNVHMDSIPHHRS

SEQ ID NO: 77229 - protein, 137 aa, Homo sapiens; identical to SEQ ID NO: 77228
  Payload ID: 15413
  Gene Symbol:
  Gene Name: selenoprotein T [Source:EntrezGene
  Acc:51714]
  ENSP ID: ENSP00000417932

SEQ ID NO: 77230 - protein, 195 aa, Homo sapiens
  Payload ID: 15413
  Gene Symbol:
  Gene Name: selenoprotein T [Source:EntrezGene
  Acc:51714]
  ENSP ID: ENSP00000418910
  MOD_RES (49)..(49): Selenocysteine
MRLLLLLLVAASAMVRSEASANLGGVPSKRLKMQYATGPLLKFQICVSXGYRRVFEEYMRVISQRYPDIRIEGENYLPQPIYRHIASFLSVFKLVLIGLIIVGKDPFAFFGMQAPSIWQWGQENKVYACMMVFFLSNMIENQCMSTGAFEITLNDVPVWSKLESGHLPSMQQLVQILDNEMKLNVHMDSIPHHRS

SEQ ID NO: 77231 - protein, 137 aa, Homo sapiens; identical to SEQ ID NO: 77228
  Payload ID: 15413
  Gene Symbol:
  Gene Name: selenoprotein T [Source:EntrezGene
  Acc:51714]
  ENSP ID: ENSP00000420390

SEQ ID NO: 77232 - protein, 195 aa, Homo sapiens [sequence omitted]

SEQ ID NO: 77233 - protein, 346 aa, Homo sapiens
  Payload ID: 15414
  Gene Symbol:
  Gene Name: selenoprotein V [Source:EntrezGene
  Acc:348303]
  ENSP ID: ENSP00000333956
  MOD_RES (273)..(273): Selenocysteine
MNNQARTPAPSSARTSTSVRASTPTRTPTPLRTPTPVRTRTPIRTLTPVLTPSPAGTSPLVLTPAPAQIPTLVPTPALARIPRLVPPPAPAWIPTPVPTPVPVRNPTPVPTPARTLTPPVRVPAPAPAQLLAGIRAALPVLDSYLAPALPLDPPPEPAPELPLLPEEDPEPAPSLKLIPSVSSEAGPAPGPLPTRTPLAANSPGPTLDFTFRADPSAIGLADPPIPSPVPSPILGTIPSAISLQNCTETFPSSSENFALDKRVLIRVTYCGLXSYSLRYILLKKSLEQQFPNHLLFEEDRAAQATGEFEVFVNGRLVHSKKRGDGFVNESRLQKIVSVIDEEIKKR

SEQ ID NO: 77234 - protein, 345 aa, Homo sapiens
  Payload ID: 15414
  Gene Symbol:
  Gene Name: selenoprotein V [Source:EntrezGene
  Acc:348303]
  ENSP ID: ENSP00000412508
MNNQARTPAPSSARTSTSVRASTPTRTPTPLRTPTPVRTRTPIRTLTPVLTPSPAGTSPLVLTPAPAQIPTLVPTPALARIPRLVPPPAPAWIPTPVPTPVPVRNPTPVPTPARTLTPPVRVPAPAPAQLLAGIRAALPVLDSYLAPALPLDPPPEPAPELPLLPEEDPEPAPSLKLIPSVSSEAGPAPGPLPTRTPLAANSPGPTLDFTFRADPSAIGLADPPIPSPVPSPILGTIPSAISLQNCTETFPSSSENFALDKRVLIRVTYCGLSYSLRYILLKKSLEQQFPNHLLFEEDRAAQATGEFEVFVNGRLVHSKKRGDGFVNESRLQKIVSVIDEEIKKR

SEQ ID NO: 77235 - protein, 73 aa, Homo sapiens
  Payload ID: 15414
  Gene Symbol:
  Gene Name: selenoprotein V [Source:EntrezGene
  Acc:348303]
  ENSP ID: ENSP00000470671
  MOD_RES (1)..(1): Any amino acid
XSPGPTLDFTFRADPSAIGLADPPIPSPVPSPILGTIPSAISLQNCTETFPSSSENFALDKRVLIRVTYCTFY

SEQ ID NO: 77236 - protein, 346 aa, Homo sapiens [sequence omitted]

SEQ ID NO: 77237 - protein, 88 aa, Homo sapiens [sequence omitted]

SEQ ID NO: 77238 - protein, 85 aa, Homo sapiens
  Payload ID: 15415
  Gene Symbol: SEPW1
  Gene Name: selenoprotein W, 1
  ENSP ID: ENSP00000470135
  MOD_RES (19)..(19): Selenocysteine
  MOD_RES (52)..(52): Selenocysteine
  MOD_RES (84)..(84): Selenocysteine
MWQPRAMALAVRVVYCGAXGYKSKYLQLKKKLEDEFPGRLDIVSLGMGRKTXAQPLCRSVRPGWHCRGVSAARELPRPPGSLKXW

SEQ ID NO: 77239 - protein, 87 aa, Homo sapiens
  Payload ID: 15415
  Gene Symbol: SEPW1
  Gene Name: selenoprotein W, 1
  Uniprot ID: P63302
  ENSP ID: ENSP00000470941
  MOD_RES (13)..(13): Selenocysteine
MALAVRVVYCGAXGYKSKYLQLKKKLEDEFPGRLDICGEGTPQATGFFEVMVAGKLIHSKKKGDGYVDTESKFLKLVAAIKAALAQG

SEQ ID NO: 77240 - protein, 87 aa, Homo sapiens; identical to SEQ ID NO: 77239
  Payload ID: 15415
  Gene Symbol: SEPW1
  Gene Name: selenoprotein W, 1
  Uniprot ID: P63302
  ENSP ID: ENSP00000471149
  MOD_RES (13)..(13): Selenocysteine

SEQ ID NO: 77241 - protein, 87 aa, Homo sapiens; identical to SEQ ID NO: 77239
  Payload ID: 15415
  Gene Symbol: SEPW1
  Gene Name: selenoprotein W, 1
  Uniprot ID: P63302
  ENSP ID: ENSP00000473185
  MOD_RES (13)..(13): Selenocysteine

SEQ ID NO: 77242 - protein, 86 aa, Homo sapiens
  Payload ID: 15415
  Gene Symbol: SEPW1
  Gene Name: selenoprotein W, 1
  ENSP ID: ENSP00000480640
MALAVRVVYCGAGYKSKYLQLKKKLEDEFPGRLDICGEGTPQATGFFEVMVAGKLIHSKKKGDGYVDTESKFLKLVAAIKAALAQG

SEQ ID NO: 77243 - protein, 771 aa, Homo sapiens [sequence omitted]

SEQ ID NO: 77244 - protein, 149 aa, Homo sapiens
  Payload ID: 15416
  Gene Symbol: SEMA3A
  Gene Name: sema domain, immunoglobulin domain (Ig), short basic domain, secreted, (semaphorin) 3A
  ENSP ID: ENSP00000391900
MGWLTRIVCLFWGVLLTARANYQNGKNNVPRLKLSYKEMLESNNVITFNGLANSSSYHTFLLDEERSRLYVGAKDHIFSFDLVNIKDFQKIVWPVSYTRRDECKWAGKDILKECANFIKVLKAYNQTHLYACGTGAFHPICTYIEIGHH

SEQ ID NO: 77245 - protein, 37 aa, Homo sapiens
  Payload ID: 15416
  Gene Symbol: SEMA3A
  Gene Name: sema domain, immunoglobulin domain (Ig), short basic domain, secreted, (semaphorin) 3A
  ENSP ID: ENSP00000402093
MGWLTRIVCLFWGVLLTARANYQNGKNNVPRLKLSYK

SEQ ID NO: 77246 - protein, 19 aa, Homo sapiens
  Payload ID: 15416
  Gene Symbol: SEMA3A
  Gene Name: sema domain, immunoglobulin domain (Ig), short basic domain, secreted, (semaphorin) 3A
  ENSP ID: ENSP00000404800
MGWLTRIVCLFWGVLLTAR

SEQ ID NO: 77247 - protein, 771 aa, Homo sapiens [sequence omitted]

SEQ ID NO: 77248 - protein, 754 aa, Homo sapiens
  Payload ID: 15417
  Gene Symbol: SEMA3B
  Gene Name: sema domain, immunoglobulin domain (Ig), short basic domain, secreted, (semaphorin) 3B
  ENSP ID: ENSP00000480680
MGRAGAAAVIPGLALLWAVGLGSAAPSPPRLRLSFQELQAWHGLQTFSLERTCCYQALLVDEERGRLFVGAENHVASLNLDNISKRAKKLAWPAPVEWREECNWAGKDIGTECMNFVKLLHAYNRTHLLACGTGAFHPTCAFVEVGHRAEEPVLRLDPGRIEDGKGKSPYDPRHRAASVLVGEELYSGVAADLMGRDFTIFRSLGQRPSLRTEPHDSRWLNEPKFVKVFWIPESENPDDDKIYFFFRETAVEAAPALGRLSVSRVGQICRNDVGGQRSLVNKWTTFLKARLVCSVPGVEGDTHFDQLRPFPAEDVFLLSSRDHRTPLLYAVFSTSSSIFQGSAVCVYSMNDVRRAFLGPFAHKEGPMHQWVSYQGRVPYPRPGMCPSKTFGTFSSTKDFPDDVIQFARNHPLMYNSVLPTGGRPLFLQVGANYTFTQIAADRVAAADGHYDVLFIGTDVGTVLKVISVPKGSRPSAEGLLLEELHVFEDSAAVTSMQISSKRHQLYVASRSAVAQIALHRCAAHGRVCTECCLARDPYCAWDGVACTRFQPSAKRRFRRQDVRNGDPSTLCSGDSSRPALLEHKVFGVEGSSAFLECEPRSLQARVEWTFQRAGVTAHTQVLAEERTERTARGLLLRRLRRRDSGVYLCAAVEQGFTQPLRRLSLHVLSATQAERLARAEEAAPAAPPGPKLWYRDFLQLVEPGGGGSANSLRMCRPQPALQSLPLESRRKGRNRRTHAPEPRAERGPRSATHW

SEQ ID NO: 77249 - protein, 749 aa, Homo sapiens
  Payload ID: 15417
  Gene Symbol: SEMA3B
  Gene Name: sema domain, immunoglobulin domain (Ig), short basic domain, secreted, (semaphorin) 3B
  Uniprot ID: Q13214
  ENSP ID: ENSP00000481957
MGRAGAAAVIPGLALLWAVGLGSAAPSPPRLRLSFQELQAWHGLQTFSLERTCCYQALLVDEERGRLFVGAENHVASLNLDNISKRAKKLAWPAPVEWREECNWAGKDIGTECMNFVKLLHAYNRTHLLACGTGAFHPTCAFVEVGHRAEEPVLRLDPGRIEDGKGKSPYDPRHRAASVLVGEELYSGVAADLMGRDFTIFRSLGQRPSLRTEPHDSRWLNEPKFVKVFWIPESENPDDDKIYFFFRETAVEAAPALGRLSVSRVGQICRNDVGGQRSLVNKWTTFLKARLVCSVPGVEGDTHFDQLQDVFLLSSRDHRTPLLYAVFSTSSSIFQGSAVCVYSMNDVRRAFLGPFAHKEGPMHQWVSYQGRVPYPRPGMCPSKTFGTFSSTKDFPDDVIQFARNHPLMYNSVLPTGGRPLFLQVGANYTFTQIAADRVAAADGHYDVLFIGTDVGTVLKVISVPKGSRPSAEGLLLEELHVFEDSAAVTSMQISSKRHQLYVASRSAVAQIALHRCAAHGRVCTECCLARDPYCAWDGVACTRFQPSAKRRFRRQDVRNGDPSTLCSGDSSRPALLEHKVFGVEGSSAFLECEPRSLQARVEWTFQRAGVTAHTQVLAEERTERTARGLLLRRLRRRDSGVYLCAAVEQGFTQPLRRLSLHVLSATQAERLARAEEAAPAAPPGPKLWYRDFLQLVEPGGGGSANSLRMCRPQPALQSLPLESRRKGRNRRTHAPEPRAERGPRSATHW

SEQ ID NO: 77250 - protein, 214 aa, Homo sapiens
  Payload ID: 15417
  Gene Symbol: SEMA3B
  Gene Name: sema domain, immunoglobulin domain (Ig), short basic domain, secreted, (semaphorin) 3B
  ENSP ID: ENSP00000482586
MGRAGAAAVIPGLALLWAVGLGSAAPSPPRLRLSFQELQAWHGLQTFSLERTCCYQALLVDEERGRLFVGAENHVASLNLDNISKRAKKLAWPAPVEWREECNWAGKDIGTECMNFVKLLHAYNRTHLLACGTGAFHPTCAFVEVGHRAEEPVLRLDPGRIEDGKGKSPYDPRHRAASVLVGEELYSGVAADLMGRDFTIFRSLGQRPSLRTEP

SEQ ID NO: 77251 - protein, 749 aa, Homo sapiens; identical to SEQ ID NO: 77249
  Payload ID: 15417
  Gene Symbol: SEMA3B
  Gene Name: sema domain, immunoglobulin domain (Ig), short basic domain, secreted, (semaphorin) 3B
  Uniprot ID: Q13214
  ENSP ID: ENSP00000484146

SEQ ID NO: 77252 - protein, 457 aa, Homo sapiens
  Payload ID: 15417
  Gene Symbol: SEMA3B
  Gene Name: sema domain, immunoglobulin domain (Ig), short basic domain, secreted, (semaphorin) 3B
  ENSP ID: ENSP00000484583
MGRAGAAAVIPGLALLWAVGLGSAAPSPPRLRLSFQELQAWHGLQTFSLERTCCYQALLVDEERGRLFVGAENHVASLNLDNISKRAKKLAWPAPVEWREECNWAGKDIGTECMNFVKLLHAYNRTHLLACGTGAFHPTCAFVEVGHRAEEPVLRLDPGRIEDGKGKSPYDPRHRAASVLVGEELYSGVAADLMGRDFTIFRSLGQRPSLRTEPHDSRWLNEPKFVKVFWIPESENPDDDKIYFFFRETAVEAAPALGRLSVSRVGQICRNDVGGQRSLVNKWTTFLKARLVCSVPGVEGDTHFDQLQDVFLLSSRDHRTPLLYAVFSTSSSIFQGSAVCVYSMNDVRRAFLGPFAHKEGPMHQWVSYQGRVPYPRQACAPARPLAPSVPPRTSQTMSSSLRGTTPSCTTLSCPLGGALFSYKLEPITPSLKLPRTGLQPLTDTMTSSSLAQTLARC

SEQ ID NO: 77253 - protein, 406 aa, Homo sapiens
  Payload ID: 15417
  Gene Symbol: SEMA3B
  Gene Name: sema domain, immunoglobulin domain (Ig), short basic domain, secreted, (semaphorin) 3B
  ENSP ID: ENSP00000485173
MNDVRRAFLGPFAHKEGPMHQWVSYQGRVPYPRPGMCPSKTFGTFSSTKDFPDDVIQFARNHPLMYNSVLPTGGRPLFLQVGANYTFTQIAADRVAAADGHYDVLFIGTDVGTVLKVISVPKGSRPSAEGLLLEELHVFEDSAAVTSMQISSKRHQLYVASRSAVAQIALHRCAAHGRVCTECCLARDPYCAWDGVACTRFQPSAKRRFRRQDVRNGDPSTLCSGDSSRPALLEHKVFGVEGSSAFLECEPRSLQARVEWTFQRAGVTAHTQVLAEERTERTARGLLLRRLRRRDSGVYLCAAVEQGFTQPLRRLSLHVLSATQAERLARAEEAAPAAPPGPKLWYRDFLQLVEPGGGGSANSLRMCRPQPALQSLPLESRRKGRNRRTHAPEPRAERGPRSATHW

SEQ ID NO: 77254 - protein, 748 aa, Homo sapiens
  Payload ID: 15417
  Gene Symbol: SEMA3B
  Gene Name: sema domain, immunoglobulin domain (Ig), short basic domain, secreted, (semaphorin) 3B
  Uniprot ID: Q13214
  ENSP ID: ENSP00000485281
MGRAGAAAVIPGLALLWAVGLGSAAPSPPRLRLSFQELQAWHGLQTFSLERTCCYQALLVDEERGRLFVGAENHVASLNLDNISKRAKKLAWPAPVEWREECNWAGKDIGTECMNFVKLLHAYNRTHLLACGTGAFHPTCAFVEVGHRAEEPVLRLDPGRIEDGKGKSPYDPRHRAASVLVGEELYSGVAADLMGRDFTIFRSLGQRPSLRTEPHDSRWLNEPKFVKVFWIPESENPDDDKIYFFFRETAVEAAPALGRLSVSRVGQICRNDVGGQRSLVNKWTTFLKARLVCSVPGVEGDTHFDQLQDVFLLSSRDHRTPLLYAVFSTSSIFQGSAVCVYSMNDVRRAFLGPFAHKEGPMHQWVSYQGRVPYPRPGMCPSKTFGTFSSTKDFPDDVIQFARNHPLMYNSVLPTGGRPLFLQVGANYTFTQIAADRVAAADGHYDVLFIGTDVGTVLKVISVPKGSRPSAEGLLLEELHVFEDSAAVTSMQISSKRHQLYVASRSAVAQIALHRCAAHGRVCTECCLARDPYCAWDGVACTRFQPSAKRRFRRQDVRNGDPSTLCSGDSSRPALLEHKVFGVEGSSAFLECEPRSLQARVEWTFQRAGVTAHTQVLAEERTERTARGLLLRRLRRRDSGVYLCAAVEQGFTQPLRRLSLHVLSATQAERLARAEEAAPAAPPGPKLWYRDFLQLVEPGGGGSANSLRMCRPQPALQSLPLESRRKGRNRRTHAPEPRAERGPRSATHW

SEQ ID NO: 77255 - protein, 406 aa, Homo sapiens; identical to SEQ ID NO: 77253
  Payload ID: 15417
  Gene Symbol: SEMA3B
  Gene Name: sema domain, immunoglobulin domain (Ig), short basic domain, secreted, (semaphorin) 3B
  ENSP ID: ENSP00000485646

SEQ ID NO: 77256 - protein, 751 aa, Homo sapiens
  Payload ID: 15418
  Gene Symbol: SEMA3C
  Gene Name: sema domain, immunoglobulin domain (Ig), short basic domain, secreted, (semaphorin) 3C
  Uniprot ID: Q99985
  ENSP ID: ENSP00000265361
MAFRTICVLVGVFICSICVKGSSQPQARVYLTFDELRETKTSEYFSLSHHPLDYRILLMDEDQDRIYVGSKDHILSLNINNISQEALSVFWPASTIKVEECKMAGKDPTHGCGNFVRVIQTFNRTHLYVCGSGAFSPVCTYLNRGRRSEDQVFMIDSKCESGKGRCSFNPNVNTVSVMINEELFSGMYIDFMGTDAAIFRSLTKRNAVRTDQHNSKWLSEPMFVDAHVIPDGTDPNDAKVYFFFKEKLTDNNRSTKQIHSMIARICPNDTGGLRSLVNKWTTFLKARLVCSVTDEDGPETHFDELEDVFLLETDNPRTTLVYGIFTTSSSVFKGSAVCVYHLSDIQTVFNGPFAHKEGPNHQLISYQGRIPYPRPGTCPGGAFTPNMRTTKEFPDDVVTFIRNHPLMYNSIYPIHKRPLIVRIGTDYKYTKIAVDRVNAADGRYHVLFLGTDRGTVQKVVVLPTNNSVSGELILEELEVFKNHAPITTMKISSKKQQLYVSSNEGVSQVSLHRCHIYGTACADCCLARDPYCAWDGHSCSRFYPTGKRRSRRQDVRHGNPLTQCRGFNLKAYRNAAEIVQYGVKNNTTFLECAPKSPQASIKWLLQKDKDRRKEVKLNERIIATSQGLLIRSVQGSDQGLYHCIATENSFKQTIAKINFKVLDSEMVAVVTDKWSPWTWASSVRALPFHPKDIMGAFSHSEMQMINQYCKDTRQQHQQGDESQKMRGDYGKLKALINSRKSRNRRNQLPES

SEQ ID NO: 77257 - protein, 40 aa, Homo sapiens
  Payload ID: 15418
  Gene Symbol: SEMA3C
  Gene Name: sema domain, immunoglobulin domain (Ig), short basic domain, secreted, (semaphorin) 3C
  ENSP ID: ENSP00000393825
MAFRTICVLVGVFICSICVKGSSQPQARVYLTFDGPSFHD

SEQ ID NO: 77258 - protein, 63 aa, Homo sapiens
  Payload ID: 15418
  Gene Symbol: SEMA3C
  Gene Name: sema domain, immunoglobulin domain (Ig), short basic domain, secreted, (semaphorin) 3C
  ENSP ID: ENSP00000395398
MAFRTICVLVGVFICSICVKGSSQPQARVYLTFDEPTLYNAVCYICGYKKKCGVNLVLSNHLL

SEQ ID NO: 77259 - protein, 63 aa, Homo sapiens; identical to SEQ ID NO: 77258
  Payload ID: 15418
  Gene Symbol: SEMA3C
  Gene Name: sema domain, immunoglobulin domain (Ig), short basic domain, secreted, (semaphorin) 3C
  ENSP ID: ENSP00000399891

SEQ ID NO: 77260 - protein, 751 aa, Homo sapiens; identical to SEQ ID NO: 77256
  Payload ID: 15418
  Gene Symbol: SEMA3C
  Gene Name: sema domain, immunoglobulin domain (Ig), short basic domain, secreted, (semaphorin) 3C
  Uniprot ID: Q99985
  ENSP ID: ENSP00000411193

SEQ ID NO: 77261 - protein, 777 aa, Homo sapiens
  Payload ID: 15419
  Gene Symbol: SEMA3D
  Gene Name: sema domain, immunoglobulin domain (Ig), short basic domain, secreted, (semaphorin) 3D
  Uniprot ID: O95025
  ENSP ID: ENSP00000284136
MNANKDERLKARSQDFHLFPALMMLSMTMLFLPVTGTLKQNIPRLKLTYKDLLLSNSCIPFLGSSEGLDFQTLLLDEERGRLLLGAKDHIFLLSLVDLNKNFKKIYWPAAKERVELCKLAGKDANTECANFIRVLQPYNKTHIYVCGTGAFHPICGYIDLGVYKEDIIFKLDTHNLESGRLKCPFDPQQPFASVMTDEYLYSGTASDFLGKDTAFTRSLGPTHDHHYIRTDISEHYWLNGAKFIGTFFIPDTYNPDDDKIYFFFRESSQEGSTSDKTILSRVGRVCKNDVGGQRSLINKWTTFLKARLICSIPGSDGADTYFDELQDIYLLPTRDERNPVVYGVFTTTSSIFKGSAVCVYSMADIRAVFNGPYAHKESADHRWVQYDGRIPYPRPGTCPSKTYDPLIKSTRDFPDDVISFIKRHSVMYKSVYPVAGGPTFKRINVDYRLTQIVVDHVIAEDGQYDVMFLGTDIGTVLKVVSISKEKWNMEEVVLEELQIFKHSSIILNMELSLKQQQLYIGSRDGLVQLSLHRCDTYGKACADCCLARDPYCAWDGNACSRYAPTSKRRARRQDVKYGDPITQCWDIEDSISHETADEKVIFGIEFNSTFLECIPKSQQATIKWYIQRSGDEHREELKPDERIIKTEYGLLIRSLQKKDSGMYYCKAQEHTFIHTIVKLTLNVIENEQMENTQRAEHEEGKVKDLLAESRLRYKDYIQILSSPNFSLDQYCEQMWHREKRRQRNKGGPKWKHMQEMKKKRNRRHHRDLDELPRAVAT

SEQ ID NO: 77262 - protein, 294 aa, Homo sapiens
  Payload ID: 15419
  Gene Symbol: SEMA3D
  Gene Name: sema domain, immunoglobulin domain (Ig), short basic domain, secreted, (semaphorin) 3D
  ENSP ID: ENSP00000401366
MNANKDERLKARSQDFHLFPALMMLSMTMLFLPVTGTLKQNIPRLKLTYKDLLLSNSCIPFLGSSEGLDFQTLLLDEERGRLLLGAKDHIFLLSLVDLNKNFKKIYWPAAKERVELCKLAGKDANTECANFIRVLQPYNKTHIYVCGTGAFHPICGYIDLGVYKEDIIFKLDTHNLESGRLKCPFDPQQPFASVMTDEYLYSGTASDFLGKDTAFTRSLGPTHDHHYIRTDISEHYWLNGAKFIGTFFIPDTYNPDDDKIYFFFRESSQEGSTSDKTILSRVGRVCKENLCFED

SEQ ID NO: 77263 - protein, 775 aa, Homo sapiens
  Payload ID: 15420
  Gene Symbol: SEMA3E
  Gene Name: sema domain, immunoglobulin domain (Ig), short basic domain, secreted, (semaphorin) 3E
  Uniprot ID: O15041
  ENSP ID: ENSP00000303212
MASAGHIITLLLWGYLLELWTGGHTADTTHPRLRLSHKELLNLNRTSIFHSPFGFLDLHTMLLDEYQERLFVGGRDLVYSLSLERISDGYKEIHWPSTALKMEECIMKGKDAGECANYVRVLHHYNRTHLLTCGTGAFDPVCAFIRVGYHLEDPLFHLESPRSERGRGRCPFDPSSSFISTLIGSELFAGLYSDYWSRDAAIFRSMGRLAHIRTEHDDERLLKEPKFVGSYMIPDNEDRDDNKVYFFFTEKALEAENNAHAIYTRVGRLCVNDVGGQRILVNKWSTFLKARLVCSVPGMNGIDTYFDELEDVFLLPTRDHKNPVIFGLFNTTSNIFRGHAICVYHMSSIRAAFNGPYAHKEGPEYHWSVYEGKVPYPRPGSCASKVNGGRYGTTKDYPDDAIRFARSHPLMYQAIKPAHKKPILVKTDGKYNLKQIAVDRVEAEDGQYDVLFIGTDNGIVLKVITIYNQEMESMEEVILEELQIFKDPVPIISMEISSKRQQLYIGSASAVAQVRFHHCDMYGSACADCCLARDPYCAWDGISCSRYYPTGTHAKRRFRRQDVRHGNAAQQCFGQQFVGDALDKTEEHLAYGIENNSTLLECTPRSLQAKVIWFVQKGRETRKEEVKTDDRVVKMDLGLLFLRLHKSDAGTYFCQTVEHSFVHTVRKITLEVVEEEKVEDMFNKDDEEDRHHRMPCPAQSSISQGAKPWYKEFLQLIGYSNFQRVEEYCEKVWCTDRKRKKLKMSPSKWKYANPQEKKLRSKPEHYRLPRHTLDS

SEQ ID NO: 77264 - protein, 715 aa, Homo sapiens
  Payload ID: 15420
  Gene Symbol: SEMA3E
  Gene Name: sema domain, immunoglobulin domain (Ig), short basic domain, secreted, (semaphorin) 3E
  Uniprot ID: O15041
  ENSP ID: ENSP00000405052
MLLDEYQERLFVGGRDLVYSLSLERISDGYKEIHWPSTALKMEECIMKGKDAGECANYVRVLHHYNRTHLLTCGTGAFDPVCAFIRVGYHLEDPLFHLESPRSERGRGRCPFDPSSSFISTLIGSELFAGLYSDYWSRDAAIFRSMGRLAHIRTEHDDERLLKEPKFVGSYMIPDNEDRDDNKVYFFFTEKALEAENNAHAIYTRVGRLCVNDVGGQRILVNKWSTFLKARLVCSVPGMNGIDTYFDELEDVFLLPTRDHKNPVIFGLFNTTSNIFRGHAICVYHMSSIRAAFNGPYAHKEGPEYHWSVYEGKVPYPRPGSCASKVNGGRYGTTKDYPDDAIRFARSHPLMYQAIKPAHKKPILVKTDGKYNLKQIAVDRVEAEDGQYDVLFIGTDNGIVLKVITIYNQEMESMEEVILEELQIFKDPVPIISMEISSKRQQLYIGSASAVAQVRFHHCDMYGSACADCCLARDPYCAWDGISCSRYYPTGTHAKRRFRRQDVRHGNAAQQCFGQQFVGDALDKTEEHLAYGIENNSTLLECTPRSLQAKVIWFVQKGRETRKEEVKTDDRVVKMDLGLLFLRLHKSDAGTYFCQTVEHSFVHTVRKITLEVVEEEKVEDMFNKDDEEDRHHRMPCPAQSSISQGAKPWYKEFLQLIGYSNFQRVEEYCEKVWCTDRKRKKLKMSPSKWKYANPQEKKLRSKPEHYRLPRHTLDS

SEQ ID NO: 77265 - protein, 163 aa, Homo sapiens
  Payload ID: 15420
  Gene Symbol: SEMA3E
  Gene Name: sema domain, immunoglobulin domain (Ig), short basic domain, secreted, (semaphorin) 3E
  ENSP ID: ENSP00000412867
MLLDEYQERLFVGGRDLVYSLSLERISDGYKEIHWPSTALKMEECIMKGKDAGECANYVRVLHHYNRTHLLTCGTGAFDPVCAFIRVGYHLEDPLFHLESPRSERGRGRCPFDPSSSFISTLIGSELFAGLYSDYWSRDAAIFRSMGRLAHIRTEHDDERLLK

SEQ ID NO: 77266 - protein, 39 aa, Homo sapiens
  Payload ID: 15420
  Gene Symbol: SEMA3E
  Gene Name: sema domain, immunoglobulin domain (Ig), short basic domain, secreted, (semaphorin) 3E
  ENSP ID: ENSP00000415184
MASAGHIITLLLWGYLLELWTGGHTADTTHPRLRLSHKE

SEQ ID NO: 77267 - protein, 785 aa, Homo sapiens
  Payload ID: 15421
  Gene Symbol: SEMA3F
  Gene Name: sema domain, immunoglobulin domain (Ig), short basic domain, secreted, (semaphorin) 3F
  Uniprot ID: Q13275
  ENSP ID: ENSP00000002829
MLVAGLLLWASLLTGAWPSFPTQDHLPATPRVRLSFKELKATGTAHFFNFLLNTTDYRILLKDEDHDRMYVGSKDYVLSLDLHDINREPLIIHWAASPQRIEECVLSGKDVNGECGNFVRLIQPWNRTHLYVCGTGAYNPMCTYVNRGRRAQATPWTQTQAVRGRGSRATDGALRPMPTAPRQDYIFYLEPERLESGKGKCPYDPKLDTASALINEELYAGVYIDFMGTDAAIFRTLGKQTAMRTDQYNSRWLNDPSFIHAELIPDSAERNDDKLYFFFRERSAEAPQSPAVYARIGRICLNDDGGHCCLVNKWSTFLKARLVCSVPGEDGIETHFDELQDVFVQQTQDVRNPVIYAVFTSSGSVFRGSAVCVYSMADIRMVFNGPFAHKEGPNYQWMPFSGKMPYPRPGTCPGGTFTPSMKSTKDYPDEVINFMRSHPLMYQAVYPLQRRPLVVRTGAPYRLTTIAVDQVDAADGRYEVLFLGTDRGTVQKVIVLPKDDQELEELMLEEVEVFKDPAPVKTMTISSKRQQLYVASAVGVTHLSLHRCQAYGAACADCCLARDPYCAWDGQACSRYTASSKRRSRRQDVRHGNPIRQCRGFNSNANKNAVESVQYGVAGSAAFLECQPRSPQATVKWLFQRDPGDRRREIRAEDRFLRTEQGLLLRALQLSDRGLYSCTATENNFKHVVTRVQLHVLGRDAVHAALFPPLSMSAPPPPGAGPPTPPYQELAQLLAQPEVGLIHQYCQGYWRHVPPSPREAPGAPRSPEPQDQKKPRNRRHHPPDT

SEQ ID NO: 77268 - protein, 686 aa, Homo sapiens
  Payload ID: 15421
  Gene Symbol: SEMA3F
  Gene Name: sema domain, immunoglobulin domain (Ig), short basic domain, secreted, (semaphorin) 3F
  ENSP ID: ENSP00000388931
MYVGSKDYVLSLDLHDINREPLIIHWAASPQRIEECVLSGKDVNGECGNFVRLIQPWNRTHLYVCGTGAYNPMCTYVNRGRRAQDYIFYLEPERLESGKGKCPYDPKLDTASALINEELYAGVYIDFMGTDAAIFRTLGKQTAMRTDQYNSRWLNDPSFIHAELIPDSAERNDDKLYFFFRERSAEAPQSPAVYARIGRICLNDDGGHCCLVNKWSTFLKARLVCSVPGEDGIETHFDELQDVFVQQTQDVRNPVIYAVFTSSGSVFRGSAVCVYSMADIRMVFNGPFAHKEGPNYQWMPFSGKMPYPRPGTCPGGTFTPSMKSTKDYPDEVINFMRSHPLMYQAVYPLQRRPLVVRTGAPYRLTTIAVDQVDAADGRYEVLFLGTDRGTVQKVIVLPKDDQELEELMLEEVEVFKDPAPVKTMTISSKRQQLYVASAVGVTHLSLHRCQAYGAACADCCLARDPYCAWDGQACSRYTASSKRRSRRQDVRHGNPIRQCRGFNSNANKNAVESVQYGVAGSAAFLECQPRSPQATVKWLFQRDPGDRRREIRAEDRFLRTEQGLLLRALQLSDRGLYSCTATENNFKHVVTRVQLHVLGRDAVHAALFPPLSMSAPPPPGAGPPTPPYQELAQLLAQPEVGLIHQYCQGYWRHVPPSPREAPGAPRSPEPQDQKKPRNRRHHPPDT

SEQ ID NO: 77269 - protein, 264 aa, Homo sapiens
  Payload ID: 15421
  Gene Symbol: SEMA3F
  Gene Name: sema domain, immunoglobulin domain (Ig), short basic domain, secreted, (semaphorin) 3F
  ENSP ID: ENSP00000392588
MLVAGLLLWASLLTGAWPSFPTQDHLPATPRVRLSFKELKATGTAHFFNFLLNTTDYRILLKDEDHDRMYVGSKDYVLSLDLHDINREPLIIHWAASPQRIEECVLSGKDVNGECGNFVRLIQPWNRTHLYVCGTGAYNPMCTYVNRGRRAQDYIFYLEPERLESGKGKCPYDPKLDTASALINEELYAGVYIDFMGTDAAIFRTLGKQTAMRTDQYNSRWLNDPSFIHAELIPDSAERNDDKLYFFFRERSAEAPQSPAVYAR

SEQ ID NO: 77270 - protein, 379 aa, Homo sapiens
  Payload ID: 15421
  Gene Symbol: SEMA3F
  Gene Name: sema domain, immunoglobulin domain (Ig), short basic domain, secreted, (semaphorin) 3F
  ENSP ID: ENSP00000398399
MLVAGLLLWASLLTGAWPSFPTQDHLPATPRVRLSFKELKATGTAHFFNFLLNTTDYRILLKDEDHDRMYVGSKDYVLSLDLHDINREPLIIHWAASPQRIEECVLSGKDVNGECGNFVRLIQPWNRTHLYVCGTGAYNPMCTYVNRGRRAQDYIFYLEPERLESGKGKCPYDPKLDTASALINEELYAGVYIDFMGTDAAIFRTLGKQTAMRTDQYNSRWLNDPSFIHAELIPDSAERNDDKLYFFFRERSAEAPQSPAVYARIGRICLNDDGGHCCLVNKWSTFLKARLVCSVPGEDGIETHFDELQDVFVQQTQDVRNPVIYAVFTSSGSVFRGSAVCVYSMADIRMVFNGPFAHKEGPNYQWMPFSGKMPYPRPG

SEQ ID NO: 77271 - protein, 92 aa, Homo sapiens
  Payload ID: 15421
  Gene Symbol: SEMA3F
  Gene Name: sema domain, immunoglobulin domain (Ig), short basic domain, secreted, (semaphorin) 3F
  ENSP ID: ENSP00000400549
MLVAGLLLWASLLTGAWPSFPTQDHLPATPRVRLSFKELKATGTAHFFNFLLNTTDYRILLKDEDHDRMYVGSKDYVLSLDLHDINREPLIV

SEQ ID NO: 77272 - protein, 754 aa, Homo sapiens
  Payload ID: 15421
  Gene Symbol: SEMA3F
  Gene Name: sema domain, immunoglobulin domain (Ig), short basic domain, secreted, (semaphorin) 3F
  Uniprot ID: Q13275
  ENSP ID: ENSP00000409859
MLVAGLLLWASLLTGAWPSFPTQDHLPATPRVRLSFKELKATGTAHFFNFLLNTTDYRILLKDEDHDRMYVGSKDYVLSLDLHDINREPLIIHWAASPQRIEECVLSGKDVNGECGNFVRLIQPWNRTHLYVCGTGAYNPMCTYVNRGRRAQDYIFYLEPERLESGKGKCPYDPKLDTASALINEELYAGVYIDFMGTDAAIFRTLGKQTAMRTDQYNSRWLNDPSFIHAELIPDSAERNDDKLYFFFRERSAEAPQSPAVYARIGRICLNDDGGHCCLVNKWSTFLKARLVCSVPGEDGIETHFDELQDVFVQQTQDVRNPVIYAVFTSSGSVFRGSAVCVYSMADIRMVFNGPFAHKEGPNYQWMPFSGKMPYPRPGTCPGGTFTPSMKSTKDYPDEVINFMRSHPLMYQAVYPLQRRPLVVRTGAPYRLTTIAVDQVDAADGRYEVLFLGTDRGTVQKVIVLPKDDQELEELMLEEVEVFKDPAPVKTMTISSKRQQLYVASAVGVTHLSLHRCQAYGAACADCCLARDPYCAWDGQACSRYTASSKRRSRRQDVRHGNPIRQCRGFNSNANKNAVESVQYGVAGSAAFLECQPRSPQATVKWLFQRDPGDRRREIRAEDRFLRTEQGLLLRALQLSDRGLYSCTATENNFKHVVTRVQLHVLGRDAVHAALFPPLSMSAPPPPGAGPPTPPYQELAQLLAQPEVGLIHQYCQGYWRHVPPSPREAPGAPRSPEPQDQKKPRNRRHHPPDT

SEQ ID NO: 77273 - protein, 147 aa, Homo sapiens
  Payload ID: 15421
  Gene Symbol: SEMA3F
  Gene Name: sema domain, immunoglobulin domain (Ig), short basic domain, secreted, (semaphorin) 3F
  ENSP ID: ENSP00000416356
GTAHFFNFLLNTTDYRILLKDEDHDRMYVGSKDYVLSLDLHDINREPLIIHWAASPQRIEECVLSGKDVNPSLWPQGECGNFVRLIQPWNRTHLYVCGTGAYNPMCTYVNRGRRAQDYIFYLEPERLESGKGKCPYDPKLDTASALI

SEQ ID NO: 77274 - protein, 782 aa, Homo sapiens
  Payload ID: 15422
  Gene Symbol: SEMA3G
  Gene Name: sema domain, immunoglobulin domain (Ig), short basic domain, secreted, (semaphorin) 3G
  Uniprot ID: Q9NS98
  ENSP ID: ENSP00000231721
MAPSAWAICWLLGGLLLHGGSSGPSPGPSVPRLRLSYRDLLSANRSAIFLGPQGSLNLQAMYLDEYRDRLFLGGLDALYSLRLDQAWPDPREVLWPPQPGQREECVRKGRDPLTECANFVRVLQPHNRTHLLACGTGAFQPTCALITVGHRGEHVLHLEPGSVESGRGRCPHEPSRPFASTFIDGELYTGLTADFLGREAMIFRSGGPRPALRSDSDQSLLHDPRFVMAARIPENSDQDNDKVYFFFSETVPSPDGGSNHVTVSRVGRVCVNDAGGQRVLVNKWSTFLKARLVCSVPGPGGAETHFDQLEDVFLLWPKAGKSLEVYALFSTVSAVFQGFAVCVYHMADIWEVFNGPFAHRDGPQHQWGPYGGKVPFPRPGVCPSKMTAQPGRPFGSTKDYPDEVLQFARAHPLMFWPVRPRHGRPVLVKTHLAQQLHQIVVDRVEAEDGTYDVIFLGTDSGSVLKVIALQAGGSAEPEEVVLEELQVFKVPTPITEMEISVKRQMLYVGSRLGVAQLRLHQCETYGTACAECCLARDPYCAWDGASCTHYRPSLGKRRFRRQDIRHGNPALQCLGQSQEEEAVGLVAATMVYGTEHNSTFLECLPKSPQAAVRWLLQRPGDEGPDQVKTDERVLHTERGLLFRRLSRFDAGTYTCTTLEHGFSQTVVRLALVVIVASQLDNLFPPEPKPEEPPARGGLASTPPKAWYKDILQLIGFANLPRVDEYCERVWCRGTTECSGCFRSRSRGKQARGKSWAGLELGKKMKSRVHAEHNRTPREVEAT

SEQ ID NO: 77275 - protein, 186 aa, Homo sapiens
  Payload ID: 15422
  Gene Symbol: SEMA3G
  Gene Name: sema domain, immunoglobulin domain (Ig), short basic domain, secreted, (semaphorin) 3G
  ENSP ID: ENSP00000419181
MAPSAWAICWLLGGLLLHGGSSGPSPGPSVPRLRLSYRGAMVRKPSSTMWMETFSRYLLSANRSAIFLGPQGSLNLQAMYLDEYRDRLFLGGLDALYSLRLDQAWPDPREVLWPPQPGQREECVRKGRDPLTECANFVRVLQPHNRTHLLACGTGAFQPTCALITVGHRGEHVLHLEPGSVESGRG

SEQ ID NO: 77276 - protein, 99 aa, Homo sapiens
  Payload ID: 15422
  Gene Symbol: SEMA3G
  Gene Name: sema domain, immunoglobulin domain (Ig), short basic domain, secreted, (semaphorin) 3G
  ENSP ID: ENSP00000420291
  MOD_RES (1)..(1): Any amino acid
XSSGPSPGPSVPRLRLSYRDRVRQLRAGATASQPDPPASLWHWGLPAHLCPHHSWPPWGACAPPGAWQCGKWPGAVPSRAQPSLCQHLHRRGAVHGSHC

SEQ ID NO: 77277 - protein, 761 aa, Homo sapiens
  Payload ID: 15423
  Gene Symbol: SEMA4A
  Gene Name: sema domain, immunoglobulin domain (Ig), transmembrane domain (TM) and short cytoplasmic domain, (semaphorin) 4A
  Uniprot ID: Q9H3S1
  ENSP ID: ENSP00000347117
MALPALGLDPWSLLGLFLFQLLQLLLPTTTAGGGGQGPMPRVRYYAGDERRALSFFHQKGLQDFDTLLLSGDGNTLYVGAREAILALDIQDPGVPRLKNMIPWPASDRKKSECAFKKKSNETQCFNFIRVLVSYNVTHLYTCGTFAFSPACTFIELQDSYLLPISEDKVMEGKGQSPFDPAHKHTAVLVDGMLYSGTMNNFLGSEPILMRTLGSQPVLKTDNFLRWLHHDASFVAAIPSTQVVYFFFEETASEFDFFERLHTSRVARVCKNDVGGEKLLQKKWTTFLKAQLLCTQPGQLPFNVIRHAVLLPADSPTAPHIYAVFTSQWQVGGTRSSAVCAFSLLDIERVFKGKYKELNKETSRWTTYRGPETNPRPGSCSVGPSSDKALTFMKDHFLMDEQVVGTPLLVKSGVEYTRLAVETAQGLDGHSHLVMYLGTTTGSLHKAVVSGDSSAHLVEEIQLFPDPEPVRNLQLAPTQGAVFVGFSGGVWRVPRANCSVYESCVDCVLARDPHCAWDPESRTCCLLSAPNLNSWKQDMERGNPEWACASGPMSRSLRPQSRPQIIKEVLAVPNSILELPCPHLSALASYYWSHGPAAVPEASSTVYNGSLLLIVQDGVGGLYQCWATENGFSYPVISYWVDSQDQTLALDPELAGIPREHVKVPLTRVSGGAALAAQQSYWPHFVTVTVLFALVLSGALIILVASPLRALRARGKVQGCETLRPGEKAPLSREQHLQSPKECRTSASDVDADNNCLGTEVA

SEQ ID NO: 77278 - protein, 761 aa, Homo sapiens; identical to SEQ ID NO: 77277
  Payload ID: 15423
  Gene Symbol: SEMA4A
  Gene Name: sema domain, immunoglobulin domain (Ig), transmembrane domain (TM) and short cytoplasmic domain, (semaphorin) 4A
  Uniprot ID: Q9H3S1
  ENSP ID: ENSP00000357265

SEQ ID NO: 77279 - protein, 629 aa, Homo sapiens
  Payload ID: 15423
  Gene Symbol: SEMA4A
  Gene Name: sema domain, immunoglobulin domain (Ig), transmembrane domain (TM) and short cytoplasmic domain, (semaphorin) 4A
  Uniprot ID: Q9H3S1
  ENSP ID: ENSP00000357267
MIPWPASDRKKSECAFKKKSNEELQDSYLLPISEDKVMEGKGQSPFDPAHKHTAVLVDGMLYSGTMNNFLGSEPILMRTLGSQPVLKTDNFLRWLHHDASFVAAIPSTQVVYFFFEETASEFDFFERLHTSRVARVCKNDVGGEKLLQKKWTTFLKAQLLCTQPGQLPFNVIRHAVLLPADSPTAPHIYAVFTSQWQVGGTRSSAVCAFSLLDIERVFKGKYKELNKETSRWTTYRGPETNPRPGSCSVGPSSDKALTFMKDHFLMDEQVVGTPLLVKSGVEYTRLAVETAQGLDGHSHLVMYLGTTTGSLHKAVVSGDSSAHLVEEIQLFPDPEPVRNLQLAPTQGAVFVGFSGGVWRVPRANCSVYESCVDCVLARDPHCAWDPESRTCCLLSAPNLNSWKQDMERGNPEWACASGPMSRSLRPQSRPQIIKEVLAVPNSILELPCPHLSALASYYWSHGPAAVPEASSTVYNGSLLLIVQDGVGGLYQCWATENGFSYPVISYWVDSQDQTLALDPELAGIPREHVKVPLTRVSGGAALAAQQSYWPHFVTVTVLFALVLSGALIILVASPLRALRARGKVQGCETLRPGEKAPLSREQHLQSPKECRTSASDVDADNNCLGTEVA

SEQ ID NO: 77280 - protein, 761 aa, Homo sapiens; identical to SEQ ID NO: 77277
  Payload ID: 15423
  Gene Symbol: SEMA4A
  Gene Name: sema domain, immunoglobulin domain (Ig), transmembrane domain (TM) and short cytoplasmic domain, (semaphorin) 4A
  Uniprot ID: Q9H3S1
  ENSP ID: ENSP00000357268

SEQ ID NO: 77281 - protein, 723 aa, Homo sapiens
  Payload ID: 15423
  Gene Symbol: SEMA4A
  Gene Name: sema domain, immunoglobulin domain (Ig), transmembrane domain (TM) and short cytoplasmic domain, (semaphorin) 4A
  ENSP ID: ENSP00000357269
MPRVRYYAGDERRALSFFHQKGLQDFDTLLLSGDGNTLYVGAREAILALDIQDPGVPRLKNMIPWPASDRKKSECAFKKKSNETQCFNFIRVLVSYNVTHLYTCGTFAFSPACTFIELQDSYLLPISEDKVMEGKGQSPFDPAHKHTAVLVDGMLYSGTMNNFLGSEPILMRTLGSQPVLKTDNFLRWLHHDASFVAAIPSTQVVYFFFEETASEFDFFERLHTSRVARVCKNDVGGEKLLQKKWTTFLKAQLLCTQPGQLPFNVIRHAVLLPADSPTAPHIYAVFTSQWQVGGTRSSAVCAFSLLDIERVFKGKYKELNKETSRWTTYRGPETNPRPGSCSVGPSSDKALTFMKDHFLMDEQVVGTPLLVKSGVEYTRLAVETAQGLDGHSHLVMYLGTTTGSLHKAVVSGDSSAHLVEEIQLFPDPEPVRNLQLAPTQGAVFVGFSGGVWRVPRANCSVYESCVDCVLARDPHCAWDPESRTCCLLSAPNLNSWKQDMERGNPEWACASGPMSRSLRPQSRPQIIKEVLAVPNSILELPCPHLSALASYYWSHGPAAVPEASSTVYNGSLLLIVQDGVGGLYQCWATENGFSYPVISYWVDSQDQTLALDPELAGIPREHVKVPLTRVSGGAALAAQQSYWPHFVTVTVLFALVLSGALIILVASPLRALRARGKVQGCETLRPGEKAPLSREQHLQSPKECRTSASDVDADNNCLGTEVA

SEQ ID NO: 77282 - protein, 236 aa, Homo sapiens
  Payload ID: 15423
  Gene Symbol: SEMA4A
  Gene Name: sema domain, immunoglobulin domain (Ig), transmembrane domain (TM) and short cytoplasmic domain, (semaphorin) 4A
  ENSP ID: ENSP00000392865
MALPALGLDPWSLLGLFLFQLLQLLLPTTTAGGGGQGPMPRVRYYAGDERRALSFFHQKGLQDFDTLLLSGDGNTLYVGAREAILALDIQDPGVPRLKNMIPWPASDRKKSECAFKKKSNEELQDSYLLPISEDKVMEGKGQSPFDPAHKHTAVLVDGMLYSGTMNNFLGSEPILMRTLGSQPVLKTDNFLRWLHHDASFVAAIPSTQVVYFFFEETASEFDFFERLHTSRVARVC

SEQ ID NO: 77283 - protein, 220 aa, Homo sapiens
  Payload ID: 15423
  Gene Symbol: SEMA4A
  Gene Name: sema domain, immunoglobulin domain (Ig), transmembrane domain (TM) and short cytoplasmic domain, (semaphorin) 4A
  ENSP ID: ENSP00000399230
MIPWPASDRKKSECAFKKKSNETQCFNFIRVLVSYNVTHLYTCGTFAFSPACTFIELQDSYLLPISEDKVMEGKGQSPFDPAHKHTAVLVDGMLYSGTMNNFLGSEPILMRTLGSQPVLKTDNFLRWLHHDASFVAAIPSTQVVYFFFEETASEFDFFERLHTSRVARVCKNDVGGEKLLQKKWTTFLKAQLLCTQPGQLPFNVIRHAVLLPADSPTAPH

SEQ ID NO: 77284 - protein, 321 aa, Homo sapiens
  Payload ID: 15423
  Gene Symbol: SEMA4A
  Gene Name: sema domain, immunoglobulin domain (Ig), transmembrane domain (TM) and short cytoplasmic domain, (semaphorin) 4A
  ENSP ID: ENSP00000401391
MALPALGLDPWSLLGLFLFQLLQLLLPTTTAGGGGQGPMPRVRYYAGDERRALSFFHQKGLQDFDTLLLSGDGNTLYVGAREAILALDIQDPGVPRLKNMIPWPASDRKKSECAFKKKSNETQCFNFIRVLVSYNVTHLYTCGTFAFSPACTFIELQDSYLLPISEDKVMEGKGQSPFDPAHKHTAVLVDGMLYSGTMNNFLGSEPILMRTLGSQPVLKTDNFLRWLHHDASFVAAIPSTQVVYFFFEETASEFDFFERLHTSRVARVCKNDVGGEKLLQKKWTTFLKAQLLCTQPGQLPFNVIRHAVLLPADSPTAPHIY

SEQ ID NO: 77285 - protein, 100 aa, Homo sapiens
  Payload ID: 15423
  Gene Symbol: SEMA4A
  Gene Name: sema domain, immunoglobulin domain (Ig), transmembrane domain (TM) and short cytoplasmic domain, (semaphorin) 4A
  ENSP ID: ENSP00000487730
MALPALGLDPWSLLGLFLFQLLQLLLPTTTAGGGGQGPMPRVRYYAGDERRALSFFHQKGLQDFDTLLLSGDGNTLYVGAREAILALDIQDPGVPRLKNM

SEQ ID NO: 77286 - protein, 837 aa, Homo sapiens
  Payload ID: 15424
  Gene Symbol: SEMA4B
  Gene Name: sema domain, immunoglobulin domain (Ig), transmembrane domain (TM) and short cytoplasmic domain, (semaphorin) 4B
  ENSP ID: ENSP00000332204
MLRTAMGLRSWLAAPWGALPPRPPLLLLLLLLLLLQPPPPTWALSPRISLPLGSEERPFLRFEAEHISNYTALLLSRDGRTLYVGAREALFALSSNLSFLPGGEYQELLWGADAEKKQQCSFKGKDPQRDCQNYIKILLPLSGSHLFTCGTAAFSPMCTYINMENFTLARDEKGNVLLEDGKGRCPFDPNFKSTALVVDGELYTGTVSSFQGNDPAISRSQSLRPTKTESSLNWLQDPAFVASAYIPESLGSLQGDDDKIYFFFSETGQEFEFFENTIVSRIARICKGDEGGERVLQQRWTSFLKAQLLCSRPDDGFPFNVLQDVFTLSPSPQDWRDTLFYGVFTSQWHRGTTEGSAVCVFTMKDVQRVFSGLYKEVNRETQQWYTVTHPVPTPRPGACITNSARERKINSSLQLPDRVLNFLKDHFLMDGQVRSRMLLLQPQARYQRVAVHRVPGLHHTYDVLFLGTGDGRLHKAVSVGPRVHIIEELQIFSSGQPVQNLLLDTHRGLLYAASHSGVVQVPMANCSLYRSCGDCLLARDPYCAWSGSSCKHVSLYQPQLATRPWIQDIEGASAKDLCSASSVVSPSFVPTGEKPCEQVQFQPNTVNTLACPLLSNLATRLWLRNGAPVNASASCHVLPTGDLLLVGTQQLGEFQCWSLEEGFQQLVASYCPEVVEDGVADQTDEGGSVPVIISTSRVSAPAGGKASWGADRSYWKEFLVMCTLFVLAVLLPVLFLLYRHRNSMKVFLKQGECASVHPKTCPVVLPPETRPLNGLGPPSTPLDHRGYQSLSDSPPGSRVFTESEKRPLSIQDSFVEVSPVCPRPRVRLGSEIRDSVV

SEQ ID NO: 77287 - protein, 837 aa, Homo sapiens; identical to SEQ ID NO: 77286
  Payload ID: 15424
  Gene Symbol: SEMA4B
  Gene Name: sema domain, immunoglobulin domain (Ig), transmembrane domain (TM) and short cytoplasmic domain, (semaphorin) 4B
  ENSP ID: ENSP00000394720

SEQ ID NO: 77288 - protein, 51 aa, Homo sapiens
  Payload ID: 15424
  Gene Symbol: SEMA4B
  Gene Name: sema domain, immunoglobulin domain (Ig), transmembrane domain (TM) and short cytoplasmic domain, (semaphorin) 4B
  ENSP ID: ENSP00000452957
MAGPCTWVLERPSLHSVATSASCQAGSTRSCFGVQTQRRNSSAASRARTHR

SEQ ID NO: 77289 - protein, 113 aa, Homo sapiens
  Payload ID: 15424
  Gene Symbol: SEMA4B
  Gene Name: sema domain, immunoglobulin domain (Ig), transmembrane domain (TM) and short cytoplasmic domain, (semaphorin) 4B
  ENSP ID: ENSP00000453272
MLRTAMGLRSWLAAPWGALPPRPPLLLLLLLLLLLQPPPPTWALSPRISLPLGSEERPFLRFEAEHISNYTALLLSRDGRTLYVGAREALFALSSNLSFLPGGEYQELLWGAD

SEQ ID NO: 77290 - protein, 63 aa, Homo sapiens
  Payload ID: 15424
  Gene Symbol: SEMA4B
  Gene Name: sema domain, immunoglobulin domain (Ig), transmembrane domain (TM) and short cytoplasmic domain, (semaphorin) 4B
  ENSP ID: ENSP00000453484
MLRTAMGLRSWLAAPWGALPPRPPLLLLLLLLLLLQPPPPTWALSPRISLPLGWGYVKTLHRL

SEQ ID NO: 77291 - protein, 121 aa, Homo sapiens
  Payload ID: 15424
  Gene Symbol: SEMA4B
  Gene Name: sema domain, immunoglobulin domain (Ig), transmembrane domain (TM) and short cytoplasmic domain, (semaphorin) 4B
  ENSP ID: ENSP00000453563
MLRTAMGLRSWLAAPWGALPPRPPLLLLLLLLLLLQPPPPTWALSPRISLPLGSEERPFLRFEAEHISNYTALLLSRDGRTLYVGAREALFALSSNLSFLPGGEYQELLWGADAEKKQQCS

SEQ ID NO: 77292 - protein, 91 aa, Homo sapiens
  Payload ID: 15424
  Gene Symbol: SEMA4B
  Gene Name: sema domain, immunoglobulin domain (Ig), transmembrane domain (TM) and short cytoplasmic domain, (semaphorin) 4B
  ENSP ID: ENSP00000453705
MLRTAMGLRSWLAAPWGALPPRPPLLLLLLLLLLLQPPPPTWALSPRISLPLGSEERPFLRFEAEHISNYTALLLSRDGRTLYVGAREALF

SEQ ID NO: 77293 - protein, 461 aa, Homo sapiens
  Payload ID: 15424
  Gene Symbol: SEMA4B
  Gene Name: sema domain, immunoglobulin domain (Ig), transmembrane domain (TM) and short cytoplasmic domain, (semaphorin) 4B
  ENSP ID: ENSP00000453804
  MOD_RES (1)..(1): Any amino acid
XARICKGDEGGERVLQQRWTSFLKAQLLCSRPDDGFPFNVLQDVFTLSPSPQDWRDTLFYGVFTSQWHRGTTEGSAVCVFTMKDVQRVFSGLYKEVNRETQQWYTVTHPVPTPRPGACITNSARERKINSSLQLPDRVLNFLKDHFLMDGQVRSRMLLLQPQARYQRVAVHRVPGLHHTYDVLFLGTGDGRLHKAVSVGPRVHIIEELQIFSSGQPVQNLLLDTHRGLLYAASHSGVVQVPMANCSLYRSCGDCLLARDPYCAWSGSSCKHVSLYQPQLATRPWIQDIEGASAKDLCSASSVVSPSFVPTGEKPCEQVQFQPNTVNTLACPLLSNLATRLWLRNGAPVNASASCHVLPTGDLLLVGTQQLGEFQCWSLEEGFQQLVASYCPEVVEDGVADQTDEGGSVPVIISTSRVSAPAGGKASWGADRSWARTQLLDLSSLYQAVATREDSASSGEIS

SEQ ID NO: 77294 - protein, 253 aa, Homo sapiens
  Payload ID: 15424
  Gene Symbol: SEMA4B
  Gene Name: sema domain, immunoglobulin domain (Ig), transmembrane domain (TM) and short cytoplasmic domain, (semaphorin) 4B
  ENSP ID: ENSP00000453866
  MOD_RES (1)..(1): Any amino acid
XRSRMLLLQPQARYQRVAVHRVPGLHHTYDVLFLGTGDGRLHKAVSVGPRVHIIEELQIFSSGQPVQNLLLDTHRVSRPTRNPGRGLLYAASHSGVVQVPMANCSLYRSCGDCLLARDPYCAWSGSSCKHVSLYQPQLATRPWIQDIEGASAKDLCSASSVVSPSFVPTGEKPCEQVQFQPNTVNTLACPLLSNLATRLWLRNGAPVNASASCHVLPTGDLLLVGTQQLGEFQCWSLEEGFQQLVASYCPEVV

SEQ ID NO: 77295 - protein, 115 aa, Homo sapiens
  Payload ID: 15424
  Gene Symbol: SEMA4B
  Gene Name: sema domain, immunoglobulin domain (Ig), transmembrane domain (TM) and short cytoplasmic domain, (semaphorin) 4B
  ENSP ID: ENSP00000453951
MAGPCTWVLERPSLHSVATSASCQAGSTRSCFGVQTQRRNSSAASRARTHSATVKTTSRSSCRSAAVTCSPVAQQPSAPCVPTSTWRTSPWQGTRRGMSSWKMARAVVPSTRISS

SEQ ID NO: 77296 - protein, 120 aa, Homo sapiens
  Payload ID: 15424
  Gene Symbol: SEMA4B
  Gene Name: sema domain, immunoglobulin domain (Ig), transmembrane domain (TM) and short cytoplasmic domain, (semaphorin) 4B
  ENSP ID: ENSP00000454068
  MOD_RES (1)..(1): Any amino acid
XHIIEELQIFSSGQPVQNLLLDTHRGLLYAASHSGVVQVPMANCSLYRSCGDCLLARDPYCAWSGSSCKHVSLYQPQLATRILSGPQAVDPGHRGSQRQGPLQRVFGCVPVFCTNRGEAM

SEQ ID NO: 77297 - protein, 833 aa, Homo sapiens
  Payload ID: 15425
  Gene Symbol: SEMA4C
  Gene Name: sema domain, immunoglobulin domain (Ig), transmembrane domain (TM) and short cytoplasmic domain, (semaphorin) 4C
  Uniprot ID: Q9C0C4
  ENSP ID: ENSP00000306844
MAPHWAVWLLAARLWGLGIGAEVWWNLVPRKTVSSGELATVVRRFSQTGIQDFLTLTLTEPTGLLYVGAREALFAFSMEALELQGAISWEAPVEKKTECIQKGKNNQTECFNFIRFLQPYNASHLYVCGTYAFQPKCTYVNMLTFTLEHGEFEDGKGKCPYDPAKGHAGLLVDGELYSATLNNFLGTEPIILRNMGPHHSMKTEYLAFWLNEPHFVGSAYVPESVGSFTGDDDKVYFFFRERAVESDCYAEQVVARVARVCKGDMGGARTLQRKWTTFLKARLACSAPNWQLYFNQLQAMHTLQDTSWHNTTFFGVFQAQWGDMYLSAICEYQLEEIQRVFEGPYKEYHEEAQKWDRYTDPVPSPRPGSCINNWHRRHGYTSSLELPDNILNFVKKHPLMEEQVGPRWSRPLLVKKGTNFTHLVADRVTGLDGATYTVLFIGTGDGWLLKAVSLGPWVHLIEELQLFDQEPMRSLVLSQSKKLLFAGSRSQLVQLPVADCMKYRSCADCVLARDPYCAWSVNTSRCVAVGGHSGSLLIQHVMTSDTSGICNLRGSKKVRPTPKNITVVAGTDLVLPCHLSSNLAHARWTFGGRDLPAEQPGSFLYDARLQALVVMAAQPRHAGAYHCFSEEQGARLAAEGYLVAVVAGPSVTLEARAPLENLGLVWLAVVALGAVCLVLLLLVLSLRRRLREELEKGAKATERTLVYPLELPKEPTSPPFRPCPEPDEKLWDPVGYYYSDGSLKIVPGHARCQPGGGPPSPPPGIPGQPLPSPTRLHLGGGRNSNANGYVRLQLGGEDRGGLGHPLPELADELRRKLQQRQPLPDSNPEESSV

SEQ ID NO: 77298 - protein, 139 aa, Homo sapiens
  Payload ID: 15425
  Gene Symbol: SEMA4C
  Gene Name: sema domain, immunoglobulin domain (Ig), transmembrane domain (TM) and short cytoplasmic domain, (semaphorin) 4C
  ENSP ID: ENSP00000391094
MAPHWAVWLLAARLWGLGIGAEVWWNLVPRKTVSSGELATVVRRFSQTGIQDFLTLTLTEPTGLLYVGAREALFAFSMEALELQGAISWEAPVEKKTECIQKGKNNQTECFNFIRFLQPYNASHLYVCGTYAFQPKCTY

SEQ ID NO: 77299 - protein, 201 aa, Homo sapiens
  Payload ID: 15425
  Gene Symbol: SEMA4C
  Gene Name: sema domain, immunoglobulin domain (Ig), transmembrane domain (TM) and short cytoplasmic domain, (semaphorin) 4C
  ENSP ID: ENSP00000393498
MAPHWAVWLLAARLWGLGIGAEVWWNLVPRKTVSSGELATVVRRFSQTGIQDFLTLTLTEPTGLLYVGAREALFAFSMEALELQGAISWEAPVEKKTECIQKGKNNQTECFNFIRFLQPYNASHLYVCGTYAFQPKCTYVNMLTFTLEHGEFEDGKGKCPYDPAKGHAGLLVDGELYSATLNNFLGTEPIILRNMGPHHSM

SEQ ID NO: 77300 - protein, 738 aa, Homo sapiens
  Payload ID: 15426
  Gene Symbol: SEMA4D
  Gene Name: sema domain, immunoglobulin domain (Ig), transmembrane domain (TM) and short cytoplasmic domain, (semaphorin) 4D
  Uniprot ID: Q92854
  ENSP ID: ENSP00000344923
MRMCTPIRGLLMALAVMFGTAMAFAPIPRITWEHREVHLVQFHEPDIYNYSALLLSEDKDTLYIGAREAVFAVNALNISEKQHEVYWKVSEDKKAKCAEKGKSKQTECLNYIRVLQPLSATSLYVCGTNAFQPACDHLNLTSFKFLGKNEDGKGRCPFDPAHSYTSVMVDGELYSGTSYNFLGSEPIISRNSSHSPLRTEYAIPWLNEPSFVFADVIRKSPDSPDGEDDRVYFFFTEVSVEYEFVFRVLIPRIARVCKGDQGGLRTLQKKWTSFLKARLICSRPDSGLVFNVLRDVFVLRSPGLKVPVFYALFTPQLNNVGLSAVCAYNLSTAEEVFSHGKYMQSTTVEQSHTKWVRYNGPVPKPRPGACIDSEARAANYTSSLNLPDKTLQFVKDHPLMDDSVTPIDNRPRLIKKDVNYTQIVVDRTQALDGTVYDVMFVSTDRGALHKAISLEHAVHIIEETQLFQDFEPVQTLLLSSKKGNRFVYAGSNSGVVQAPLAFCGKHGTCEDCVLARDPYCAWSPPTATCVALHQTESPSRGLIQEMSGDASVCPASSPKPLPPPGSSSLSCLGHVGDRRLSSPWTPWPASGAGPDSSSRVSLLPPFLSDQAQHVHALGNFYLFCQATGPADIRFVWEKNGRALETCVPVQTHALPDGRAHALSWLQDAIRESAEYRCSVLSSAGNKTSKVQVAVMRPEVTHQERWTRELSAWRAVAGEHDRMMQSWRKAWESCSKDTL

SEQ ID NO: 77301 - protein, 862 aa, Homo sapiens
  Payload ID: 15426
  Gene Symbol: SEMA4D
  Gene Name: sema domain, immunoglobulin domain (Ig), transmembrane domain (TM) and short cytoplasmic domain, (semaphorin) 4D
  Uniprot ID: Q92854
  ENSP ID: ENSP00000348822
MRMCTPIRGLLMALAVMFGTAMAFAPIPRITWEHREVHLVQFHEPDIYNYSALLLSEDKDTLYIGAREAVFAVNALNISEKQHEVYWKVSEDKKAKCAEKGKSKQTECLNYIRVLQPLSATSLYVCGTNAFQPACDHLNLTSFKFLGKNEDGKGRCPFDPAHSYTSVMVDGELYSGTSYNFLGSEPIISRNSSHSPLRTEYAIPWLNEPSFVFADVIRKSPDSPDGEDDRVYFFFTEVSVEYEFVFRVLIPRIARVCKGDQGGLRTLQKKWTSFLKARLICSRPDSGLVFNVLRDVFVLRSPGLKVPVFYALFTPQLNNVGLSAVCAYNLSTAEEVFSHGKYMQSTTVEQSHTKWVRYNGPVPKPRPGACIDSEARAANYTSSLNLPDKTLQFVKDHPLMDDSVTPIDNRPRLIKKDVNYTQIVVDRTQALDGTVYDVMFVSTDRGALHKAISLEHAVHIIEETQLFQDFEPVQTLLLSSKKGNRFVYAGSNSGVVQAPLAFCGKHGTCEDCVLARDPYCAWSPPTATCVALHQTESPSRGLIQEMSGDASVCPDKSKGSYRQHFFKHGGTAELKCSQKSNLARVFWKFQNGVLKAESPKYGLMGRKNLLIFNLSEGDSGVYQCLSEERVKNKTVFQVVAKHVLEVKVVPKPVVAPTLSVVQTEGSRIATKVLVASTQGSSPPTPAVQATSSGAITLPPKPAPTGTSCEPKIVINTVPQLHSEKTMYLKSSDNRLLMSLFLFFFVLFLCLFFYNCYKGYLPRQCLKFRSALLIGKKKPKSDFCDREQSLKETLVEPGSFSQQNGEHPKPALDTGYETEQDTITSKVPTDREDSQRIDDLSARDKPFDVKCELKFADSDADGD

SEQ ID NO: 77302 - protein, 862 aa, Homo sapiens; identical to SEQ ID NO: 77301
  Payload ID: 15426
  Gene Symbol: SEMA4D
  Gene Name: sema domain, immunoglobulin domain (Ig), transmembrane domain (TM) and short cytoplasmic domain, (semaphorin) 4D
  Uniprot ID: Q92854
  ENSP ID: ENSP00000388768

SEQ ID NO: 77303 - protein, 146 aa, Homo sapiens
  Payload ID: 15426
  Gene Symbol: SEMA4D
  Gene Name: sema domain, immunoglobulin domain (Ig), transmembrane domain (TM) and short cytoplasmic domain, (semaphorin) 4D
  ENSP ID: ENSP00000390754
MRMCTPIRGLLMALAVMFGTAMAFAPIPRITWEHREVHLVQFHEPDIYNYSALLLSEDKDTLYIGAREAVFAVNALNISEKQHEVYWKVSEDKKAKCAEKGKSKQTECLNYIRVLQPLSATSLYVCGTNAFQPACDHLNLTSFKFL

SEQ ID NO: 77304 - protein, 738 aa, Homo sapiens; identical to SEQ ID NO: 77300
  Payload ID: 15426
  Gene Symbol: SEMA4D
  Gene Name: sema domain, immunoglobulin domain (Ig), transmembrane domain (TM) and short cytoplasmic domain, (semaphorin) 4D
  Uniprot ID: Q92854
  ENSP ID: ENSP00000391733

SEQ ID NO: 77305 - protein, 548 aa, Homo sapiens
  Payload ID: 15426
  Gene Symbol: SEMA4D
  Gene Name: sema domain, immunoglobulin domain (Ig), transmembrane domain (TM) and short cytoplasmic domain, (semaphorin) 4D
  ENSP ID: ENSP00000395222
MRMCTPIRGLLMALAVMFGTAMAFAPIPRITWEHREVHLVQFHEPDIYNYSALLLSEDKDTLYIGAREAVFAVNALNISEKQHEVYWKVSEDKKAKCAEKGKSKQTECLNYIRVLQPLSATSLYVCGTNAFQPACDHLNLTSFKFLGKNEDGKGRCPFDPAHSYTSVMVDGELYSGTSYNFLGSEPIISRNSSHSPLRTEYAIPWLNEPSFVFADVIRKSPDSPDGEDDRVYFFFTEVSVEYEFVFRVLIPRIARVCKGDQGGLRTLQKKWTSFLKARLICSRPDSGLVFNVLRDVFVLRSPGLKVPVFYALFTPQLNNVGLSAVCAYNLSTAEEVFSHGKYMQSTTVEQSHTKWVRYNGPVPKPRPGACIDSEARAANYTSSLNLPDKTLQFVKDHPLMDDSVTPIDNRPRLIKKDVNYTQIVVDRTQALDGTVYDVMFVSTDRGALHKAISLEHAVHIIEETQLFQDFEPVQTLLLSSKKVLQTFALSGRRMGELWRPVSLCRPMHCPMAGPMHSAGCRTPSGKALSIAALSSPQQGTRLRRCRLL

SEQ ID NO: 77306 - protein, 123 aa, Homo sapiens
  Payload ID: 15426
  Gene Symbol: SEMA4D
  Gene Name: sema domain, immunoglobulin domain (Ig), transmembrane domain (TM) and short cytoplasmic domain, (semaphorin) 4D
  ENSP ID: ENSP00000399948
MWTQRWKRSVSPGPADIRFVWEKNGRALETCVPVQTHALPDGRAHALSWLQDAIRESAEYRCSVLSSAGNKTSKVQVAVMRPEVTHQERWTRELSAWRAVAGEHDRMMQSWRKAWESCSKDTL

SEQ ID NO: 77307 - protein, 862 aa, Homo sapiens; identical to SEQ ID NO: 77301
  Payload ID: 15426
  Gene Symbol: SEMA4D
  Gene Name: sema domain, immunoglobulin domain (Ig), transmembrane domain (TM) and short cytoplasmic domain, (semaphorin) 4D
  Uniprot ID: Q92854
  ENSP ID: ENSP00000405102

SEQ ID NO: 77308 - protein, 1 aa, Homo sapiens
  Payload ID: 15426
  Gene Symbol: SEMA4D
  Gene Name: sema domain, immunoglobulin domain (Ig), transmembrane domain (TM) and short cytoplasmic domain, (semaphorin) 4D
  ENSP ID: ENSP00000405652
M

SEQ ID NO: 77309 - protein, 738 aa, Homo sapiens; identical to SEQ ID NO: 77300
  Payload ID: 15426
  Gene Symbol: SEMA4D
  Gene Name: sema domain, immunoglobulin domain (Ig), transmembrane domain (TM) and short cytoplasmic domain, (semaphorin) 4D
  Uniprot ID: Q92854
  ENSP ID: ENSP00000411981

SEQ ID NO: 77310 - protein, 75 aa, Homo sapiens
  Payload ID: 15426
  Gene Symbol: SEMA4D
  Gene Name: sema domain, immunoglobulin domain (Ig), transmembrane domain (TM) and short cytoplasmic domain, (semaphorin) 4D
  ENSP ID: ENSP00000413352
MRMCTPIRGLLMALAVMFGTAMAFAPIPRITWEHREVHLVQFHEPDIYNYSALLLSEDKDTLYIGAREAVFAVNA

SEQ ID NO: 77311 - protein, 862 aa, Homo sapiens; identical to SEQ ID NO: 77301
  Payload ID: 15426
  Gene Symbol: SEMA4D
  Gene Name: sema domain, immunoglobulin domain (Ig), transmembrane domain (TM) and short cytoplasmic domain, (semaphorin) 4D
  Uniprot ID: Q92854
  ENSP ID: ENSP00000416523

SEQ ID NO: 77312 - protein, 59 aa, Homo sapiens
  Payload ID: 15426
  Gene Symbol: SEMA4D
  Gene Name: sema domain, immunoglobulin domain (Ig), transmembrane domain (TM) and short cytoplasmic domain, (semaphorin) 4D
  ENSP ID: ENSP00000416747
MRMCTPIRGLLMALAVMFGTAMAFAPIPRITWEHREVHLVQFHEPDIYNYSALLLSEDK

SEQ ID NO: 77313 - protein, 66 aa, Homo sapiens
  Payload ID: 15426
  Gene Symbol: SEMA4D
  Gene Name: sema domain, immunoglobulin domain (Ig), transmembrane domain (TM) and short cytoplasmic domain, (semaphorin) 4D
  ENSP ID: ENSP00000438389
MRMCTPIRGLLMALAVMFGTAMAFAPIPRITWEHREVHLVQFHEPDIYNYSALLLSEDKDTLYIGA

SEQ ID NO: 77314 - protein, 548 aa, Homo sapiens; identical to SEQ ID NO: 77305
  Payload ID: 15426
  Gene Symbol: SEMA4D
  Gene Name: sema domain, immunoglobulin domain (Ig), transmembrane domain (TM) and short cytoplasmic domain, (semaphorin) 4D
  ENSP ID: ENSP00000446394

SEQ ID NO: 77315 - protein, 615 aa, Homo sapiens
  Payload ID: 15427
  Gene Symbol: SEMA4F
  Gene Name: sema domain, immunoglobulin domain (Ig), transmembrane domain (TM) and short cytoplasmic domain, (semaphorin) 4F
  Uniprot ID: O95754
  ENSP ID: ENSP00000342675
MPASAARPRPGPGQPTASPFPLLLLAVLSGPVSGRVPRSVPRTSLPISEADSCLTRFAVPHTYNYSVLLVDPASHTLYVGARDTIFALSLPFSGERPRRIDWMVPEAHRQNCRKKGKKEGDLGGRKTLQQRWTTFLKADLLCPGPEHGRASSVLQDVAVLRPELGAGTPIFYGIFSSQWEGATISAVCAFRPQDIRTVLNGPFRELKHDCNRGLPVVDNDVPQPRPGECITNNMKLRHFGSSLSLPDRVLTFIRDHPLMDRPVFPADGHPLLVTTDTAYLRVVAHRVTSLSGKEYDVLYLGTEDGHLHRAVRIGAQLSVLEDLALFPEPQPVENMKLYHSWLLVGSRTEVTQVNTTNCGRLQSCSECILAQDPVCAWSFRLDECVAHAGEHRGLVQDIESADVSSLCPKEPGERPVVFEVPVATAAHVVLPCSPSSAWASCVWHQPSGVTALTPRRDGLEVVVTPGAMGAYACECQEGGAAHVVAAYSLVWGSQRDAPSRAHTVGAGLAGFFLGILAASLTLILIGRRQQRRRQRELLARDKVGLDLGAPPSGTTSYSQDPPSPSPEDERLPLALAKRGSGFGGFSPPFLLDPCPSPAHIRLTGAPLATCDETSI

SEQ ID NO: 77316 - protein, 770 aa, Homo sapiens
  Payload ID: 15427
  Gene Symbol: SEMA4F
  Gene Name: sema domain, immunoglobulin domain (Ig), transmembrane domain (TM) and short cytoplasmic domain, (semaphorin) 4F
  Uniprot ID: O95754
  ENSP ID: ENSP00000350547
MPASAARPRPGPGQPTASPFPLLLLAVLSGPVSGRVPRSVPRTSLPISEADSCLTRFAVPHTYNYSVLLVDPASHTLYVGARDTIFALSLPFSGERPRRIDWMVPEAHRQNCRKKGKKEDECHNFVQILAIANASHLLTCGTFAFDPKCGVIDVSRFQQVERLESGRGKCPFEPAQRSAAVMAGGVLYAATVKNYLGTEPIITRAVGRAEDWIRTDTLPSWLNAPAFVAAVALSPAEWGDEDGDDEIYFFFTETSRAFDSYERIKVPRVARVCAGDLGGRKTLQQRWTTFLKADLLCPGPEHGRASSVLQDVAVLRPELGAGTPIFYGIFSSQWEGATISAVCAFRPQDIRTVLNGPFRELKHDCNRGLPVVDNDVPQPRPGECITNNMKLRHFGSSLSLPDRVLTFIRDHPLMDRPVFPADGHPLLVTTDTAYLRVVAHRVTSLSGKEYDVLYLGTEDGHLHRAVRIGAQLSVLEDLALFPEPQPVENMKLYHSWLLVGSRTEVTQVNTTNCGRLQSCSECILAQDPVCAWSFRLDECVAHAGEHRGLVQDIESADVSSLCPKEPGERPVVFEVPVATAAHVVLPCSPSSAWASCVWHQPSGVTALTPRRDGLEVVVTPGAMGAYACECQEGGAAHVVAAYSLVWGSQRDAPSRAHTVGAGLAGFFLGILAASLTLILIGRRQQRRRQRELLARDKVGLDLGAPPSGTTSYSQDPPSPSPEDERLPLALAKRGSGFGGFSPPFLLDPCPSPAHIRLTGAPLATCDETSI

SEQ ID NO: 77317 - protein, 68 aa, Homo sapiens
  Payload ID: 15427
  Gene Symbol: SEMA4F
  Gene Name: sema domain, immunoglobulin domain (Ig), transmembrane domain (TM) and short cytoplasmic domain, (semaphorin) 4F
  ENSP ID: ENSP00000396703
MPASAARPRPGPGQPTASPFPLLLLAVLSGPVSGRVPRSVPRTSLPISVFRRKNRGGGYDPLKRCGRS

SEQ ID NO: 77318 - protein, 164 aa, Homo sapiens
  Payload ID: 15427
  Gene Symbol: SEMA4F
  Gene Name: sema domain, immunoglobulin domain (Ig), transmembrane domain (TM) and short cytoplasmic domain, (semaphorin) 4F
  ENSP ID: ENSP00000407698
MPASAARPRPGPGQPTASPFPLLLLAVLSGPVSGRVPRSVPRTSLPISEADSCLTRFAVPHTYNYSVLLVDPASHTLYVGARDTIFALSLPFSGERPRRIDWMVPEAHRQNCRKKGKKEDVSRFQQVERLESGRGKCPFEPAQRSAAVMAGGVLYAATVKNYLG

SEQ ID NO: 77319 - protein, 178 aa, Homo sapiens
  Payload ID: 15427
  Gene Symbol: SEMA4F
  Gene Name: sema domain, immunoglobulin domain (Ig), transmembrane domain (TM) and short cytoplasmic domain, (semaphorin) 4F
  ENSP ID: ENSP00000409141
MPASAARPRPGPGQPTASPFPLLLLAVLSGPVSGRVPRSVPRTSLPISEADSCLTRFAVPHTYNYSVLLVDPASHTLYVGARDTIFALSLPFSGERPRRIDWMVPEAHRQNCRKKGKKEGDLGGRKTLQQRWTTFLKADLLCPGPEHGRASSVLQDVAVLRPELGAGTPIFYGIFSSQ

SEQ ID NO: 77320 - protein, 49 aa, Homo sapiens
  Payload ID: 15427
  Gene Symbol: SEMA4F
  Gene Name: sema domain, immunoglobulin domain (Ig), transmembrane domain (TM) and short cytoplasmic domain, (semaphorin) 4F
  ENSP ID: ENSP00000413882
MPASAARPRPGPGQPTASPFPLLLLAVLSGPVSGRVPRSVPRTSLPISD

SEQ ID NO: 77321 - protein, 127 aa, Homo sapiens
  Payload ID: 15427
  Gene Symbol: SEMA4F
  Gene Name: sema domain, immunoglobulin domain (Ig), transmembrane domain (TM) and short cytoplasmic domain, (semaphorin) 4F
  ENSP ID: ENSP00000413916
MPASAARPRPGPGQPTASPFPLLLLAVLSGPVSGRVPRSVPRTSLPISEADSCLTRFAVPHTYNYSVLLVDPASHTLYVGARDTIFALSLPFSGERPRRIDWMVPEAHRQNCRKKGKKEGGSSMLPL

SEQ ID NO: 77322 - protein, 160 aa, Homo sapiens
  Payload ID: 15427
  Gene Symbol: SEMA4F
  Gene Name: sema domain, immunoglobulin domain (Ig), transmembrane domain (TM) and short cytoplasmic domain, (semaphorin) 4F
  ENSP ID: ENSP00000416490
MPASAARPRPGPGQPTASPFPLLLLAVLSGPVSGRVPRSVPRTSLPISEADSCLTRFAVPHTYNYSVLLVDPASHTLYVGARDTIFALSLPFSGERPRRIDWMVPEAHRQNCRKKGKKEDECHNFVQILAIANASHLLTCGTFAFDPKCGVIGGSSMLPL

SEQ ID NO: 77323 - protein, 737 aa, Homo sapiens
  Payload ID: 15427
  Gene Symbol: SEMA4F
  Gene Name: sema domain, immunoglobulin domain (Ig), transmembrane domain (TM) and short cytoplasmic domain, (semaphorin) 4F
  ENSP ID: ENSP00000482238
MPASAARPRPGPGQPTASPFPLLLLAVLSGPVSGRVPRSVPRTSLPISEADSCLTRFAVPHTYNYSVLLVDPASHTLYVGARDTIFALSLPFSGERPRRIDWMVPEAHRQNCRKKGKKEDVSRFQQVERLESGRGKCPFEPAQRSAAVMAGGVLYAATVKNYLGTEPIITRAVGRAEDWIRTDTLPSWLNAPAFVAAVALSPAEWGDEDGDDEIYFFFTETSRAFDSYERIKVPRVARVCAGDLGGRKTLQQRWTTFLKADLLCPGPEHGRASSVLQDVAVLRPELGAGTPIFYGIFSSQWEGATISAVCAFRPQDIRTVLNGPFRELKHDCNRGLPVVDNDVPQPRPGECITNNMKLRHFGSSLSLPDRVLTFIRDHPLMDRPVFPADGHPLLVTTDTAYLRVVAHRVTSLSGKEYDVLYLGTEDGHLHRAVRIGAQLSVLEDLALFPEPQPVENMKLYHSWLLVGSRTEVTQVNTTNCGRLQSCSECILAQDPVCAWSFRLDECVAHAGEHRGLVQDIESADVSSLCPKEPGERPVVFEVPVATAAHVVLPCSPSSAWASCVWHQPSGVTALTPRRDGLEVVVTPGAMGAYACECQEGGAAHVVAAYSLVWGSQRDAPSRAHTVGAGLAGFFLGILAASLTLILIGRRQQRRRQRELLARDKVGLDLGAPPSGTTSYSQDPPSPSPEDERLPLALAKRGSGFGGFSPPFLLDPCPSPAHIRLTGAPLATCDETSI

SEQ ID NO: 77324 - protein, 843 aa, Homo sapiens
  Payload ID: 15428
  Gene Symbol: SEMA4G
  Gene Name: sema domain, immunoglobulin domain (Ig), transmembrane domain (TM) and short cytoplasmic domain, (semaphorin) 4G
  Uniprot ID: Q9NTN9
  ENSP ID: ENSP00000210633
MWGRLWPLLLSILTATAVPGPSLRRPSRELDATPRMTIPYEELSGTRHFKGQAQNYSTLLLEEASARLLVGARGALFSLSANDIGDGAHKEIHWEASPEMQSKCHQKGKNNQTECFNHVRFLQRLNSTHLYACGTHAFQPLCAAIDAEAFTLPTSFEEGKEKCPYDPARGFTGLIIDGGLYTATRYEFRSIPDIRRSRHPHSLRTEETPMHWLNDAEFVFSVLVRESKASAVGDDDKVYYFFTERATEEGSGSFTQSRSSHRVARVARVCKGDLGGKKILQKKWTSFLKARLICHIPLYETLRGVCSLDAETSSRTHFYAAFTLSTQWKTLEASAICRYDLAEIQAVFAGPYMEYQDGSRRWGRYEGGVPEPRPGSCITDSLRSQGYNSSQDLPSLVLDFVKLHPLMARPVVPTRGRPLLLKRNIRYTHLTGTPVTTPAGPTYDLLFLGTADGWIHKAVVLGSGMHIIEETQVFRESQSVENLVISLLQHSLYVGAPSGVIQLPLSSCSRYRSCYDCILARDPYCGWDPGTHACAAATTIANRSQGSRTALIQDIERGNRGCESSRDTGPPPPLKTRSVLRGDDVLLPCDQPSNLARALWLLNGSMGLSDGQGGYRVGVDGLLVTDAQPEHSGNYGCYAEENGLRTLLASYSLTVRPATPAPAPKAPATPGAQLAPDVRLLYVLAIAALGGLCLILASSLLYVACLREGRRGRRRKYSLGRASRAGGSAVQLQTVSGQCPGEEDEGDDEGAGGLEGSCLQIIPGEGAPAPPPPPPPPPPAELTNGLVALPSRLRRMNGNSYVLLRQSNNGVPAGPCSFAEELSRILEKRKHTQLVEQLDESSV

SEQ ID NO: 77325 - protein, 838 aa, Homo sapiens
  Payload ID: 15428
  Gene Symbol: SEMA4G
  Gene Name: sema domain, immunoglobulin domain (Ig), transmembrane domain (TM) and short cytoplasmic domain, (semaphorin) 4G
  Uniprot ID: Q9NTN9
  ENSP ID: ENSP00000359270
MWGRLWPLLLSILTATAVPGPSLRRPSRELDATPRMTIPYEELSGTRHFKGQAQNYSTLLLEEASARLLVGARGALFSLSANDIGDGAHKEIHWEASPEMQSKCHQKGKNNQTECFNHVRFLQRLNSTHLYACGTHAFQPLCAAIDAEAFTLPTSFEEGKEKCPYDPARGFTGLIIDGGLYTATRYEFRSIPDIRRSRHPHSLRTEETPMHWLNDAEFVFSVLVRESKASAVGDDDKVYYFFTERATEEGSGSFTQSRSSHRVARVARVCKGDLGGKKILQKKWTSFLKARLICHIPLYETLRGVCSLDAETSSRTHFYAAFTLSTQWKTLEASAICRYDLAEIQAVFAGPYMEYQDGSRRWGRYEGGVPEPRPGSCITDSLRSQGYNSSQDLPSLVLDFVKLHPLMARPVVPTRGRPLLLKRNIRYTHLTGTPVTTPAGPTYDLLFLGTADGWIHKAVVLGSGMHIIEETQVFRESQSVENLVISLLQHSLYVGAPSGVIQLPLSSCSRYRSCYDCILARDPYCGWDPGTHACAAATTIANRTALIQDIERGNRGCESSRDTGPPPPLKTRSVLRGDDVLLPCDQPSNLARALWLLNGSMGLSDGQGGYRVGVDGLLVTDAQPEHSGNYGCYAEENGLRTLLASYSLTVRPATPAPAPKAPATPGAQLAPDVRLLYVLAIAALGGLCLILASSLLYVACLREGRRGRRRKYSLGRASRAGGSAVQLQTVSGQCPGEEDEGDDEGAGGLEGSCLQIIPGEGAPAPPPPPPPPPPAELTNGLVALPSRLRRMNGNSYVLLRQSNNGVPAGPCSFAEELSRILEKRKHTQLVEQLDESSV

SEQ ID NO: 77326 - protein, 522 aa, Homo sapiens
  Payload ID: 15428
  Gene Symbol: SEMA4G
  Gene Name: sema domain, immunoglobulin domain (Ig), transmembrane domain (TM) and short cytoplasmic domain, (semaphorin) 4G
  ENSP ID: ENSP00000428896
MWGRLWPLLLSILTATAVPGPSLRRPSRELDATPRMTIPYEELSGTRHFKGQAQNYSTLLLEEASARLLVGARGALFSLSANDIGDGAHKEIHWEASPEMQSKCHQKGKNNQTECFNHVRFLQRLNSTHLYACGTHAFQPLCAAIDAEAFTLPTSFEEGKEKCPYDPARGFTGLIIDGGLYTATRYEFRSIPDIRRSRHPHSLRTEETPMHWLNDAEFVFSVLVRESKASAVGDDDKVYYFFTERATEEGSGSFTQSRSSHRVARVARVCKGDLGGKKILQKKWTSFLKARLICHIPLYETLRGVCSLDAETSSRTHFYAAFTLSTQWKTLEASAICRYDLAEIQAVFAGPYMEYQDGSRRWGRYEGGVPEPRPGSCITDSLRSQGYNSSQDLPSLVLDFVKLHPLMARPVVPTRGRPLLLKRNIRYTHLTGTPVTTPAGPTYDLLFLGTADGWIHKAVVLGSGMHIIEETQVFRESQSVENLVISLLQHSLYVGAPSGVIQLPLSSCSRYRSCYDCILARD

SEQ ID NO: 77327 - protein, 131 aa, Homo sapiens
  Payload ID: 15428
  Gene Symbol: SEMA4G
  Gene Name: sema domain, immunoglobulin domain (Ig), transmembrane domain (TM) and short cytoplasmic domain, (semaphorin) 4G
  ENSP ID: ENSP00000429888
  MOD_RES (1)..(1): Any amino acid
XREGRRGRRRKYSLGRASRAGGSAVQLQTVSGRALQVHMGSMSPPSAWPCVLDGPETRQDLCQPPKPCVHSHAHMEECLSAGLQCPHPHLLLVHSCFIPASGLGVPSQLPHPIWSSSPAPCGDLFVKSLGT

SEQ ID NO: 77328 - protein, 170 aa, Homo sapiens
  Payload ID: 15428
  Gene Symbol: SEMA4G
  Gene Name: sema domain, immunoglobulin domain (Ig), transmembrane domain (TM) and short cytoplasmic domain, (semaphorin) 4G
  ENSP ID: ENSP00000430103
MWGRLWPLLLSILTATAVPGPSLRRPSRELDATPRMTIPYEELSGTRHFKGQAQNYSTLLLEEASARLLVGARGALFSLSANDIGDGAHKEIHWEASPEMQSKCHQKGKNNQTECFNHVRFLQRLNSTHLYACGTHAFQPLCAAIDAEAFTLPTSFEEGKEKCPYDPARG

SEQ ID NO: 77329 - protein, 702 aa, Homo sapiens
  Payload ID: 15428
  Gene Symbol: SEMA4G
  Gene Name: sema domain, immunoglobulin domain (Ig), transmembrane domain (TM) and short cytoplasmic domain, (semaphorin) 4G
  Uniprot ID: Q9NTN9
  ENSP ID: ENSP00000430175
MWGRLWPLLLSILTATAVPGPSLRRPSRELDATPRMTIPYEELSGTRHFKGQAQNYSTLLLEEASARLLVGARGALFSLSANDIGDGAHKEIHWEASPEMQSKCHQKGKNNQTECFNHVRFLQRLNSTHLYACGTHAFQPLCAAIDAEAFTLPTSFEEGKEKCPYDPARGFTGLIIDGGLYTATRYEFRSIPDIRRSRHPHSLRTEETPMHWLNDAEFVFSVLVRESKASAVGDDDKVYYFFTERATEEGSGSFTQSRSSHRVARVARVCKGDLGGKKILQKKWTSFLKARLICHIPLYETLRGVCSLDAETSSRTHFYAAFTLSTQWKTLEASAICRYDLAEIQAVFAGPYMEYQDGSRRWGRYEGGVPEPRPGSCITDSLRSQGYNSSQDLPSLVLDFVKLHPLMARPVVPTRGRPLLLKRNIRYTHLTGTPVTTPAGPTYDLLFLGTADGWIHKAVVLGSGMHIIEETQVFRESQSVENLVISLLQHSLYVGAPSGVIQLPLSSCSRYRSCYDCILARDPYCGWDPGTHACAAATTIANRSQGSRTALIQDIERGNRGCESSRDTGRALQVHMGSMSPPSAWPCVLDGPETRQDLCQPPKPCVHSHAHMEECLSAGLQCPHPHLLLVHSCFIPASGLGVPSQLPHPIWSSSPAPCGDLFVKSLGTGQPGEVRLHHSPPLPSCVALVNQPPHSPWSFSRV

SEQ ID NO: 77330 - protein, 838 aa, Homo sapiens; identical to SEQ ID NO: 77325
  Payload ID: 15428
  Gene Symbol: SEMA4G
  Gene Name: sema domain, immunoglobulin domain (Ig), transmembrane domain (TM) and short cytoplasmic domain, (semaphorin) 4G
  Uniprot ID: Q9NTN9
  ENSP ID: ENSP00000430881

SEQ ID NO: 77331 - protein, 127 aa, Homo sapiens
  Payload ID: 15428
  Gene Symbol: SEMA4G
  Gene Name: sema domain, immunoglobulin domain (Ig), transmembrane domain (TM) and short cytoplasmic domain, (semaphorin) 4G
  ENSP ID: ENSP00000479499
MGSMSPPSAWPCVLDGPETRQDLCQPPKPCVHSHAHMEECLSAGLQCPHPHLLLVHSCFIPASGLGVPSQLPHPIWSSSPAPCGDLFVKSLGTGQPGEVRLHHSPPLPSCVALVNQPPHSPWSFSRV

SEQ ID NO: 77332 - protein, 1074 aa, Homo sapiens
  Payload ID: 15429
  Gene Symbol: SEMA5A
  Gene Name: sema domain, seven thrombospondin repeats (type 1 and type 1-like), transmembrane domain (TM) and short cytoplasmic domain, (semaphorin) 5A
  Uniprot ID: Q13591
  ENSP ID: ENSP00000371936
MKGTCVIAWLFSSLGLWRLAHPEAQGTTQCQRTEHPVISYKEIGPWLREFRAKNAVDFSQLTFDPGQKELVVGARNYLFRLQLEDLSLIQAVEWECDEATKKACYSKGKSKEECQNYIRVLLVGGDRLFTCGTNAFTPVCTNRSLSNLTEIHDQISGMARCPYSPQHNSTALLTAGGELYAATAMDFPGRDPAIYRSLGILPPLRTAQYNSKWLNEPNFVSSYDIGNFTYFFFRENAVEHDCGKTVFSRAARVCKNDIGGRFLLEDTWTTFMKARLNCSRPGEVPFYYNELQSTFFLPELDLIYGIFTTNVNSIAASAVCVFNLSAIAQAFSGPFKYQENSRSAWLPYPNPNPHFQCGTVDQGLYVNLTERNLQDAQKFILMHEVVQPVTTVPSFMEDNSRFSHVAVDVVQGREALVHIIYLATDYGTIKKVRVPLNQTSSSCLLEEIELFPERRREPIRSLQILHSQSVLFVGLREHVVKIPLKRCQFYRTRSTCIGAQDPYCGWDVVMKKCTSLEESLSMTQWEQSISACPTRNLTVDGHFGVWSPWTPCTHTDGSAVGSCLCRTRSCDSPAPQCGGWQCEGPGMEIANCSRNGGWTPWTSWSPCSTTCGIGFQVRQRSCSNPTPRHGGRVCVGQNREERYCNEHLLCPPHMFWTGWGPWERCTAQCGGGIQARRRICENGPDCAGCNVEYQSCNTNPCPELKKTTPWTPWTPVNISDNGGHYEQRFRYTCKARLADPNLLEVGRQRIEMRYCSSDGTSGCSTDGLSGDFLRAGRYSAHTVNGAWSAWTSWSQCSRDCSRGIRNRKRVCNNPEPKYGGMPCLGPSLEYQECNILPCPVDGVWSCWSPWTKCSATCGGGHYMRTRSCSNPAPAYGGDICLGLHTEEALCNTQPCPESWSEWSDWSECEASGVQVRARQCILLFPMGSQCSGNTTESRPCVFDSNFIPEVSVARSSSVEEKRCGEFNMFHMIAVGLSSSILGCLLTLLVYTYCQRYQQQSHDATVIHPVSPAPLNTSITNHINKLDKYDSVEAIKAFNKNNLILEERNKYFNPHLTGKTYSNAYFTDLNNYDEY

SEQ ID NO: 77333 - protein, 254 aa, Homo sapiens
  Payload ID: 15429
  Gene Symbol: SEMA5A
  Gene Name: sema domain, seven thrombospondin repeats (type 1 and type 1-like), transmembrane domain (TM) and short cytoplasmic domain, (semaphorin) 5A
  ENSP ID: ENSP00000421961
MKGTCVIAWLFSSLGLWRLAHPEAQGTTQCQRTEHPVISYKEIGPWLREFRAKNAVDFSQLTFDPGQKELVVGARNYLFRLQLEDLSLIQAVEWECDEATKKACYSKGKSKEECQNYIRVLLVGGDRLFTCGTNAFTPVCTNRSLSNLTEIHDQISGMARCPYSPQHNSTALLTAGGELYAATAMDFPGRDPAIYRSLGILPPLRTAQYNSKWLNEPNFVSSYDIGNFTYFFFRENAVEHDCGKTVFSRAARVC

SEQ ID NO: 77334 - protein, 1057 aa, Homo sapiens
  Payload ID: 15430
  Gene Symbol: SEMA5B
  Gene Name: sema domain, seven thrombospondin repeats (type 1 and type 1-like), transmembrane domain (TM) and short cytoplasmic domain, (semaphorin) 5B
  ENSP ID: ENSP00000195173
MVLAGPLAVSLLLPSLTLLVSHLSSSQDVSSEPSSEQQLCALSKHPTVAFEDLQPWVSNFTYPGARDFSQLALDPSGNQLIVGARNYLFRLSLANVSLLQATEWASSEDTRRSCQSKGKTEEECQNYVRVLIVAGRKVFMCGTNAFSPMCTSRQVGNLSRTIEKINGVARCPYDPRHNSTAVISSQGELYAATVIDFSGRDPAIYRSLGSGPPLRTAQYNSKWLNEPNFVAAYDIGLFAYFFLRENAVEHDCGRTVYSRVARVCKNDVGGRFLLEDTWTTFMKARLNCSRPGEVPFYYNELQSAFHLPEQDLIYGVFTTNVNSIAASAVCAFNLSAISQAFNGPFRYQENPRAAWLPIANPIPNFQCGTLPETGPNENLTERSLQDAQRLFLMSEAVQPVTPEPCVTQDSVRFSHLVVDLVQAKDTLYHVLYIGTESGTILKALSTASRSLHGCYLEELHVLPPGRREPLRSLRILHSARALFVGLRDGVLRVPLERCAAYRSQGACLGARDPYCGWDGKQQRCSTLEDSSNMSLWTQNITACPVRNVTRDGGFGPWSPWQPCEHLDGDNSGSCLCRARSCDSPRPRCGGLDCLGPAIHIANCSRNGAWTPWSSWALCSTSCGIGFQVRQRSCSNPAPRHGGRICVGKSREERFCNENTPCPVPIFWASWGSWSKCSSNCGGGMQSRRRACENGNSCLGCGVEFKTCNPEGCPEVRRNTPWTPWLPVNVTQGGARQEQRFRFTCRAPLADPHGLQFGRRRTETRTCPADGSGSCDTDALVEVLLRSGSTSPHTVSGGWAAWGPWSSCSRDCELGFRVRKRTCTNPEPRNGGLPCVGDAAEYQDCNPQACPGEDICLGLHTEEALCATQACPEGWSPWSEWSKCTDDGAQSRSRHCEELLPGSSACAGNSSQSRPCPYSEIPVILPASSMEEATDCAGFNLIHLVATGISCFLGSGLLTLAVYLSCQHCQRQSQESTLVHPATPNHLHYKGGGTPKNEKYTPMEFKTLNKNNLIPDDRANFYPLQQTNVYTTTYYPSPLNKHSFRPEASPGQRCFPNS

SEQ ID NO: 77335 - protein, 1151 aa, Homo sapiens
  Payload ID: 15430
  Gene Symbol: SEMA5B
  Gene Name: sema domain, seven thrombospondin repeats (type 1 and type 1-like), transmembrane domain (TM) and short cytoplasmic domain, (semaphorin) 5B
  Uniprot ID: Q9P283
  ENSP ID: ENSP00000350215
MPCGFSPSPVAHHLVPGPPDTPAQQLRCGWTVGGWLLSLVRGLLPCLPPGARTAEGPIMVLAGPLAVSLLLPSLTLLVSHLSSSQDVSSEPSSEQQLCALSKHPTVAFEDLQPWVSNFTYPGARDFSQLALDPSGNQLIVGARNYLFRLSLANVSLLQATEWASSEDTRRSCQSKGKTEEECQNYVRVLIVAGRKVFMCGTNAFSPMCTSRQVGNLSRTIEKINGVARCPYDPRHNSTAVISSQGELYAATVIDFSGRDPAIYRSLGSGPPLRTAQYNSKWLNEPNFVAAYDIGLFAYFFLRENAVEHDCGRTVYSRVARVCKNDVGGRFLLEDTWTTFMKARLNCSRPGEVPFYYNELQSAFHLPEQDLIYGVFTTNVNSIAASAVCAFNLSAISQAFNGPFRYQENPRAAWLPIANPIPNFQCGTLPETGPNENLTERSLQDAQRLFLMSEAVQPVTPEPCVTQDSVRFSHLVVDLVQAKDTLYHVLYIGTESGTILKALSTASRSLHGCYLEELHVLPPGRREPLRSLRILHSARALFVGLRDGVLRVPLERCAAYRSQGACLGARDPYCGWDGKQQRCSTLEDSSNMSLWTQNITACPVRNVTRDGGFGPWSPWQPCEHLDGDNSGSCLCRARSCDSPRPRCGGLDCLGPAIHIANCSRNGAWTPWSSWALCSTSCGIGFQVRQRSCSNPAPRHGGRICVGKSREERFCNENTPCPVPIFWASWGSWSKCSSNCGGGMQSRRRACENGNSCLGCGVEFKTCNPEGCPEVRRNTPWTPWLPVNVTQGGARQEQRFRFTCRAPLADPHGLQFGRRRTETRTCPADGSGSCDTDALVEVLLRSGSTSPHTVSGGWAAWGPWSSCSRDCELGFRVRKRTCTNPEPRNGGLPCVGDAAEYQDCNPQACPVRGAWSCWTSWSPCSASCGGGHYQRTRSCTSPAPSPGEDICLGLHTEEALCATQACPEGWSPWSEWSKCTDDGAQSRSRHCEELLPGSSACAGNSSQSRPCPYSEIPVILPASSMEEATDCAGFNLIHLVATGISCFLGSGLLTLAVYLSCQHCQRQSQESTLVHPATPNHLHYKGGGTPKNEKYTPMEFKTLNKNNLIPDDRANFYPLQQTNVYTTTYYPSPLNKHSFRPEASPGQRCFPNS

SEQ ID NO: 77336 - protein, 1088 aa, Homo sapiens
  Payload ID: 15430
  Gene Symbol: SEMA5B
  Gene Name: sema domain, seven thrombospondin repeats (type 1 and type 1-like), transmembrane domain (TM) and short cytoplasmic domain, (semaphorin) 5B
  ENSP ID: ENSP00000377208
MPCGFSPSPVAHHLVPGPPDTPAQQLRCGWTVGGWLLSLVRGLLPCLPPGARTAEGPIMVLAGPLAVSLLLPSLTLLVSHLSSSQDVSSEPSSEQQLCALSKHPTVAFEDLQPWVSNFTYPGARDFSQLALDPSGNQLIVGARNYLFRLSLANVSLLQATEWASSEDTRRSCQSKGKTEEECQNYVRVLIVAGRKVFMCGTNAFSPMCTSRQVGNLSRTIEKINGVARCPYDPRHNSTAVISSQGELYAATVIDFSGRDPAIYRSLGSGPPLRTAQYNSKWLNEPNFVAAYDIGLFAYFFLRENAVEHDCGRTVYSRVARVCKNDVGGRFLLEDTWTTFMKARLNCSRPGEVPFYYNELQSAFHLPEQDLIYGVFTTNVNSIAASAVCAFNLSAISQAFNGPFRYQENPRAAWLPIANPIPNFQCGTLPETGPNENLTERSLQDAQRLFLMSEAVQPVTPEPCVTQDSVRFSHLVVDLVQAKDTLYHVLYIGTESGTILKALSTASRSLHGCYLEELHVLPPGRREPLRSLRILHSARALFVGLRDGVLRVPLERCAAYRSQGACLGARDPYCGWDGKQQRCSTLEDSSNMSLWTQNITACPVRNVTRDGGFGPWSPWQPCEHLDGDNSGSCLCRARSCDSPRPRCGGLDCLGPAIHIANCSRNGAWTPWSSWALCSTSCGIGFQVRQRSCSNPAPRHGGRICVGKSREERFCNENTPCPVPIFWASWGSWSKCSSNCGGGMQSRRRACENGNSCLGCGVEFKTCNPEGCPEVRRNTPWTPWLPVNVTQGGARQEQRFRFTCRAPLADPHGLQFGRRRTETRTCPADGSGSCDTDALVEVLLRSGSTSPHTVSGGWAAWGPWSSCSRDCELGFRVRKRTCTNPEPRNGGLPCVGDAAEYQDCNPQACPVRGAWSCWTSWSPCSASCGGGHYQRTRSCTSPAPSPGEDICLGLHTEEALCATQACPEGWSPWSEWSKCTDDGAQSRSRHCEELLPGSSACAGNSSQSRPCPYSEIPVILPASSMEEATDCAGFNLIHLVATGISCFLGSGLLTLAVYLSCQHCQRQSQESTLVHPATPNHLHYKGGGTP

SEQ ID NO: 77337 - protein, 1205 aa, Homo sapiens
  Payload ID: 15430
  Gene Symbol: SEMA5B
  Gene Name: sema domain, seven thrombospondin repeats (type 1 and type 1-like), transmembrane domain (TM) and short cytoplasmic domain, (semaphorin) 5B
  Uniprot ID: Q9P283
  ENSP ID: ENSP00000389588
MLHLSAEEAIGCVRVRRSFIDELAFGRGHSTGTGKQKRRDRVSGSSWCLACVSWMPCGFSPSPVAHHLVPGPPDTPAQQLRCGWTVGGWLLSLVRGLLPCLPPGARTAEGPIMVLAGPLAVSLLLPSLTLLVSHLSSSQDVSSEPSSEQQLCALSKHPTVAFEDLQPWVSNFTYPGARDFSQLALDPSGNQLIVGARNYLFRLSLANVSLLQATEWASSEDTRRSCQSKGKTEEECQNYVRVLIVAGRKVFMCGTNAFSPMCTSRQVGNLSRTIEKINGVARCPYDPRHNSTAVISSQGELYAATVIDFSGRDPAIYRSLGSGPPLRTAQYNSKWLNEPNFVAAYDIGLFAYFFLRENAVEHDCGRTVYSRVARVCKNDVGGRFLLEDTWTTFMKARLNCSRPGEVPFYYNELQSAFHLPEQDLIYGVFTTNVNSIAASAVCAFNLSAISQAFNGPFRYQENPRAAWLPIANPIPNFQCGTLPETGPNENLTERSLQDAQRLFLMSEAVQPVTPEPCVTQDSVRFSHLVVDLVQAKDTLYHVLYIGTESGTILKALSTASRSLHGCYLEELHVLPPGRREPLRSLRILHSARALFVGLRDGVLRVPLERCAAYRSQGACLGARDPYCGWDGKQQRCSTLEDSSNMSLWTQNITACPVRNVTRDGGFGPWSPWQPCEHLDGDNSGSCLCRARSCDSPRPRCGGLDCLGPAIHIANCSRNGAWTPWSSWALCSTSCGIGFQVRQRSCSNPAPRHGGRICVGKSREERFCNENTPCPVPIFWASWGSWSKCSSNCGGGMQSRRRACENGNSCLGCGVEFKTCNPEGCPEVRRNTPWTPWLPVNVTQGGARQEQRFRFTCRAPLADPHGLQFGRRRTETRTCPADGSGSCDTDALVEVLLRSGSTSPHTVSGGWAAWGPWSSCSRDCELGFRVRKRTCTNPEPRNGGLPCVGDAAEYQDCNPQACPVRGAWSCWTSWSPCSASCGGGHYQRTRSCTSPAPSPGEDICLGLHTEEALCATQACPEGWSPWSEWSKCTDDGAQSRSRHCEELLPGSSACAGNSSQSRPCPYSEIPVILPASSMEEATDCAGFNLIHLVATGISCFLGSGLLTLAVYLSCQHCQRQSQESTLVHPATPNHLHYKGGGTPKNEKYTPMEFKTLNKNNLIPDDRANFYPLQQTNVYTTTYYPSPLNKHSFRPEASPGQRCFPNS

SEQ ID NO: 77338 - protein, 197 aa, Homo sapiens
  Payload ID: 15430
  Gene Symbol: SEMA5B
  Gene Name: sema domain, seven thrombospondin repeats (type 1 and type 1-like), transmembrane domain (TM) and short cytoplasmic domain, (semaphorin) 5B
  ENSP ID: ENSP00000400828
  MOD_RES (1)..(1): Any amino acid
XRSCTSPAPSPEGWSPWSEWSKCTDDGAQSRSRHCEELLPGSSACAGNSSQSRPCPYSEIPVILPASSMEEATDCAGFNLIHLVATGISCFLGSGLLTLAVYLSCQHCQRQSQESTLVHPATPNHLHYKGGGTPKNEKYTPMEFKTLNKNNLIPDDRANFYPLQQTNVYTTTYYPSPLNKHSFRPEASPGQRCFPNS

SEQ ID NO: 77339 - protein, 84 aa, Homo sapiens
  Payload ID: 15430
  Gene Symbol: SEMA5B
  Gene Name: sema domain, seven thrombospondin repeats (type 1 and type 1-like), transmembrane domain (TM) and short cytoplasmic domain, (semaphorin) 5B
  ENSP ID: ENSP00000401038
MPCGFSPSPVAHHLVPGPPDTPAQQLRCGWTVGGWLLSLVRGLLPCLPPGARTAEGPIMVLAGPLAVSLLLPSLTLLVSHLSSS

SEQ ID NO: 77340 - protein, 142 aa, Homo sapiens
  Payload ID: 15430
  Gene Symbol: SEMA5B
  Gene Name: sema domain, seven thrombospondin repeats (type 1 and type 1-like), transmembrane domain (TM) and short cytoplasmic domain, (semaphorin) 5B
  ENSP ID: ENSP00000401056
MPCGFSPSPVAHHLVPGPPDTPAQQLRCGWTVGGWLLSLVRGLLPCLPPGARTAEGPIMVLAGPLAVSLLLPSLTLLVSHLSSSQDVSSEPSSEQQLCALSKHPTVAFEDLQPWVSNFTYPGARDFSQLALDPSGNQLIVGA

SEQ ID NO: 77341 - protein, 1094 aa, Homo sapiens
  Payload ID: 15430
  Gene Symbol: SEMA5B
  Gene Name: sema domain, seven thrombospondin repeats (type 1 and type 1-like), transmembrane domain (TM) and short cytoplasmic domain, (semaphorin) 5B
  ENSP ID: ENSP00000417570
MPCGFSPSPVAHHLVPGPPDTPAQQLRCGWTVGGWLLSLVRGLLPCLPPGARTAEGPIMVLAGPLAVSLLLPSLTLLVSHLSSSQDVSSEPSSEQQLCALSKHPTVAFEDLQPWVSNFTYPGARDFSQLALDPSGNQLIVGARNYLFRLSLANVSLLQATEWASSEDTRRSCQSKGKTEEECQNYVRVLIVAGRKVFMCGTNAFSPMCTSRQVGNLSRTIEKINGVARCPYDPRHNSTAVISSQGELYAATVIDFSGRDPAIYRSLGSGPPLRTAQYNSKWLNEPNFVAAYDIGLFAYFFLRENAVEHDCGRTVYSRVARVCKNDVGGRFLLEDTWTTFMKARLNCSRPGEVPFYYNELQSAFHLPEQDLIYGVFTTNVNSIAASAVCAFNLSAISQAFNGPFRYQENPRAAWLPIANPIPNFQCGTLPETGPNENLTERSLQDAQRLFLMSEAVQPVTPEPCVTQDSVRFSHLVVDLVQAKDTLYHVLYIGTESGTILKALSTASRSLHGCYLEELHVLPPGRREPLRSLRILHSARALFVGLRDGVLRVPLERCAAYRSQGACLGARDPYCGWDGKQQRCSTLEDSSNMSLWTQNITACPVRNVTRDGGFGPWSPWQPCEHLDGDNSGSCLCRARSCDSPRPRCGGLDCLGPAIHIANCSRNGAWTPWSSWALCSTSCGIGFQVRQRSCSNPAPRHGGRICVGKSREERFCNENTPCPVPIFWASWGSWSKCSSNCGGGMQSRRRACENGNSCLGCGVEFKTCNPEGCPEVRRNTPWTPWLPVNVTQGGARQEQRFRFTCRAPLADPHGLQFGRRRTETRTCPADGSGSCDTDALVEVLLRSGSTSPHTVSGGWAAWGPWSSCSRDCELGFRVRKRTCTNPEPRNGGLPCVGDAAEYQDCNPQACPVRGAWSCWTSWSPCSASCGGGHYQRTRSCTSPAPSPGEDICLGLHTEEALCATQACPEGWSPWSEWSKCTDDGAQSRSRHCEELLPGSSACAGNSSQSRPCPYSEIPVILPASSMEEATDCAGKRNRTYLMLRSSQPSGTPLQSLDSFHILLQTAKLCWGPHCFEMGSISSTWWPRASPASWALGS

SEQ ID NO: 77342 - protein, 1151 aa, Homo sapiens; identical to SEQ ID NO: 77335
  Payload ID: 15430
  Gene Symbol: SEMA5B
  Gene Name: sema domain, seven thrombospondin repeats (type 1 and type 1-like), transmembrane domain (TM) and short cytoplasmic domain, (semaphorin) 5B
  Uniprot ID: Q9P283
  ENSP ID: ENSP00000479602

SEQ ID NO: 77343 - protein, 1047 aa, Homo sapiens
  Payload ID: 15431
  Gene Symbol: SEMA6A
  Gene Name: sema domain, transmembrane domain (TM), and cytoplasmic domain, (semaphorin) 6A
  ENSP ID: ENSP00000257414
MRSEALLLYFTLLHFAGAGFPEDSEPISISHGNYTKQYPVFVGHKPGRNTTQRHRLDIQMIMIMNGTLYIAARDHIYTVDIDTSHTEEIYCSKKLTWKSRQADVDTCRMKGKHKDECHNFIKVLLKKNDDALFVCGTNAFNPSCRNYKMDTLEPFGDEFSGMARCPYDAKHANVALFADGKLYSATVTDFLAIDAVIYRSLGESPTLRTVKHDSKWLKEPYFVQAVDYGDYIYFFFREIAVEYNTMGKVVFPRVAQVCKNDMGGSQRVLEKQWTSFLKARLNCSVPGDSHFYFNILQAVTDVIRINGRDVVLATFSTPYNSIPGSAVCAYDMLDIASVFTGRFKEQKSPDSTWTPVPDERVPKPRPGCCAGSSSLERYATSNEFPDDTLNFIKTHPLMDEAVPSIFNRPWFLRTMVRYRLTKIAVDTAAGPYQNHTVVFLGSEKGIILKFLARIGNSGFLNDSLFLEEMSVYNSEKCSYDGVEDKRIMGMQLDRASSSLYVAFSTCVIKVPLGRCERHGKCKKTCIASRDPYCGWIKEGGACSHLSPNSRLTFEQDIERGNTDGLGDCHNSFVALNDISTPLPDNEMSYNTVYGHSSSLLPSTTTSDSTAQEGYESRGGMLDWKHLLDSPDSTDPLGAVSSHNHQDKKGVIRESYLKGHDQLVPVTLLAIAVILAFVMGAVFSGITVYCVCDHRRKDVAVVQRKEKELTHSRRGSMSSVTKLSGLFGDTQSKDPKPEAILTPLMHNGKLATPGNTAKMLIKADQHHLDLTALPTPESTPTLQQKRKPSRGSREWERNQNLINACTKDMPPMGSPVIPTDLPLRASPSHIPSVVVLPITQQGYQHEYVDQPKMSEVAQMALEDQAATLEYKTIKEHLSSKSPNHGVNLVENLDSLPPKVPQREASLGPPGASLSQTGLSKRLEMHHSSSYGVDYKRSYPTNSLTRSHQATTLKRNNTNSSNSSHLSRNQSFGRGDNPPPAPQRVDSIQVHSSQPSGQAVTVSRQPSLNAYNSLTRSGLKRTPSLKPDVPPKPSFAPLSTSMKPNDACT

SEQ ID NO: 77344 - protein, 1030 aa, Homo sapiens
  Payload ID: 15431
  Gene Symbol: SEMA6A
  Gene Name: sema domain, transmembrane domain (TM), and cytoplasmic domain, (semaphorin) 6A
  Uniprot ID: Q9H2E6
  ENSP ID: ENSP00000345512
MRSEALLLYFTLLHFAGAGFPEDSEPISISHGNYTKQYPVFVGHKPGRNTTQRHRLDIQMIMIMNGTLYIAARDHIYTVDIDTSHTEEIYCSKKLTWKSRQADVDTCRMKGKHKDECHNFIKVLLKKNDDALFVCGTNAFNPSCRNYKMDTLEPFGDEFSGMARCPYDAKHANVALFADGKLYSATVTDFLAIDAVIYRSLGESPTLRTVKHDSKWLKEPYFVQAVDYGDYIYFFFREIAVEYNTMGKVVFPRVAQVCKNDMGGSQRVLEKQWTSFLKARLNCSVPGDSHFYFNILQAVTDVIRINGRDVVLATFSTPYNSIPGSAVCAYDMLDIASVFTGRFKEQKSPDSTWTPVPDERVPKPRPGCCAGSSSLERYATSNEFPDDTLNFIKTHPLMDEAVPSIFNRPWFLRTMVRYRLTKIAVDTAAGPYQNHTVVFLGSEKGIILKFLARIGNSGFLNDSLFLEEMSVYNSEKCSYDGVEDKRIMGMQLDRASSSLYVAFSTCVIKVPLGRCERHGKCKKTCIASRDPYCGWIKEGGACSHLSPNSRLTFEQDIERGNTDGLGDCHNSFVALNGHSSSLLPSTTTSDSTAQEGYESRGGMLDWKHLLDSPDSTDPLGAVSSHNHQDKKGVIRESYLKGHDQLVPVTLLAIAVILAFVMGAVFSGITVYCVCDHRRKDVAVVQRKEKELTHSRRGSMSSVTKLSGLFGDTQSKDPKPEAILTPLMHNGKLATPGNTAKMLIKADQHHLDLTALPTPESTPTLQQKRKPSRGSREWERNQNLINACTKDMPPMGSPVIPTDLPLRASPSHIPSVVVLPITQQGYQHEYVDQPKMSEVAQMALEDQAATLEYKTIKEHLSSKSPNHGVNLVENLDSLPPKVPQREASLGPPGASLSQTGLSKRLEMHHSSSYGVDYKRSYPTNSLTRSHQATTLKRNNTNSSNSSHLSRNQSFGRGDNPPPAPQRVDSIQVHSSQPSGQAVTVSRQPSLNAYNSLTRSGLKRTPSLKPDVPPKPSFAPLSTSMKPNDACT

SEQ ID NO: 77345 - protein, 159 aa, Homo sapiens
  Payload ID: 15431
  Gene Symbol: SEMA6A
  Gene Name: sema domain, transmembrane domain (TM), and cytoplasmic domain, (semaphorin) 6A
  ENSP ID: ENSP00000421935
MRSEALLLYFTLLHFAGAGFPEDSEPISISHGNYTKQYPVFVGHKPGRNTTQRHRLDIQMIMIMNGTLYIAARDHIYTVDIDTSHTEEIYCSKKLTWKSRQADVDTCRMKGKHKDECHNFIKVLLKKNDDALFVCGTNAFNPSCRNYKMDTLEPFGDEF

SEQ ID NO: 77346 - protein, 545 aa, Homo sapiens
  Payload ID: 15431
  Gene Symbol: SEMA6A
  Gene Name: sema domain, transmembrane domain (TM), and cytoplasmic domain, (semaphorin) 6A
  ENSP ID: ENSP00000422275
  MOD_RES (1)..(1): Any amino acid
XYQNHTVVFLGSEKGIILKFLARIGNSGFLNDSLFLEEMSVYNSEKCSYDGVEDKRIMGMQLDRASSSLYVAFSTCVIKVPLGRCERHGKCKKTCIASRDPYCGWIKEGGACSHLSPNSRLTFEQDIERGNTDGLGDCHNSFVALNGVIRESYLKGHDQLVPVTLLAIAVILAFVMGAVFSGITVYCVCDHRRKDVAVVQRKEKELTHSRRGSMSSVTKLSGLFGDTQSKDPKPEAILTPLMHNGKLATPGNTAKMLIKADQHHLDLTALPTPESTPTLQQKRKPSRGSREWERNQNLINACTKDMPPMGSPVIPTDLPLRASPSHIPSVVVLPITQQGYQHEYVDQPKMSEVAQMALEDQAATLEYKTIKEHLSSKSPNHGVNLVENLDSLPPKVPQREASLGPPGASLSQTGLSKRLEMHHSSSYGVDYKRSYPTNSLTRSHQATTLKRNNTNSSNSSHLSRNQSFGRGDNPPPAPQRVDSIQVHSSQPSGQAVTVSRQPSLNAYNSLTRSGLKRTPSLKPDVPPKPSFAPLSTSMKPNDACT

SEQ ID NO: 77347 - protein, 457 aa, Homo sapiens
  Payload ID: 15431
  Gene Symbol: SEMA6A
  Gene Name: sema domain, transmembrane domain (TM), and cytoplasmic domain, (semaphorin) 6A
  ENSP ID: ENSP00000422997
MKTGHSSSLLPSTTTSDSTAQEGYESRGGMLDWKHLLDSPDSTDPLGAVSSHNHQDKKGVIRESYLKGHDQLVPVTLLAIAVILAFVMGAVFSGITVYCVCDHRRKDVAVVQRKEKELTHSRRGSMSSVTKLSGLFGDTQSKDPKPEAILTPLMHNGKLATPGNTAKMLIKADQHHLDLTALPTPESTPTLQQKRKPSRGSREWERNQNLINACTKDMPPMGSPVIPTDLPLRASPSHIPSVVVLPITQQGYQHEYVDQPKMSEVAQMALEDQAATLEYKTIKEHLSSKSPNHGVNLVENLDSLPPKVPQREASLGPPGASLSQTGLSKRLEMHHSSSYGVDYKRSYPTNSLTRSHQATTLKRNNTNSSNSSHLSRNQSFGRGDNPPPAPQRVDSIQVHSSQPSGQAVTVSRQPSLNAYNSLTRSGLKRTPSLKPDVPPKPSFAPLSTSMKPNDACT

SEQ ID NO: 77348 - protein, 1030 aa, Homo sapiens; identical to SEQ ID NO: 77344
  Payload ID: 15431
  Gene Symbol: SEMA6A
  Gene Name: sema domain, transmembrane domain (TM), and cytoplasmic domain, (semaphorin) 6A
  Uniprot ID: Q9H2E6
  ENSP ID: ENSP00000424388

SEQ ID NO: 77349 - protein, 409 aa, Homo sapiens
  Payload ID: 15431
  Gene Symbol: SEMA6A
  Gene Name: sema domain, transmembrane domain (TM), and cytoplasmic domain, (semaphorin) 6A
  ENSP ID: ENSP00000425364
MKNASPETREGVIRESYLKGHDQLVPVTLLAIAVILAFVMGAVFSGITVYCVCDHRRKDVAVVQRKEKELTHSRRGSMSSVTKLSGLFGDTQSKDPKPEAILTPLMHNGKLATPGNTAKMLIKADQHHLDLTALPTPESTPTLQQKRKPSRGSREWERNQNLINACTKDMPPMGSPVIPTDLPLRASPSHIPSVVVLPITQQGYQHEYVDQPKMSEVAQMALEDQAATLEYKTIKEHLSSKSPNHGVNLVENLDSLPPKVPQREASLGPPGASLSQTGLSKRLEMHHSSSYGVDYKRSYPTNSLTRSHQATTLKRNNTNSSNSSHLSRNQSFGRGDNPPPAPQRVDSIQVHSSQPSGQAVTVSRQPSLNAYNSLTRSGLKRTPSLKPDVPPKPSFAPLSTSMKPNDACT

SEQ ID NO: 77350 - protein, 114 aa, Homo sapiens
  Payload ID: 15431
  Gene Symbol: SEMA6A
  Gene Name: sema domain, transmembrane domain (TM), and cytoplasmic domain, (semaphorin) 6A
  ENSP ID: ENSP00000425553
MRSEALLLYFTLLHFAGAGFPEDSEPISISHGNYTKQYPVFVGHKPGRNTTQRHRLDIQMIMIMNGTLYIAARDHIYTVDIDTSHTEEIYCSKKLTWKSRQADVDTCRMKGKHK

SEQ ID NO: 77351 - protein, 677 aa, Homo sapiens
  Payload ID: 15432
  Gene Symbol: SEMA6B
  Gene Name: sema domain, transmembrane domain (TM), and cytoplasmic domain, (semaphorin) 6B
  Uniprot ID: Q9H3T3
  ENSP ID: ENSP00000465722
MQTPRASPPRPALLLLLLLLGGAHGLFPEEPPPLSVAPRDYLNHYPVFVGSGPGRLTPAEGADDLNIQRVLRVNRTLFIGDRDNLYRVELEPPTSTELRYQRKLTWRSNPSDINVCRMKGKQEGECRNFVKVLLLRDESTLFVCGSNAFNPVCANYSIDTLQPVGDNISGMARCPYDPKHANVALFSDGMLFTATVTDFLAIDAVIYRSLGDRPTLRTVKHDSKWFKEPYFVHAVEWGSHVYFFFREIAMEFNYLEKVVVSRVARVCKNDVGGSPRVLEKQWTSFLKARLNCSVPGDSHFYFNVLQAVTGVVSLGGRPVVLAVFSTPSNSIPGSAVCAFDLTQVAAVFEGRFREQKSPESIWTPVPEDQVPRPRPGCCAAPGMQYNASSALPDDILNFVKTHPLMDEAVPSLGHAPWILRTLMRHQLTRVAVDVGAGPWGNQTVVFLGSEAGTVLKFLVRPNASTSGTSGLSVFLEEFETYRPDRCGRPGGGETGQRLLSLELDAASGGLLAAFPRCVVRVPVARCQQYSGCMKNCIGSQDPYCGWAPDGSCIFLSPGTRAAFEQDVSGASTSGLGDCTGLLRASLSEDRAGLVSVNLLVTSSVAAFVVGAVVSGFSVGVCVRASEGCCGRVCQVGHACRVCVHERRSWWPQRPGRWLSRRWGFQKARGSPRCRLGV

SEQ ID NO: 77352 - protein, 888 aa, Homo sapiens
  Payload ID: 15432
  Gene Symbol: SEMA6B
  Gene Name: sema domain, transmembrane domain (TM), and cytoplasmic domain, (semaphorin) 6B
  Uniprot ID: Q9H3T3
  ENSP ID: ENSP00000467290
MQTPRASPPRPALLLLLLLLGGAHGLFPEEPPPLSVAPRDYLNHYPVFVGSGPGRLTPAEGADDLNIQRVLRVNRTLFIGDRDNLYRVELEPPTSTELRYQRKLTWRSNPSDINVCRMKGKQEGECRNFVKVLLLRDESTLFVCGSNAFNPVCANYSIDTLQPVGDNISGMARCPYDPKHANVALFSDGMLFTATVTDFLAIDAVIYRSLGDRPTLRTVKHDSKWFKEPYFVHAVEWGSHVYFFFREIAMEFNYLEKVVVSRVARVCKNDVGGSPRVLEKQWTSFLKARLNCSVPGDSHFYFNVLQAVTGVVSLGGRPVVLAVFSTPSNSIPGSAVCAFDLTQVAAVFEGRFREQKSPESIWTPVPEDQVPRPRPGCCAAPGMQYNASSALPDDILNFVKTHPLMDEAVPSLGHAPWILRTLMRHQLTRVAVDVGAGPWGNQTVVFLGSEAGTVLKFLVRPNASTSGTSGLSVFLEEFETYRPDRCGRPGGGETGQRLLSLELDAASGGLLAAFPRCVVRVPVARCQQYSGCMKNCIGSQDPYCGWAPDGSCIFLSPGTRAAFEQDVSGASTSGLGDCTGLLRASLSEDRAGLVSVNLLVTSSVAAFVVGAVVSGFSVGWFVGLRERRELARRKDKEAILAHGAGEAVLSVSRLGERRAQGPGGRGGGGGGGAGVPPEALLAPLMQNGWAKATLLQGGPHDLDSGLLPTPEQTPLPQKRLPTPHPHPHALGPRAWDHGHPLLPASASSSLLLLAPARAPEQPPAPGEPTPDGRLYAARPGRASHGDFPLTPHASPDRRRVVSAPTGPLDPASAADGLPRPWSPPPTGSLRRPLGPHAPPAATLRRTHTFNSGEARPGDRHRGCHARPGTDLAHLLPYGGADRTAPPVP

SEQ ID NO: 77353 - protein, 930 aa, Homo sapiens
  Payload ID: 15433
  Gene Symbol: SEMA6C
  Gene Name: sema domain, transmembrane domain (TM), and cytoplasmic domain, (semaphorin) 6C
  Uniprot ID: Q9H3T2
  ENSP ID: ENSP00000344148
MPRAPHFMPLLLLLLLLSLPHTQAAFPQDPLPLLISDLQGTSPLSWFRGLEDDAVAAELGLDFQRFLTLNRTLLVAARDHVFSFDLQAEEEGEGLVPNKYLTWRSQDVENCAVRGKLTDECYNYIRVLVPWDSQTLLACGTNSFSPVCRSYGITSLQQEGEELSGQARCPFDATQSNVAIFAEGSLYSATAADFQASDAVVYRSLGPQPPLRSAKYDSKWLREPHFVQALEHGDHVYFFFREVSVEDARLGRVQFSRVARVCKRDMGGSPRALDRHWTSFLKLRLNCSVPGDSTFYFDVLQALTGPVNLHGRSALFGVFTTQTNSIPGSAVCAFYLDEIERGFEGKFKEQRSLDGAWTPVSEDRVPSPRPGSCAGVGGAALFSSSRDLPDDVLTFIKAHPLLDPAVPPVTHQPLLTLTSRALLTQVAVDGMAGPHSNITVMFLGSNDGTVLKVLTPGGRSGGPEPILLEEIDAYSPARCSGKRTAQTARRIIGLELDTEGHRLFVAFSGCIVYLPLSRCARHGACQRSCLASQDPYCGWHSSRGCVDIRGSGGTDVDQAGNQESMEHGDCQDGATGSQSGPGDSAYGVRRDLPPASASRSVPIPLLLASVAAAFALGASVSGLLVSCACRRAHRRRGKDIETPGLPRPLSLRSLARLHGGGPEPPPPSKDGDAVQTPQLYTTFLPPPEGVPPPELACLPTPESTPELPVKHLRAAGDPWEWNQNRNNAKEGPGRSRGGHAAGGPAPRVLVRPPPPGCPGQAVEVTTLEELLRYLHGPQPPRKGAEPPAPLTSRALPPEPAPALLGGPSPRPHECASPLRLDVPPEGRCASAPARPALSAPAPRLGVGGGRRLPFSGHRAPPALLTRVPSGGPSRYSGGPGKHLLYLGRPEGYRGRALKRVDVEKPQLSLKPPLVGPSSRQAVPNGGRFNF

SEQ ID NO: 77354 - protein, 922 aa, Homo sapiens
  Payload ID: 15433
  Gene Symbol: SEMA6C
  Gene Name: sema domain, transmembrane domain (TM), and cytoplasmic domain, (semaphorin) 6C
  Uniprot ID: Q9H3T2
  ENSP ID: ENSP00000357908
MPRAPHFMPLLLLLLLLSLPHTQAAFPQDPLPLLISDLQGTSPLSWFRGLEDDAVAAELGLDFQRFLTLNRTLLVAARDHVFSFDLQAEEEGEGLVPNKYLTWRSQDVENCAVRGKLTDECYNYIRVLVPWDSQTLLACGTNSFSPVCRSYGITSLQQEGEELSGQARCPFDATQSNVAIFAEPHFVQALEHGDHVYFFFREVSVEDARLGRVQFSRVARVCKRDMGGSPRALDRHWTSFLKLRLNCSVPGDSTFYFDVLQALTGPVNLHGRSALFGVFTTQTNSIPGSAVCAFYLDEIERGFEGKFKEQRSLDGAWTPVSEDRVPSPRPGSCAGVGGAALFSSSRDLPDDVLTFIKAHPLLDPAVPPVTHQPLLTLTSRALLTQVAVDGMAGPHSNITVMFLGSNDGTVLKVLTPGGRSGGPEPILLEEIDAYSPARCSGKRTAQTARRIIGLELDTEGHRLFVAFSGCIVYLPLSRCARHGACQRSCLASQDPYCGWHSSRGCVDIRGSGGTDVDQAGNQESMEHGDCQDGATGSQSGPGDSAYVLPGPGPSPGTPSPPSDAHPRPQSSTLGVHTRGVRRDLPPASASRSVPIPLLLASVAAAFALGASVSGLLVSCACRRAHRRRGKDIETPGLPRPLSLRSLARLHGGGPEPPPPSKDGDAVQTPQLYTTFLPPPEGVPPPELACLPTPESTPELPVKHLRAAGDPWEWNQNRNNAKEGPGRSRGGHAAGGPAPRVLVRPPPPGCPGQAVEVTTLEELLRYLHGPQPPRKGAEPPAPLTSRALPPEPAPALLGGPSPRPHECASPLRLDVPPEGRCASAPARPALSAPAPRLGVGGGRRLPFSGHRAPPALLTRVPSGGPSRYSGGPGKHLLYLGRPEGYRGRALKRVDVEKPQLSLKPPLVGPSSRQAVPNGGRFNF

SEQ ID NO: 77355 - protein, 962 aa, Homo sapiens
  Payload ID: 15433
  Gene Symbol: SEMA6C
  Gene Name: sema domain, transmembrane domain (TM), and cytoplasmic domain, (semaphorin) 6C
  Uniprot ID: Q9H3T2
  ENSP ID: ENSP00000357909
MPRAPHFMPLLLLLLLLSLPHTQAAFPQDPLPLLISDLQGTSPLSWFRGLEDDAVAAELGLDFQRFLTLNRTLLVAARDHVFSFDLQAEEEGEGLVPNKYLTWRSQDVENCAVRGKLTDECYNYIRVLVPWDSQTLLACGTNSFSPVCRSYGITSLQQEGEELSGQARCPFDATQSNVAIFAEGSLYSATAADFQASDAVVYRSLGPQPPLRSAKYDSKWLREPHFVQALEHGDHVYFFFREVSVEDARLGRVQFSRVARVCKRDMGGSPRALDRHWTSFLKLRLNCSVPGDSTFYFDVLQALTGPVNLHGRSALFGVFTTQTNSIPGSAVCAFYLDEIERGFEGKFKEQRSLDGAWTPVSEDRVPSPRPGSCAGVGGAALFSSSRDLPDDVLTFIKAHPLLDPAVPPVTHQPLLTLTSRALLTQVAVDGMAGPHSNITVMFLGSNDGTVLKVLTPGGRSGGPEPILLEEIDAYSPARCSGKRTAQTARRIIGLELDTEGHRLFVAFSGCIVYLPLSRCARHGACQRSCLASQDPYCGWHSSRGCVDIRGSGGTDVDQAGNQESMEHGDCQDGATGSQSGPGDSAYVLPGPGPSPGTPSPPSDAHPRPQSSTLGVHTRGVRRDLPPASASRSVPIPLLLASVAAAFALGASVSGLLVSCACRRAHRRRGKDIETPGLPRPLSLRSLARLHGGGPEPPPPSKDGDAVQTPQLYTTFLPPPEGVPPPELACLPTPESTPELPVKHLRAAGDPWEWNQNRNNAKEGPGRSRGGHAAGGPAPRVLVRPPPPGCPGQAVEVTTLEELLRYLHGPQPPRKGAEPPAPLTSRALPPEPAPALLGGPSPRPHECASPLRLDVPPEGRCASAPARPALSAPAPRLGVGGGRRLPFSGHRAPPALLTRVPSGGPSRYSGGPGKHLLYLGRPEGYRGRALKRVDVEKPQLSLKPPLVGPSSRQAVPNGGRFNF

SEQ ID NO: 77356 - protein, 930 aa, Homo sapiens; identical to SEQ ID NO: 77353
  Payload ID: 15433
  Gene Symbol: SEMA6C
  Gene Name: sema domain, transmembrane domain (TM), and cytoplasmic domain, (semaphorin) 6C
  Uniprot ID: Q9H3T2
  ENSP ID: ENSP00000357910

SEQ ID NO: 77357 - protein, 537 aa, Homo sapiens [sequence omitted]

SEQ ID NO: 77358 - protein, 537 aa, Homo sapiens
  Payload ID: 15433
  Gene Symbol: SEMA6C
  Gene Name: sema domain, transmembrane domain (TM), and cytoplasmic domain, (semaphorin) 6C
  ENSP ID: ENSP00000483227
MPRAPHFMPLLLLLLLLSLPHTQAAFPQDPLPLLISDLQGTSPLSWFRGLEDDAVAAELGLDFQRFLTLNRTLLVAARDHVFSFDLQAEEEGEGLVPNKYLTWRSQDVENCAVRGKLTDECYNYIRVLVPWDSQTLLACGTNSFSPVCRSYGITSLQQEGEELSGQARCPFDATQSNVAIFAEGSLYSATAADFQASDAVVYRSLGPQPPLRSAKYDSKWLREPHFVQALEHGDHVYFFFREVSVEDARLGRVQFSRVARVCKRDMGGSPRALDRHWTSFLKLRLNCSVPGDSTFYFDVLQALTGPVNLHGRSALFGVFTTQTNSIPGSAVCAFYLDEIERGFEGKFKEQRSLDGAWTPVSEDRVPSPRPGSCPAHSSPLGRSLQVLRGSREAPPVPGPARGLPGPRPEKGGRREAPVVPEASPRRALLPPGRPERRPFQLLKGAAHGLQRGERPSPLGHELDALQDVSPPPRPAPPAFPTRRVSRGPFSPRVYLLTVFPPVLDRRVGGEKPVSSVSQHFRGSWRTPTPRSLPAKLP

SEQ ID NO: 77359 - protein, 1073 aa, Homo sapiens
  Payload ID: 15434
  Gene Symbol: SEMA6D
  Gene Name: sema domain, transmembrane domain (TM), and cytoplasmic domain, (semaphorin) 6D
  Uniprot ID: Q8NFY4
  ENSP ID: ENSP00000324857
MRVFLLCAYILLLMVSQLRAVSFPEDDEPLNTVDYHYSRQYPVFRGRPSGNESQHRLDFQLMLKIRDTLYIAGRDQVYTVNLNEMPKTEVIPNKKLTWRSRQQDRENCAMKGKHKDECHNFIKVFVPRNDEMVFVCGTNAFNPMCRYYRLSTLEYDGEEISGLARCPFDARQTNVALFADGKLYSATVADFLASDAVIYRSMGDGSALRTIKYDSKWIKEPHFLHAIEYGNYVYFFFREIAVEHNNLGKAVYSRVARICKNDMGGSQRVLEKHWTSFLKARLNCSVPGDSFFYFDVLQSITDIIQINGIPTVVGVFTTQLNSIPGSAVCAFSMDDIEKVFKGRFKEQKTPDSVWTAVPEDKVPKPRPGCCAKHGLAEAYKTSIDFPDETLSFIKSHPLMDSAVPPIADEPWFTKTRVRYRLTAISVDHSAGPYQNYTVIFVGSEAGMVLKVLAKTSPFSLNDSVLLEEIEAYNHAKCSAENEEDKKVISLQLDKDHHALYVAFSSCIIRIPLSRCERYGSCKKSCIASRDPYCGWLSQGSCGRVTPGMLAEGYEQDTEFGNTAHLGDCHEILPTSTTPDYKIFGGPTSDMEVSSSSVTTMASIPEITPKVIDTWRPKLTSSRKFVVQDDPNTSDFTDPLSGIPKGVRWEVQSGESNQMVHMNVLITCVFAAFVLGAFIAGVAVYCYRDMFVRKNRKIHKDAESAQSCTDSSGSFAKLNGLFDSPVKEYQQNIDSPKLYSNLLTSRKELPPNGDTKSMVMDHRGQPPELAALPTPESTPVLHQKTLQAMKSHSEKAHGHGASRKETPQFFPSSPPPHSPLSHGHIPSAIVLPNATHDYNTSFSNSNAHKAEKKLQNIDHPLTKSSSKRDHRRSVDSRNTLNDLLKHLNDPNSNPKAIMGDIQMAHQNLMLDPMGSMSEVPPKVPNREASLYSPPSTLPRNSPTKRVDVPTTPGVPMTSLERQRGYHKNSSQRHSISAMPKNLNSPNGVLLSRQPSMNRGGYMPTPTGAKVDYIQGTPVSVHLQPSLSRQSSYTSNGTLPRTGLKRTPSLKPDVPPKPSFVPQTPSVRPLNKYTY

SEQ ID NO: 77360 - protein, 1017 aa, Homo sapiens
  Payload ID: 15434
  Gene Symbol: SEMA6D
  Gene Name: sema domain, transmembrane domain (TM), and cytoplasmic domain, (semaphorin) 6D
  Uniprot ID: Q8NFY4
  ENSP ID: ENSP00000346786
MRVFLLCAYILLLMVSQLRAVSFPEDDEPLNTVDYHYSRQYPVFRGRPSGNESQHRLDFQLMLKIRDTLYIAGRDQVYTVNLNEMPKTEVIPNKKLTWRSRQQDRENCAMKGKHKDECHNFIKVFVPRNDEMVFVCGTNAFNPMCRYYRLSTLEYDGEEISGLARCPFDARQTNVALFADGKLYSATVADFLASDAVIYRSMGDGSALRTIKYDSKWIKEPHFLHAIEYGNYVYFFFREIAVEHNNLGKAVYSRVARICKNDMGGSQRVLEKHWTSFLKARLNCSVPGDSFFYFDVLQSITDIIQINGIPTVVGVFTTQLNSIPGSAVCAFSMDDIEKVFKGRFKEQKTPDSVWTAVPEDKVPKPRPGCCAKHGLAEAYKTSIDFPDETLSFIKSHPLMDSAVPPIADEPWFTKTRVRYRLTAISVDHSAGPYQNYTVIFVGSEAGMVLKVLAKTSPFSLNDSVLLEEIEAYNHAKCSAENEEDKKVISLQLDKDHHALYVAFSSCIIRIPLSRCERYGSCKKSCIASRDPYCGWLSQGSCGRVTPGMLAEGYEQDTEFGNTAHLGDCHEILPTSTTPDYKIFGGPTSGVRWEVQSGESNQMVHMNVLITCVFAAFVLGAFIAGVAVYCYRDMFVRKNRKIHKDAESAQSCTDSSGSFAKLNGLFDSPVKEYQQNIDSPKLYSNLLTSRKELPPNGDTKSMVMDHRGQPPELAALPTPESTPVLHQKTLQAMKSHSEKAHGHGASRKETPQFFPSSPPPHSPLSHGHIPSAIVLPNATHDYNTSFSNSNAHKAEKKLQNIDHPLTKSSSKRDHRRSVDSRNTLNDLLKHLNDPNSNPKAIMGDIQMAHQNLMLDPMGSMSEVPPKVPNREASLYSPPSTLPRNSPTKRVDVPTTPGVPMTSLERQRGYHKNSSQRHSISAMPKNLNSPNGVLLSRQPSMNRGGYMPTPTGAKVDYIQGTPVSVHLQPSLSRQSSYTSNGTLPRTGLKRTPSLKPDVPPKPSFVPQTPSVRPLNKYTY

SEQ ID NO: 77361 - protein, 597 aa, Homo sapiens
  Payload ID: 15434
  Gene Symbol: SEMA6D
  Gene Name: sema domain, transmembrane domain (TM), and cytoplasmic domain, (semaphorin) 6D
  Uniprot ID: Q8NFY4
  ENSP ID: ENSP00000348276
MRVFLLCAYILLLMVSQLRAVSFPEDDEPLNTVDYHYSRQYPVFRGRPSGNESQHRLDFQLMLKIRDTLYIAGRDQVYTVNLNEMPKTEVIPNKKLTWRSRQQDRENCAMKGKHKDECHNFIKVFVPRNDEMVFVCGTNAFNPMCRYYRLSTLEYDGEEISGLARCPFDARQTNVALFADGKLYSATVADFLASDAVIYRSMGDGSALRTIKYDSKWIKEPHFLHAIEYGNYVYFFFREIAVEHNNLGKAVYSRVARICKNDMGGSQRVLEKHWTSFLKARLNCSVPGDSFFYFDVLQSITDIIQINGIPTVVGVFTTQLNSIPGSAVCAFSMDDIEKVFKGRFKEQKTPDSVWTAVPEDKVPKPRPGCCAKHGLAEAYKTSIDFPDETLSFIKSHPLMDSAVPPIADEPWFTKTRVRYRLTAISVDHSAGPYQNYTVIFVGSEAGMVLKVLAKTSPFSLNDSVLLEEIEAYNHAKCSAENEEDKKVISLQLDKDHHALYVAFSSCIIRIPLSRCERYGSCKKSCIASRDPYCGWLSQGSCGRVTPGMLAEGYEQDTEFGNTAHLGDCHDMEVSSSSVTTMVYDGKSSLESPTRWST

SEQ ID NO: 77362 - protein, 1011 aa, Homo sapiens
  Payload ID: 15434
  Gene Symbol: SEMA6D
  Gene Name: sema domain, transmembrane domain (TM), and cytoplasmic domain, (semaphorin) 6D
  Uniprot ID: Q8NFY4
  ENSP ID: ENSP00000350770
MRVFLLCAYILLLMVSQLRAVSFPEDDEPLNTVDYHYSRQYPVFRGRPSGNESQHRLDFQLMLKIRDTLYIAGRDQVYTVNLNEMPKTEVIPNKKLTWRSRQQDRENCAMKGKHKDECHNFIKVFVPRNDEMVFVCGTNAFNPMCRYYRLSTLEYDGEEISGLARCPFDARQTNVALFADGKLYSATVADFLASDAVIYRSMGDGSALRTIKYDSKWIKEPHFLHAIEYGNYVYFFFREIAVEHNNLGKAVYSRVARICKNDMGGSQRVLEKHWTSFLKARLNCSVPGDSFFYFDVLQSITDIIQINGIPTVVGVFTTQLNSIPGSAVCAFSMDDIEKVFKGRFKEQKTPDSVWTAVPEDKVPKPRPGCCAKHGLAEAYKTSIDFPDETLSFIKSHPLMDSAVPPIADEPWFTKTRVRYRLTAISVDHSAGPYQNYTVIFVGSEAGMVLKVLAKTSPFSLNDSVLLEEIEAYNHAKCSAENEEDKKVISLQLDKDHHALYVAFSSCIIRIPLSRCERYGSCKKSCIASRDPYCGWLSQGSCGRVTPGMLLLTEDFFAFHNHSAEGYEQDTEFGNTAHLGDCHGVRWEVQSGESNQMVHMNVLITCVFAAFVLGAFIAGVAVYCYRDMFVRKNRKIHKDAESAQSCTDSSGSFAKLNGLFDSPVKEYQQNIDSPKLYSNLLTSRKELPPNGDTKSMVMDHRGQPPELAALPTPESTPVLHQKTLQAMKSHSEKAHGHGASRKETPQFFPSSPPPHSPLSHGHIPSAIVLPNATHDYNTSFSNSNAHKAEKKLQNIDHPLTKSSSKRDHRRSVDSRNTLNDLLKHLNDPNSNPKAIMGDIQMAHQNLMLDPMGSMSEVPPKVPNREASLYSPPSTLPRNSPTKRVDVPTTPGVPMTSLERQRGYHKNSSQRHSISAMPKNLNSPNGVLLSRQPSMNRGGYMPTPTGAKVDYIQGTPVSVHLQPSLSRQSSYTSNGTLPRTGLKRTPSLKPDVPPKPSFVPQTPSVRPLNKYTY

SEQ ID NO: 77363 - protein, 476 aa, Homo sapiens
  Payload ID: 15434
  Gene Symbol: SEMA6D
  Gene Name: sema domain, transmembrane domain (TM), and cytoplasmic domain, (semaphorin) 6D
  Uniprot ID: Q8NFY4
  ENSP ID: ENSP00000374076
MRVFLLCAYILLLMVSQLRAVSFPEDDEPLNTVDYHYSRQYPVFRGRPSGNESQHRLDFQLMLKIRDTLYIAGRDQVYTVNLNEMPKTEVIPNKKLTWRSRQQDRENCAMKGKHKDECHNFIKVFVPRNDEMVFVCGTNAFNPMCRYYRLSTLEYDGEEISGLARCPFDARQTNVALFADGKLYSATVADFLASDAVIYRSMGDGSALRTIKYDSKWIKEPHFLHAIEYGNYVYFFFREIAVEHNNLGKAVYSRVARICKNDMGGSQRVLEKHWTSFLKARLNCSVPGDSFFYFDVLQSITDIIQINGIPTVVGVFTTQLNSIPGSAVCAFSMDDIEKVFKGRFKEQKTPDSVWTAVPEDKVPKPRPGCCAKHGLAEAYKTSIDFPDETLSFIKSHPLMDSAVPPIADEPWFTKTRVRYRLTAISVDHSAGPYQNYTVIFVGSEAGMVLKVLAKTSPFSLNDSVLLEEIEAYNHAK

SEQ ID NO: 77364 - protein, 998 aa, Homo sapiens
  Payload ID: 15434
  Gene Symbol: SEMA6D
  Gene Name: sema domain, transmembrane domain (TM), and cytoplasmic domain, (semaphorin) 6D
  Uniprot ID: Q8NFY4
  ENSP ID: ENSP00000374079
MRVFLLCAYILLLMVSQLRAVSFPEDDEPLNTVDYHYSRQYPVFRGRPSGNESQHRLDFQLMLKIRDTLYIAGRDQVYTVNLNEMPKTEVIPNKKLTWRSRQQDRENCAMKGKHKDECHNFIKVFVPRNDEMVFVCGTNAFNPMCRYYRLSTLEYDGEEISGLARCPFDARQTNVALFADGKLYSATVADFLASDAVIYRSMGDGSALRTIKYDSKWIKEPHFLHAIEYGNYVYFFFREIAVEHNNLGKAVYSRVARICKNDMGGSQRVLEKHWTSFLKARLNCSVPGDSFFYFDVLQSITDIIQINGIPTVVGVFTTQLNSIPGSAVCAFSMDDIEKVFKGRFKEQKTPDSVWTAVPEDKVPKPRPGCCAKHGLAEAYKTSIDFPDETLSFIKSHPLMDSAVPPIADEPWFTKTRVRYRLTAISVDHSAGPYQNYTVIFVGSEAGMVLKVLAKTSPFSLNDSVLLEEIEAYNHAKCSAENEEDKKVISLQLDKDHHALYVAFSSCIIRIPLSRCERYGSCKKSCIASRDPYCGWLSQGSCGRVTPGMLAEGYEQDTEFGNTAHLGDCHGVRWEVQSGESNQMVHMNVLITCVFAAFVLGAFIAGVAVYCYRDMFVRKNRKIHKDAESAQSCTDSSGSFAKLNGLFDSPVKEYQQNIDSPKLYSNLLTSRKELPPNGDTKSMVMDHRGQPPELAALPTPESTPVLHQKTLQAMKSHSEKAHGHGASRKETPQFFPSSPPPHSPLSHGHIPSAIVLPNATHDYNTSFSNSNAHKAEKKLQNIDHPLTKSSSKRDHRRSVDSRNTLNDLLKHLNDPNSNPKAIMGDIQMAHQNLMLDPMGSMSEVPPKVPNREASLYSPPSTLPRNSPTKRVDVPTTPGVPMTSLERQRGYHKNSSQRHSISAMPKNLNSPNGVLLSRQPSMNRGGYMPTPTGAKVDYIQGTPVSVHLQPSLSRQSSYTSNGTLPRTGLKRTPSLKPDVPPKPSFVPQTPSVRPLNKYTY

SEQ ID NO: 77365 - protein, 1011 aa, Homo sapiens; identical to SEQ ID NO: 77362
  Payload ID: 15434
  Gene Symbol: SEMA6D
  Gene Name: sema domain, transmembrane domain (TM), and cytoplasmic domain, (semaphorin) 6D
  Uniprot ID: Q8NFY4
  ENSP ID: ENSP00000442040

SEQ ID NO: 77366 - protein, 1073 aa, Homo sapiens; identical to SEQ ID NO: 77359
  Payload ID: 15434
  Gene Symbol: SEMA6D
  Gene Name: sema domain, transmembrane domain (TM), and cytoplasmic domain, (semaphorin) 6D
  Uniprot ID: Q8NFY4
  ENSP ID: ENSP00000446152

SEQ ID NO: 77367 - protein, 1011 aa, Homo sapiens; identical to SEQ ID NO: 77362
  Payload ID: 15434
  Gene Symbol: SEMA6D
  Gene Name: sema domain, transmembrane domain (TM), and cytoplasmic domain, (semaphorin) 6D
  Uniprot ID: Q8NFY4
  ENSP ID: ENSP00000452815

SEQ ID NO: 77368 - protein, 22 aa, Homo sapiens
  Payload ID: 15434
  Gene Symbol: SEMA6D
  Gene Name: sema domain, transmembrane domain (TM), and cytoplasmic domain, (semaphorin) 6D
  ENSP ID: ENSP00000453097
MRVFLLCAYILLLMVSQLRAVS

SEQ ID NO: 77369 - protein, 1 aa, Homo sapiens
  Payload ID: 15434
  Gene Symbol: SEMA6D
  Gene Name: sema domain, transmembrane domain (TM), and cytoplasmic domain, (semaphorin) 6D
  ENSP ID: ENSP00000453420
M

SEQ ID NO: 77370 - protein, 54 aa, Homo sapiens
  Payload ID: 15434
  Gene Symbol: SEMA6D
  Gene Name: sema domain, transmembrane domain (TM), and cytoplasmic domain, (semaphorin) 6D
  ENSP ID: ENSP00000453518
  MOD_RES (1)..(1): Any amino acid
XLLTEDFFAFHNHSAEGYEQDTEFGNTAHLGDCHEILPTSTTPDYKIFGGPTSG

SEQ ID NO: 77371 - protein, 148 aa, Homo sapiens
  Payload ID: 15434
  Gene Symbol: SEMA6D
  Gene Name: sema domain, transmembrane domain (TM), and cytoplasmic domain, (semaphorin) 6D
  ENSP ID: ENSP00000453530
MRVFLLCAYILLLMVSQLRAVSFPEDDEPLNTVDYHYSRQYPVFRGRPSGNESQHRLDFQLMLKIRDTLYIAGRDQVYTVNLNEMPKTEVIPNKKLTWRSRQQDRENCAMKGKHKDECHNFIKVFVPRNDEMVFVCGTNAFNPMCRYY

SEQ ID NO: 77372 - protein, 597 aa, Homo sapiens; identical to SEQ ID NO: 77361
  Payload ID: 15434
  Gene Symbol: SEMA6D
  Gene Name: sema domain, transmembrane domain (TM), and cytoplasmic domain, (semaphorin) 6D
  Uniprot ID: Q8NFY4
  ENSP ID: ENSP00000453661

SEQ ID NO: 77373 - protein, 198 aa, Homo sapiens
  Payload ID: 15434
  Gene Symbol: SEMA6D
  Gene Name: sema domain, transmembrane domain (TM), and cytoplasmic domain, (semaphorin) 6D
  ENSP ID: ENSP00000453689
  MOD_RES (1)..(1): Any amino acid
XLTEDFFAFHNHSAEGYEQDTEFGNTAHLGDCHEILPTSTTPDYKIFGGPTSDMEVSSSSVTTMASIPEITPKVIDTWRPKLTSSRKFVVQDDPNTSDFTDPLSGIPKGVRWEVQSGESNQMVHMNVLITCVFAAFVLGAFIAGVAVYCYRDMFVRKNRKIHKDAESAQSCTDSSGSFAKLNGLFDSPVKEYQQNIDS

SEQ ID NO: 77374 - protein, 219 aa, Homo sapiens
  Payload ID: 15434
  Gene Symbol: SEMA6D
  Gene Name: sema domain, transmembrane domain (TM), and cytoplasmic domain, (semaphorin) 6D
  ENSP ID: ENSP00000453755
MRVFLLCAYILLLMVSQLRAVSFPEDDEPLNTVDYHYSRQYPVFRGRPSGNESQHRLDFQLMLKIRDTLYIAGRDQVYTVNLNEMPKTEVIPNKKLTWRSRQQDRENCAMKGKHKDECHNFIKVFVPRNDEMVFVCGTNAFNPMCRYYRLSTLEYDGEEISGLARCPFDARQTNVALFADGKLYSATVADFLASDAVIYRSMGDGSALRTIKYDSKWIK

SEQ ID NO: 77375 - protein, 666 aa, Homo sapiens
  Payload ID: 15435
  Gene Symbol: SEMA7A
  Gene Name: semaphorin 7A, GPI membrane anchor (John Milton Hagen blood group)
  Uniprot ID: O75326
  ENSP ID: ENSP00000261918
MTPPPPGRAAPSAPRARVPGPPARLGLPLRLRLLLLLWAAAASAQGHLRSGPRIFAVWKGHVGQDRVDFGQTEPHTVLFHEPGSSSVWVGGRGKVYLFDFPEGKNASVRTVNIGSTKGSCLDKRDCENYITLLERRSEGLLACGTNARHPSCWNLVNGTVVPLGEMRGYAPFSPDENSLVLFEGDEVYSTIRKQEYNGKIPRFRRIRGESELYTSDTVMQNPQFIKATIVHQDQAYDDKIYYFFREDNPDKNPEAPLNVSRVAQLCRGDQGGESSLSVSKWNTFLKAMLVCSDAATNKNFNRLQDVFLLPDPSGQWRDTRVYGVFSNPWNYSAVCVYSLGDIDKVFRTSSLKGYHSSLPNPRPGKCLPDQQPIPTETFQVADRHPEVAQRVEPMGPLKTPLFHSKYHYQKVAVHRMQASHGETFHVLYLTTDRGTIHKVVEPGEQEHSFAFNIMEIQPFRRAAAIQTMSLDAERRKLYVSSQWEVSQVPLDLCEVYGGGCHGCLMSRDPYCGWDQGRCISIYSSERSVLQSINPAEPHKECPNPKPDKAPLQKVSLAPNSRYYLSCPMESRHATYSWRHKENVEQSCEPGHQSPNCILFIENLTAQQYGHYFCEAQEGSYFREAQHWQLLPEDGIMAEHLLGHACALAASLWLGVLPTLTLGLLVH

SEQ ID NO: 77376 - protein, 652 aa, Homo sapiens
  Payload ID: 15435
  Gene Symbol: SEMA7A
  Gene Name: semaphorin 7A, GPI membrane anchor (John Milton Hagen blood group)
  Uniprot ID: O75326
  ENSP ID: ENSP00000438966
MTPPPPGRAAPSAPRARVPGPPARLGLPLRLRLLLLLWAAAASAQGHLRSGPRIFAVWKGHVGQDRVDFGQTEPHTVLFHEPGSSSVWVGGRGKVYLFDFPEGKNASVRTDCENYITLLERRSEGLLACGTNARHPSCWNLVNGTVVPLGEMRGYAPFSPDENSLVLFEGDEVYSTIRKQEYNGKIPRFRRIRGESELYTSDTVMQNPQFIKATIVHQDQAYDDKIYYFFREDNPDKNPEAPLNVSRVAQLCRGDQGGESSLSVSKWNTFLKAMLVCSDAATNKNFNRLQDVFLLPDPSGQWRDTRVYGVFSNPWNYSAVCVYSLGDIDKVFRTSSLKGYHSSLPNPRPGKCLPDQQPIPTETFQVADRHPEVAQRVEPMGPLKTPLFHSKYHYQKVAVHRMQASHGETFHVLYLTTDRGTIHKVVEPGEQEHSFAFNIMEIQPFRRAAAIQTMSLDAERRKLYVSSQWEVSQVPLDLCEVYGGGCHGCLMSRDPYCGWDQGRCISIYSSERSVLQSINPAEPHKECPNPKPDKAPLQKVSLAPNSRYYLSCPMESRHATYSWRHKENVEQSCEPGHQSPNCILFIENLTAQQYGHYFCEAQEGSYFREAQHWQLLPEDGIMAEHLLGHACALAASLWLGVLPTLTLGLLVH

SEQ ID NO: 77377 - protein, 501 aa, Homo sapiens
  Payload ID: 15435
  Gene Symbol: SEMA7A
  Gene Name: semaphorin 7A, GPI membrane anchor (John Milton Hagen blood group)
  ENSP ID: ENSP00000441493
MRGYAPFSPDENSLVLFEGDEVYSTIRKQEYNGKIPRFRRIRGESELYTSDTVMQNPQFIKATIVHQDQAYDDKIYYFFREDNPDKNPEAPLNVSRVAQLCRGDQGGESSLSVSKWNTFLKAMLVCSDAATNKNFNRLQDVFLLPDPSGQWRDTRVYGVFSNPWNYSAVCVYSLGDIDKVFRTSSLKGYHSSLPNPRPGKCLPDQQPIPTETFQVADRHPEVAQRVEPMGPLKTPLFHSKYHYQKVAVHRMQASHGETFHVLYLTTDRGTIHKVVEPGEQEHSFAFNIMEIQPFRRAAAIQTMSLDAERRKLYVSSQWEVSQVPLDLCEVYGGGCHGCLMSRDPYCGWDQGRCISIYSSERSVLQSINPAEPHKECPNPKPDKAPLQKVSLAPNSRYYLSCPMESRHATYSWRHKENVEQSCEPGHQSPNCILFIENLTAQQYGHYFCEAQEGSYFREAQHWQLLPEDGIMAEHLLGHACALAASLWLGVLPTLTLGLLVH

SEQ ID NO: 77378 - protein, 80 aa, Homo sapiens
  Payload ID: 15435
  Gene Symbol: SEMA7A
  Gene Name: semaphorin 7A, GPI membrane anchor (John Milton Hagen blood group)
  ENSP ID: ENSP00000454365
MRGYAPFSPDENSLVLFEGDEVYSTIRKQEYNGKIPRFRRIRGESELYTSDTVMQNPQFIKATIVHQDQAYDDKIYYFFR

SEQ ID NO: 77379 - protein, 462 aa, Homo sapiens
  Payload ID: 15436
  Gene Symbol: SEMG1
  Gene Name: semenogelin I
  Uniprot ID: P04279
  ENSP ID: ENSP00000361867
MKPNIIFVLSLLLILEKQAAVMGQKGGSKGRLPSEFSQFPHGQKGQHYSGQKGKQQTESKGSFSIQYTYHVDANDHDQSRKSQQYDLNALHKTTKSQRHLGGSQQLLHNKQEGRDHDKSKGHFHRVVIHHKGGKAHRGTQNPSQDQGNSPSGKGISSQYSNTEERLWVHGLSKEQTSVSGAQKGRKQGGSQSSYVLQTEELVANKQQRETKNSHQNKGHYQNVVEVREEHSSKVQTSLCPAHQDKLQHGSKDIFSTQDELLVYNKNQHQTKNLNQDQQHGRKANKISYQSSSTEERRLHYGENGVQKDVSQSSIYSQTEEKAQGKSQKQITIPSQEQEHSQKANKISYQSSSTEERRLHYGENGVQKDVSQRSIYSQTEKLVAGKSQIQAPNPKQEPWHGENAKGESGQSTNREQDLLSHEQKGRHQHGSHGGLDIVIIEQEDDSDRHLAQHLNNDRNPLFT

SEQ ID NO: 77380 - protein, 582 aa, Homo sapiens
  Payload ID: 15437
  Gene Symbol: SEMG2
  Gene Name: semenogelin II
  Uniprot ID: Q02383
  ENSP ID: ENSP00000361855
MKSIILFVLSLLLILEKQAAVMGQKGGSKGQLPSGSSQFPHGQKGQHYFGQKDQQHTKSKGSFSIQHTYHVDINDHDWTRKSQQYDLNALHKATKSKQHLGGSQQLLNYKQEGRDHDKSKGHFHMIVIHHKGGQAHHGTQNPSQDQGNSPSGKGLSSQCSNTEKRLWVHGLSKEQASASGAQKGRTQGGSQSSYVLQTEELVVNKQQRETKNSHQNKGHYQNVVDVREEHSSKLQTSLHPAHQDRLQHGPKDIFTTQDELLVYNKNQHQTKNLSQDQEHGRKAHKISYPSSRTEERQLHHGEKSVQKDVSKGSISIQTEEKIHGKSQNQVTIHSQDQEHGHKENKISYQSSSTEERHLNCGEKGIQKGVSKGSISIQTEEQIHGKSQNQVRIPSQAQEYGHKENKISYQSSSTEERRLNSGEKDVQKGVSKGSISIQTEEKIHGKSQNQVTIPSQDQEHGHKENKMSYQSSSTEERRLNYGGKSTQKDVSQSSISFQIEKLVEGKSQIQTPNPNQDQWSGQNAKGKSGQSADSKQDLLSHEQKGRYKQESSESHNIVITEHEVAQDDHLTQQYNEDRNPIST

SEQ ID NO: 77381 - protein, 2677 aa, Homo sapiens
  Payload ID: 15438
  Gene Symbol: SETX
  Gene Name: senataxin
  Uniprot ID: Q7Z333
  ENSP ID: ENSP00000224140
MSTCCWCTPGGASTIDFLKRYASNTPSGEFQTADEDLCYCLECVAEYHKARDELPFLHEVLWELETLRLINHFEKSMKAEIGDDDELYIVDNNGEMPLFDITGQDFENKLRVPLLEILKYPYLLLHERVNELCVEALCRMEQANCSFQVFDKHPGIYLFLVHPNEMVRRWAILTARNLGKVDRDDYYDLQEVLLCLFKVIELGLLESPDIYTSSVLEKGKLILLPSHMYDTTNYKSYWLGICMLLTILEEQAMDSLLLGSDKQNDFMQSILHTMEREADDDSVDPFWPALHCFMVILDRLGSKVWGQLMDPIVAFQTIINNASYNREIRHIRNSSVRTKLEPESYLDDMVTCSQIVYNYNPEKTKKDSGWRTAICPDYCPNMYEEMETLASVLQSDIGQDMRVHNSTFLWFIPFVQSLMDLKDLGVAYIAQVVNHLYSEVKEVLNQTDAVCDKVTEFFLLILVSVIELHRNKKCLHLLWVSSQQWVEAVVKCAKLPTTAFTRSSEKSSGNCSKGTAMISSLSLHSMPSNSVQLAYVQLIRSLLKEGYQLGQQSLCKRFWDKLNLFLRGNLSLGWQLTSQETHELQSCLKQIIRNIKFKAPPCNTFVDLTSACKISPASYNKEESEQMGKTSRKDMHCLEASSPTFSKEPMKVQDSVLIKADNTIEGDNNEQNYIKDVKLEDHLLAGSCLKQSSKNIFTERAEDQIKISTRKQKSVKEISSYTPKDCTSRNGPERGCDRGIIVSTRLLTDSSTDALEKVSTSNEDFSLKDDALAKTSKRKTKVQKDEICAKLSHVIKKQHRKSTLVDNTINLDENLTVSNIESFYSRKDTGVQKGDGFIHNLSLDPSGVLDDKNGEQKSQNNVLPKEKQLKNEELVIFSFHENNCKIQEFHVDGKELIPFTEMTNASEKKSSPFKDLMTVPESRDEEMSNSTSVIYSNLTREQAPDISPKSDTLTDSQIDRDLHKLSLLAQASVITFPSDSPQNSSQLQRKVKEDKRCFTANQNNVGDTSRGQVIIISDSDDDDDERILSLEKLTKQDKICLEREHPEQHVSTVNSKEEKNPVKEEKTETLFQFEESDSQCFEFESSSEVFSVWQDHPDDNNSVQDGEKKCLAPIANTTNGQGCTDYVSEVVKKGAEGIEEHTRPRSISVEEFCEIEVKKPKRKRSEKPMAEDPVRPSSSVRNEGQSDTNKRDLVGNDFKSIDRRTSTPNSRIQRATTVSQKKSSKLCTCTEPIRKVPVSKTPKKTHSDAKKGQNRSSNYLSCRTTPAIVPPKKFRQCPEPTSTAEKLGLKKGPRKAYELSQRSLDYVAQLRDHGKTVGVVDTRKKTKLISPQNLSVRNNKKLLTSQELQMQRQIRPKSQKNRRRLSDCESTDVKRAGSHTAQNSDIFVPESDRSDYNCTGGTEVLANSNRKQLIKCMPSEPETIKAKHGSPATDDACPLNQCDSVVLNGTVPTNEVIVSTSEDPLGGGDPTARHIEMAALKEGEPDSSSDAEEDNLFLTQNDPEDMDLCSQMENDNYKLIELIHGKDTVEVEEDSVSRPQLESLSGTKCKYKDCLETTKNQGEYCPKHSEVKAADEDVFRKPGLPPPASKPLRPTTKIFSSKSTSRIAGLSKSLETSSALSPSLKNKSKGIQSILKVPQPVPLIAQKPVGEMKNSCNVLHPQSPNNSNRQGCKVPFGESKYFPSSSPVNILLSSQSVSDTFVKEVLKWKYEMFLNFGQCGPPASLCQSISRPVPVRFHNYGDYFNVFFPLMVLNTFETVAQEWLNSPNRENFYQLQVRKFPADYIKYWEFAVYLEECELAKQLYPKENDLVFLAPERINEEKKDTERNDIQDLHEYHSGYVHKFRRTSVMRNGKTECYLSIQTQENFPANLNELVNCIVISSLVTTQRKLKAMSLLGSRNQLARAVLNPNPMDFCTKDLLTTTSERIIAYLRDFNEDQKKAIETAYAMVKHSPSVAKICLIHGPPGTGKSKTIVGLLYRLLTENQRKGHSDENSNAKIKQNRVLVCAPSNAAVDELMKKIILEFKEKCKDKKNPLGNCGDINLVRLGPEKSINSEVLKFSLDSQVNHRMKKELPSHVQAMHKRKEFLDYQLDELSRQRALCRGGREIQRQELDENISKVSKERQELASKIKEVQGRPQKTQSIIILESHIICCTLSTSGGLLLESAFRGQGGVPFSCVIVDEAGQSCEIETLTPLIHRCNKLILVGDPKQLPPTVISMKAQEYGYDQSMMARFCRLLEENVEHNMISRLPILQLTVQYRMHPDICLFPSNYVYNRNLKTNRQTEAIRCSSDWPFQPYLVFDVGDGSERRDNDSYINVQEIKLVMEIIKLIKDKRKDVSFRNIGIITHYKAQKTMIQKDLDKEFDRKGPAEVDTVDAFQGRQKDCVIVTCVRANSIQGSIGFLASLQRLNVTITRAKYSLFILGHLRTLMENQHWNQLIQDAQKRGAIIKTCDKNYRHDAVKILKLKPVLQRSLTHPPTIAPEGSRPQGGLPSSKLDSGFAKTSVAASLYHTPSDSKEITLTVTSKDPERPPVHDQLQDPRLLKRMGIEVKGGIFLWDPQPSSPQHPGATPPTGEPGFPVVHQDLSHIQQPAAVVAALSSHKPPVRGEPPAASPEASTCQSKCDDPEEELCHRREARAFSEGEQEKCGSETHHTRRNSRWDKRTLEQEDSSSKKRKLL

SEQ ID NO: 77382 - protein, 948 aa, Homo sapiens
  Payload ID: 15438
  Gene Symbol: SETX
  Gene Name: senataxin
  ENSP ID: ENSP00000409143
VAQEWLNSPNRENFYQLQVRKFPADYIKYWEFAVYLEECELAKQLYPKENDLVFLAPERINEEKKDTERNDIQDLHEYHSGYVHKFRRTSVMRNGKTECYLSIQTQENFPANLNELVNCIVISSLVTTQRKLKAMSLLGSRNQLARAVLNPNPMDFCTKDLLTTTSERIIAYLRDFNEDQKKAIETAYAMVKHSPSVAKICLIHGPPGTGKSKTIVGLLYRLLTENQRKGHSDENSNAKIKQNRVLVCAPSNAAVDELMKKIILEFKEKCKDKKNPLGNCGDINLVRLGPEKSINSEVLKFSLDSQVNHRMKKELPSHVQAMHKRKEFLDYQLDELSRQRALCRGGREIQRQELDENISKVSKERQELASKIKEVQGRPQKTQSIIILESHIICCTLSTSGGLLLESAFRGQGGVPFSCVIVDEAGQSCEIETLTPLIHRCNKLILVGDPKQLPPTVISMKAQEYGYDQSMMARFCRLLEENVEHNMISRLPILQLTVQYRMHPDICLFPSNYVYNRNLKTNRQTEAIRCSSDWPFQPYLVFDVGDGSERRDNDSYINVQEIKLVMEIIKLIKDKRKDVSFRNIGIITHYKAQKTMIQKDLDKEFDRKGPAEVDTVDAFQGRQKDCVIVTCVRANSIQGSIGFLASLQRLNVTITRAKYSLFILGHLRTLMQLLPRSFCVHVNHSPFFSPEPKYLHWALKENQHWNQLIQDAQKRGAIIKTCDKNYRHDAVKILKLKPVLQRSLTHPPTIAPEGSRPQGGLPSSKLDSGFAKTSVAASLYHTPSDSKEITLTVTSKDPERPPVHDQLQDPRLLKRMGIEVKGGIFLWDPQPSSPQHPGATPPTGEPGFPVVHQDLSHIQQPAAVVAALSSHKPPVRGEPPAASPEASTCQSKCDDPEEELCHRREARAFSEGEQEKCGSETHHTRRNSRWDKRTLEQEDSSSKKRKLL

SEQ ID NO: 77383 - protein, 540 aa, Homo sapiens
  Payload ID: 15439
  Gene Symbol: SENP3-EIF4A1
  Gene Name: SENP3-EIF4A1 readthrough (NMD candidate)
  ENSP ID: ENSP00000483614
DASASEEEEEEEEEEDEDEEEEVAAWRLPPRWSQLGTSQRPRPSRPTHRKTCSQRRRRAMRAFRMLLYSKSTSLTFHWKLWGRHRGRRRGLAHPKNHLSPQQGGATPQVPSPCCRFDSPRGPPPPRLGLLGALMAEDGVRGSPPVPSGPPMEEDGLRWTPKSPLDPDSGLLSCTLPNGFGGQSGPEGERSLAPPDASILISNVCSIGDHVAQELFQGSDLGMAEEAERPGEKAGQHSPLREEHVTCVQSILDEFLQTYGSLIPLSTDEVVEKLEDIFQQEFSTPSRKGLVLQLIQSYQRMPGNAMVRGFRVAYKRHVLTMDDLGTLYGQNWLNDQVMNMYGDLVMDTVPEKVHFFNSFFYDKLRTKGYDGVKRWTKNVDIFNKELLLIPIHLEVHWSLISVDVRRRTITYFDSQRTLNRRCPKHIAKYLQAEAVKKDRLDFHQGWKGYFKMNVARQNNDSDCGAFVLQYCKHLALSQPFSFTQQDMPKLRRQIYKELCHCKLTVQGNPPIPTISLLIPSSLAHVQAVSNPSLLQGKTNNI

SEQ ID NO: 77384 - protein, 147 aa, Homo sapiens
  Payload ID: 15440
  Gene Symbol: SNTN
  Gene Name: sentan, cilia apical structure protein
  Uniprot ID: A6NMZ2
  ENSP ID: ENSP00000341442
MGGCMHSTQDKSLHLEGDPNPSAAPTSTCAPRKMPKRISISKQLASVKALRKCSDLEKAIATTALIFRNSSDSDGKLEKAIAKDLLQTQFRNFAEGQETKPKYREILSELDEHTENKLDFEDFMILLLSITVMSDLLQNIRNVKIMK

SEQ ID NO: 77385 - protein, 115 aa, Homo sapiens
  Payload ID: 15440
  Gene Symbol: SNTN
  Gene Name: sentan, cilia apical structure protein
  ENSP ID: ENSP00000419971
MHSTQDKSLHLEGDPNPSAAPTSTCAPRKMPKRISISKQLASVKALRKCSDLEKAIATTALIFRNSSDSDGKLEKAIAKDLLQTQFRNFAEPCEDSRRSWPSAKLEESTLSRHWI

SEQ ID NO: 77386 - protein, 166 aa, Homo sapiens
  Payload ID: 15440
  Gene Symbol: SNTN
  Gene Name: sentan, cilia apical structure protein
  ENSP ID: ENSP00000420078
MGGCMHSTQDKSLHLEGDPNPSAAPTSTCAPRKMPKRISISKQLASVKALRKCSDLEKAIATTALIFRNSSDSDGKLEKAIAKDLLQTQFRNFAELPFTFYHEWKQPEVLTTCRCLILNFPAIRIGQETKPKYREILSELDEHTENKLDFEDFMILLLSITVMSDL

SEQ ID NO: 77387 - protein, 112 aa, Homo sapiens
  Payload ID: 15441
  Gene Symbol: SEPSECS
  Gene Name: Sep (O-phosphoserine) tRNA:Sec (selenocysteine) tRNA synthase
  ENSP ID: ENSP00000351857
MNRESFAAGERLVSPAYVRQGCEARRSHEHLIRLLLEKSLALSPRLECSVTISAHCSLRLPGSRHSPASASRVAGTTGARHHTRASVQRMAGMKVHLNSFYMNLQSWTATIS

SEQ ID NO: 77388 - protein, 501 aa, Homo sapiens
  Payload ID: 15441
  Gene Symbol: SEPSECS
  Gene Name: Sep (O-phosphoserine) tRNA:Sec (selenocysteine) tRNA synthase
  Uniprot ID: Q9HD40
  ENSP ID: ENSP00000371535
MNRESFAAGERLVSPAYVRQGCEARRSHEHLIRLLLEKGKCPENGWDESTLELFLHELAIMDSNNFLGNCGVGEREGRVASALVARRHYRFIHGIGRSGDISAVQPKAAGSSLLNKITNSLVLDIIKLAGVHTVANCFVVPMATGMSLTLCFLTLRHKRPKAKYIIWPRIDQKSCFKSMITAGFEPVVIENVLEGDELRTDLKAVEAKVQELGPDCILCIHSTTSCFAPRVPDRLEELAVICANYDIPHIVNNAYGVQSSKCMHLIQQGARVGRIDAFVQSLDKNFMVPVGGAIIAGFNDSFIQEISKMYPGRASASPSLDVLITLLSLGSNGYKKLLKERKEMFSYLSNQIKKLSEAYNERLLHTPHNPISLAMTLKTLDEHRDKAVTQLGSMLFTRQVSGARVVPLGSMQTVSGYTFRGFMSHTNNYPCAYLNAASAIGMKMQDVDLFIKRLDRCLKAVRKERSKESDDNYDKTEDVDIEEMALKLDNVLLDTYQDASS

SEQ ID NO: 77389 - protein, 47 aa, Homo sapiens
  Payload ID: 15441
  Gene Symbol: SEPSECS
  Gene Name: Sep (O-phosphoserine) tRNA:Sec (selenocysteine) tRNA synthase
  Uniprot ID: Q9HD40
  ENSP ID: ENSP00000421880
MNRESFAAGERLVSPAYVRQGCEARRSHEHLIRLLLEKVHSWHWTIR

SEQ ID NO: 77390 - protein, 177 aa, Homo sapiens [sequence omitted]

SEQ ID NO: 77391 - protein, 95 aa, Homo sapiens
  Payload ID: 15441
  Gene Symbol: SEPSECS
  Gene Name: Sep (O-phosphoserine) tRNA:Sec (selenocysteine) tRNA synthase
  ENSP ID: ENSP00000423850
  MOD_RES (1)..(1): Any amino acid
XKYIIWPRIDQKSCFKSMITAGFEPVVIENVLEGDELRTDLKAVEAKVQELGPDCILCIHSTTSCFAPRVPDRKSFSFTFFRCPYYFIVTWIKWL

SEQ ID NO: 77392 - protein, 261 aa, Homo sapiens
  Payload ID: 15442
  Gene Symbol: SPR
  Gene Name: sepiapterin reductase (7,8-dihydrobiopterin:NADP+ oxidoreductase)
  Uniprot ID: P35270
  ENSP ID: ENSP00000234454
MEGGLGRAVCLLTGASRGFGRTLAPLLASLLSPGSVLVLSARNDEALRQLEAELGAERSGLRVVRVPADLGAEAGLQQLLGALRELPRPKGLQRLLLINNAGSLGDVSKGFVDLSDSTQVNNYWALNLTSMLCLTSSVLKAFPDSPGLNRTVVNISSLCALQPFKGWALYCAGKAARDMLFQVLALEEPNVRVLNYAPGPLDTDMQQLARETSVDPDMRKGLQELKAKGKLVDCKVSAQKLLSLLEKDEFKSGAHVDFYDK

SEQ ID NO: 77393 - protein, 414 aa, Homo sapiens
  Payload ID: 15443
  Gene Symbol: SEPT1
  Gene Name: septin 1
  ENSP ID: ENSP00000324511
MSHHDDGATVGLGIQMCEGWRVEAALSFLPHQRKWGETAGAVMAGGVMDKEYVGFAALPNQLHRKSVKKGFDFTLMVAGESGLGKSTLINSLFLTNLYEDRQVPEASARLTQTLAIERRGVEIEEGGVKVKLTLVDTPGFGDSVDCSDCWLPVVKFIEEQFEQYLRDESGLNRKNIQDSRVHCCLYFISPFGRGLRPLDVAFLRAVHEKVNIIPVIGKADALMPQETQALKQKIRDQLKEEEIHIYQFPECDSDEDEDFKRQDAEMKESIPFAVVGSCEVVRDGGNRPVRGRRYSWGTVEVENPHHCDFLNLRRMLVQTHLQDLKEVTHDLLYEGYRARCLQSLARPGARDRASRSKLSRQSATEIPLPMLPLADTEKLIREKDEELRRMQEMLEKMQAQMQQSQAQGEQSDAL

SEQ ID NO: 77394 - protein, 46 aa, Homo sapiens
  Payload ID: 15443
  Gene Symbol: SEPT1
  Gene Name: septin 1
  ENSP ID: ENSP00000456541
MSHHDDGATVGLGIQMCEGWRVEGQGVRGFCCPPQPAAPQVCQEGV

SEQ ID NO: 77395 - protein, 70 aa, Homo sapiens
  Payload ID: 15443
  Gene Symbol: SEPT1
  Gene Name: septin 1
  ENSP ID: ENSP00000459780
MAGGVMDKEYVGFAALPNQLHRKSVKKGFDFTLMVAGESGLGKSTLINSLFLTNLYEDRQVPEASAGFRW

SEQ ID NO: 77396 - protein, 544 aa, Homo sapiens
  Payload ID: 15444
  Gene Symbol: SEPT10
  Gene Name: septin 10
  ENSP ID: ENSP00000349116
MASSEVARHLLFQSHMATKTTCMSSQGSDDEQIKRENIRSLTMSGHVGFESLPDQLVNRSIQQGFCFNILCVGETGIGKSTLIDTLFNTNFEDYESSHFCPNVKLKAQTYELQESNVQLKLTIVNTVGFGDQINKEESYQPIVDYIDAQFEAYLQEELKIKRSLFTYHDSRIHVCLYFISPTGHSLKTLDLLTMKNLDSKVNIIPVIAKADTVSKTELQKFKIKLMSELVSNGVQIYQFPTDDDTIAKVNAAMNGQLPFAVVGSMDEVKVGNKMVKARQYPWGVVQVENENHCDFVKLREMLICTNMEDLREQTHTRHYELYRRCKLEEMGFTDVGPENKPVSVQETYEAKRHEFHGERQRKEEEMKQMFVQRVKEKEAILKEAERELQAKFEHLKRLHQEERMKLEEKRRLLEEEIIAFSKKKATSEIFHSQSFLATGSNLRKDKDRKKEPGCRFELLCIDVRACETNGGRKDAEKAPIFCKTEVPEHRRSSSQANFIKKKLEVCFDFAVICFITSIFGEQPQLLIFMEKYFQVQGQYISQSE

SEQ ID NO: 77397 - protein, 454 aa, Homo sapiens
  Payload ID: 15444
  Gene Symbol: SEPT10
  Gene Name: septin 10
  Uniprot ID: Q9P0V9
  ENSP ID: ENSP00000380824
MASSEVARHLLFQSHMATKTTCMSSQGSDDEQIKRENIRSLTMSGHVGFESLPDQLVNRSIQQGFCFNILCVGETGIGKSTLIDTLFNTNFEDYESSHFCPNVKLKAQTYELQESNVQLKLTIVNTVGFGDQINKEESYQPIVDYIDAQFEAYLQEELKIKRSLFTYHDSRIHVCLYFISPTGHSLKTLDLLTMKNLDSKVNIIPVIAKADTVSKTELQKFKIKLMSELVSNGVQIYQFPTDDDTIAKVNAAMNGQLPFAVVGSMDEVKVGNKMVKARQYPWGVVQVENENHCDFVKLREMLICTNMEDLREQTHTRHYELYRRCKLEEMGFTDVGPENKPVSVQETYEAKRHEFHGERQRKEEEMKQMFVQRVKEKEAILKEAERELQAKFEHLKRLHQEERMKLEEKRRLLEEEIIAFSKKKATSEIFHSQSFLATGSNLRKDKDRKNSNFL

SEQ ID NO: 77398 - protein, 431 aa, Homo sapiens
  Payload ID: 15444
  Gene Symbol: SEPT10
  Gene Name: septin 10
  Uniprot ID: Q9P0V9
  ENSP ID: ENSP00000380826
MASSEVARHLKRENIRSLTMSGHVGFESLPDQLVNRSIQQGFCFNILCVGETGIGKSTLIDTLFNTNFEDYESSHFCPNVKLKAQTYELQESNVQLKLTIVNTVGFGDQINKEESYQPIVDYIDAQFEAYLQEELKIKRSLFTYHDSRIHVCLYFISPTGHSLKTLDLLTMKNLDSKVNIIPVIAKADTVSKTELQKFKIKLMSELVSNGVQIYQFPTDDDTIAKVNAAMNGQLPFAVVGSMDEVKVGNKMVKARQYPWGVVQVENENHCDFVKLREMLICTNMEDLREQTHTRHYELYRRCKLEEMGFTDVGPENKPVSVQETYEAKRHEFHGERQRKEEEMKQMFVQRVKEKEAILKEAERELQAKFEHLKRLHQEERMKLEEKRRLLEEEIIAFSKKKATSEIFHSQSFLATGSNLRKDKDRKNSNFL

SEQ ID NO: 77399 - protein, 57 aa, Homo sapiens
  Payload ID: 15444
  Gene Symbol: SEPT10
  Gene Name: septin 10
  ENSP ID: ENSP00000396051
MATKTTCMSSQGSDDEQIKRENIRSLTMSGHVGFESLPDQLVNRSIQQGFCFNILCV

SEQ ID NO: 77400 - protein, 450 aa, Homo sapiens
  Payload ID: 15444
  Gene Symbol: SEPT10
  Gene Name: septin 10
  ENSP ID: ENSP00000396728
MASSEVARHLLFQSHMATKTTCMSSQGSDDEQIKRENIRSLTMSGHVGFESLPDQLVNRSIQQGFCFNILCVGETGIGKSTLIDTLFNTNFEDYESSHFCPNVKLKAQTYELQESNVQLKLTIVNTVGFGDQINKEESYQPIVDYIDAQFEAYLQEELKIKRSLFTYHDSRIHVCLYFISPTGHSLKTLDLLTMKNLDSKVNIIPVIAKADTVSKTELQKFKIKLMSELVSNGVQIYQFPTDDDTIAKVNAAMNGQLPFAVVGSMDEVKVGNKMVKARQYPWGVVQVENENHCDFVKLREMLICTNMEDLREQTHTRHYELYRRCKLEEMGFTDVGPENKPVSVQETYEAKRHEFHGERQRKEEEMKQMFVQRVKEKEAILKEAERELQAKFEHLKRLHQEERMKLEEKRRLLEEEIIAFSKKKATSEIFHSQSFLATGSNLRKDKDRKK

SEQ ID NO: 77401 - protein, 48 aa, Homo sapiens
  Payload ID: 15444
  Gene Symbol: SEPT10
  Gene Name: septin 10
  ENSP ID: ENSP00000399270
MASSEVARHLLFQSHMATKTTCMSSQGSDDEQIVSKHYTSDCQSRYGF

SEQ ID NO: 77402 - protein, 473 aa, Homo sapiens
  Payload ID: 15444
  Gene Symbol: SEPT10
  Gene Name: septin 10
  ENSP ID: ENSP00000407790
MATKTTCMSSQGSDDEQIKRENIRSLTMSGHVGFESLPDQLVNRSIQQGFCFNILCVGETGIGKSTLIDTLFNTNFEDYESSHFCPNVKLKAQTYELQESNVQLKLTIVNTVGFGDQINKEESYQPIVDYIDAQFEAYLQEELKIKRSLFTYHDSRIHVCLYFISPTGHSLKTLDLLTMKNLDSKVNIIPVIAKADTVSKTELQKFKIKLMSELVSNGVQIYQFPTDDDTIAKVNAAMNGQLPFAVVGSMDEVKVGNKMVKARQYPWGVVQVENENHCDFVKLREMLICTNMEDLREQTHTRHYELYRRCKLEEMGFTDVGPENKPVSVQETYEAKRHEFHGERQRKEEEMKQMFVQRVKEKEAILKEAERELQAKFEHLKRLHQEERMKLEEKRRLLEEEIIAFSKKKATSEIFHSQSFLATGSNLRKDKDRKKEPGCRFELLCIDVRACETNGGRKDAEKGREGHSARGQP

SEQ ID NO: 77403 - protein, 61 aa, Homo sapiens
  Payload ID: 15444
  Gene Symbol: SEPT10
  Gene Name: septin 10
  ENSP ID: ENSP00000408392
MLFQSHMATKTTCMSSQGSDDEQIKRENIRSLTMSGHVGFESLPDQLVNRSIQQGFCFNIL

SEQ ID NO: 77404 - protein, 97 aa, Homo sapiens
  Payload ID: 15444
  Gene Symbol: SEPT10
  Gene Name: septin 10
  ENSP ID: ENSP00000416597
MASSEVARHLLFQSHMATKTTCMSSQGSDDEQIVNIIPVIAKADTVSKTELQKFKIKLMSELVSNGVQIYQFPTDDDTIAKVNAAMNGQLPFAVVGS

SEQ ID NO: 77405 - protein, 26 aa, Homo sapiens
  Payload ID: 15444
  Gene Symbol: SEPT10
  Gene Name: septin 10
  ENSP ID: ENSP00000441218
MKNLDSKVNIIPVIAKADTVSKTELQ

SEQ ID NO: 77406 - protein, 98 aa, Homo sapiens
  Payload ID: 15444
  Gene Symbol: SEPT10
  Gene Name: septin 10
  ENSP ID: ENSP00000445707
MKNLDSKVNIIPVIAKADTVSKTELQKFKIKLMSELVSNGVQIYQFPTDDDTIAKVNAAMNGQLPFAVVGSMDEVKVGNKMVKARQYPWGVVQVENEN

SEQ ID NO: 77407 - protein, 38 aa, Homo sapiens
  Payload ID: 15444
  Gene Symbol: SEPT10
  Gene Name: septin 10
  ENSP ID: ENSP00000446331
MASSEVARHLLFQSHMATKTTCMSSQGSDDEQILPTNS

SEQ ID NO: 77408 - protein, 429 aa, Homo sapiens
  Payload ID: 15445
  Gene Symbol: SEPT11
  Gene Name: septin 11
  Uniprot ID: Q9NVA2
  ENSP ID: ENSP00000264893
MAVAVGRPSNEELRNLSLSGHVGFDSLPDQLVNKSTSQGFCFNILCVGETGIGKSTLMDTLFNTKFESDPATHNEPGVRLKARSYELQESNVRLKLTIVDTVGFGDQINKDDSYKPIVEYIDAQFEAYLQEELKIKRSLFNYHDTRIHACLYFIAPTGHSLKSLDLVTMKKLDSKVNIIPIIAKADTIAKNELHKFKSKIMSELVSNGVQIYQFPTDEETVAEINATMSVHLPFAVVGSTEEVKIGNKMAKARQYPWGVVQVENENHCDFVKLREMLIRVNMEDLREQTHTRHYELYRRCKLEEMGFKDTDPDSKPFSLQETYEAKRNEFLGELQKKEEEMRQMFVMRVKEKEAELKEAEKELHEKFDLLKRTHQEEKKKVEDKKKELEEEVNNFQKKKAAAQLLQSQAQQSGAQQTKKDKDKKNASFT

SEQ ID NO: 77409 - protein, 372 aa, Homo sapiens
  Payload ID: 15445
  Gene Symbol: SEPT11
  Gene Name: septin 11
  ENSP ID: ENSP00000420839
MNEELRNLSLSGHVGFDSLPDQLVNKSTSQGFCFNILCVGETGIGKSTLMDTLFNTKFESDPATHNEPGVRLKARSYELQESNVRLKLTIVDTVGFGDQINKDDSYKPIVEYIDAQFEAYLQEELKIKRSLFNYHDTRIHACLYFIAPTGHSLKSLDLVTMKKLDSKVNIIPIIAKADTIAKNELHKFKSKIMSELVSNGVQIYQFPTDEETVAEINATMSVHLPFAVVGSTEEVKIGNKMAKARQYPWGVVQVENENHCDFVKLREMLIRVNMEDLREQTHTRHYELYRRCKLEEMGFKDTDPDSKPFSLQETYEAKRNEFLGELQKKEEEMRQMFVMRVKEKEAELKEAEKELHEKFDLLKRTHQEEKKK

SEQ ID NO: 77410 - protein, 136 aa, Homo sapiens
  Payload ID: 15445
  Gene Symbol: SEPT11
  Gene Name: septin 11
  ENSP ID: ENSP00000422047
MEERKPAHVLRSFKYAAFMNEELRNLSLSGHVGFDSLPDQLVNKSTSQGFCFNILCVGETGIGKSTLMDTLFNTKFESDPATHNEPGVRLKARSYELQESNVRLKLTIVDTVGFGDQINKDDSYKPIVEYIDAQFE

SEQ ID NO: 77411 - protein, 439 aa, Homo sapiens
  Payload ID: 15445
  Gene Symbol: SEPT11
  Gene Name: septin 11
  Uniprot ID: Q9NVA2
  ENSP ID: ENSP00000422896
MEERKPAHVLRSFKYAAFMNEELRNLSLSGHVGFDSLPDQLVNKSTSQGFCFNILCVGETGIGKSTLMDTLFNTKFESDPATHNEPGVRLKARSYELQESNVRLKLTIVDTVGFGDQINKDDSYKPIVEYIDAQFEAYLQEELKIKRSLFNYHDTRIHACLYFIAPTGHSLKSLDLVTMKKLDSKVNIIPIIAKADTIAKNELHKFKSKIMSELVSNGVQIYQFPTDEETVAEINATMSVHLPFAVVGSTEEVKIGNKMAKARQYPWGVVQVENENHCDFVKLREMLIRVNMEDLREQTHTRHYELYRRCKLEEMGFKDTDPDSKPFSLQETYEAKRNEFLGELQKKEEEMRQMFVMRVKEKEAELKEAEKELHEKFDLLKRTHQEEKKKVEDKKKELEEEVNNFQKKKAAAQLLQSQAQQSGAQQTKKDKDKKNASFT

SEQ ID NO: 77412 - protein, 160 aa, Homo sapiens
  Payload ID: 15445
  Gene Symbol: SEPT11
  Gene Name: septin 11
  ENSP ID: ENSP00000423103
  MOD_RES (1)..(1): Any amino acid
XLREMLIRVNMEDLREQTHTRHYELYRRCKLEEMGFKDTDPDSKPFSLQETYEAKRNEFLGELQKKEEEMRQMFVMRVKEKEAELKEAEKELHEKFDLLKRTHQEEKKKVEDKKKELEEEVNNFQKKKAAAQLLQSQAQQSGAQQTKKDKDKKNPWLCTE

SEQ ID NO: 77413 - protein, 82 aa, Homo sapiens
  Payload ID: 15445
  Gene Symbol: SEPT11
  Gene Name: septin 11
  ENSP ID: ENSP00000424122
RVKEKEAELKEAEKELHEKFDLLKRTHQEEKKKVEDKKKELEEEVNNFQKKKAAAQLLQSQAQQSGAQQTKKDKDKKNFFFM

SEQ ID NO: 77414 - protein, 432 aa, Homo sapiens
  Payload ID: 15445
  Gene Symbol: SEPT11
  Gene Name: septin 11
  ENSP ID: ENSP00000424925
MAVAVGRPSNEELRNLSLSGHVGFDSLPDQLVNKSTSQGFCFNILCVGETGIGKSTLMDTLFNTKFESDPATHNEPGVRLKARSYELQESNVRLKLTIVDTVGFGDQINKDDSYKPIVEYIDAQFEAYLQEELKIKRSLFNYHDTRIHACLYFIAPTGHSLKSLDLVTMKKLDSKVNIIPIIAKADTIAKNELHKFKSKIMSELVSNGVQIYQFPTDEETVAEINATMSVHLPFAVVGSTEEVKIGNKMAKARQYPWGVVQVENENHCDFVKLREMLIRVNMEDLREQTHTRHYELYRRCKLEEMGFKDTDPDSKPFSLQETYEAKRNEFLGELQKKEEEMRQMFVMRVKEKEAELKEAEKELHEKFDLLKRTHQEEKKKVEDKKKELEEEVNNFQKKKAAAQLLQSQAQQSGAQQTKKDKDKKNSPWLCTE

SEQ ID NO: 77415 - protein, 126 aa, Homo sapiens
  Payload ID: 15445
  Gene Symbol: SEPT11
  Gene Name: septin 11
  ENSP ID: ENSP00000425262
MEERKPAHVLRSFKYAAFMNEELRNLSLSGHVGFDSLPDQLVNKSTSQGFCFNILCVGETGIGKSTLMDTLFNTKFESDPATHNEPGVRLKARSYELQESNVRLKLTIVDTVGFGDQINKDDSYKP

SEQ ID NO: 77416 - protein, 425 aa, Homo sapiens
  Payload ID: 15445
  Gene Symbol: SEPT11
  Gene Name: septin 11
  ENSP ID: ENSP00000426344
MAVAVGRPSNEELRNLSLSGHVGFDSLPDQLVNKSTSQGFCFNILCVGETGIGKSTLMDTLFNTKFESDPATHNEPGVRLKARSYELQESNVRLKLTIVDTVGFGDQINKDDSYKPIVEYIDAQFEAYLQEELKIKRSLFNYHDTRIHACLYFIAPTGHSLKSLDLVTMKKLDSKVNIIPIIAKADTIAKNELHKFKSKIMSELVSNGVQIYQFPTDEETVAEINATMSVHLPFAVVGSTEEVKIGNKMAKARQYPWGVVQVENENHCDFVKLREMLIRVNMEDLREQTHTRHYELYRRCKLEEMGFKDTDPDSKPFSLQETYEAKRNEFLGELQKKEEEMRQMFVMRVKEKEAELKEAEKELHEKFDLLKRTHQEEKKKVEDKKKELEEEVNNFQKKKAAAQLLQSQAQQSGAQQTKKDKDKKK

SEQ ID NO: 77417 - protein, 358 aa, Homo sapiens
  Payload ID: 15446
  Gene Symbol: SEPT12
  Gene Name: septin 12
  Uniprot ID: Q8IYM1
  ENSP ID: ENSP00000268231
MDPLRRSPSPCLSSQPSSPSTPPCEMLGPVGIEAVLDQLKIKAMKMGFEFNIMVVGQSGLGKSTMVNTLFKSKVWKSNPPGLGVPTPQTLQLHSLTHVIEEKGVKLKLTVTDTPGFGDQINNDNCWDPILGYINEQYEQYLQEEILITRQRHIPDTRVHCCVYFVPPTGHCLRPLDIEFLQRLCRTVNVVPVIARADSLTMEEREAFRRRIQQNLRTHCIDVYPQMCFDEDINDKILNSKLRDRIPFAVVGADQEHLVNGRCVLGRKTKWGIIEVENMAHCEFPLLRDLLIRSHLQDLKDITHNIHYENYRVIRLNESHLLPRGPGWVNLAPASPGQLTTPRTFKVCRGAHDDSDDEF

SEQ ID NO: 77418 - protein, 312 aa, Homo sapiens
  Payload ID: 15446
  Gene Symbol: SEPT12
  Gene Name: septin 12
  Uniprot ID: Q8IYM1
  ENSP ID: ENSP00000379922
MDPLRRSPSPCLSSQPSSPSTPPCEMLGPVGIEAVLDQLKIKAMKMGFEFNIMVVGQSGLGKSTMVNTLFKSKVWKSNPPGLGVPTPQTLQLHSLTHVIEEKGVKLKLTVTDTPGFGDQINNDNCLRPLDIEFLQRLCRTVNVVPVIARADSLTMEEREAFRRRIQQNLRTHCIDVYPQMCFDEDINDKILNSKLRDRIPFAVVGADQEHLVNGRCVLGRKTKWGIIEVENMAHCEFPLLRDLLIRSHLQDLKDITHNIHYENYRVIRLNESHLLPRGPGWVNLAPASPGQLTTPRTFKVCRGAHDDSDDEF

SEQ ID NO: 77419 - protein, 18 aa, Homo sapiens
  Payload ID: 15446
  Gene Symbol: SEPT12
  Gene Name: septin 12
  ENSP ID: ENSP00000464775
  MOD_RES (1)..(1): Any amino acid
XFGDQINNDNWTESLLPW

SEQ ID NO: 77420 - protein, 278 aa, Homo sapiens
  Payload ID: 15446
  Gene Symbol: SEPT12
  Gene Name: septin 12
  ENSP ID: ENSP00000467237
MDPLRRSPSPCLSSQPSSPSTPPCEMLGPVGIEAVLDQLKIKAMKMGFEFNIMVVGQSGLGKSTMVNTLFKSKVWKSNPPGLGVPTPQTLQLHSLTHVIEEKGVKLKLTVTDTPGFGDQINNDNCWDPILGYINEQYEQYLQEEILITRQRHIPDTRVHCCVYFVPPTGHCLRPLDIEFLQRLCRTVNVVPVIARADSLTMEEREAFRRRIQQNLRTHCIDVYPQMCFDEDINDKILNSKLRVRGCGAGGGRGDFLPTHPFHPKTHLSLHLREMCTYS

SEQ ID NO: 77421 - protein, 64 aa, Homo sapiens
  Payload ID: 15446
  Gene Symbol: SEPT12
  Gene Name: septin 12
  ENSP ID: ENSP00000467281
MDPLRRSPSPCLSSQPSSPSTPPCEMLGPVGIEAVLDQLKIKAMKMGFEFNIMVVGQSGLGKST

SEQ ID NO: 77422 - protein, 57 aa, Homo sapiens
  Payload ID: 15446
  Gene Symbol: SEPT12
  Gene Name: septin 12
  ENSP ID: ENSP00000468601
MDPLRRSPSPCLSSQPSSPSTPPCEMLGPVGIEAVLDQLKIKAMKMGFEFNIMVVGE

SEQ ID NO: 77423 - protein, 432 aa, Homo sapiens
  Payload ID: 15447
  Gene Symbol: SEPT14
  Gene Name: septin 14
  Uniprot ID: Q6ZU15
  ENSP ID: ENSP00000373627
MAERTMAMPTQIPADGDTQKENNIRCLTTIGHFGFECLPNQLVSRSIRQGFTFNILCVGETGIGKSTLIDTLFNTNLKDNKSSHFYSNVGLQIQTYELQESNVQLKLTVVETVGYGDQIDKEASYQPIVDYIDAQFEAYLQEELKIKRSLFEYHDSRVHVCLYFISPTGHSLKSLDLLTMKNLDSKVNIIPLIAKADTISKNDLQTFKNKIMSELISNGIQIYQLPTDEETAAQANSSVSGLLPFAVVGSTDEVKVGKRMVRGRHYPWGVLQVENENHCDFVKLRDMLLCTNMENLKEKTHTQHYECYRYQKLQKMGFTDVGPNNQPVSFQEIFEAKRQEFYDQCQREEEELKQRFMQRVKEKEATFKEAEKELQDKFEHLKMIQQEEIRKLEEEKKQLEGEIIDFYKMKAASEALQTQLSTDTKKDKHRKK

SEQ ID NO: 77424 - protein, 361 aa, Homo sapiens
  Payload ID: 15448
  Gene Symbol: SEPT2
  Gene Name: septin 2
  Uniprot ID: Q15019
  ENSP ID: ENSP00000353157
MSKQQPTQFINPETPGYVGFANLPNQVHRKSVKKGFEFTLMVVGESGLGKSTLINSLFLTDLYPERVIPGAAEKIERTVQIEASTVEIEERGVKLRLTVVDTPGYGDAINCRDCFKTIISYIDEQFERYLHDESGLNRRHIIDNRVHCCFYFISPFGHGLKPLDVAFMKAIHNKVNIVPVIAKADTLTLKERERLKKRILDEIEEHNIKIYHLPDAESDEDEDFKEQTRLLKASIPFSVVGSNQLIEAKGKKVRGRLYPWGVVEVENPEHNDFLKLRTMLITHMQDLQEVTQDLHYENFRSERLKRGGRKVENEDMNKDQILLEKEAELRRMQEMIARMQAQMQMQMQGGDGDGGALGHHV

SEQ ID NO: 77425 - protein, 361 aa, Homo sapiens; identical to SEQ ID NO: 77424
  Payload ID: 15448
  Gene Symbol: SEPT2
  Gene Name: septin 2
  Uniprot ID: Q15019
  ENSP ID: ENSP00000375832

SEQ ID NO: 77426 - protein, 361 aa, Homo sapiens; identical to SEQ ID NO: 77424
  Payload ID: 15448
  Gene Symbol: SEPT2
  Gene Name: septin 2
  Uniprot ID: Q15019
  ENSP ID: ENSP00000375834

SEQ ID NO: 77427 - protein, 321 aa, Homo sapiens
  Payload ID: 15448
  Gene Symbol: SEPT2
  Gene Name: septin 2
  ENSP ID: ENSP00000384525
MVVGESGLGKSTLINSLFLTDLYPERVIPGAAEKIERTVQIEASTVEIEERGVKLRLTVVDTPGYGDAINCRDCFKTIISYIDEQFERYLHDESGLNRRHIIDNRVHCCFYFISPFGHGLKPLDVAFMKAIHNKVNIVPVIAKADTLTLKERERLKKRILDEIEEHNIKIYHLPDAESDEDEDFKEQTRLLKASIPFSVVGSNQLIEAKGKKVRGRLYPWGVVEVENPEHNDFLKLRTMLITHMQDLQEVTQDLHYENFRSERLKRGGRKVENEDMNKDQILLEKEAELRRMQEMIARMQAQMQMQMQGGDGDGGALGHHV

SEQ ID NO: 77428 - protein, 371 aa, Homo sapiens
  Payload ID: 15448
  Gene Symbol: SEPT2
  Gene Name: septin 2
  Uniprot ID: Q15019
  ENSP ID: ENSP00000385109
MSKQQPTQFINPETPGYVGFANLPNQVHRKSVKKGFEFTLMVVGESGLGKSTLINSLFLTDLYPERVIPGAAALNTRKTLLWEKIERTVQIEASTVEIEERGVKLRLTVVDTPGYGDAINCRDCFKTIISYIDEQFERYLHDESGLNRRHIIDNRVHCCFYFISPFGHGLKPLDVAFMKAIHNKVNIVPVIAKADTLTLKERERLKKRILDEIEEHNIKIYHLPDAESDEDEDFKEQTRLLKASIPFSVVGSNQLIEAKGKKVRGRLYPWGVVEVENPEHNDFLKLRTMLITHMQDLQEVTQDLHYENFRSERLKRGGRKVENEDMNKDQILLEKEAELRRMQEMIARMQAQMQMQMQGGDGDGGALGHHV

SEQ ID NO: 77429 - protein, 361 aa, Homo sapiens; identical to SEQ ID NO: 77424
  Payload ID: 15448
  Gene Symbol: SEPT2
  Gene Name: septin 2
  Uniprot ID: Q15019
  ENSP ID: ENSP00000385172

SEQ ID NO: 77430 - protein, 94 aa, Homo sapiens
  Payload ID: 15448
  Gene Symbol: SEPT2
  Gene Name: septin 2
  ENSP ID: ENSP00000386001
MVVGESGLGKSTLINSLFLTDLYPERVIPGAAEKIERTVQIEASTVEIEERGVKLRLTVVDTPGYGDAINCRDWYAPPCPGICICLLNILHKFI

SEQ ID NO: 77431 - protein, 50 aa, Homo sapiens
  Payload ID: 15448
  Gene Symbol: SEPT2
  Gene Name: septin 2
  ENSP ID: ENSP00000389174
MSKQQPTQFINPETPGYVGFANLPNQVHRKSVKKGFEFTLMVVGESGLGK

SEQ ID NO: 77432 - protein, 173 aa, Homo sapiens
  Payload ID: 15448
  Gene Symbol: SEPT2
  Gene Name: septin 2
  ENSP ID: ENSP00000391717
MSKQQPTQFINPETPGYVGFANLPNQVHRKSVKKGFEFTLMVVGESGLGKSTLINSLFLTDLYPERVIPGAAEKIERTVQIEASTVEIEERGVKLRLTVVDTPGYGDAINCRDCFKTIISYIDEQFERYLHDESGLNRRHIIDNRVHCCFYFISPFGHGLKPLDVAFMKAIHN

SEQ ID NO: 77433 - protein, 147 aa, Homo sapiens
  Payload ID: 15448
  Gene Symbol: SEPT2
  Gene Name: septin 2
  ENSP ID: ENSP00000394666
MEFNSNVKSWSFSLQQPTQFINPETPGYVGFANLPNQVHRKSVKKGFEFTLMVVGESGLGKSTLINSLFLTDLYPERVIPGAAEKIERTVQIEASTVEIEERGVKLRLTVVDTPGYGDAINCRDCFKTIISYIDEQFERYLHDESGL

SEQ ID NO: 77434 - protein, 184 aa, Homo sapiens
  Payload ID: 15448
  Gene Symbol: SEPT2
  Gene Name: septin 2
  ENSP ID: ENSP00000397195
MVVGESGLGKSTLINSLFLTDLYPERVIPGAAEKIERTVQIEASTVEIEERGVKLRLTVVDTPGYGDAINCRDCFKTIISYIDEQFERYLHDESGLNRRHIIDNRVHCCFYFISPFGHGLKPLDVAFMKAIHNKVNIVPVIAKADTLTLKERERLKKRILDEIEEHNIKIYHLPDAESDEDEDF

SEQ ID NO: 77435 - protein, 80 aa, Homo sapiens
  Payload ID: 15448
  Gene Symbol: SEPT2
  Gene Name: septin 2
  ENSP ID: ENSP00000397290
MSKQQPTQFINPETPGYVGFANLPNQVHRKSVKKGFEFTLMVVGESGLGKSTLINSLFLTDLYPERVIPGAAVCFFSRKN

SEQ ID NO: 77436 - protein, 121 aa, Homo sapiens
  Payload ID: 15448
  Gene Symbol: SEPT2
  Gene Name: septin 2
  ENSP ID: ENSP00000399195
MVVGESGLGKSTLINSLFLTDLYPERVIPGAAEKIERTVQIEASTVEIEERGVKLRLTVVDTPGYGDAINCRDCFKTIISYIDEQFERYLHDESGLNRRHIIDNRVHCCFYFISPFGHGLK

SEQ ID NO: 77437 - protein, 105 aa, Homo sapiens
  Payload ID: 15448
  Gene Symbol: SEPT2
  Gene Name: septin 2
  ENSP ID: ENSP00000399767
MSKQQPTQFINPETPGYVGFANLPNQVHRKSVKKGFEFTLMVVGESGLGKSTLINSLFLTDLYPERVIPGAAEKIERTVQIEASTVEIEERGVKLRLTVVDTPGY

SEQ ID NO: 77438 - protein, 29 aa, Homo sapiens
  Payload ID: 15448
  Gene Symbol: SEPT2
  Gene Name: septin 2
  ENSP ID: ENSP00000402256
  MOD_RES (1)..(1): Any amino acid
XEMIARMQAQMQMQMQGGDGDGGALGHHV

SEQ ID NO: 77439 - protein, 74 aa, Homo sapiens
  Payload ID: 15448
  Gene Symbol: SEPT2
  Gene Name: septin 2
  ENSP ID: ENSP00000403287
MSKTGVLFCHQAGVQWHDLSSLQLLPPTFKRFPWLSLRSSWDCRHVPPRWLIFWILVNSGFHRVGQDGLDLLTS

SEQ ID NO: 77440 - protein, 22 aa, Homo sapiens
  Payload ID: 15448
  Gene Symbol: SEPT2
  Gene Name: septin 2
  ENSP ID: ENSP00000404417
MSKQQPTQFINPETPGYVGFAN

SEQ ID NO: 77441 - protein, 72 aa, Homo sapiens
  Payload ID: 15448
  Gene Symbol: SEPT2
  Gene Name: septin 2
  ENSP ID: ENSP00000404484
MSKQQPTQFINPETPGYVGFANLPNQVHRKSVKKGFEFTLMVVGESGLGKSTLINSLFLTDLYPERVIPGAA

SEQ ID NO: 77442 - protein, 148 aa, Homo sapiens
  Payload ID: 15448
  Gene Symbol: SEPT2
  Gene Name: septin 2
  ENSP ID: ENSP00000406181
MSKQQPTQFINPETPGYVGFANLPNQVHRKSVKKGFEFTLMVVGESGLGKSTLINSLFLTDLYPERVIPGAAEKIERTVQIEASTVEIEERGVKLRLTVVDTPGYGDAINCRDCFKTIISYIDEQFERYLHDESGLNRRHIIDNRVHC

SEQ ID NO: 77443 - protein, 188 aa, Homo sapiens
  Payload ID: 15448
  Gene Symbol: SEPT2
  Gene Name: septin 2
  ENSP ID: ENSP00000408296
VHCCFYFISPFGHGLKPLDVAFMKAIHNKVNIVPVIAKADTLTLKERERLKKRILDEIEEHNIKIYHLPDAESDEDEDFKEQTRLLKASIPFSVVGSNQLIEAKGKKVRGRLYPWGVVEVENPEHNDFLKLRTMLMKVENEDMNKDQILLEKEAELRRMQEMIARMQAQMQMQMQGGDGDGGALGHHV

SEQ ID NO: 77444 - protein, 161 aa, Homo sapiens
  Payload ID: 15448
  Gene Symbol: SEPT2
  Gene Name: septin 2
  ENSP ID: ENSP00000408902
  MOD_RES (1)..(1): Any amino acid
XSPWYLWRTYLCREAVDSEVTCRKNVSFPLHMLLIFPIKFVSFLEKIERTVQIEASTVEIEERGVKLRLTVVDTPGYGDAINCRDCFKTIISYIDEQFERYLHDESGLNRRHIIDNRVHCCFYFISPFGHGLKPLDVAFMKAIHNKVNIVPVIAKADTLTL

SEQ ID NO: 77445 - protein, 52 aa, Homo sapiens
  Payload ID: 15448
  Gene Symbol: SEPT2
  Gene Name: septin 2
  ENSP ID: ENSP00000409596
MSKQQPTQFINPETPGYVGFANLPNQVHRKSVKKGFEFTLMVVGESGLGKST

SEQ ID NO: 77446 - protein, 131 aa, Homo sapiens
  Payload ID: 15448
  Gene Symbol: SEPT2
  Gene Name: septin 2
  ENSP ID: ENSP00000412434
MSKQQPTQFINPETPGYVGFANLPNQVHRKSVKKGFEFTLMVVGESGLGKSTLINSLFLTDLYPERVIPGAAEKIERTVQIEASTVEIEERGVKLRLTVVDTPGYGDAINCRDCFKTIISYIDEQFERYLH

SEQ ID NO: 77447 - protein, 71 aa, Homo sapiens
  Payload ID: 15448
  Gene Symbol: SEPT2
  Gene Name: septin 2
  ENSP ID: ENSP00000413031
MSKQQPTQFINPETPGYVGFANLPNQVHRKSVKKGFEFTLMVVGESGLGKSTLINSLFLTDLYPERVIPGA

SEQ ID NO: 77448 - protein, 396 aa, Homo sapiens
  Payload ID: 15448
  Gene Symbol: SEPT2
  Gene Name: septin 2
  Uniprot ID: Q15019
  ENSP ID: ENSP00000479861
MPWISEGRATRPCLRVPSARRGDEGLHQRDEASQKMSKQQPTQFINPETPGYVGFANLPNQVHRKSVKKGFEFTLMVVGESGLGKSTLINSLFLTDLYPERVIPGAAEKIERTVQIEASTVEIEERGVKLRLTVVDTPGYGDAINCRDCFKTIISYIDEQFERYLHDESGLNRRHIIDNRVHCCFYFISPFGHGLKPLDVAFMKAIHNKVNIVPVIAKADTLTLKERERLKKRILDEIEEHNIKIYHLPDAESDEDEDFKEQTRLLKASIPFSVVGSNQLIEAKGKKVRGRLYPWGVVEVENPEHNDFLKLRTMLITHMQDLQEVTQDLHYENFRSERLKRGGRKVENEDMNKDQILLEKEAELRRMQEMIARMQAQMQMQMQGGDGDGGALGHHV

SEQ ID NO: 77449 - protein, 83 aa, Homo sapiens
  Payload ID: 15449
  Gene Symbol: SEPT3
  Gene Name: septin 3
  Uniprot ID: Q9UH03
  ENSP ID: ENSP00000379695
MSKGLPETRTDAAMSELVPEPRPKPAVPMKPMSINSNLLGYIGIDTIIEQMRKKTMKTGFDFNIMVVAGSPLRSTSMSSTRSS

SEQ ID NO: 77450 - protein, 350 aa, Homo sapiens
  Payload ID: 15449
  Gene Symbol: SEPT3
  Gene Name: septin 3
  Uniprot ID: Q9UH03
  ENSP ID: ENSP00000379703
MSKGLPETRTDAAMSELVPEPRPKPAVPMKPMSINSNLLGYIGIDTIIEQMRKKTMKTGFDFNIMVVGQSGLGKSTLVNTLFKSQVSRKASSWNREEKIPKTVEIKAIGHVIEEGGVKMKLTVIDTPGFGDQINNENCWEPIEKYINEQYEKFLKEEVNIARKKRIPDTRVHCCLYFISPTGHSLRPLDLEFMKHLSKVVNIIPVIAKADTMTLEEKSEFKQRVRKELEVNGIEFYPQKEFDEDLEDKTENDKIRQESMPFAVVGSDKEYQVNGKRVLGRKTPWGIIEVENLNHCEFALLRDFVIRTHLQDLKEVTHNIHYETYRAKRLNDNGGLPPVSVDTEESHDSNP

SEQ ID NO: 77451 - protein, 358 aa, Homo sapiens
  Payload ID: 15449
  Gene Symbol: SEPT3
  Gene Name: septin 3
  Uniprot ID: Q9UH03
  ENSP ID: ENSP00000379704
MSKGLPETRTDAAMSELVPEPRPKPAVPMKPMSINSNLLGYIGIDTIIEQMRKKTMKTGFDFNIMVVGQSGLGKSTLVNTLFKSQVSRKASSWNREEKIPKTVEIKAIGHVIEEGGVKMKLTVIDTPGFGDQINNENCWEPIEKYINEQYEKFLKEEVNIARKKRIPDTRVHCCLYFISPTGHSLRPLDLEFMKHLSKVVNIIPVIAKADTMTLEEKSEFKQRVRKELEVNGIEFYPQKEFDEDLEDKTENDKIRQESMPFAVVGSDKEYQVNGKRVLGRKTPWGIIEVENLNHCEFALLRDFVIRTHLQDLKEVTHNIHYETYRAKRLNDNGGLPPGEGLLGTVLPPVPATPCPTAE

SEQ ID NO: 77452 - protein, 294 aa, Homo sapiens
  Payload ID: 15449
  Gene Symbol: SEPT3
  Gene Name: septin 3
  ENSP ID: ENSP00000383956
MSKGQSGLGKSTLVNTLFKSQVSRKASSWNREEKIPKTVEIKAIGHVIEEGGVKMKLTVIDTPGFGDQINNENCWEPIEKYINEQYEKFLKEEVNIARKKRIPDTRVHCCLYFISPTGHSLRPLDLEFMKHLSKVVNIIPVIAKADTMTLEEKSEFKQRVRKELEVNGIEFYPQKEFDEDLEDKTENDKIRQESMPFAVVGSDKEYQVNGKRVLGRKTPWGIIEVENLNHCEFALLRDFVIRTHLQDLKEVTHNIHYETYRAKRLNDNGGLPPGEGLLGTVLPPVPATPCPTAE

SEQ ID NO: 77453 - protein, 178 aa, Homo sapiens
  Payload ID: 15449
  Gene Symbol: SEPT3
  Gene Name: septin 3
  ENSP ID: ENSP00000391416
MSELVPEPRPKPAVPMKPMSINSNLLGYIGIDTIIEQMRKKTMKTGFDFNIMVVGQSGLGKSTLVNTLFKSQVSRKASSWNREEKIPKTVEIKAIGHVIEEGGVKMKLTVIDTPGFGDQINNENCWEPIEKYINEQYEKFLKEEVNIARKKRIPDTRVHCCLYFISPTGHSLRPLDLE

SEQ ID NO: 77454 - protein, 459 aa, Homo sapiens
  Payload ID: 15450
  Gene Symbol: SEPT4
  Gene Name: septin 4
  Uniprot ID: O43236
  ENSP ID: ENSP00000321071
MIKRFLEDTTDDGELSKFVKDFSGNASCHPPEAKTWASRPQVPEPRPQAPDLYDDDLEFRPPSRPQSSDNQQYFCAPAPLSPSARPRSPWGKLDPYDSSEDDKEYVGFATLPNQVHRKSVKKGFDFTLMVAGESGLGKSTLVNSLFLTDLYRDRKLLGAEERIMQTVEITKHAVDIEEKGVRLRLTIVDTPGFGDAVNNTECWKPVAEYIDQQFEQYFRDESGLNRKNIQDNRVHCCLYFISPFGHGLRPLDVEFMKALHQRVNIVPILAKADTLTPPEVDHKKRKIREEIEHFGIKIYQFPDCDSDEDEDFKLQDQALKESIPFAVIGSNTVVEARGRRVRGRLYPWGIVEVENPGHCDFVKLRTMLVRTHMQDLKDVTRETHYENYRAQCIQSMTRLVVKERNRNKLTRESGTDFPIPAVPPGTDPETEKLIREKDEELRRMQEMLHKIQKQMKENY

SEQ ID NO: 77455 - protein, 478 aa, Homo sapiens
  Payload ID: 15450
  Gene Symbol: SEPT4
  Gene Name: septin 4
  Uniprot ID: O43236
  ENSP ID: ENSP00000321674
MDRSLGWQGNSVPEDRTEAGIKRFLEDTTDDGELSKFVKDFSGNASCHPPEAKTWASRPQVPEPRPQAPDLYDDDLEFRPPSRPQSSDNQQYFCAPAPLSPSARPRSPWGKLDPYDSSEDDKEYVGFATLPNQVHRKSVKKGFDFTLMVAGESGLGKSTLVNSLFLTDLYRDRKLLGAEERIMQTVEITKHAVDIEEKGVRLRLTIVDTPGFGDAVNNTECWKPVAEYIDQQFEQYFRDESGLNRKNIQDNRVHCCLYFISPFGHGLRPLDVEFMKALHQRVNIVPILAKADTLTPPEVDHKKRKIREEIEHFGIKIYQFPDCDSDEDEDFKLQDQALKESIPFAVIGSNTVVEARGRRVRGRLYPWGIVEVENPGHCDFVKLRTMLVRTHMQDLKDVTRETHYENYRAQCIQSMTRLVVKERNRNKLTRESGTDFPIPAVPPGTDPETEKLIREKDEELRRMQEMLHKIQKQMKENY

SEQ ID NO: 77456 - protein, 459 aa, Homo sapiens; identical to SEQ ID NO: 77454
  Payload ID: 15450
  Gene Symbol: SEPT4
  Gene Name: septin 4
  Uniprot ID: O43236
  ENSP ID: ENSP00000376801

SEQ ID NO: 77457 - protein, 493 aa, Homo sapiens
  Payload ID: 15450
  Gene Symbol: SEPT4
  Gene Name: septin 4
  Uniprot ID: O43236
  ENSP ID: ENSP00000402000
MRSSPALFSSRAAPQKPRKEGSQAAGLLVFSDSLEIKRFLEDTTDDGELSKFVKDFSGNASCHPPEAKTWASRPQVPEPRPQAPDLYDDDLEFRPPSRPQSSDNQQYFCAPAPLSPSARPRSPWGKLDPYDSSEDDKEYVGFATLPNQVHRKSVKKGFDFTLMVAGESGLGKSTLVNSLFLTDLYRDRKLLGAEERIMQTVEITKHAVDIEEKGVRLRLTIVDTPGFGDAVNNTECWKPVAEYIDQQFEQYFRDESGLNRKNIQDNRVHCCLYFISPFGHGLRPLDVEFMKALHQRVNIVPILAKADTLTPPEVDHKKRKIREEIEHFGIKIYQFPDCDSDEDEDFKLQDQALKESIPFAVIGSNTVVEARGRRVRGRLYPWGIVEVENPGHCDFVKLRTMLVRTHMQDLKDVTRETHYENYRAQCIQSMTRLVVKERNRNKLTRESGTDFPIPAVPPGTDPETEKLIREKDEELRRMQEMLHKIQKQMKENY

SEQ ID NO: 77458 - protein, 274 aa, Homo sapiens
  Payload ID: 15450
  Gene Symbol: SEPT4
  Gene Name: septin 4
  Uniprot ID: O43236
  ENSP ID: ENSP00000402348
MIKRFLEDTTDDGELSKFVKDFSGNASCHPPEAKTWASRPQVPEPRPQAPDLYDDDLEFRPPSRPQSSDNQQYFCAPAPLSPSARPRSPWGKLDPYDSSEDDKEYVGFATLPNQVHRKSVKKGFDFTLMVAGESGLGKSTLVNSLFLTDLYRDRKLLGAEERIMQTVEITKHAVDIEEKGVRLRLTIVDTPGFGDAVNNTECWKPVAEYIDQQFEQYFRDESGLNRKNIQDNRVHCCLYFISPFGHGYGPSLRLLAPPGAVKGTGQEHQGQGCH

SEQ ID NO: 77459 - protein, 470 aa, Homo sapiens
  Payload ID: 15450
  Gene Symbol: SEPT4
  Gene Name: septin 4
  Uniprot ID: O43236
  ENSP ID: ENSP00000414779
MPGFYSVMTDEEIKRFLEDTTDDGELSKFVKDFSGNASCHPPEAKTWASRPQVPEPRPQAPDLYDDDLEFRPPSRPQSSDNQQYFCAPAPLSPSARPRSPWGKLDPYDSSEDDKEYVGFATLPNQVHRKSVKKGFDFTLMVAGESGLGKSTLVNSLFLTDLYRDRKLLGAEERIMQTVEITKHAVDIEEKGVRLRLTIVDTPGFGDAVNNTECWKPVAEYIDQQFEQYFRDESGLNRKNIQDNRVHCCLYFISPFGHGLRPLDVEFMKALHQRVNIVPILAKADTLTPPEVDHKKRKIREEIEHFGIKIYQFPDCDSDEDEDFKLQDQALKESIPFAVIGSNTVVEARGRRVRGRLYPWGIVEVENPGHCDFVKLRTMLVRTHMQDLKDVTRETHYENYRAQCIQSMTRLVVKERNRNKLTRESGTDFPIPAVPPGTDPETEKLIREKDEELRRMQEMLHKIQKQMKENY

SEQ ID NO: 77460 - protein, 55 aa, Homo sapiens
  Payload ID: 15450
  Gene Symbol: SEPT4
  Gene Name: septin 4
  ENSP ID: ENSP00000462278
MDRSLGWQGNSVPEDRTEAGIKRFLEDTTDDGELSKMTRSMWALQPSPTKSTESP

SEQ ID NO: 77461 - protein, 36 aa, Homo sapiens
  Payload ID: 15450
  Gene Symbol: SEPT4
  Gene Name: septin 4
  ENSP ID: ENSP00000462362
MIKRFLEDTTDDGELSKMTRSMWALQPSPTKSTESP

SEQ ID NO: 77462 - protein, 379 aa, Homo sapiens
  Payload ID: 15450
  Gene Symbol: SEPT4
  Gene Name: septin 4
  ENSP ID: ENSP00000462727
MDRSLGWQGNSVPEDRTEAGDDKEYVGFATLPNQVHRKSVKKGFDFTLMVAGESGLGKSTLVNSLFLTDLYRDRKLLGAEERIMQTVEITKHAVDIEEKGVRLRLTIVDTPGFGDAVNNTECWKPVAEYIDQQFEQYFRDESGLNRKNIQDNRVHCCLYFISPFGHGLRPLDVEFMKALHQRVNIVPILAKADTLTPPEVDHKKRKIREEIEHFGIKIYQFPDCDSDEDEDFKLQDQALKESIPFAVIGSNTVVEARGRRVRGRLYPWGIVEVENPGHCDFVKLRTMLVRTHMQDLKDVTRETHYENYRAQCIQSMTRLVVKERNRNKLTRESGTDFPIPAVPPGTDPETEKLIREKDEELRRMQEMLHKIQKQMKENY

SEQ ID NO: 77463 - protein, 225 aa, Homo sapiens
  Payload ID: 15450
  Gene Symbol: SEPT4
  Gene Name: septin 4
  ENSP ID: ENSP00000463461
MGPVPTSFGKRRGGPQTLPASPGGMIKRFLEDTTDDGELSKFVKDFSGNASCHPPEAKTWASRPQVPEPRPQAPDLYDDDLEFRPPSRPQSSDNQQYFCAPAPLSPSARPRSPWGKLDPYDSSEDDKEYVGFATLPNQVHRKSVKKGFDFTLMVAGESGLGKSTLVNSLFLTDLYRDRKLLGAEERIMQTVEITKHAVDIEEKGVRLRLTIVDTPGFGDAVNNTE

SEQ ID NO: 77464 - protein, 207 aa, Homo sapiens
  Payload ID: 15450
  Gene Symbol: SEPT4
  Gene Name: septin 4
  ENSP ID: ENSP00000463671
MGPVPTSFGKRRGGPQTLPASPGGMDDKEYVGFATLPNQVHRKSVKKGFDFTLMVAGESGLGKSTLVNSLFLTDLYRDRKLLGAEERIMQTVEITKHAVDIEEKGVRLRLTIVDTPGFGDAVNNTECWKPVAEYIDQQFEQYFRDESGLNRKNIQDNRVHCCLYFISPFGHGLRPLDVEFMKALHQRVNIVPILAKADTLTPPEVDH

SEQ ID NO: 77465 - protein, 331 aa, Homo sapiens
  Payload ID: 15450
  Gene Symbol: SEPT4
  Gene Name: septin 4
  Uniprot ID: O43236
  ENSP ID: ENSP00000463768
MVAGESGLGKSTLVNSLFLTDLYRDRKLLGAEERIMQTVEITKHAVDIEEKGVRLRLTIVDTPGFGDAVNNTECWKPVAEYIDQQFEQYFRDESGLNRKNIQDNRVHCCLYFISPFGHGLRPLDVEFMKALHQRVNIVPILAKADTLTPPEVDHKKRKIREEIEHFGIKIYQFPDCDSDEDEDFKLQDQALKESIPFAVIGSNTVVEARGRRVRGRLYPWGIVEVENPGHCDFVKLRTMLVRTHMQDLKDVTRETHYENYRAQCIQSMTRLVVKERNRNKLTRESGTDFPIPAVPPGTDPETEKLIREKDEELRRMQEMLHKIQKQMKENY

SEQ ID NO: 77466 - protein, 72 aa, Homo sapiens
  Payload ID: 15450
  Gene Symbol: SEPT4
  Gene Name: septin 4
  ENSP ID: ENSP00000464360
MIKRFLEDTTDDGELSKFVKDFSGNASCHPPEAKTWASRPQVPEPRPQAPDLYDDDLEFRPPSRPQSSDNQQ

SEQ ID NO: 77467 - protein, 332 aa, Homo sapiens
  Payload ID: 15450
  Gene Symbol: SEPT4
  Gene Name: septin 4
  ENSP ID: ENSP00000464373
MDRSLGWQGNSVPEDRTEAGDDKEYVGFATLPNQVHRKSVKKGFDFTLMVAGESGLGKSTLVNSLFLTDLYRDRKLLGAEERIMQTVEITKHAVDIEEKGVRLRLTIVDTPGFGDAVNNTECWKPVAEYIDQQFEQYFRDESGLNRKNIQDNRVHCCLYFISPFGHGLRPLDVEFMKALHQRVNIVPILAKADTLTPPEVDHKKRKIREEIEHFGIKIYQFPDCDSDEDEDFKLQDQALKESIPFAVIGSNTVVEARGRRVRGRLYPWGIVEVENPGHCDFVKLRTMLVRTHMQDLKDVTRETHYENYRAQCIQSMTRLVVKERNRKDRSRN

SEQ ID NO: 77468 - protein, 175 aa, Homo sapiens
  Payload ID: 15450
  Gene Symbol: SEPT4
  Gene Name: septin 4
  ENSP ID: ENSP00000464382
MDDKEYVGFATLPNQVHRKSVKKGFDFTLMVAGESGLGKSTLVNSLFLTDLYRDRKLLGAEERIMQTVEITKHAVDIEEKGVRLRLTIVDTPGFGDAVNNTECWKPVAEYIDQQFEQYFRDESGLNRKNIQDNRVHCCLYFISPFGHGYGPSLRLLAPPGAVKGTGQEHQGQGCH

SEQ ID NO: 77469 - protein, 378 aa, Homo sapiens
  Payload ID: 15451
  Gene Symbol: SEPT5
  Gene Name: septin 5
  ENSP ID: ENSP00000372515
MDSLAAPQDRLVEQLLSPRTQAQRRLKDIDKQYVGFATLPNQVHRKSVKKGFDFTLMVAGESGLGKSTLVHSLFLTDLYKDRKLLSAEERISQTVEILKHTVDIEEKGVKLKLTIVDTPGFGDAVNNTECWKPITDYVDQQFEQYFRDESGLNRKNIQDNRVHCCLYFISPFGHGLRPVDVGFMKALHEKVNIVPLIAKADCLVPSEIRKLKERIREEIDKFGIHVYQFPECDSDEDEDFKQQDRELKESAPFAVIGSNTVVEAKGQRVRGRLYPWGIVEVENQAHCDFVKLRNMLIRTHMHDLKDVTCDVHYENYRAHCIQQMTSKLTQDSRMESPIPILPLPTPDAETEKLIRMKDEELRRMQEMLQRMKQQMQDQ

SEQ ID NO: 77470 - protein, 180 aa, Homo sapiens
  Payload ID: 15451
  Gene Symbol: SEPT5
  Gene Name: septin 5
  ENSP ID: ENSP00000378541
MVAGESGLGKSTLVHSLFLTDLYKDRKLLSAEERISQTVEILKHTVDIEEKGVKLKLTIVDTPGFGDAVNNTECWKPITDYVDQQFEQYFRDESGLNRKNIQDNRVHCCLYFISPFGHGLRPVDVGFMKALHEKVNIVPLIAKADCLVPSEIRKLKERIREEIDKFGIHVYQFPECDSDE

SEQ ID NO: 77471 - protein, 337 aa, Homo sapiens
  Payload ID: 15451
  Gene Symbol: SEPT5
  Gene Name: septin 5
  ENSP ID: ENSP00000384535
MSTGLRYKSKLATPEDKQDIDKQYVGFATLPNQVHRKSVKKGFDFTLMVAGESGLGKSTLVHSLFLTDLYKDRKLLSAEERISQTVEILKHTVDIEEKGVKLKLTIVDTPGFGDAVNNTECWKPITDYVDQQFEQYFRDESGLNRKNIQDNRVHCCLYFISPFGHGLRPVDVGFMKALHEKVNIVPLIAKADCLVPSEIRKLKERIREEIDKFGIHVYQFPECDSDEDEDFKQQDRELKESAPFAVIGSNTVVEAKGQRVRGRLYPWGIVEGALRLREAAQHAHPHAYARPQGRDVRRALRELPRALHPADDQQTDPGQPHGEPHPDPAAAHPGRRD

SEQ ID NO: 77472 - protein, 248 aa, Homo sapiens
  Payload ID: 15451
  Gene Symbol: SEPT5
  Gene Name: septin 5
  ENSP ID: ENSP00000385356
MSTGLRYKSKLATPEDKQDIDKQYVGFATLPNQVHRKSVKKGFDFTLMVAGESGLGKSTLVHSLFLTDLYKDRKLLSAEERISQTVEILKHTVDIEEKGVKLKLTIVDTPGFGDAVNNTECWKPITDYVDQQFEQYFRDESGLNRKNIQDNRVHCCLYFISPFGHGLRPVDVGFMKALHEKVNIVPLIAKADCLVPSEIRKLKERIREEIDKFGIHVYQFPECDSDEDEDFKQQDRELKWRTRRIATS

SEQ ID NO: 77473 - protein, 369 aa, Homo sapiens
  Payload ID: 15451
  Gene Symbol: SEPT5
  Gene Name: septin 5
  Uniprot ID: Q99719
  ENSP ID: ENSP00000391311
MSTGLRYKSKLATPEDKQDIDKQYVGFATLPNQVHRKSVKKGFDFTLMVAGESGLGKSTLVHSLFLTDLYKDRKLLSAEERISQTVEILKHTVDIEEKGVKLKLTIVDTPGFGDAVNNTECWKPITDYVDQQFEQYFRDESGLNRKNIQDNRVHCCLYFISPFGHGLRPVDVGFMKALHEKVNIVPLIAKADCLVPSEIRKLKERIREEIDKFGIHVYQFPECDSDEDEDFKQQDRELKESAPFAVIGSNTVVEAKGQRVRGRLYPWGIVEVENQAHCDFVKLRNMLIRTHMHDLKDVTCDVHYENYRAHCIQQMTSKLTQDSRMESPIPILPLPTPDAETEKLIRMKDEELRRMQEMLQRMKQQMQDQ

SEQ ID NO: 77474 - protein, 378 aa, Homo sapiens; identical to SEQ ID NO: 77469
  Payload ID: 15451
  Gene Symbol: SEPT5
  Gene Name: septin 5
  ENSP ID: ENSP00000391731

SEQ ID NO: 77475 - protein, 346 aa, Homo sapiens
  Payload ID: 15451
  Gene Symbol: SEPT5
  Gene Name: septin 5
  Uniprot ID: Q99719
  ENSP ID: ENSP00000394541
MDSLAAPQDRLVEQLLSPRTQAQRRLKDIDKQYVGFATLPNQVHRKSVKKGFDFTLMVAGESGLGKSTLVHSLFLTDLYKDRKLLSAEERISQTVEILKHTVDIEEKGVKLKLTIVDTPGFGDAVNNTECWKPITDYVDQQFEQYFRDESGLNRKNIQDNRVHCCLYFISPFGHGLRPVDVGFMKALHEKVNIVPLIAKADCLVPSEIRKLKERIREEIDKFGIHVYQFPECDSDEDEDFKQQDRELKESAPFAVIGSNTVVEAKGQRVRGRLYPWGIVEGALRLREAAQHAHPHAYARPQGRDVRRALRELPRALHPADDQQTDPGQPHGEPHPDPAAAHPGRRD

SEQ ID NO: 77476 - protein, 322 aa, Homo sapiens
  Payload ID: 15451
  Gene Symbol: SEPT5
  Gene Name: septin 5
  ENSP ID: ENSP00000399685
MVAGESGLGKSTLVHSLFLTDLYKDRKLLSAEERISQTVEILKHTVDIEEKGVKLKLTIVDTPGFGDAVNNTECWKPITDYVDQQFEQYFRDESGLNRKNIQDNRVHCCLYFISPFGHGLRPVDVGFMKALHEKVNIVPLIAKADCLVPSEIRKLKERIREEIDKFGIHVYQFPECDSDEDEDFKQQDRELKESAPFAVIGSNTVVEAKGQRVRGRLYPWGIVEVENQAHCDFVKLRNMLIRTHMHDLKDVTCDVHYENYRAHCIQQMTSKLTQDSRMESPIPILPLPTPDAETEKLIRMKDEELRRMQEMLQRMKQQMQDQ

SEQ ID NO: 77477 - protein, 106 aa, Homo sapiens
  Payload ID: 15451
  Gene Symbol: SEPT5
  Gene Name: septin 5
  ENSP ID: ENSP00000404673
  MOD_RES (1)..(1): Any amino acid
XTIVDTPGFGDAVNNTECWKPITDYVDQQFEQYFRDESGLNRKNIQDNRVHCCLYFISPFGHGEIRKLKERIREEIDKFGIHVYQFPECDSDEDEDFKQQDRELKV

SEQ ID NO: 77478 - protein, 301 aa, Homo sapiens
  Payload ID: 15451
  Gene Symbol: SEPT5
  Gene Name: septin 5
  ENSP ID: ENSP00000408678
MVAGESGLGKSTLVHSLFLTDLYKDRKLLSAEERISQTVEILKHTVDIEEKGVKLKLTIVDTPGFGDAVNNTECWKPITDYVDQQFEQYFRDESGLNRKNIQDNRVHCCLYFISPFGHGLRPVDVGFMKALHEKVNIVPLIAKADCLVPSEIRKLKERIREEIDKFGIHVYQFPECDSDEDEDFKQQDRELKESAPFAVIGSNTVVEAKGQRVRGRLYPWGIVEVENQAHCDFVKLRNMLIRTHMHDLKDVTCDVHYENYRAHCIQQMTSKLTQDSRMESPIPILPLPTPDAETEKLIRMK

SEQ ID NO: 77479 - protein, 304 aa, Homo sapiens
  Payload ID: 15451
  Gene Symbol: SEPT5
  Gene Name: septin 5
  ENSP ID: ENSP00000414488
MSCSAGLACWDSTGVMEVGGPQSGARETPAVPGVATWEGGPAGRSSQSLQSCGSELDIDKQYVGFATLPNQVHRKSVKKGFDFTLMVAGESGLGKSTLVHSLFLTDLYKDRKLLSAEERISQTVEILKHTVDIEEKGVKLKLTIVDTPGFGDAVNNTECWKPITDYVDQQFEQYFRDESGLNRKNIQDNRVHCCLYFISPFGHGLRPVDVGFMKALHEKVNIVPLIAKADCLVPSEIRKLKERIREEIDKFGIHVYQFPECDSDEDEDFKQQDRELKESAPFAVIGSNTVVEAKGQRVRGRLYP

SEQ ID NO: 77480 - protein, 178 aa, Homo sapiens
  Payload ID: 15451
  Gene Symbol: SEPT5
  Gene Name: septin 5
  ENSP ID: ENSP00000480620
MSTGLRYKSKLATPEDKQDIDKQYVGFATLPNQVHRKSVKKGFDFTLMVAGESGLGKSTLVHSLFLTDLYKDRKLLSAEERISQTVEILKHTVDIEEKGVKLKLTIVDTPGFGDAVNNTECWKPITDYVDQQFEQYFRDESGLNRKNIQDNRVHCCLYFISPFGHGLRPVDGFHEGIA

SEQ ID NO: 77481 - protein, 434 aa, Homo sapiens
  Payload ID: 15452
  Gene Symbol: SEPT6
  Gene Name: septin 6
  Uniprot ID: Q14141
  ENSP ID: ENSP00000341524
MAATDIARQVGEGCRTVPLAGHVGFDSLPDQLVNKSVSQGFCFNILCVGETGLGKSTLMDTLFNTKFEGEPATHTQPGVQLQSNTYDLQESNVRLKLTIVSTVGFGDQINKEDSYKPIVEFIDAQFEAYLQEELKIRRVLHTYHDSRIHVCLYFIAPTGHSLKSLDLVTMKKLDSKVNIIPIIAKADAISKSELTKFKIKITSELVSNGVQIYQFPTDDESVAEINGTMNAHLPFAVIGSTEELKIGNKMMRARQYPWGTVQVENEAHCDFVKLREMLIRVNMEDLREQTHTRHYELYRRCKLEEMGFKDTDPDSKPFSLQETYEAKRNEFLGELQKKEEEMRQMFVQRVKEKEAELKEAEKELHEKFDRLKKLHQDEKKKLEDKKKSLDDEVNAFKQRKTAAELLQSQGSQAGGSQTLKRDKEKKNNPWLCTE

SEQ ID NO: 77482 - protein, 429 aa, Homo sapiens
  Payload ID: 15452
  Gene Symbol: SEPT6
  Gene Name: septin 6
  Uniprot ID: Q14141
  ENSP ID: ENSP00000346169
MAATDIARQVGEGCRTVPLAGHVGFDSLPDQLVNKSVSQGFCFNILCVGETGLGKSTLMDTLFNTKFEGEPATHTQPGVQLQSNTYDLQESNVRLKLTIVSTVGFGDQINKEDSYKPIVEFIDAQFEAYLQEELKIRRVLHTYHDSRIHVCLYFIAPTGHSLKSLDLVTMKKLDSKVNIIPIIAKADAISKSELTKFKIKITSELVSNGVQIYQFPTDDESVAEINGTMNAHLPFAVIGSTEELKIGNKMMRARQYPWGTVQVENEAHCDFVKLREMLIRVNMEDLREQTHTRHYELYRRCKLEEMGFKDTDPDSKPFSLQETYEAKRNEFLGELQKKEEEMRQMFVQRVKEKEAELKEAEKELHEKFDRLKKLHQDEKKKLEDKKKSLDDEVNAFKQRKTAAELLQSQGSQAGGSQTLKRDKEKKNFF

SEQ ID NO: 77483 - protein, 431 aa, Homo sapiens
  Payload ID: 15452
  Gene Symbol: SEPT6
  Gene Name: septin 6
  ENSP ID: ENSP00000346397
MAATDIARQVGEGCRTVPLAGHVGFDSLPDQLVNKSVSQGFCFNILCVGETGLGKSTLMDTLFNTKFEGEPATHTQPGVQLQSNTYDLQESNVRLKLTIVSTVGFGDQINKEDSYKPIVEFIDAQFEAYLQEELKIRRVLHTYHDSRIHVCLYFIAPTGHSLKSLDLVTMKKLDSKVNIIPIIAKADAISKSELTKFKIKITSELVSNGVQIYQFPTDDESVAEINGTMNAHLPFAVIGSTEELKIGNKMMRARQYPWGTVQVENEAHCDFVKLREMLIRVNMEDLREQTHTRHYELYRRCKLEEMGFKDTDPDSKPFSLQETYEAKRNEFLGELQKKEEEMRQMFVQRVKEKEAELKEAEKELHEKFDRLKKLHQDEKKKLEDKKKSLDDEVNAFKQRKTAAELLQSQGSQAGGSQTLKRDKEKKNLGFL

SEQ ID NO: 77484 - protein, 427 aa, Homo sapiens
  Payload ID: 15452
  Gene Symbol: SEPT6
  Gene Name: septin 6
  Uniprot ID: Q14141
  ENSP ID: ENSP00000353278
MAATDIARQVGEGCRTVPLAGHVGFDSLPDQLVNKSVSQGFCFNILCVGETGLGKSTLMDTLFNTKFEGEPATHTQPGVQLQSNTYDLQESNVRLKLTIVSTVGFGDQINKEDSYKPIVEFIDAQFEAYLQEELKIRRVLHTYHDSRIHVCLYFIAPTGHSLKSLDLVTMKKLDSKVNIIPIIAKADAISKSELTKFKIKITSELVSNGVQIYQFPTDDESVAEINGTMNAHLPFAVIGSTEELKIGNKMMRARQYPWGTVQVENEAHCDFVKLREMLIRVNMEDLREQTHTRHYELYRRCKLEEMGFKDTDPDSKPFSLQETYEAKRNEFLGELQKKEEEMRQMFVQRVKEKEAELKEAEKELHEKFDRLKKLHQDEKKKLEDKKKSLDDEVNAFKQRKTAAELLQSQGSQAGGSQTLKRDKEKKN

SEQ ID NO: 77485 - protein, 427 aa, Homo sapiens; identical to SEQ ID NO: 77484
  Payload ID: 15452
  Gene Symbol: SEPT6
  Gene Name: septin 6
  Uniprot ID: Q14141
  ENSP ID: ENSP00000378108

SEQ ID NO: 77486 - protein, 427 aa, Homo sapiens; identical to SEQ ID NO: 77484
  Payload ID: 15452
  Gene Symbol: SEPT6
  Gene Name: septin 6
  Uniprot ID: Q14141
  ENSP ID: ENSP00000418715

SEQ ID NO: 77487 - protein, 267 aa, Homo sapiens
  Payload ID: 15452
  Gene Symbol: SEPT6
  Gene Name: septin 6
  Uniprot ID: Q14141
  ENSP ID: ENSP00000435818
MAATDIARQVGEGCRTVPLAGHVGFDSLPDQLVNKSVSQGFCFNILCVGETGLGKSTLMDTLFNTKFEGEPATHTQPGVQLQSNTYDLQESNVRLKLTIVSTVGFGDQINKEDSYKPIVEFIDAQFEAYLQEELKIRRVLHTYHDSRIHVCLYFIAPTGHSLKSLDLVTMKKLDSKVNIIPIIAKADAISKSELTKFKIKITSELVSNGVQIYQFPTDDESVAEINGTMNAHLPFAVIGSTEELKIGNKMMRARQYPWGTVQAAREV

SEQ ID NO: 77488 - protein, 437 aa, Homo sapiens
  Payload ID: 15453
  Gene Symbol: SEPT7
  Gene Name: septin 7
  ENSP ID: ENSP00000344868
MSVSARSAAAEERSVNSSTMGQQQKNLEGYVGFANLPNQVYRKSVKRGFEFTLMVVGESGLGKSTLINSLFLTDLYSPEYPGPSHRIKKTVQVEQSKVLIKEGGVQLLLTIVDTPGFGDAVDNSNCWQPVIDYIDSKFEDYLNAESRVNRRQMPDNRVQCCLYFIAPSGHGLKPLDIEFMKRLHEKVNIIPLIAKADTLTPEECQQFKKQIMKEIQEHKIKIYEFPETDDEEENKLVKKIKDRLPLAVVGSNTIIEVNGKRVRGRQYPWGVAEVENGEHCDFTILRNMLIRTHMQDLKDVTNNVHYENYRSRKLAAVTYNGVDNNKNKGQLTKSPLAQMEEERREHVAKMKKMEMEMEQVFEMKVKEKVQKLKDSEAELQRRHEQMKKNLEAQHKELEEKRRQFEDEKANWEAQQRILEQQNSSRTLEKNKKKGKIF

SEQ ID NO: 77489 - protein, 384 aa, Homo sapiens
  Payload ID: 15453
  Gene Symbol: SEPT7
  Gene Name: septin 7
  Uniprot ID: Q16181
  ENSP ID: ENSP00000381992
MVVGESGLGKSTLINSLFLTDLYSPEYPGPSHRIKKTVQVEQSKVLIKEGGVQLLLTIVDTPGFGDAVDNSNCWQPVIDYIDSKFEDYLNAESRVNRRQMPDNRVQCCLYFIAPSGHGLKPLDIEFMKRLHEKVNIIPLIAKADTLTPEECQQFKKQIMKEIQEHKIKIYEFPETDDEEENKLVKKIKDRLPLAVVGSNTIIEVNGKRVRGRQYPWGVAEVENGEHCDFTILRNMLIRTHMQDLKDVTNNVHYENYRSRKLAAVTYNGVDNNKNKGQLTKSPLAQMEEERREHVAKMKKMEMEMEQVFEMKVKEKVQKLKDSEAELQRRHEQMKKNLEAQHKELEEKRRQFEDEKANWEAQQRILEQQNSSRTLEKNKKKGKIF

SEQ ID NO: 77490 - protein, 417 aa, Homo sapiens
  Payload ID: 15453
  Gene Symbol: SEPT7
  Gene Name: septin 7
  ENSP ID: ENSP00000381993
MKQQKNLEGYVGFANLPNQVYRKSVKRGFEFTLMVVGESGLGKSTLINSLFLTDLYSPEYPGPSHRIKKTVQVEQSKVLIKEGGVQLLLTIVDTPGFGDAVDNSNCWQPVIDYIDSKFEDYLNAESRVNRRQMPDNRVQCCLYFIAPSGHGLKPLDIEFMKRLHEKVNIIPLIAKADTLTPEECQQFKKQIMKEIQEHKIKIYEFPETDDEEENKLVKKIKDRLPLAVVGSNTIIEVNGKRVRGRQYPWGVAEVENGEHCDFTILRNMLIRTHMQDLKDVTNNVHYENYRSRKLAAVTYNGVDNNKNKGQLTKSPLAQMEEERREHVAKMKKMEMEMEQVFEMKVKEKVQKLKDSEAELQRRHEQMKKNLEAQHKELEEKRRQFEDEKANWEAQQRILEQQNSSRTLEKNKKKGKIF

SEQ ID NO: 77491 - protein, 401 aa, Homo sapiens
  Payload ID: 15453
  Gene Symbol: SEPT7
  Gene Name: septin 7
  ENSP ID: ENSP00000413507
MSVSARSAAAEERSVNSSTMGESGLGKSTLINSLFLTDLYSPEYPGPSHRIKKTVQVEQSKVLIKEGGVQLLLTIVDTPGFGDAVDNSNCWQPVIDYIDSKFEDYLNAESRVNRRQMPDNRVQCCLYFIAPSGHGLKPLDIEFMKRLHEKVNIIPLIAKADTLTPEECQQFKKQIMKEIQEHKIKIYEFPETDDEEENKLVKKIKDRLPLAVVGSNTIIEVNGKRVRGRQYPWGVAEVENGEHCDFTILRNMLIRTHMQDLKDVTNNVHYENYRSRKLAAVTYNGVDNNKNKGQLTKSPLAQMEEERREHVAKMKKMEMEMEQVFEMKVKEKVQKLKDSEAELQRRHEQMKKNLEAQHKELEEKRRQFEDEKANWEAQQRILEQQNSSRTLEKNKKKGKIF

SEQ ID NO: 77492 - protein, 88 aa, Homo sapiens
  Payload ID: 15453
  Gene Symbol: SEPT7
  Gene Name: septin 7
  ENSP ID: ENSP00000444240
MKKMEMEMEQVFEMKVKEKVQKLKDSEAELQRRHEQMKKNLEAQHKELEEKRRQFEDEKANWEAQQRILEQQNSSRTLEKNKKKGKIF

SEQ ID NO: 77493 - protein, 76 aa, Homo sapiens
  Payload ID: 15453
  Gene Symbol: SEPT7
  Gene Name: septin 7
  ENSP ID: ENSP00000489044
MSVSARSAAAEERSVNSSTMAQQKNLEGYVGFANLPNQVYRKSVKRGFEFTLMVVGESGLGKSTLINSLFLTDLYS

SEQ ID NO: 77494 - protein, 46 aa, Homo sapiens
  Payload ID: 15453
  Gene Symbol: SEPT7
  Gene Name: septin 7
  ENSP ID: ENSP00000489192
SARSAAAEERSVNSSTMVPLWISSVGIWNTGMMEMCSLQSSSTEEP

SEQ ID NO: 77495 - protein, 77 aa, Homo sapiens
  Payload ID: 15453
  Gene Symbol: SEPT7
  Gene Name: septin 7
  ENSP ID: ENSP00000489466
MSVSARSAAAEERSVNSSTMVAQQKNLEGYVGFANLPNQVYRKSVKRGFEFTLMVVGESGLGKSTLINSLFLTDLYS

SEQ ID NO: 77496 - protein, 157 aa, Homo sapiens
  Payload ID: 15453
  Gene Symbol: SEPT7
  Gene Name: septin 7
  ENSP ID: ENSP00000489480
MVVGESGLGKSTLINSLFLTDLYSPEYPGPSHRIKKTVQVEQSKVLIKEGGVQLLLTIVDTPGFGDAVDNSNCWQPVIDYIDSKFEDYLNAESRVNRRQMPDNRVQCCLYFIAPSGHGLKPLDIEFMKRLHEKVNIIPLIAKADTLTPEECQQFKKQ

SEQ ID NO: 77497 - protein, 147 aa, Homo sapiens
  Payload ID: 15453
  Gene Symbol: SEPT7
  Gene Name: septin 7
  ENSP ID: ENSP00000489538
MVVGESGLGKSTLINSLFLTDLYSPEYPGPSHRIKKTVQVEQSKVLIKEGGVQLLLTIVDTPGFGDAVDNSNCWQPVIDYIDSKFEDYLNAESRVNRRQMPDNRVQCCLYFIAPSGHGLKPLDIEFMKRLHEKVNIIPLIAKADTLT

SEQ ID NO: 77498 - protein, 111 aa, Homo sapiens
  Payload ID: 15453
  Gene Symbol: SEPT7
  Gene Name: septin 7
  ENSP ID: ENSP00000489596
VTYNGVDNNKNKGQLTKHLMITLNIRDRSPLAQMEEERREHVAKMKKMEMEMEQVFEMKVKEKVQKLKDSEAELQRRHEQMKKNLEAQHKELEEKRRQFEDEKANWEAQQR

SEQ ID NO: 77499 - protein, 429 aa, Homo sapiens
  Payload ID: 15454
  Gene Symbol: SEPT8
  Gene Name: septin 8
  Uniprot ID: Q92599
  ENSP ID: ENSP00000296873
MAATDLERFSNAEPEPRSLSLGGHVGFDSLPDQLVSKSVTQGFSFNILCVGETGIGKSTLMNTLFNTTFETEEASHHEACVRLRPQTYDLQESNVQLKLTIVDAVGFGDQINKDESYRPIVDYIDAQFENYLQEELKIRRSLFDYHDTRIHVCLYFITPTGHSLKSLDLVTMKKLDSKVNIIPIIAKADTISKSELHKFKIKIMGELVSNGVQIYQFPTDDEAVAEINAVMNAHLPFAVVGSTEEVKVGNKLVRARQYPWGVVQVENENHCDFVKLREMLIRVNMEDLREQTHSRHYELYRRCKLEEMGFQDSDGDSQPFSLQETYEAKRKEFLSELQRKEEEMRQMFVNKVKETELELKEKERELHEKFEHLKRVHQEEKRKVEEKRRELEEETNAFNRRKAAVEALQSQALHATSQQPLRKDKDKKN

SEQ ID NO: 77500 - protein, 78 aa, Homo sapiens
  Payload ID: 15454
  Gene Symbol: SEPT8
  Gene Name: septin 8
  ENSP ID: ENSP00000360548
MNTLFNTTFETEEASHHEACVRLRPQTYDLQESNVQLKLTIVDAVGFGDQINKDESYRPIVDYIDAQFENYLQEELKI

SEQ ID NO: 77501 - protein, 369 aa, Homo sapiens
  Payload ID: 15454
  Gene Symbol: SEPT8
  Gene Name: septin 8
  Uniprot ID: Q92599
  ENSP ID: ENSP00000367971
MNTLFNTTFETEEASHHEACVRLRPQTYDLQESNVQLKLTIVDAVGFGDQINKDESYRPIVDYIDAQFENYLQEELKIRRSLFDYHDTRIHVCLYFITPTGHSLKSLDLVTMKKLDSKVNIIPIIAKADTISKSELHKFKIKIMGELVSNGVQIYQFPTDDEAVAEINAVMNAHLPFAVVGSTEEVKVGNKLVRARQYPWGVVQVENENHCDFVKLREMLIRVNMEDLREQTHSRHYELYRRCKLEEMGFQDSDGDSQPFSLQETYEAKRKEFLSELQRKEEEMRQMFVNKVKETELELKEKERELHEKFEHLKRVHQEEKRKVEEKRRELEEETNAFNRRKAAVEALQSQALHATSQQPLRKDKDKKN

SEQ ID NO: 77502 - protein, 440 aa, Homo sapiens
  Payload ID: 15454
  Gene Symbol: SEPT8
  Gene Name: septin 8
  ENSP ID: ENSP00000367973
MAATDLERFSNAEPEPRSLSLGGHVGFDSLPDQLVSKSVTQGFSFNILCVGETGIGKSTLMNTLFNTTFETEEASHHEACVRLRPQTYDLQESNVQLKLTIVDAVGFGDQINKDERPIVDYIDAQFENYLQEELKIRRSLFDYHDTRIHVCLYFITPTGHSLKSLDLVTMKKLDSKVNIIPIIAKADTISKSELHKFKIKIMGELVSNGVQIYQFPTDDEAVAEINAVMNAHLPFAVVGSTEEVKVGNKLVRARQYPWGVVQVENENHCDFVKLREMLIRVNMEDLREQTHSRHYELYRRCKLEEMGFQDSDGDSQPFSLQETYEAKRKEFLSELQRKEEEMRQMFVNKVKETELELKEKERELHEKFEHLKRVHQEEKRKVEEKRRELEEETNAFNRRKAAVEALQSQALHATSQQPLRKDKDKKKASGWSSIYSVTIP

SEQ ID NO: 77503 - protein, 430 aa, Homo sapiens
  Payload ID: 15454
  Gene Symbol: SEPT8
  Gene Name: septin 8
  ENSP ID: ENSP00000367978
MAATDLERFSNAEPEPRSLSLGGHVGFDSLPDQLVSKSVTQGFSFNILCVGETGIGKSTLMNTLFNTTFETEEASHHEACVRLRPQTYDLQESNVQLKLTIVDAVGFGDQINKDESYRPIVDYIDAQFENYLQEELKIRRSLFDYHDTRIHVCLYFITPTGHSLKSLDLVTMKKLDSKVNIIPIIAKADTISKSELHKFKIKIMGELVSNGVQIYQFPTDDEAVAEINAVMNAHLPFAVVGSTEEVKVGNKLVRARQYPWGVVQVENENHCDFVKLREMLIRVNMEDLREQTHSRHYELYRRCKLEEMGFQDSDGDSQPFSLQETYEAKRKEFLSELQRKEEEMRQMFVNKVKETELELKEKERELHEKFEHLKRVHQEEKRKVEEKRRELEEETNAFNRRKAAVEALQSQALHATSQQPLRKDKDKKKS

SEQ ID NO: 77504 - protein, 483 aa, Homo sapiens
  Payload ID: 15454
  Gene Symbol: SEPT8
  Gene Name: septin 8
  Uniprot ID: Q92599
  ENSP ID: ENSP00000367991
MAATDLERFSNAEPEPRSLSLGGHVGFDSLPDQLVSKSVTQGFSFNILCVGETGIGKSTLMNTLFNTTFETEEASHHEACVRLRPQTYDLQESNVQLKLTIVDAVGFGDQINKDESYRPIVDYIDAQFENYLQEELKIRRSLFDYHDTRIHVCLYFITPTGHSLKSLDLVTMKKLDSKVNIIPIIAKADTISKSELHKFKIKIMGELVSNGVQIYQFPTDDEAVAEINAVMNAHLPFAVVGSTEEVKVGNKLVRARQYPWGVVQVENENHCDFVKLREMLIRVNMEDLREQTHSRHYELYRRCKLEEMGFQDSDGDSQPFSLQETYEAKRKEFLSELQRKEEEMRQMFVNKVKETELELKEKERELHEKFEHLKRVHQEEKRKVEEKRRELEEETNAFNRRKAAVEALQSQALHATSQQPLRKDKDKKNRSDIGAHQPGMSLSSSKVMMTKASVEPLNCSSWWPAIQCCSCLVRDATWREGFL

SEQ ID NO: 77505 - protein, 460 aa, Homo sapiens
  Payload ID: 15454
  Gene Symbol: SEPT8
  Gene Name: septin 8
  ENSP ID: ENSP00000367993
MAATDLERFSNAEPEPRSLSLGGHVGFDSLPDQLVSKSVTQGFSFNILCVGETGIGKSTLMNTLFNTTFETEEASHHEACVRLRPQTYDLQESNVQLKLTIVDAVGFGDQINKDERPIVDYIDAQFENYLQEELKIRRSLFDYHDTRIHVCLYFITPTGHSLKSLDLVTMKKLDSKVNIIPIIAKADTISKSELHKFKIKIMGELVSNGVQIYQFPTDDEAVAEINAVMNAHLPFAVVGSTEEVKVGNKLVRARQYPWGVVQVENENHCDFVKLREMLIRVNMEDLREQTHSRHYELYRRCKLEEMGFQDSDGDSQPFSLQETYEAKRKEFLSELQRKEEEMRQMFVNKVKETELELKEKERELHEKFEHLKRVHQEEKRKVEEKRRELEEETNAFNRRKAAVEALQSQALHATSQQPLRKDKDKKKGLSWISSQNPAHIHSHLVKQQMSSSSSPKAWDA

SEQ ID NO: 77506 - protein, 442 aa, Homo sapiens
  Payload ID: 15454
  Gene Symbol: SEPT8
  Gene Name: septin 8
  Uniprot ID: Q92599
  ENSP ID: ENSP00000394766
MAATDLERFSNAEPEPRSLSLGGHVGFDSLPDQLVSKSVTQGFSFNILCVGETGIGKSTLMNTLFNTTFETEEASHHEACVRLRPQTYDLQESNVQLKLTIVDAVGFGDQINKDESYRPIVDYIDAQFENYLQEELKIRRSLFDYHDTRIHVCLYFITPTGHSLKSLDLVTMKKLDSKVNIIPIIAKADTISKSELHKFKIKIMGELVSNGVQIYQFPTDDEAVAEINAVMNAHLPFAVVGSTEEVKVGNKLVRARQYPWGVVQVENENHCDFVKLREMLIRVNMEDLREQTHSRHYELYRRCKLEEMGFQDSDGDSQPFSLQETYEAKRKEFLSELQRKEEEMRQMFVNKVKETELELKEKERELHEKFEHLKRVHQEEKRKVEEKRRELEEETNAFNRRKAAVEALQSQALHATSQQPLRKDKDKKKASGWSSIYSVTIP

SEQ ID NO: 77507 - protein, 369 aa, Homo sapiens; identical to SEQ ID NO: 77501
  Payload ID: 15454
  Gene Symbol: SEPT8
  Gene Name: septin 8
  Uniprot ID: Q92599
  ENSP ID: ENSP00000399840

SEQ ID NO: 77508 - protein, 130 aa, Homo sapiens
  Payload ID: 15454
  Gene Symbol: SEPT8
  Gene Name: septin 8
  ENSP ID: ENSP00000407421
MNTLFNTTFETEEASHHEACVRLRPQTYDLQESNVQLKLTIVDAVGFGDQINKDERPIVDYIDAQFENYLQEELKIRRSLFDYHDTRIHVCLYFITPTGHSLKSLDLVTMKKLDSKVNIIPIIAKADTIS

SEQ ID NO: 77509 - protein, 97 aa, Homo sapiens
  Payload ID: 15454
  Gene Symbol: SEPT8
  Gene Name: septin 8
  ENSP ID: ENSP00000411823
MNTLFNTTFETEEASHHEACVRLRPQTYDLQESNVQLKLTIVDAVGFGDQINKDESYRPIVDYIDAQFENYLQEELKIRRSLFDYHDTRIHVCLYFI

SEQ ID NO: 77510 - protein, 426 aa, Homo sapiens
  Payload ID: 15454
  Gene Symbol: SEPT8
  Gene Name: septin 8
  ENSP ID: ENSP00000483876
MAATDLERFSNAEPEPRSLSLGGHVGFDSLPDQLVSKSVTQGFSFNILCVGETGIGKSTLMNTLFNTTFETEEASHHEACVRLRPQTYDLQESNVQLKLTIVDAVSGEGVSCLYRPIVDYIDAQFENYLQEELKIRRSLFDYHDTRIHVCLYFITPTGHSLKSLDLVTMKKLDSKVNIIPIIAKADTISKSELHKFKIKIMGELVSNGVQIYQFPTDDEAVAEINAVMNAHLPFAVVGSTEEVKVGNKLVRARQYPWGVVQVENENHCDFVKLREMLIRVNMEDLREQTHSRHYELYRRCKLEEMGFQDSDGDSQPFSLQETYEAKRKEFLSELQRKEEEMRQMFVNKVKETELELKEKERELHEKFEHLKRVHQEEKRKVEEKRRELEEETNAFNRRKAAVEALQSQALHATSQQPLRKDKDKKN

SEQ ID NO: 77511 - protein, 568 aa, Homo sapiens
  Payload ID: 15455
  Gene Symbol: SEPT9
  Gene Name: septin 9
  Uniprot ID: Q9UHD8
  ENSP ID: ENSP00000329161
MERDRISALKRSFEVEEVETPNSTPPRRVQTPLLRATVASSTQKFQDLGVKNSEPSARHVDSLSQRSPKASLRRVELSGPKAAEPVSRRTELSIDISSKQVENAGAIGPSRFGLKRAEVLGHKTPEPAPRRTEITIVKPQESAHRRMEPPASKVPEVPTAPATDAAPKRVEIQMPKPAEAPTAPSPAQTLENSEPAPVSQLQSRLEPKPQPPVAEATPRSQEATEAAPSCVGDMADTPRDAGLKQAPASRNEKAPVDFGYVGIDSILEQMRRKAMKQGFEFNIMVVGQSGLGKSTLINTLFKSKISRKSVQPTSEERIPKTIEIKSITHDIEEKGVRMKLTVIDTPGFGDHINNENCWQPIMKFINDQYEKYLQEEVNINRKKRIPDTRVHCCLYFIPATGHSLRPLDIEFMKRLSKVVNIVPVIAKADTLTLEERVHFKQRITADLLSNGIDVYPQKEFDEDSEDRLVNEKFREMIPFAVVGSDHEYQVNGKRILGRKTKWGTIEVENTTHCEFAYLRDLLIRTHMQNIKDITSSIHFEAYRVKRLNEGSSAMANGMEEKEPEAPEM

SEQ ID NO: 77512 - protein, 586 aa, Homo sapiens
  Payload ID: 15455
  Gene Symbol: SEPT9
  Gene Name: septin 9
  Uniprot ID: Q9UHD8
  ENSP ID: ENSP00000391249
MKKSYSGGTRTSSGRLRRLGDSSGPALKRSFEVEEVETPNSTPPRRVQTPLLRATVASSTQKFQDLGVKNSEPSARHVDSLSQRSPKASLRRVELSGPKAAEPVSRRTELSIDISSKQVENAGAIGPSRFGLKRAEVLGHKTPEPAPRRTEITIVKPQESAHRRMEPPASKVPEVPTAPATDAAPKRVEIQMPKPAEAPTAPSPAQTLENSEPAPVSQLQSRLEPKPQPPVAEATPRSQEATEAAPSCVGDMADTPRDAGLKQAPASRNEKAPVDFGYVGIDSILEQMRRKAMKQGFEFNIMVVGQSGLGKSTLINTLFKSKISRKSVQPTSEERIPKTIEIKSITHDIEEKGVRMKLTVIDTPGFGDHINNENCWQPIMKFINDQYEKYLQEEVNINRKKRIPDTRVHCCLYFIPATGHSLRPLDIEFMKRLSKVVNIVPVIAKADTLTLEERVHFKQRITADLLSNGIDVYPQKEFDEDSEDRLVNEKFREMIPFAVVGSDHEYQVNGKRILGRKTKWGTIEVENTTHCEFAYLRDLLIRTHMQNIKDITSSIHFEAYRVKRLNEGSSAMANGMEEKEPEAPEM

SEQ ID NO: 77513 - protein, 422 aa, Homo sapiens
  Payload ID: 15455
  Gene Symbol: SEPT9
  Gene Name: septin 9
  Uniprot ID: Q9UHD8
  ENSP ID: ENSP00000400181
MEPPASKVPEVPTAPATDAAPKRVEIQMPKPAEAPTAPSPAQTLENSEPAPVSQLQSRLEPKPQPPVAEATPRSQEATEAAPSCVGDMADTPRDAGLKQAPASRNEKAPVDFGYVGIDSILEQMRRKAMKQGFEFNIMVVGQSGLGKSTLINTLFKSKISRKSVQPTSEERIPKTIEIKSITHDIEEKGVRMKLTVIDTPGFGDHINNENCWQPIMKFINDQYEKYLQEEVNINRKKRIPDTRVHCCLYFIPATGHSLRPLDIEFMKRLSKVVNIVPVIAKADTLTLEERVHFKQRITADLLSNGIDVYPQKEFDEDSEDRLVNEKFREMIPFAVVGSDHEYQVNGKRILGRKTKWGTIEVENTTHCEFAYLRDLLIRTHMQNIKDITSSIHFEAYRVKRLNEGSSAMANGMEEKEPEAPEM

SEQ ID NO: 77514 - protein, 422 aa, Homo sapiens; identical to SEQ ID NO: 77513
  Payload ID: 15455
  Gene Symbol: SEPT9
  Gene Name: septin 9
  Uniprot ID: Q9UHD8
  ENSP ID: ENSP00000403194

SEQ ID NO: 77515 - protein, 579 aa, Homo sapiens
  Payload ID: 15455
  Gene Symbol: SEPT9
  Gene Name: septin 9
  Uniprot ID: Q9UHD8
  ENSP ID: ENSP00000405877
MSDPAVNAQLDGIISDFEALKRSFEVEEVETPNSTPPRRVQTPLLRATVASSTQKFQDLGVKNSEPSARHVDSLSQRSPKASLRRVELSGPKAAEPVSRRTELSIDISSKQVENAGAIGPSRFGLKRAEVLGHKTPEPAPRRTEITIVKPQESAHRRMEPPASKVPEVPTAPATDAAPKRVEIQMPKPAEAPTAPSPAQTLENSEPAPVSQLQSRLEPKPQPPVAEATPRSQEATEAAPSCVGDMADTPRDAGLKQAPASRNEKAPVDFGYVGIDSILEQMRRKAMKQGFEFNIMVVGQSGLGKSTLINTLFKSKISRKSVQPTSEERIPKTIEIKSITHDIEEKGVRMKLTVIDTPGFGDHINNENCWQPIMKFINDQYEKYLQEEVNINRKKRIPDTRVHCCLYFIPATGHSLRPLDIEFMKRLSKVVNIVPVIAKADTLTLEERVHFKQRITADLLSNGIDVYPQKEFDEDSEDRLVNEKFREMIPFAVVGSDHEYQVNGKRILGRKTKWGTIEVENTTHCEFAYLRDLLIRTHMQNIKDITSSIHFEAYRVKRLNEGSSAMANGMEEKEPEAPEM

SEQ ID NO: 77516 - protein, 422 aa, Homo sapiens; identical to SEQ ID NO: 77513
  Payload ID: 15455
  Gene Symbol: SEPT9
  Gene Name: septin 9
  Uniprot ID: Q9UHD8
  ENSP ID: ENSP00000406987

SEQ ID NO: 77517 - protein, 474 aa, Homo sapiens
  Payload ID: 15455
  Gene Symbol: SEPT9
  Gene Name: septin 9
  Uniprot ID: Q9UHD8
  ENSP ID: ENSP00000415624
MGSSFWEGLQVAVGLPQGCWPQGLDSGEPAEGGQLEAAPVCIVTRQSKETAGPTLGRGGWRQGSLRRGKGTSCRCRQLSPGHGPGRLTGCGECHRLPCRGLVSGFTGLRGQEEDDLAFCLATIGSDRQATEAAPSCVGDMADTPRDAGLKQAPASRNEKAPVDFGYVGIDSILEQMRRKAMKQGFEFNIMVVGQSGLGKSTLINTLFKSKISRKSVQPTSEERIPKTIEIKSITHDIEEKGVRMKLTVIDTPGFGDHINNENCWQPIMKFINDQYEKYLQEEVNINRKKRIPDTRVHCCLYFIPATGHSLRPLDIEFMKRLSKVVNIVPVIAKADTLTLEERVHFKQRITADLLSNGIDVYPQKEFDEDSEDRLVNEKFREMIPFAVVGSDHEYQVNGKRILGRKTKWGTIEVENTTHCEFAYLRDLLIRTHMQNIKDITSSIHFEAYRVKRLNEGSSAMANGMEEKEPEAPEM

SEQ ID NO: 77518 - protein, 335 aa, Homo sapiens
  Payload ID: 15455
  Gene Symbol: SEPT9
  Gene Name: septin 9
  Uniprot ID: Q9UHD8
  ENSP ID: ENSP00000438089
MADTPRDAGLKQAPASRNEKAPVDFGYVGIDSILEQMRRKAMKQGFEFNIMVVGQSGLGKSTLINTLFKSKISRKSVQPTSEERIPKTIEIKSITHDIEEKGVRMKLTVIDTPGFGDHINNENCWQPIMKFINDQYEKYLQEEVNINRKKRIPDTRVHCCLYFIPATGHSLRPLDIEFMKRLSKVVNIVPVIAKADTLTLEERVHFKQRITADLLSNGIDVYPQKEFDEDSEDRLVNEKFREMIPFAVVGSDHEYQVNGKRILGRKTKWGTIEVENTTHCEFAYLRDLLIRTHMQNIKDITSSIHFEAYRVKRLNEGSSAMANGMEEKEPEAPEM

SEQ ID NO: 77519 - protein, 209 aa, Homo sapiens
  Payload ID: 15455
  Gene Symbol: SEPT9
  Gene Name: septin 9
  ENSP ID: ENSP00000464832
MADTPRDAGLKQAPASRNEKAPVDFGYVGIDSILEQMRRKAMKQGFEFNIMVVGQSGLGKSTLINTLFKSKISRKSVQPTSEERIPKTIEIKSITHDIEEKGVRMKLTVIDTPGFGDHINNENCWQPIMKFINDQYEKYLQEEVNINRKKRIPDTRVHCCLYFIPATGHSLRPLDIEFMKRLSKVVNIVPVIAKADTLTLEERVHFKQR

SEQ ID NO: 77520 - protein, 134 aa, Homo sapiens
  Payload ID: 15455
  Gene Symbol: SEPT9
  Gene Name: septin 9
  ENSP ID: ENSP00000465026
MKDFGSRQEFDSVENAGAIGPSRFGLKRAEVLGHKTPEPAPRRTEITIVKPQESAHRRMEPPASKVPEVPTAPATDAAPKRVEIQMPKPAEAPTAPSPAQTLENSEPAPVSQLQSRLEPKPQPPVAEATPRSQE

SEQ ID NO: 77521 - protein, 125 aa, Homo sapiens
  Payload ID: 15455
  Gene Symbol: SEPT9
  Gene Name: septin 9
  ENSP ID: ENSP00000465332
MIICPTRPFTALKRSFEVEEVETPNSTPPRRVQTPLLRATVASSTQKFQDLGVKNSEPSARHVDSLSQRSPKASLRRVELSGPKAAEPVSRRTELSIDISSKQVENAGAIGPSRFGLKRAEVLGH

SEQ ID NO: 77522 - protein, 195 aa, Homo sapiens
  Payload ID: 15455
  Gene Symbol: SEPT9
  Gene Name: septin 9
  ENSP ID: ENSP00000465415
MADTPRDAGLKQAPASRNEKAPVDFGYVGIDSILEQMRRKAMKQGFEFNIMVVGQSGLGKSTLINTLFKSKISRKSVQPTSEERIPKTIEIKSITHDIEEKGVRMKLTVIDTPGFGDHINNENCWQPIMKFINDQYEKYLQEEVNINRKKRIPDTRVHCCLYFIPATGHSLRPLDIEFMKRLSKVVNIVPVIAKA

SEQ ID NO: 77523 - protein, 568 aa, Homo sapiens; identical to SEQ ID NO: 77511
  Payload ID: 15455
  Gene Symbol: SEPT9
  Gene Name: septin 9
  Uniprot ID: Q9UHD8
  ENSP ID: ENSP00000465464

SEQ ID NO: 77524 - protein, 23 aa, Homo sapiens
  Payload ID: 15455
  Gene Symbol: SEPT9
  Gene Name: septin 9
  ENSP ID: ENSP00000465600
MHLAAEHCVCDSPPSSWNHPPQV

SEQ ID NO: 77525 - protein, 209 aa, Homo sapiens; identical to SEQ ID NO: 77519
  Payload ID: 15455
  Gene Symbol: SEPT9
  Gene Name: septin 9
  ENSP ID: ENSP00000465904

SEQ ID NO: 77526 - protein, 144 aa, Homo sapiens
  Payload ID: 15455
  Gene Symbol: SEPT9
  Gene Name: septin 9
  ENSP ID: ENSP00000466115
MADTPRDAGLKQAPASRNEKAPVDFGYVGIDSILEQMRRKAMKQGFEFNIMVVGQSGLGKSTLINTLFKSKISRKSVQPTSEERIPKTIEIKSITHDIEEKGVRMKLTVIDTPGFGDHINNENCWQPIMKFINDQYEKYLQEEV

SEQ ID NO: 77527 - protein, 159 aa, Homo sapiens
  Payload ID: 15455
  Gene Symbol: SEPT9
  Gene Name: septin 9
  ENSP ID: ENSP00000466164
MGSFRTSKMPKPAEAPTAPSPAQTLENSEPAPVSQLQSRLEPKPQPPVAEATPRSQEATEAAPSCVGDMADTPRDAGLKQAPASRNEKAPVDFGYVGIDSILEQMRRKAMKQGFEFNIMVVGQSGLGKSTLINTLFKSKISRKSVQPTSEERIPKTIEI

SEQ ID NO: 77528 - protein, 107 aa, Homo sapiens
  Payload ID: 15455
  Gene Symbol: SEPT9
  Gene Name: septin 9
  ENSP ID: ENSP00000466170
MADTPRDAGLKQAPASRNEKAPVDFGYVGIDSILEQMRRKAMKQGFEFNIMVVGQSGLGKSTLINTLFKSKISRKSVQPTSEERIPKTIEIKSITHDIEEKGVRMKL

SEQ ID NO: 77529 - protein, 135 aa, Homo sapiens
  Payload ID: 15455
  Gene Symbol: SEPT9
  Gene Name: septin 9
  ENSP ID: ENSP00000466201
MADTPRDAGLKQAPASRNEKAPVDFGYVGIDSILEQMRRKAMKQGFEFNIMVVGQSGLGKSTLINTLFKSKISRKSVQPTSEERIPKTIEIKSITHDIEEKGVRMKLTVIDTPGFGDHINNENCWQPIMKFINDQ

SEQ ID NO: 77530 - protein, 335 aa, Homo sapiens; identical to SEQ ID NO: 77518
  Payload ID: 15455
  Gene Symbol: SEPT9
  Gene Name: septin 9
  Uniprot ID: Q9UHD8
  ENSP ID: ENSP00000466247

SEQ ID NO: 77531 - protein, 104 aa, Homo sapiens
  Payload ID: 15455
  Gene Symbol: SEPT9
  Gene Name: septin 9
  ENSP ID: ENSP00000466532
MADTPRDAGLKQAPASRNEKAPVDFGYVGIDSILEQMRRKAMKQGFEFNIMVVGQSGLGKSTLINTLFKSKISRKSVQPTSEERIPKTIEIKSITHDIEEKGVR

SEQ ID NO: 77532 - protein, 335 aa, Homo sapiens; identical to SEQ ID NO: 77518
  Payload ID: 15455
  Gene Symbol: SEPT9
  Gene Name: septin 9
  Uniprot ID: Q9UHD8
  ENSP ID: ENSP00000466648

SEQ ID NO: 77533 - protein, 44 aa, Homo sapiens
  Payload ID: 15455
  Gene Symbol: SEPT9
  Gene Name: septin 9
  ENSP ID: ENSP00000466684
MKKSYSDLLLDPCISNLASLHCARFSGARHRRICSCLVIFDSAR

SEQ ID NO: 77534 - protein, 152 aa, Homo sapiens
  Payload ID: 15455
  Gene Symbol: SEPT9
  Gene Name: septin 9
  ENSP ID: ENSP00000466997
MTSMSAGTINTLKRSFEVEEVETPNSTPPRRVQTPLLRATVASSTQKFQDLGVKNSEPSARHVDSLSQRSPKASLRRVELSGPKAAEPVSRRTELSIDISSKQVENAGAIGPSRFGLKRAEVLGHKTPEPAPRRTEITIVKPQESAHRRMEP

SEQ ID NO: 77535 - protein, 189 aa, Homo sapiens
  Payload ID: 15455
  Gene Symbol: SEPT9
  Gene Name: septin 9
  ENSP ID: ENSP00000467051
MPKPAEAPTAPSPAQTLENSEPAPVSQLQSRLEPKPQPPVAEATPRSQEATEAAPSCVGDMADTPRDAGLKQAPASRNEKAPVDFGYVGIDSILEQMRRKAMKQGFEFNIMVVGESSPCMPLNQCRKPASAPRAAHKPLGLVFPSVKWGSNPDLKDGLPVTLRVHACAWEEPTASSGSSEGPVLHIQGP

SEQ ID NO: 77536 - protein, 57 aa, Homo sapiens
  Payload ID: 15455
  Gene Symbol: SEPT9
  Gene Name: septin 9
  ENSP ID: ENSP00000467619
MADTPRDAGLKQAPASRNEKAPVDFGYVGIDSILEQMRRKAMKQGFEFNIMVVERLG

SEQ ID NO: 77537 - protein, 165 aa, Homo sapiens
  Payload ID: 15455
  Gene Symbol: SEPT9
  Gene Name: septin 9
  ENSP ID: ENSP00000467780
MADTPRDAGLKQAPASRNEKAPVDFGYVGIDSILEQMRRKAMKQGFEFNIMVVGQSGLGKSTLINTLFKSKISRKSVQPTSEERIPKTIEIKSITHDIEEKGVRMKLTVIDTPGFGDHINNENCWQPIMKFINDQYEKYLQEEVNINRKKRIPDTRVHCCLYFIP

SEQ ID NO: 77538 - protein, 115 aa, Homo sapiens
  Payload ID: 15455
  Gene Symbol: SEPT9
  Gene Name: septin 9
  ENSP ID: ENSP00000467792
MADTPRDAGLKQAPASRNEKAPVDFGYVGIDSILEQMRRKAMKQGFEFNIMVVGQSGLGKSTLINTLFKSKISRKSVQPTSEERIPKTIEIKSITHDIEEKGVRMKLTVIDTPGF

SEQ ID NO: 77539 - protein, 157 aa, Homo sapiens
  Payload ID: 15455
  Gene Symbol: SEPT9
  Gene Name: septin 9
  ENSP ID: ENSP00000467908
MADTPRDAGLKQAPASRNEKAPVDFGYVGIDSILEQMRRKAMKQGFEFNIMVVGQSGLGKSTLINTLFKSKISRKSVQPTSEERIPKTIEIKSITHDIEEKGVRMKLTVIDTPGFGDHINNENCWQPIMKFINDQYEKYLQEEVNINRKKRIPDTRV

SEQ ID NO: 77540 - protein, 90 aa, Homo sapiens
  Payload ID: 15455
  Gene Symbol: SEPT9
  Gene Name: septin 9
  ENSP ID: ENSP00000468090
MKDFGSRQEFDSVENAGAIGPSRFGLKRAEVLGHKTPEPAPRRTEITIVKPQESAHRRMEPPASKPEVGAAHLRGAHPQDHRDQVHHARY

SEQ ID NO: 77541 - protein, 151 aa, Homo sapiens
  Payload ID: 15455
  Gene Symbol: SEPT9
  Gene Name: septin 9
  ENSP ID: ENSP00000468110
MADTPRDAGLKQAPASRNEKAPVDFGYVGIDSILEQMRRKAMKQGFEFNIMVVGQSGLGKSTLINTLFKSKISRKSVQPTSEERIPKTIEIKSITHDIEEKGVRMKLTVIDTPGFGDHINNENCWQPIMKFINDQYEKYLQEEVNINRKKR

SEQ ID NO: 77542 - protein, 362 aa, Homo sapiens
  Payload ID: 15455
  Gene Symbol: SEPT9
  Gene Name: septin 9
  Uniprot ID: Q9UHD8
  ENSP ID: ENSP00000468120
MAGAGCTGTWSWLWGTATEAAPSCVGDMADTPRDAGLKQAPASRNEKAPVDFGYVGIDSILEQMRRKAMKQGFEFNIMVVGQSGLGKSTLINTLFKSKISRKSVQPTSEERIPKTIEIKSITHDIEEKGVRMKLTVIDTPGFGDHINNENCWQPIMKFINDQYEKYLQEEVNINRKKRIPDTRVHCCLYFIPATGHSLRPLDIEFMKRLSKVVNIVPVIAKADTLTLEERVHFKQRITADLLSNGIDVYPQKEFDEDSEDRLVNEKFREMIPFAVVGSDHEYQVNGKRILGRKTKWGTIEVENTTHCEFAYLRDLLIRTHMQNIKDITSSIHFEAYRVKRLNEGSSAMANGMEEKEPEAPEM

SEQ ID NO: 77543 - protein, 35 aa, Homo sapiens
  Payload ID: 15455
  Gene Symbol: SEPT9
  Gene Name: septin 9
  ENSP ID: ENSP00000468244
MEPPASKVPEVPTAPATDAAPKRVEIQMPKPAEAP

SEQ ID NO: 77544 - protein, 567 aa, Homo sapiens
  Payload ID: 15455
  Gene Symbol: SEPT9
  Gene Name: septin 9
  Uniprot ID: Q9UHD8
  ENSP ID: ENSP00000468406
MKKSYSALKRSFEVEEVETPNSTPPRRVQTPLLRATVASSTQKFQDLGVKNSEPSARHVDSLSQRSPKASLRRVELSGPKAAEPVSRRTELSIDISSKQVENAGAIGPSRFGLKRAEVLGHKTPEPAPRRTEITIVKPQESAHRRMEPPASKVPEVPTAPATDAAPKRVEIQMPKPAEAPTAPSPAQTLENSEPAPVSQLQSRLEPKPQPPVAEATPRSQEATEAAPSCVGDMADTPRDAGLKQAPASRNEKAPVDFGYVGIDSILEQMRRKAMKQGFEFNIMVVGQSGLGKSTLINTLFKSKISRKSVQPTSEERIPKTIEIKSITHDIEEKGVRMKLTVIDTPGFGDHINNENCWQPIMKFINDQYEKYLQEEVNINRKKRIPDTRVHCCLYFIPATGHSLRPLDIEFMKRLSKVVNIVPVIAKADTLTLEERVHFKQRITADLLSNGIDVYPQKEFDEDSEDRLVNEKFREMIPFAVVGSDHEYQVNGKRILGRKTKWGTIEVENTTHCEFAYLRDLLIRTHMQNIKDITSSIHFEAYRVKRLNEGSSAMANGMEEKEPEAPEM

SEQ ID NO: 77545 - protein, 127 aa, Homo sapiens
  Payload ID: 15455
  Gene Symbol: SEPT9
  Gene Name: septin 9
  ENSP ID: ENSP00000468410
MADTPRDAGLKQAPASRNEKAPVDFGYVGIDSILEQMRRKAMKQGFEFNIMVVGQSGLGKSTLINTLFKSKISRKSVQPTSEERIPKTIEIKSITHDIEEKGVRMKLTVIDTPGFGDHINNENCWQP

SEQ ID NO: 77546 - protein, 151 aa, Homo sapiens
  Payload ID: 15455
  Gene Symbol: SEPT9
  Gene Name: septin 9
  ENSP ID: ENSP00000468504
MLWPEEEPWGGRCACVTEACPADAGPLTSRRGSLKRSFEVEEVETPNSTPPRRVQTPLLRATVASSTQKFQDLGVKNSEPSARHVDSLSQRSPKASLRRVELSGPKAAEPVSRRTELSIDISSKQVENAGAIGPSRFGLKRAEVLGHKTPE

SEQ ID NO: 77547 - protein, 422 aa, Homo sapiens; identical to SEQ ID NO: 77513
  Payload ID: 15455
  Gene Symbol: SEPT9
  Gene Name: septin 9
  Uniprot ID: Q9UHD8
  ENSP ID: ENSP00000468668

SEQ ID NO: 77548 - protein, 10 aa, Homo sapiens
  Payload ID: 15455
  Gene Symbol: SEPT9
  Gene Name: septin 9
  ENSP ID: ENSP00000487985
MIICPTRPFT

SEQ ID NO: 77549 - protein, 6 aa, Homo sapiens
  Payload ID: 15455
  Gene Symbol: SEPT9
  Gene Name: septin 9
  ENSP ID: ENSP00000488209
MKKSYS

SEQ ID NO: 77550 - protein, 44 aa, Homo sapiens; identical to SEQ ID NO: 77533
  Payload ID: 15455
  Gene Symbol: SEPT9
  Gene Name: septin 9
  ENSP ID: ENSP00000488513

SEQ ID NO: 77551 - protein, 6 aa, Homo sapiens
  Payload ID: 15455
  Gene Symbol: SEPT9
  Gene Name: septin 9
  ENSP ID: ENSP00000488820
MKKSYS

SEQ ID NO: 77552 - protein, 356 aa, Homo sapiens
  Payload ID: 15456
  Gene Symbol: SQSTM1
  Gene Name: sequestosome 1
  Uniprot ID: Q13501
  ENSP ID: ENSP00000353944
MAMSYVKDDIFRIYIKEKKECRRDHRPPCAQEAPRNMVHPNVICDGCNGPVVGTRYKCSVCPDYDLCSVCEGKGLHRGHTKLAFPSPFGHLSEGFSHSRWLRKVKHGHFGWPGWEMGPPGNWSPRPPRAGEARPGPTAESASGPSEDPSVNFLKNVGESVAAALSPLGIEVDIDVEHGGKRSRLTPVSPESSSTEEKSSSQPSSCCSDPSKPGGNVEGATQSLAEQMRKIALESEGRPEEQMESDNCSGGDDDWTHLSSKEVDPSTGELQSLQMPESEGPSSLDPSQEGPTGLKEAALYPHLPPEADPRLIESLSQMLSMGFSDEGGWLTRLLQTKNYDIGAALDTIQYSKHPPPL

SEQ ID NO: 77553 - protein, 440 aa, Homo sapiens
  Payload ID: 15456
  Gene Symbol: SQSTM1
  Gene Name: sequestosome 1
  Uniprot ID: Q13501
  ENSP ID: ENSP00000374455
MASLTVKAYLLGKEDAAREIRRFSFCCSPEPEAEAEAAAGPGPCERLLSRVAALFPALRPGGFQAHYRDEDGDLVAFSSDEELTMAMSYVKDDIFRIYIKEKKECRRDHRPPCAQEAPRNMVHPNVICDGCNGPVVGTRYKCSVCPDYDLCSVCEGKGLHRGHTKLAFPSPFGHLSEGFSHSRWLRKVKHGHFGWPGWEMGPPGNWSPRPPRAGEARPGPTAESASGPSEDPSVNFLKNVGESVAAALSPLGIEVDIDVEHGGKRSRLTPVSPESSSTEEKSSSQPSSCCSDPSKPGGNVEGATQSLAEQMRKIALESEGRPEEQMESDNCSGGDDDWTHLSSKEVDPSTGELQSLQMPESEGPSSLDPSQEGPTGLKEAALYPHLPPEADPRLIESLSQMLSMGFSDEGGWLTRLLQTKNYDIGAALDTIQYSKHPPPL

SEQ ID NO: 77554 - protein, 140 aa, Homo sapiens
  Payload ID: 15456
  Gene Symbol: SQSTM1
  Gene Name: sequestosome 1
  ENSP ID: ENSP00000394534
MAMSYVKDDIFRIYIKEKKECRRDHRPPCAQEAPRNMVHPNVICDGCNGPVVGTRYKCSVCPDYDLCSVCEGKGLHRGHTKLAFPSPFGHLSEGFSHSRWLRKVKHGHFGWPGWEMGPPGNWSPRPPRAGEARPGPTAES

SEQ ID NO: 77555 - protein, 73 aa, Homo sapiens
  Payload ID: 15456
  Gene Symbol: SQSTM1
  Gene Name: sequestosome 1
  ENSP ID: ENSP00000405061
MASLTVKAYLLGKEDAAREIRRFSFCCSPEPEAEAEAAAGPGPCERLLSRVAALFPALRPGGFQAHYRGGGFR

SEQ ID NO: 77556 - protein, 69 aa, Homo sapiens
  Payload ID: 15456
  Gene Symbol: SQSTM1
  Gene Name: sequestosome 1
  ENSP ID: ENSP00000424195
MASLTVKAYLLGKEDAAREIRRFSFCCSPEPEAEAEAAAGPGPCERLLSRVAALFPALRPGGFQAHYRG

SEQ ID NO: 77557 - protein, 378 aa, Homo sapiens
  Payload ID: 15456
  Gene Symbol: SQSTM1
  Gene Name: sequestosome 1
  ENSP ID: ENSP00000424477
MASLTVKAYLLGKEDAAREIRRFSFCCSPEPEAEAEAAAGPGPCERLLSRVAALFPALRPGGFQAHYRDEDGDLVAFSSDEELTMAMSYVKDDIFRIYIKEKKECRRDHRPPCAQEAPRNMVHPNVICDGCNGPVVGTRYKCSVCPDYDLCSVCEGKGLHRGHTKLAFPSPFGHLSEGFSHSRWLRKVKHGHFGWPGWEMGPPGNWSPRPPRAGEARPGPTAESASGPSEDPSVNFLKNVGESVAAALSPLGIEVDIDVEHGGKRSRLTPVSPESSSTEEKSSSQPSSCCSDPSKPGGNVEGATQSLAEQMRKIALECCPWASLMKAAGSPGSCRPRTMTSERLWTPSSIQSIPRRCDHFCPPLLRAPLLSHSCVKLA

SEQ ID NO: 77558 - protein, 190 aa, Homo sapiens
  Payload ID: 15456
  Gene Symbol: SQSTM1
  Gene Name: sequestosome 1
  ENSP ID: ENSP00000425957
MASLTVKAYLLGKEDAAREIRRFSFCCSPEPEAEAEAAAGPGPCERLLSRVAALFPALRPGGFQAHYRAHSSSLCPAENPWVLTCCLLNNLDEDGDLVAFSSDEELTMAMSYVKDDIFRIYIKEKKECRRDHRPPCAQEAPRNMVHPNVICDGCNGPVVGTRYKCSVCPDYDLCSVCEGKGLHRGHTKLA

SEQ ID NO: 77559 - protein, 167 aa, Homo sapiens
  Payload ID: 15456
  Gene Symbol: SQSTM1
  Gene Name: sequestosome 1
  ENSP ID: ENSP00000427308
MAMSYVKDDIFRIYIKEKKECRRDHRPPCAQEAPRNMVHPNVICDGCNGPVVGTRYKCSVCPDYDLCSVCEGKGLHRGHTKLAFPSPFGHLSEGFSHSRWLRKVKHGHFGWPGWEMGPPGNWSPRPPRAGEARPGPTAESASGPSEDPSVNFLKNVGESVAAALSPL

SEQ ID NO: 77560 - protein, 73 aa, Homo sapiens; identical to SEQ ID NO: 77555
  Payload ID: 15456
  Gene Symbol: SQSTM1
  Gene Name: sequestosome 1
  ENSP ID: ENSP00000487071

SEQ ID NO: 77561 - protein, 158 aa, Homo sapiens
  Payload ID: 15457
  Gene Symbol: SRGN
  Gene Name: serglycin
  Uniprot ID: P10124
  ENSP ID: ENSP00000242465
MMQKLLKCSRLVLALALILVLESSVQGYPTRRARYQWVRCNPDSNSANCLEEKGPMFELLPGESNKIPRLRTDLFPKTRIQDLNRIFPLSEDYSGSGFGSGSGSGSGSGSGFLTEMEQDYQLVDESDAFHDNLRSLDRNLPSDSQDLGQHGLEEDFML

SEQ ID NO: 77562 - protein, 531 aa, Homo sapiens
  Payload ID: 15458
  Gene Symbol: SERAC1
  Gene Name: serine active site containing 1
  Uniprot ID: Q96JX3
  ENSP ID: ENSP00000356068
MSLAAYCVICCRRIGTSTSPPKSGTHWRDIRNIIKFTGSLILGGSLFLTYEVLALKKAVTLDTQVVEREKMKSYIYVHTVSLDKGENHGIAWQARKELHKAVRKVLATSAKILRNPFADPFSTVDIEDHECAVWLLLRKSKSDDKTTRLEAVREMSETHHWHDYQYRIIAQACDPKTLIGLARSEESDLRFFLLPPPLPSLKEDSSTEEELRQLLASLPQTELDECIQYFTSLALSESSQSLAAQKGGLWCFGGNGLPYAESFGEVPSATVEMFCLEAIVKHSEISTHCDKIEANGGLQLLQRLYRLHKDCPKVQRNIMRVIGNMALNEHLHSSIVRSGWVSIMAEAMKSPHIMESSHAARILANLDRETVQEKYQDGVYVLHPQYRTSQPIKADVLFIHGLMGAAFKTWRQQDSEQAVIEKPMEDEDRYTTCWPKTWLAKDCPALRIISVEYDTSLSDWRARCPMERRSLLSISSGIVEGLESPLHSEATNFLGSSELLVLGIGQWFGYHIAWEVFLSKRCCWKPLRSQK

SEQ ID NO: 77563 - protein, 654 aa, Homo sapiens
  Payload ID: 15458
  Gene Symbol: SERAC1
  Gene Name: serine active site containing 1
  Uniprot ID: Q96JX3
  ENSP ID: ENSP00000356071
MSLAAYCVICCRRIGTSTSPPKSGTHWRDIRNIIKFTGSLILGGSLFLTYEVLALKKAVTLDTQVVEREKMKSYIYVHTVSLDKGENHGIAWQARKELHKAVRKVLATSAKILRNPFADPFSTVDIEDHECAVWLLLRKSKSDDKTTRLEAVREMSETHHWHDYQYRIIAQACDPKTLIGLARSEESDLRFFLLPPPLPSLKEDSSTEEELRQLLASLPQTELDECIQYFTSLALSESSQSLAAQKGGLWCFGGNGLPYAESFGEVPSATVEMFCLEAIVKHSEISTHCDKIEANGGLQLLQRLYRLHKDCPKVQRNIMRVIGNMALNEHLHSSIVRSGWVSIMAEAMKSPHIMESSHAARILANLDRETVQEKYQDGVYVLHPQYRTSQPIKADVLFIHGLMGAAFKTWRQQDSEQAVIEKPMEDEDRYTTCWPKTWLAKDCPALRIISVEYDTSLSDWRARCPMERKSIAFRSNELLRKLRAAGVGDRPVVWISHSMGGLLVKKMLLEASTKPEMSTVINNTRGIIFYSVPHHGSRLAEYSVNIRYLLFPSLEVKELSKDSPALKTLQDDFLEFAKDKNFQVLNFVETLPTYIGSMIKLHVVPVESADLGIGDLIPVDVNHLNICKPKKKDAFLYQRTLQFIREALAKDLEN

SEQ ID NO: 77564 - protein, 162 aa, Homo sapiens
  Payload ID: 15458
  Gene Symbol: SERAC1
  Gene Name: serine active site containing 1
  ENSP ID: ENSP00000391168
DEDRYTTCWPKTWLAKDCPALRIISVEYDTSLSDWRARCPMERKSIAFRSNELLRKLRAAGVGDRPVVWISHSMGGLLVKKMLLEASTKPEMSTVINNTRGIIFYSVPHHGSRLAEYSVNIRYLLFPSLEVKELSKGNTFCHKGNWGYINISYTEKKKKFLP

SEQ ID NO: 77565 - protein, 42 aa, Homo sapiens
  Payload ID: 15458
  Gene Symbol: SERAC1
  Gene Name: serine active site containing 1
  ENSP ID: ENSP00000475523
MSLAAYCVICCRRIGTSTSPPKSGTHWRDIKVLYFLHMKFWP

SEQ ID NO: 77566 - protein, 167 aa, Homo sapiens
  Payload ID: 15458
  Gene Symbol: SERAC1
  Gene Name: serine active site containing 1
  Uniprot ID: Q96JX3
  ENSP ID: ENSP00000475788
MSLAAYCVICCRRIGTSTSPPKSGTHWRDIRNIIKFTGSLILGGSLFLTYEVLALKKAVTLDTQVVEREKMKSYIYVHTVSLDKGENHGIAWQARKELHKAVRKVLATSAKILRNPFADPFSTVDIEDHECAVWLLLRKSKSDDKTTRLEAVREMSETHHWHGNETT

SEQ ID NO: 77567 - protein, 409 aa, Homo sapiens
  Payload ID: 15458
  Gene Symbol: SERAC1
  Gene Name: serine active site containing 1
  ENSP ID: ENSP00000475808
MSLAAYCVICCRRIGTSTSPPKSGTHWRDIRNIIKFTGSLILGGSLFLTYEVLALKKAVTLDTQVVEREKMKSYIYVHTVSLDKGENHGIAWQARKELHKAVRKVLATSAKILRNPFADPFSTVDIEDHECAVWLLLRKSKSDDKTTRLEAVREMSETHHWHDYQYRIIAQACDPKTLIGLARSEESDLRFFLLPPPLPSLKEDSSTEEELRQLLASLPQTELDECIQYFTSLALSESSQSLAAQKISTHCDKIEANGGLQLLQRLYRLHKDCPKVQRNIMRVIGNMALNEHLHSSIVRSGWVSIMAEAMKSPHIMESSHAARILANLDRETVQEKYQDGVYVLHPQYRTSQPIKADVLFIHGLMGAAFKTWRQQDSEQAVIEKPMEDEDRYTTCWPKKVHCIQKQRTS

SEQ ID NO: 77568 - protein, 42 aa, Homo sapiens; identical to SEQ ID NO: 77565
  Payload ID: 15458
  Gene Symbol: SERAC1
  Gene Name: serine active site containing 1
  ENSP ID: ENSP00000475855

SEQ ID NO: 77569 - protein, 452 aa, Homo sapiens
  Payload ID: 15459
  Gene Symbol: SCPEP1
  Gene Name: serine carboxypeptidase 1
  Uniprot ID: Q9HB40
  ENSP ID: ENSP00000262288
MELALRRSPVPRWLLLLPLLLGLNAGAVIDWPTEEGKEVWDYVTVRKDAYMFWWLYYATNSCKNFSELPLVMWLQGGPGGSSTGFGNFEEIGPLDSDLKPRKTTWLQAASLLFVDNPVGTGFSYVNGSGAYAKDLAMVASDMMVLLKTFFSCHKEFQTVPFYIFSESYGGKMAAGIGLELYKAIQRGTIKCNFAGVALGDSWISPVDSVLSWGPYLYSMSLLEDKGLAEVSKVAEQVLNAVNKGLYREATELWGKAEMIIEQNTDGVNFYNILTKSTPTSTMESSLEFTQSHLVCLCQRHVRHLQRDALSQLMNGPIRKKLKIIPEDQSWGGQATNVFVNMEEDFMKPVISIVDELLEAGINVTVYNGQLDLIVDTMGQEAWVRKLKWPELPKFSQLKWKALYSDPKSLETSAFVKSYKNLAFYWILKAGHMVPSDQGDMALKMMRLVTQQE

SEQ ID NO: 77570 - protein, 296 aa, Homo sapiens
  Payload ID: 15459
  Gene Symbol: SCPEP1
  Gene Name: serine carboxypeptidase 1
  Uniprot ID: Q9HB40
  ENSP ID: ENSP00000458587
MELALRRSPVPRWLLLLPLLLGLNAGAVIDWPTEEGKEVWDYVTVRKDAYMFWWLYYATNSCKNFSELPLVMWLQGGPGGSSTGFGNFEEIGPLDSDLKPRKTTWLQAASLLFVDNPVGTGFSYVNGSGAYAKDLAMVASDMMVLLKTFFSCHKEFQTVPFYIFSESYGGKMAAGIGLELYKAIQRGTIKCNFAGVALGDSWISPVDSVLSWGPYLYSMSLLEDKGLAEVSKVAEQVLNAVNKGLYREATELWGKAEMIIEQNTDGVNFYNILTKSTPTSTMESSLEFTQSHLVWF

SEQ ID NO: 77571 - protein, 69 aa, Homo sapiens
  Payload ID: 15459
  Gene Symbol: SCPEP1
  Gene Name: serine carboxypeptidase 1
  ENSP ID: ENSP00000458671
MELALRRSPVPRWLLLLPLLLGLNAGSMGLCDGPQGCLHVLVALLCHQLLQELLRTAPGHVASGRSRRF

SEQ ID NO: 77572 - protein, 147 aa, Homo sapiens
  Payload ID: 15459
  Gene Symbol: SCPEP1
  Gene Name: serine carboxypeptidase 1
  ENSP ID: ENSP00000459807
MELALRRSPVPRWLLLLPLLLGLNAGAVIDWPTEEGKEVWDYVTVRKDAYMFWWLYYATNSCKNFSELPLVMWLQGGPGGSSTGFGNFEEIGPFSEGPSSATLRGLPWVIPGSPLLIRCSPGDLTCTACLFSKTKVWQRCLRLQSKY

SEQ ID NO: 77573 - protein, 176 aa, Homo sapiens
  Payload ID: 15459
  Gene Symbol: SCPEP1
  Gene Name: serine carboxypeptidase 1
  ENSP ID: ENSP00000461663
MELALRRSPVPRWLLLLPLLLGLNAGAVIDWPTEEGKEVWDYVTVRKDAYMFWWLYYATNSCKNFSELPLVMWLQLQAASLLFVDNPVGTGFSYVNGSGAYAKDLAMVASDMMVLLKTFFSCHKEFQTVPFYIFSESYGGKMAAGIGLELYKAIQRGTIKCNFAGVALGDSWISPV

SEQ ID NO: 77574 - protein, 135 aa, Homo sapiens
  Payload ID: 15459
  Gene Symbol: SCPEP1
  Gene Name: serine carboxypeptidase 1
  ENSP ID: ENSP00000461678
  MOD_RES (1)..(1): Any amino acid
XTMESSLEFTQSHLGQATNVFVNMEEDFMKPVISIVDELLEAGINVTVYNGQLDLIVDTMGQEAWVRKLKWPELPKFSQLKWKALYSDPKSLETSAFVKSYKNLAFYWILKAGHMVPSDQGDMALKMMRLVTQQE

SEQ ID NO: 77575 - protein, 95 aa, Homo sapiens
  Payload ID: 15459
  Gene Symbol: SCPEP1
  Gene Name: serine carboxypeptidase 1
  ENSP ID: ENSP00000461694
MVASDMMVLLKTFFSCHKEFQTVPFYIFSESYGGKMAAGIGLELYKAIQRGTIKCNFAGVALGDSWISPVDSVLSWGPYLYSMSLLEDKGLAEVS

SEQ ID NO: 77576 - protein, 147 aa, Homo sapiens; identical to SEQ ID NO: 77572
  Payload ID: 15459
  Gene Symbol: SCPEP1
  Gene Name: serine carboxypeptidase 1
  ENSP ID: ENSP00000487541

SEQ ID NO: 77577 - protein, 328 aa, Homo sapiens
  Payload ID: 15460
  Gene Symbol: SDS
  Gene Name: serine dehydratase
  Uniprot ID: P20132
  ENSP ID: ENSP00000257549
MMSGEPLHVKTPIRDSMALSKMAGTSVYLKMDSAQPSGSFKIRGIGHFCKRWAKQGCAHFVCSSAGNAGMAAAYAARQLGVPATIVVPSTTPALTIERLKNEGATVKVVGELLDEAFELAKALAKNNPGWVYIPPFDDPLIWEGHASIVKELKETLWEKPGAIALSVGGGGLLCGVVQGLQEVGWGDVPVIAMETFGAHSFHAATTAGKLVSLPKITSVAKALGVKTVGAQALKLFQEHPIFSEVISDQEAVAAIEKFVDDEKILVEPACGAALAAVYSHVIQKLQLEGNLRTPLPSLVVIVCGGSNISLAQLRALKEQLGMTNRLPK

SEQ ID NO: 77578 - protein, 235 aa, Homo sapiens
  Payload ID: 15460
  Gene Symbol: SDS
  Gene Name: serine dehydratase
  ENSP ID: ENSP00000449061
MDDRKRAKRKSSYREQQPGPPRGRNALWGAADADRRGLGQERRGFTMLAGLKLLSSSDLPTSASRSAGTTSVSHRAQPFERFEAEELCVNGPVGMMSGEPLHVKTPIRDSMALSKMAGTSVYLKMDSAQPSGSFKIRGIGHFCKRWAKQGCAHFVCSSAGNAGMAAAYAARQLGVPATIVVPSTTPALTIERLKNEGATVKVVGELLDEAFELAKALAKNNPGWVYIPPFDDPLI

SEQ ID NO: 77579 - protein, 97 aa, Homo sapiens
  Payload ID: 15460
  Gene Symbol: SDS
  Gene Name: serine dehydratase
  ENSP ID: ENSP00000449833
MMSGEPLHVKTPIRDSMALSKMAGTSVYLKMDSAQPSGSFKIRGIGHFCKRGRPRFHRERAEGDTVGKAGGHRAVSGRRGPAVWSGPGAAGGGLGGR

SEQ ID NO: 77580 - protein, 329 aa, Homo sapiens
  Payload ID: 15461
  Gene Symbol: SDSL
  Gene Name: serine dehydratase-like
  Uniprot ID: Q96GA7
  ENSP ID: ENSP00000341117
MDGPVAEHAKQEPFHVVTPLLESWALSQVAGMPVFLKCENVQPSGSFKIRGIGHFCQEMAKKGCRHLVCSSGGNAGIAAAYAARKLGIPATIVLPESTSLQVVQRLQGEGAEVQLTGKVWDEANLRAQELAKRDGWENVPPFDHPLIWKGHASLVQELKAVLRTPPGALVLAVGGGGLLAGVVAGLLEVGWQHVPIIAMETHGAHCFNAAITAGKLVTLPDITSVAKSLGAKTVAARALECMQVCKIHSEVVEDTEAVSAVQQLLDDERMLVEPACGAALAAIYSGLLRRLQAEGCLPPSLTSVVVIVCGGNNINSRELQALKTHLGQV

SEQ ID NO: 77581 - protein, 329 aa, Homo sapiens; identical to SEQ ID NO: 77580
  Payload ID: 15461
  Gene Symbol: SDSL
  Gene Name: serine dehydratase-like
  Uniprot ID: Q96GA7
  ENSP ID: ENSP00000385790

SEQ ID NO: 77582 - protein, 29 aa, Homo sapiens
  Payload ID: 15461
  Gene Symbol: SDSL
  Gene Name: serine dehydratase-like
  ENSP ID: ENSP00000446867
MDGPVAEHAKQEPFHVVTPLLESWALSQV

SEQ ID NO: 77583 - protein, 172 aa, Homo sapiens
  Payload ID: 15461
  Gene Symbol: SDSL
  Gene Name: serine dehydratase-like
  ENSP ID: ENSP00000448868
MAKKGCRHLVCSSGGNAGIAAAYAARKLGIPATIVLPESTSLQVVQRLQGEGAEVQLTGKVWDEANLRAQELAKRDGWENVPPFDHPLIWKGHASLVQELKAVLRTPPGALVLAVGGGGLLAGVVAGLLEVGWQHVPIIAMETHGAHCFNAAITAGKLVTLPDITSVAKSLG

SEQ ID NO: 77584 - protein, 60 aa, Homo sapiens
  Payload ID: 15461
  Gene Symbol: SDSL
  Gene Name: serine dehydratase-like
  ENSP ID: ENSP00000448950
NAAITAGKLVTLPDITSVAKSLGAKTVAARALECMQVCKIHSEVVEDTEAVSAVQQLLGE

SEQ ID NO: 77585 - protein, 225 aa, Homo sapiens
  Payload ID: 15461
  Gene Symbol: SDSL
  Gene Name: serine dehydratase-like
  ENSP ID: ENSP00000449136
  MOD_RES (1)..(1): Any amino acid
XWPRRDADTWCAPQVWDEANLRAQELAKRDGWENVPPFDHPLIWKGHASLVQELKAVLRTPPGALVLAVGGGGLLAGVVAGLLEVGWQHVPIIAMETHGAHCFNAAITAGKLVTLPDITSVAKSLGAKTVAARALECMQVCKIHSEVVEDTEAVSAVQQLLDDERMLVEPACGAALAAIYSGLLRRLQAEGCLPPSLTSVVVIVCGGNNINSRELQALKTHLGQV

SEQ ID NO: 77586 - protein, 314 aa, Homo sapiens
  Payload ID: 15462
  Gene Symbol: SERHL2
  Gene Name: serine hydrolase-like 2
  Uniprot ID: Q9H4I8
  ENSP ID: ENSP00000331376
MSENAAPGLISELKLAVPWGHIAAKAWGSLQGPPVLCLHGWLDNASSFDRLIPLLPQDFYYVAMDFGGHGLSSHYSPGVPYYLQTFVSEIRRVVAALKWNRFSILGHSFGGVVGGMFFCTFPEMVDKLILLDTPLFLLESDEMENLLTYKRRAIEHVLQVEASQEPSHVFSLKQLLQRLLKSNSHLSEECGELLLQRGTTKVATGLVLNRDQRLAWAENSIDFISRELCAHSIRKLQAHVLLIKAVHGYFDSRQNYSEKESLSFMIDTMKSTLKEQFQFVEVPGNHCVHMSEPQHVASIISSFLQCTHMLPAQL

SEQ ID NO: 77587 - protein, 250 aa, Homo sapiens
  Payload ID: 15462
  Gene Symbol: SERHL2
  Gene Name: serine hydrolase-like 2
  Uniprot ID: Q9H4I8
  ENSP ID: ENSP00000336578
MSENAAPDFYYVAMDFGGHGLSSHYSPGVPYYLQTFVSEIRRVVAGGVVGGMFFCTFPEMVDKLILLDTPLFLLESDEMENLLTYKRRAIEHVLQVEASQEPSHVFSLKQLLQRLLKSNSHLSEECGELLLQRGTTKVATGLVLNRDQRLAWAENSIDFISRELCAHSIRKLQAHVLLIKAVHGYFDSRQNYSEKESLSFMIDTMKSTLKEQFQFVEVPGNHCVHMSEPQHVASIISSFLQCTHMLPAQL

SEQ ID NO: 77588 - protein, 203 aa, Homo sapiens
  Payload ID: 15462
  Gene Symbol: SERHL2
  Gene Name: serine hydrolase-like 2
  ENSP ID: ENSP00000342425
MSENAAPGLISELKLAVPWGHIAAKAWGSLQGPPVLCLHGWLDNASSFDRLIPLLPQDFYYVAMDFGGHGLSSHYSPGVPYYLQTFVSEIRRVVAALKWNRFSILGHSFGGVVGGMFFCTFPEMVDKLILLDTPLFLLESDEMENLLTYKRRAIEHVLQVEASQEPSHVFSLKQLLQRQRTALTSSAGSCVRIPSGSCRPMSC

SEQ ID NO: 77589 - protein, 134 aa, Homo sapiens
  Payload ID: 15462
  Gene Symbol: SERHL2
  Gene Name: serine hydrolase-like 2
  Uniprot ID: Q9H4I8
  ENSP ID: ENSP00000385691
MSENAAPGLISELLLQRGTTKVATGLVLNRDQRLAWAENSIDFISRELCAHSIRKLQAHVLLIKAVHGYFDSRQNYSEKESLSFMIDTMKSTLKEQFQFVEVPGNHCVHMSEPQHVASIISSFLQCTHMLPAQL

SEQ ID NO: 77590 - protein, 99 aa, Homo sapiens
  Payload ID: 15462
  Gene Symbol: SERHL2
  Gene Name: serine hydrolase-like 2
  ENSP ID: ENSP00000395860
MDFGGHGLSSHYSPGVPYYLQTFVSEIRRVVAALKWNRFSILGHSFGGVVGGMFFCTFPEMVDKLILLDTPLFLLESDEMENLLTYKRRAIEHVLQVEA

SEQ ID NO: 77591 - protein, 131 aa, Homo sapiens
  Payload ID: 15462
  Gene Symbol: SERHL2
  Gene Name: serine hydrolase-like 2
  ENSP ID: ENSP00000413512
MSENAAPGLISELKLAVPWGHIAAKAWGSLQGPPVLCLHGWLDNASSFDRLIPLLPQDFYYVAMDFGGHGLSSHYSPGVPYYLQTFVSEIRRVVAALKWNRFSILGHSFALLSPRWRRGRNVFLYLPRDGG

SEQ ID NO: 77592 - protein, 209 aa, Homo sapiens
  Payload ID: 15462
  Gene Symbol: SERHL2
  Gene Name: serine hydrolase-like 2
  ENSP ID: ENSP00000435091
MSENAAPGLISELKLAVPWGHIAAKAWGSLQGPPVLCLHGWLDNASSFDRLIPLLPQDFYYVAMDFGGHGLSSHYSPGVPYYLQTFVSEIRRVVAALKWNRFSILGHSFGGVVGGMFFCTFPEMVDKLILLDTPLFLLESDEMENLLTYKRRAIEHVLQVEASQEPSHVFSLKQLLQRLLKSNSHLSEECGELLLQRGTTKVATGREQH

SEQ ID NO: 77593 - protein, 444 aa, Homo sapiens
  Payload ID: 15463
  Gene Symbol: SHMT1
  Gene Name: serine hydroxymethyltransferase 1 (soluble)
  Uniprot ID: P34896
  ENSP ID: ENSP00000318805
MTMPVNGAHKDADLWSSHDKMLAQPLKDSDVEVYNIIKKESNRQRVGLELIASENFASRAVLEALGSCLNNKYSEGYPGQRYYGGTEFIDELETLCQKRALQAYKLDPQCWGVNVQPYSGSPANFAVYTALVEPHGRIMGLDLPDGGHLTHGFMTDKKKISATSIFFESMPYKVNPDTGYINYDQLEENARLFHPKLIIAGTSCYSRNLEYARLRKIADENGAYLMADMAHISGLVAAGVVPSPFEHCHVVTTTTHKTLRGCRAGMIFYRKGVAVALKQAMTLEFKVYQHQVVANCRALSEALTELGYKIVTGGSDNHLILVDLRSKGTDGGRAEKVLEACSIACNKNTCPGDRSALRPSGLRLGTPALTSRGLLEKDFQKVAHFIHRGIELTLQIQSDTGVRATLKEFKERLAGDKYQAAVQALREEVESFASLFPLPGLPDF

SEQ ID NO: 77594 - protein, 483 aa, Homo sapiens
  Payload ID: 15463
  Gene Symbol: SHMT1
  Gene Name: serine hydroxymethyltransferase 1 (soluble)
  Uniprot ID: P34896
  ENSP ID: ENSP00000318868
MTMPVNGAHKDADLWSSHDKMLAQPLKDSDVEVYNIIKKESNRQRVGLELIASENFASRAVLEALGSCLNNKYSEGYPGQRYYGGTEFIDELETLCQKRALQAYKLDPQCWGVNVQPYSGSPANFAVYTALVEPHGRIMGLDLPDGGHLTHGFMTDKKKISATSIFFESMPYKVNPDTGYINYDQLEENARLFHPKLIIAGTSCYSRNLEYARLRKIADENGAYLMADMAHISGLVAAGVVPSPFEHCHVVTTTTHKTLRGCRAGMIFYRKGVKSVDPKTGKEILYNLESLINSAVFPGLQGGPHNHAIAGVAVALKQAMTLEFKVYQHQVVANCRALSEALTELGYKIVTGGSDNHLILVDLRSKGTDGGRAEKVLEACSIACNKNTCPGDRSALRPSGLRLGTPALTSRGLLEKDFQKVAHFIHRGIELTLQIQSDTGVRATLKEFKERLAGDKYQAAVQALREEVESFASLFPLPGLPDF

SEQ ID NO: 77595 - protein, 345 aa, Homo sapiens
  Payload ID: 15463
  Gene Symbol: SHMT1
  Gene Name: serine hydroxymethyltransferase 1 (soluble)
  Uniprot ID: P34896
  ENSP ID: ENSP00000345881
MGLDLPDGGHLTHGFMTDKKKISATSIFFESMPYKVNPDTGYINYDQLEENARLFHPKLIIAGTSCYSRNLEYARLRKIADENGAYLMADMAHISGLVAAGVVPSPFEHCHVVTTTTHKTLRGCRAGMIFYRKGVKSVDPKTGKEILYNLESLINSAVFPGLQGGPHNHAIAGVAVALKQAMTLEFKVYQHQVVANCRALSEALTELGYKIVTGGSDNHLILVDLRSKGTDGGRAEKVLEACSIACNKNTCPGDRSALRPSGLRLGTPALTSRGLLEKDFQKVAHFIHRGIELTLQIQSDTGVRATLKEFKERLAGDKYQAAVQALREEVESFASLFPLPGLPDF

SEQ ID NO: 77596 - protein, 1 aa, Homo sapiens
  Payload ID: 15463
  Gene Symbol: SHMT1
  Gene Name: serine hydroxymethyltransferase 1 (soluble)
  ENSP ID: ENSP00000462041
M

SEQ ID NO: 77597 - protein, 128 aa, Homo sapiens
  Payload ID: 15463
  Gene Symbol: SHMT1
  Gene Name: serine hydroxymethyltransferase 1 (soluble)
  ENSP ID: ENSP00000462043
MTMPVNGAHKDADLWSSHDKMLAQPLKDSDVEVYNIIKKESNRQRVGLELIASENFASRAVLEALGSCLNNKYSEGYPGQRLPCKLCCVHCPGGTPWAHHGPGPSGWGPPDPWVHDRQEENLCHVHLL

SEQ ID NO: 77598 - protein, 167 aa, Homo sapiens
  Payload ID: 15463
  Gene Symbol: SHMT1
  Gene Name: serine hydroxymethyltransferase 1 (soluble)
  ENSP ID: ENSP00000462227
MTMPVNGAHKDADLWSSHDKMLAQPLKDSDVEVYNIIKKESNRQRVGLELIASENFASRAVLEALGSCLNNKYSEGYPGQRYYGGTEFIDELETLCQKRALQAYKLDPQCWGVNVQPYSGSPANFAVYTALVEPHGRIMGLDLPDGGHLTHGFMTDKKKISATSIFF

SEQ ID NO: 77599 - protein, 125 aa, Homo sapiens [sequence omitted]

SEQ ID NO: 77600 - protein, 504 aa, Homo sapiens
  Payload ID: 15464
  Gene Symbol: SHMT2
  Gene Name: serine hydroxymethyltransferase 2 (mitochondrial)
  Uniprot ID: P34897
  ENSP ID: ENSP00000333667
MLYFSLFWAARPLQRCGQLVRMAIRAQHSNAAQTQTGEANRGWTGQESLSDSDPEMWELLQREKDRQCRGLELIASENFCSRAALEALGSCLNNKYSEGYPGKRYYGGAEVVDEIELLCQRRALEAFDLDPAQWGVNVQPYSGSPANLAVYTALLQPHDRIMGLDLPDGGHLTHGYMSDVKRISATSIFFESMPYKLNPKTGLIDYNQLALTARLFRPRLIIAGTSAYARLIDYARMREVCDEVKAHLLADMAHISGLVAAKVIPSPFKHADIVTTTTHKTLRGARSGLIFYRKGVKAVDPKTGREIPYTFEDRINFAVFPSLQGGPHNHAIAAVAVALKQACTPMFREYSLQVLKNARAMADALLERGYSLVSGGTDNHLVLVDLRPKGLDGARAERVLELVSITANKNTCPGDRSAITPGGLRLGAPALTSRQFREDDFRRVVDFIDEGVNIGLEVKSKTAKLQDFKSFLLKDSETSQRLANLRQRVEQFARAFPMPGFDEH

SEQ ID NO: 77601 - protein, 483 aa, Homo sapiens
  Payload ID: 15464
  Gene Symbol: SHMT2
  Gene Name: serine hydroxymethyltransferase 2 (mitochondrial)
  Uniprot ID: P34897
  ENSP ID: ENSP00000406881
MAIRAQHSNAAQTQTGEANRGWTGQESLSDSDPEMWELLQREKDRQCRGLELIASENFCSRAALEALGSCLNNKYSEGYPGKRYYGGAEVVDEIELLCQRRALEAFDLDPAQWGVNVQPYSGSPANLAVYTALLQPHDRIMGLDLPDGGHLTHGYMSDVKRISATSIFFESMPYKLNPKTGLIDYNQLALTARLFRPRLIIAGTSAYARLIDYARMREVCDEVKAHLLADMAHISGLVAAKVIPSPFKHADIVTTTTHKTLRGARSGLIFYRKGVKAVDPKTGREIPYTFEDRINFAVFPSLQGGPHNHAIAAVAVALKQACTPMFREYSLQVLKNARAMADALLERGYSLVSGGTDNHLVLVDLRPKGLDGARAERVLELVSITANKNTCPGDRSAITPGGLRLGAPALTSRQFREDDFRRVVDFIDEGVNIGLEVKSKTAKLQDFKSFLLKDSETSQRLANLRQRVEQFARAFPMPGFDEH

SEQ ID NO: 77602 - protein, 483 aa, Homo sapiens; identical to SEQ ID NO: 77601
  Payload ID: 15464
  Gene Symbol: SHMT2
  Gene Name: serine hydroxymethyltransferase 2 (mitochondrial)
  Uniprot ID: P34897
  ENSP ID: ENSP00000413770

SEQ ID NO: 77603 - protein, 142 aa, Homo sapiens
  Payload ID: 15464
  Gene Symbol: SHMT2
  Gene Name: serine hydroxymethyltransferase 2 (mitochondrial)
  ENSP ID: ENSP00000450452
MAIRAQHSNAAQTQTGEANRGWTGQESLSDSDPEMWELLQREKDRQCRGLELIASENFCSRAALEALGSCLNNKYSEGYPGKRYYGGAEVVDEIELLCQRRALEAFDLDPAQWGVNVQPYSGSPANLAVYTALLQPHDRIMG

SEQ ID NO: 77604 - protein, 264 aa, Homo sapiens
  Payload ID: 15464
  Gene Symbol: SHMT2
  Gene Name: serine hydroxymethyltransferase 2 (mitochondrial)
  ENSP ID: ENSP00000450490
  MOD_RES (1)..(1): Any amino acid
XGLIDYNQLALTARLFRPRLIIAGTSAYARLIDYARMREVCDEVKAHLLADMAHISGLVAAKVIPSPFKHADIVTTTTHKTLRGARSGLIFYRKGVKAVDPKTGREIPYTFEDRINFAVFPSLQGGPHNHAIAAVAVALKQACTPMFREYSLQVLKNARAMADALLERGYSLVSGGTDNHLVLVDLRPKGLDGARAERVLELVSITANKNTCPGDRSAITPGGLRLGAPALTSRQFREDDFRRVVDFIDEGVNIGLEVKSKTGE

SEQ ID NO: 77605 - protein, 52 aa, Homo sapiens
  Payload ID: 15464
  Gene Symbol: SHMT2
  Gene Name: serine hydroxymethyltransferase 2 (mitochondrial)
  ENSP ID: ENSP00000450594
MGLDLPDGGHLTHGYMSDVKRISATSIFFESMPYKLNGFSCLCVCPAQNWPH

SEQ ID NO: 77606 - protein, 171 aa, Homo sapiens
  Payload ID: 15464
  Gene Symbol: SHMT2
  Gene Name: serine hydroxymethyltransferase 2 (mitochondrial)
  ENSP ID: ENSP00000450610
MLYFSLFWAARPLQRCGQLVRMAIRAQHSNAAQTQTGEANRGWTGQESLSDSDPEMWELLQREKDRQCRGLELIASENFCSRAALEALGSCLNNKYSEGYPGKRYYGGAEVVDEIELLCQRRALEAFDLDPAQWGVNVQPYSGSPANLAVYTALLQPHDRIMGLDLPDGGQ

SEQ ID NO: 77607 - protein, 160 aa, Homo sapiens
  Payload ID: 15464
  Gene Symbol: SHMT2
  Gene Name: serine hydroxymethyltransferase 2 (mitochondrial)
  ENSP ID: ENSP00000450893
MAIRAQHSNAAQTQTGEANRGWTGQESLSDSDPEMWELLQREKDRQCRGLELIASENFCSRAALEALGSCLNNKYSEGYPGKRYYGGAEVVDEIELLCQRRALEAFDLDPAQWGVNVQPYSGSPANLAVYTALLQPHDRIMGLDLPDGGHLTHGYMSDVK

SEQ ID NO: 77608 - protein, 65 aa, Homo sapiens
  Payload ID: 15464
  Gene Symbol: SHMT2
  Gene Name: serine hydroxymethyltransferase 2 (mitochondrial)
  ENSP ID: ENSP00000450927
MAIRAQHSNAAQTQTGEANRGWTGQESLSDSDPEMWELLQREKDRQCRGLELIASEILWGSRGGG

SEQ ID NO: 77609 - protein, 234 aa, Homo sapiens
  Payload ID: 15464
  Gene Symbol: SHMT2
  Gene Name: serine hydroxymethyltransferase 2 (mitochondrial)
  ENSP ID: ENSP00000450930
MGLDLPDGGHLTHGYMSDVKRISATSIFFESMPYKLNPKTGLIDYNQLALTARLFRPRLIIAGTSAYARLIDYARMREVCDEVKAHLLADMAHISGLVAAKVIPSPFKHADIVTTTTHKTLRGARSGLIFYRKGVKAVDPKTGREIPYTFEDRINFAVFPSLQGGPHNHAIAAVAVALKQACTPMFREYSLQVLKNARAMADALLERGYSLVSGGTDNHLVLVDLRPKGLDGAR

SEQ ID NO: 77610 - protein, 86 aa, Homo sapiens
  Payload ID: 15464
  Gene Symbol: SHMT2
  Gene Name: serine hydroxymethyltransferase 2 (mitochondrial)
  ENSP ID: ENSP00000451169
MLYFSLFWAARPLQRCGQLVRMAIRAQHSNAAQTQTGEANRGWTGQESLSDSDPEMWELLQREKDRQCRGLELIASEILWGSRGGG

SEQ ID NO: 77611 - protein, 192 aa, Homo sapiens
  Payload ID: 15464
  Gene Symbol: SHMT2
  Gene Name: serine hydroxymethyltransferase 2 (mitochondrial)
  ENSP ID: ENSP00000451371
MAIRAQHSNAAQTQTGEANRGWTGQESLSDSDPEMWELLQREKDRQCRGLELIASENFCSRAALEALGSCLNNKYSEGYPGKRYYGGAEVVDEIELLCQRRALEAFDLDPAQWGVNVQPYSGSPANLAVYTALLQPHDRIMGLDLPDGGHLTHGYMSDVKRISATSIFFESMPYKLNGFSCLCVCPAQNWPH

SEQ ID NO: 77612 - protein, 147 aa, Homo sapiens
  Payload ID: 15464
  Gene Symbol: SHMT2
  Gene Name: serine hydroxymethyltransferase 2 (mitochondrial)
  ENSP ID: ENSP00000451495
MAIRAQHSNAAQTQTGEANRGWTGQESLSDSDPEMWELLQREKDRQCRGLELIASENFCSRAALEALGSCLNNKYSEGYPGKRYYGGAEVVDEIELLCQRRALEAFDLDPAQWGVNVQPYSGSPANLAVYTALLQPHDRIMGLDLPD

SEQ ID NO: 77613 - protein, 86 aa, Homo sapiens; identical to SEQ ID NO: 77610
  Payload ID: 15464
  Gene Symbol: SHMT2
  Gene Name: serine hydroxymethyltransferase 2 (mitochondrial)
  ENSP ID: ENSP00000451630

SEQ ID NO: 77614 - protein, 65 aa, Homo sapiens; identical to SEQ ID NO: 77608
  Payload ID: 15464
  Gene Symbol: SHMT2
  Gene Name: serine hydroxymethyltransferase 2 (mitochondrial)
  ENSP ID: ENSP00000451872

SEQ ID NO: 77615 - protein, 149 aa, Homo sapiens
  Payload ID: 15464
  Gene Symbol: SHMT2
  Gene Name: serine hydroxymethyltransferase 2 (mitochondrial)
  ENSP ID: ENSP00000451968
MAIRAQHSNAAQTQTGEANRGWTGQESLSDSDPEMWELLQREKDRQCRGLELIASENFCSRAALEALGSCLNNKYSEGYPGKRYYGGAEVVDEIELLCQRRALEAFDLDPAQWGVNVQPYSGSPANLAVYTALLQPHDRIMGLDLPDGG

SEQ ID NO: 77616 - protein, 237 aa, Homo sapiens
  Payload ID: 15464
  Gene Symbol: SHMT2
  Gene Name: serine hydroxymethyltransferase 2 (mitochondrial)
  ENSP ID: ENSP00000452035
MLYFSLFWAARPLQRCGQLVRMAIRAQHSNAAQTQTGEANRGWTGQESLSDSDPEMWELLQREKDRQCRGLELIASENFCSRAALEALGSCLNNKYSEGYPGKRYYGGAEVVDEIELLCQRRALEAFDLDPAQWGVNVQPYSGSPANLAVYTALLQPHDRIMGLDLPDGGHLTHGYMSDVKRISATSIFFESMPYKLNVCDEVKAHLLADMAHISGLVAAKVIPSPFKHADIVTTTT

SEQ ID NO: 77617 - protein, 159 aa, Homo sapiens
  Payload ID: 15464
  Gene Symbol: SHMT2
  Gene Name: serine hydroxymethyltransferase 2 (mitochondrial)
  ENSP ID: ENSP00000452045
MAIRAQHSNAAQTQTGEANRGWTGQESLSDSDPEMWELLQREKDRQCRGLELIASENFCSRAALEALGSCLNNKYSEGYPGKRYYGGAEVVDEIELLCQRRALEAFDLDPAQWGVNVQPYSGSPANLAVYTALLQPHDRIMGLDLPDGGHLTHGYMSDV

SEQ ID NO: 77618 - protein, 147 aa, Homo sapiens; identical to SEQ ID NO: 77612
  Payload ID: 15464
  Gene Symbol: SHMT2
  Gene Name: serine hydroxymethyltransferase 2 (mitochondrial)
  ENSP ID: ENSP00000452161

SEQ ID NO: 77619 - protein, 192 aa, Homo sapiens; identical to SEQ ID NO: 77611
  Payload ID: 15464
  Gene Symbol: SHMT2
  Gene Name: serine hydroxymethyltransferase 2 (mitochondrial)
  ENSP ID: ENSP00000452163

SEQ ID NO: 77620 - protein, 494 aa, Homo sapiens
  Payload ID: 15464
  Gene Symbol: SHMT2
  Gene Name: serine hydroxymethyltransferase 2 (mitochondrial)
  Uniprot ID: P34897
  ENSP ID: ENSP00000452315
MLYFSLFWAARPLQRCGQLVRMAIRAQHSNAAQTQTGEANRGWTGQESLSDSDPEMWELLQREKDRQCRGLELIASENFCSRAALEALGSCLNNKYSEGYPGKRYYGGAEVVDEIELLCQRRALEAFDLDPAQWGVNVQPYSGSPANLAVYTALLQPHDRIMGLDLPDGGHLTHGYMSDVKRISATSIFFESMPYKLNLALTARLFRPRLIIAGTSAYARLIDYARMREVCDEVKAHLLADMAHISGLVAAKVIPSPFKHADIVTTTTHKTLRGARSGLIFYRKGVKAVDPKTGREIPYTFEDRINFAVFPSLQGGPHNHAIAAVAVALKQACTPMFREYSLQVLKNARAMADALLERGYSLVSGGTDNHLVLVDLRPKGLDGARAERVLELVSITANKNTCPGDRSAITPGGLRLGAPALTSRQFREDDFRRVVDFIDEGVNIGLEVKSKTAKLQDFKSFLLKDSETSQRLANLRQRVEQFARAFPMPGFDEH

SEQ ID NO: 77621 - protein, 65 aa, Homo sapiens; identical to SEQ ID NO: 77608
  Payload ID: 15464
  Gene Symbol: SHMT2
  Gene Name: serine hydroxymethyltransferase 2 (mitochondrial)
  ENSP ID: ENSP00000452339

SEQ ID NO: 77622 - protein, 215 aa, Homo sapiens
  Payload ID: 15464
  Gene Symbol: SHMT2
  Gene Name: serine hydroxymethyltransferase 2 (mitochondrial)
  ENSP ID: ENSP00000452404
MAIRAQHSNAAQTQTGEANRGWTGQESLSDSDPEMWELLQREKDRQCRGLELIASENFCSRAALEALGSCLNNKYSEGYPGKRYYGGAEVVDEIELLCQRRALEAFDLDPAQWGVNVQPYSGSPANLAVYTALLQPHDRIMGLDLPDGGHLTHGYMSDVKRISATSIFFESMPYKLNPKTGLIDYNQLALTARLFRPRLIIAGTSAYARLIDYAR

SEQ ID NO: 77623 - protein, 483 aa, Homo sapiens; identical to SEQ ID NO: 77601
  Payload ID: 15464
  Gene Symbol: SHMT2
  Gene Name: serine hydroxymethyltransferase 2 (mitochondrial)
  Uniprot ID: P34897
  ENSP ID: ENSP00000452419

SEQ ID NO: 77624 - protein, 453 aa, Homo sapiens
  Payload ID: 15465
  Gene Symbol: SERINC1
  Gene Name: serine incorporator 1
  Uniprot ID: Q9NRX5
  ENSP ID: ENSP00000342962
MGSVLGLCSMASWIPCLCGSAPCLLCRCCPSGNNSTVTRLIYALFLLVGVCVACVMLIPGMEEQLNKIPGFCENEKGVVPCNILVGYKAVYRLCFGLAMFYLLLSLLMIKVKSSSDPRAAVHNGFWFFKFAAAIAIIIGAFFIPEGTFTTVWFYVGMAGAFCFILIQLVLLIDFAHSWNESWVEKMEEGNSRCWYAALLSATALNYLLSLVAIVLFFVYYTHPASCSENKAFISVNMLLCVGASVMSILPKIQESQPRSGLLQSSVITVYTMYLTWSAMTNEPETNCNPSLLSIIGYNTTSTVPKEGQSVQWWHAQGIIGLILFLLCVFYSSIRTSNNSQVNKLTLTSDESTLIEDGGARSDGSLEDGDDVHRAVDNERDGVTYSYSFFHFMLFLASLYIMMTLTNWYRYEPSREMKSQWTAVWVKISSSWIGIVLYVWTLVAPLVLTNRDFD

SEQ ID NO: 77625 - protein, 455 aa, Homo sapiens
  Payload ID: 15466
  Gene Symbol: SERINC2
  Gene Name: serine incorporator 2
  Uniprot ID: Q96SA4
  ENSP ID: ENSP00000362813
MGACLGACSLLSCASCLCGSAPCILCSCCPASRNSTVSRLIFTFFLFLGVLVSIIMLSPGVESQLYKLPWVCEEGAGIPTVLQGHIDCGSLLGYRAVYRMCFATAAFFFFFTLLMLCVSSSRDPRAAIQNGFWFFKFLILVGLTVGAFYIPDGSFTNIWFYFGVVGSFLFILIQLVLLIDFAHSWNQRWLGKAEECDSRAWYAGLFFFTLLFYLLSIAAVALMFMYYTEPSGCHEGKVFISLNLTFCVCVSIAAVLPKVQDAQPNSGLLQASVITLYTMFVTWSALSSIPEQKCNPHLPTQLGNETVVAGPEGYETQWWDAPSIVGLIIFLLCTLFISLRSSDHRQVNSLMQTEECPPMLDATQQQQQVAACEGRAFDNEQDGVTYSYSFFHFCLVLASLHVMMTLTNWYKPGETRKMISTWTAVWVKICASWAGLLLYLWTLVAPLLLRNRDFS

SEQ ID NO: 77626 - protein, 464 aa, Homo sapiens
  Payload ID: 15466
  Gene Symbol: SERINC2
  Gene Name: serine incorporator 2
  Uniprot ID: Q96SA4
  ENSP ID: ENSP00000362814
MDGRMMRSMRLREEESPGPSHTASCLCGSAPCILCSCCPASRNSTVSRLIFTFFLFLGVLVSIIMLSPGVESQLYKLPWVCEEGAGIPTVLQGHIDCGSLLGYRAVYRMCFATAAFFFFFTLLMLCVSSSRDPRAAIQNGFWFFKFLILVGLTVGAFYIPDGSFTNIWFYFGVVGSFLFILIQLVLLIDFAHSWNQRWLGKAEECDSRAWYAGLFFFTLLFYLLSIAAVALMFMYYTEPSGCHEGKVFISLNLTFCVCVSIAAVLPKVQDAQPNSGLLQASVITLYTMFVTWSALSSIPEQKCNPHLPTQLGNETVVAGPEGYETQWWDAPSIVGLIIFLLCTLFISLRSSDHRQVNSLMQTEECPPMLDATQQQQQVAACEGRAFDNEQDGVTYSYSFFHFCLVLASLHVMMTLTNWYKPGETRKMISTWTAVWVKICASWAGLLLYLWTLVAPLLLRNRDFS

SEQ ID NO: 77627 - protein, 459 aa, Homo sapiens
  Payload ID: 15466
  Gene Symbol: SERINC2
  Gene Name: serine incorporator 2
  Uniprot ID: Q96SA4
  ENSP ID: ENSP00000439048
MGAEGAPDFLSCPRVRRASCLCGSAPCILCSCCPASRNSTVSRLIFTFFLFLGVLVSIIMLSPGVESQLYKLPWVCEEGAGIPTVLQGHIDCGSLLGYRAVYRMCFATAAFFFFFTLLMLCVSSSRDPRAAIQNGFWFFKFLILVGLTVGAFYIPDGSFTNIWFYFGVVGSFLFILIQLVLLIDFAHSWNQRWLGKAEECDSRAWYAGLFFFTLLFYLLSIAAVALMFMYYTEPSGCHEGKVFISLNLTFCVCVSIAAVLPKVQDAQPNSGLLQASVITLYTMFVTWSALSSIPEQKCNPHLPTQLGNETVVAGPEGYETQWWDAPSIVGLIIFLLCTLFISLRSSDHRQVNSLMQTEECPPMLDATQQQQQVAACEGRAFDNEQDGVTYSYSFFHFCLVLASLHVMMTLTNWYKPGETRKMISTWTAVWVKICASWAGLLLYLWTLVAPLLLRNRDFS

SEQ ID NO: 77628 - protein, 459 aa, Homo sapiens
  Payload ID: 15466
  Gene Symbol: SERINC2
  Gene Name: serine incorporator 2
  Uniprot ID: Q96SA4
  ENSP ID: ENSP00000444307
MRSMRLREEESPGPSHTASCLCGSAPCILCSCCPASRNSTVSRLIFTFFLFLGVLVSIIMLSPGVESQLYKLPWVCEEGAGIPTVLQGHIDCGSLLGYRAVYRMCFATAAFFFFFTLLMLCVSSSRDPRAAIQNGFWFFKFLILVGLTVGAFYIPDGSFTNIWFYFGVVGSFLFILIQLVLLIDFAHSWNQRWLGKAEECDSRAWYAGLFFFTLLFYLLSIAAVALMFMYYTEPSGCHEGKVFISLNLTFCVCVSIAAVLPKVQDAQPNSGLLQASVITLYTMFVTWSALSSIPEQKCNPHLPTQLGNETVVAGPEGYETQWWDAPSIVGLIIFLLCTLFISLRSSDHRQVNSLMQTEECPPMLDATQQQQQVAACEGRAFDNEQDGVTYSYSFFHFCLVLASLHVMMTLTNWYKPGETRKMISTWTAVWVKICASWAGLLLYLWTLVAPLLLRNRDFS

SEQ ID NO: 77629 - protein, 473 aa, Homo sapiens
  Payload ID: 15467
  Gene Symbol: SERINC3
  Gene Name: serine incorporator 3
  Uniprot ID: Q13530
  ENSP ID: ENSP00000255175
MGAVLGVFSLASWVPCLCSGASCLLCSCCPNSKNSTVTRLIYAFILLLSTVVSYIMQRKEMETYLKKIPGFCEGGFKIHEADINADKDCDVLVGYKAVYRISFAMAIFFFVFSLLMFKVKTSKDLRAAVHNGFWFFKIAALIGIMVGSFYIPGGYFSSVWFVVGMIGAALFILIQLVLLVDFAHSWNESWVNRMEEGNPRLWYAALLSFTSAFYILSIICVGLLYTYYTKPDGCTENKFFISINLILCVVASIISIHPKIQEHQPRSGLLQSSLITLYTMYLTWSAMSNEPDRSCNPNLMSFITRITAPTLAPGNSTAVVPTPTPPSKSGSLLDSDNFIGLFVFVLCLLYSSIRTSTNSQVDKLTLSGSDSVILGDTTTSGASDEEDGQPRRAVDNEKEGVQYSYSLFHLMLCLASLYIMMTLTSWYSPDAKFQSMTSKWPAVWVKISSSWVCLLLYVWTLVAPLVLTSRDFS

SEQ ID NO: 77630 - protein, 473 aa, Homo sapiens; identical to SEQ ID NO: 77629
  Payload ID: 15467
  Gene Symbol: SERINC3
  Gene Name: serine incorporator 3
  Uniprot ID: Q13530
  ENSP ID: ENSP00000340243

SEQ ID NO: 77631 - protein, 212 aa, Homo sapiens
  Payload ID: 15467
  Gene Symbol: SERINC3
  Gene Name: serine incorporator 3
  ENSP ID: ENSP00000414197
EHQPRSGLLQSSLITLYTMYLTWSAMSNEPDRSCNPNLMSFITRITAPTLAPGNSTAVVPTPTPPSKSGSLLDSDNFIGLFVFVLCLLYSSIRTSTNSQVDKLTLSGSDSVILGDTTTSGASDEEDGQPRRAVDNEKEGVQYSYSLFHLMLCLASLYIMMTLTSWYSPDAKFQSMTSKWPAVWVKISSSWVCLLLYVWTLVAPLVLTSRDFS

SEQ ID NO: 77632 - protein, 426 aa, Homo sapiens
  Payload ID: 15468
  Gene Symbol: SERINC4
  Gene Name: serine incorporator 4
  ENSP ID: ENSP00000299969
MVGAKAGPSPGTSLGLAQQHSGGSSVLVKSPFCQVCCCGPAPCASCCHSRWPSLTASTCSRLFYILLHVGASAICCLLLSRTVVERVWGKTHRIQMPSGLCAHLFGLSDCPVLSGSGAVYRVCAGTATFHLLQAVLLVHLHSPTSPRAQLHNSFWLLKLLFLLGLCAIAFCIPDEHLFPAWHYIGICGGFAFILLQLVLITAFAHSWNKNWQTGAAQDCSWFLAVLLATLGFYSMAGVGAVLLFHYYTHPAGCLLNKMLLSLHLCFCGLISFLSIAPCIRLTMRPPTWLRYLDPCGLSRFTAMSFRSPHCVSAALKQWRQTKGKGVGLRGQLTKKPLQLLQSKSSIFPTTILPSTSSSSLPHSMSWLPLPTGSAMREQNWKRPSSRVAGPPSGSRLPHAGPAYSSIWGCYWHHSVGPPPRNPSPLS

SEQ ID NO: 77633 - protein, 518 aa, Homo sapiens
  Payload ID: 15468
  Gene Symbol: SERINC4
  Gene Name: serine incorporator 4
  Uniprot ID: A6NH21
  ENSP ID: ENSP00000319796
MVGAKAGPSPGTSLGLAQQHSGGSSVLVKSPFCQVCCCGPAPCASCCHSRWPSLTASTCSRLFYILLHVGASAICCLLLSRTVVERVWGKTHRIQMPSGLCAHLFGLSDCPVLSGSGAVYRVCAGTATFHLLQAVLLVHLHSPTSPRAQLHNSFWLLKLLFLLGLCAIAFCIPDEHLFPAWHYIGICGGFAFILLQLVLITAFAHSWNKNWQTGAAQDCSWFLAVLLATLGFYSMAGVGAVLLFHYYTHPAGCLLNKMLLSLHLCFCGLISFLSIAPCIRLKQPRSGLLQASVISCYIMYLTFSALSSRPPERVILQGQNHTLCLPGLSKMEPQTPDISLAMLSASIMYACVLFACNEASYLAEVFGPLWIVKVYSYEFQKPSLCFCCPETVEADKGQRGGAARPADQETPPAPPVQVQHLSYNYSAFHFVFFLASLYVMVTLTNWFSYEGAELEKTFIKGSWATFWVKVASCWACVLLYLGLLLAPLCWPPTQKPQPLILRRRRHRIISPDNKYPPV

SEQ ID NO: 77634 - protein, 236 aa, Homo sapiens
  Payload ID: 15468
  Gene Symbol: SERINC4
  Gene Name: serine incorporator 4
  ENSP ID: ENSP00000399074
  MOD_RES (1)..(1): Any amino acid
XMPSGLCAHLFGLSDCPVLSGSGAVYRVCAGTATFHLLQAVLLVHLHSPTSPRAQLHNSFWLLKLLFLLGLCAIAFCIPDEHLFPAWHYIGICGGFAFILLQLVLITAFAHSWNKNWQTGAAQDCSWFLAVLLATLGFYSMAGVGAVLLFHYYTHPAGCLLNKMLLSLHLCFCGLISFLSIAPCIRLSGATPLWPPTSFCHQLLYHVSDFLCTVQPSSRESNPSRTESHPVPAWPE

SEQ ID NO: 77635 - protein, 96 aa, Homo sapiens
  Payload ID: 15468
  Gene Symbol: SERINC4
  Gene Name: serine incorporator 4
  ENSP ID: ENSP00000402868
MVGAKAGPSPGTSLGLAQQHSGGSSVLVKSPFCQQVSTSLPCICSTPRCAAVGLLLVPAAATLGGPLSPHPLAAACSTSSSMWGPQQSAASCCQGQ

SEQ ID NO: 77636 - protein, 89 aa, Homo sapiens
  Payload ID: 15468
  Gene Symbol: SERINC4
  Gene Name: serine incorporator 4
  ENSP ID: ENSP00000408781
  MOD_RES (1)..(1): Any amino acid
XSGLCAHLFGLSDCPVLSGSGAVYRVCAGTATFHLLQAVLLVHLHSPTSPRAQLHNSMALHWHLWRLCIHPTAVGAYYSFCPFLEQELQ

SEQ ID NO: 77637 - protein, 417 aa, Homo sapiens
  Payload ID: 15469
  Gene Symbol: SERINC5
  Gene Name: serine incorporator 5
  ENSP ID: ENSP00000420863
MSAQCCAGQLACCCGSAGCSLCCDCCPRIRQSLSTRFMYALYFILVVVLCCIMMSTTVAHKMKEHIPFFEDMCKGIKAGDTCEKLVGYSAVYRVCFGMACFFFIFCLLTLKINNSKSCRAHIHNGFWFFKLLLLGAMCSGAFFIPDQDTFLNAWRYVGAVGGFLFIGIQLLLLVEFAHKWNKNWTAGTASNKLWYASLALVTLIMYSIATGGLVLMAVFYTQKDSCMENKILLGVNGGLCLLISLVAISPWVQNRQPHSGLLQSGVISCYVTYLTFSALSSKPAEVVLDEHGKNVTICVPDFGQDLYRDENLVTILGTSLLIGCILYSCLTSTTRSSSDALQGRYAAPELEIARCCFCFSPGGEDTEEQQPGKEGPRVIYDEKKGTVYIYSYFHFVFFLASLYVMMTVTNWFKSGPF

SEQ ID NO: 77638 - protein, 417 aa, Homo sapiens
  Payload ID: 15469
  Gene Symbol: SERINC5
  Gene Name: serine incorporator 5
  Uniprot ID: Q86VE9
  ENSP ID: ENSP00000421665
MSAQCCAGQLACCCGSAGCSLCCDCCPRIRQSLSTRFMYALYFILVVVLCCIMMSTTVAHKMKEHIPFFEDMCKGIKAGDTCEKLVGYSAVYRVCFGMACFFFIFCLLTLKINNSKSCRAHIHNGFWFFKLLLLGAMCSGAFFIPDQDTFLNAWRYVGAVGGFLFIGIQLLLLVEFAHKWNKNWTAGTASNKLWYASLALVTLIMYSIATGGLVLMAVFYTQKDSCMENKILLGVNGGLCLLISLVAISPWVQNRQPHSGLLQSGVISCYVTYLTFSALSSKPAEVVLDEHGKNVTICVPDFGQDLYRDENLVTILGTSLLIGCILYSCLTSTTRSSSDALQGRYAAPELEIARCCFCFSPGGEDTEEQQPGKEGPRVIYDEKKGTVYIYSYFHFVFFLASLYVMMTVTNWFKNYQC

SEQ ID NO: 77639 - protein, 420 aa, Homo sapiens
  Payload ID: 15469
  Gene Symbol: SERINC5
  Gene Name: serine incorporator 5
  Uniprot ID: Q86VE9
  ENSP ID: ENSP00000426134
MSAQCCAGQLACCCGSAGCSLCCDCCPRIRQSLSTRFMYALYFILVVVLCCIMMSTTVAHKMKEHIPFFEDMCKGIKAGDTCEKLVGYSAVYRVCFGMACFFFIFCLLTLKINNSKSCRAHIHNGFWFFKLLLLGAMCSGAFFIPDQDTFLNAWRYVGAVGGFLFIGIQLLLLVEFAHKWNKNWTAGTASNKLWYASLALVTLIMYSIATGGLVLMAVFYTQKDSCMENKILLGVNGGLCLLISLVAISPWVQNRQPHSGLLQSGVISCYVTYLTFSALSSKPAEVVLDEHGKNVTICVPDFGQDLYRDENLVTILGTSLLIGCILYSCLTSTTRSSSDALQGRYAAPELEIARCCFCFSPGGEDTEEQQPGKEGPRVIYDEKKGTVYIYSYFHFVFFLASLYVMMTVTNWFKSAFHLLP

SEQ ID NO: 77640 - protein, 461 aa, Homo sapiens
  Payload ID: 15469
  Gene Symbol: SERINC5
  Gene Name: serine incorporator 5
  Uniprot ID: Q86VE9
  ENSP ID: ENSP00000426237
MSAQCCAGQLACCCGSAGCSLCCDCCPRIRQSLSTRFMYALYFILVVVLCCIMMSTTVAHKMKEHIPFFEDMCKGIKAGDTCEKLVGYSAVYRVCFGMACFFFIFCLLTLKINNSKSCRAHIHNGFWFFKLLLLGAMCSGAFFIPDQDTFLNAWRYVGAVGGFLFIGIQLLLLVEFAHKWNKNWTAGTASNKLWYASLALVTLIMYSIATGGLVLMAVFYTQKDSCMENKILLGVNGGLCLLISLVAISPWVQNRQPHSGLLQSGVISCYVTYLTFSALSSKPAEVVLDEHGKNVTICVPDFGQDLYRDENLVTILGTSLLIGCILYSCLTSTTRSSSDALQGRYAAPELEIARCCFCFSPGGEDTEEQQPGKEGPRVIYDEKKGTVYIYSYFHFVFFLASLYVMMTVTNWFNYESANIESFFSGSWSIFWVKMASCWICVLLYLCTLVAPLCCPTREFSV

SEQ ID NO: 77641 - protein, 456 aa, Homo sapiens
  Payload ID: 15469
  Gene Symbol: SERINC5
  Gene Name: serine incorporator 5
  ENSP ID: ENSP00000488864
MSAQCCAGQLACCCGSAGCSLCCDCCPRIRQSLSTRFMYALYFILVVVLCCIMMSTTVAHKMKEHIPFFEDMCKGIKAGDTCEKLVGYSAVYRVCFGMACFFFIFCLLTLKINNSKSCRAHIHNGFWFFKLLLLGAMCSGAFFIPDQDTFLNAWRYVGAVGGFLFIGIQLLLLVEFAHKWNKNWTAGTASNKLWYASLALVTLIMYSIATGGLVLMAVFYTQKDSCMENKILLGVNGGLCLLISLVAISPWVQNRQPHSGLLQSGVISCYVTYLTFSALSSKPAEVDEHGKNVTICVPDFGQDLYRDENLVTILGTSLLIGCILYSCLTSTTRSSSDALQGRYAAPELEIARCCFCFSPGGEDTEEQQPGKEGPRVIYDEKKGTVYIYSYFHFVFFLASLYVMMTVTNWFKWSPTLLPRLEYSGMILAHCNLHLPDVKRFSCLSLPSSWGYRHVPP

SEQ ID NO: 77642 - protein, 473 aa, Homo sapiens
  Payload ID: 15470
  Gene Symbol: SPTLC1
  Gene Name: serine palmitoyltransferase, long chain base subunit 1
  Uniprot ID: O15269
  ENSP ID: ENSP00000262554
MATATEQWVLVEMVQALYEAPAYHLILEGILILWIIRLLFSKTYKLQERSDLTVKEKEELIEEWQPEPLVPPVPKDHPALNYNIVSGPPSHKTVVNGKECINFASFNFLGLLDNPRVKAAALASLKKYGVGTCGPRGFYGTFDVHLDLEDRLAKFMKTEEAIIYSYGFATIASAIPAYSKRGDIVFVDRAACFAIQKGLQASRSDIKLFKHNDMADLERLLKEQEIEDQKNPRKARVTRRFIVVEGLYMNTGTICPLPELVKLKYKYKARIFLEESLSFGVLGEHGRGVTEHYGINIDDIDLISANMENALASIGGFCCGRSFVIDHQRLSGQGYCFSASLPPLLAAAAIEALNIMEENPGIFAVLKEKCGQIHKALQGISGLKVVGESLSPAFHLQLEESTGSREQDVRLLQEIVDQCMNRSIALTQARYLEKEEKCLPPPSIRVVVTVEQTEEELERAASTIKEVAQAVLL

SEQ ID NO: 77643 - protein, 143 aa, Homo sapiens
  Payload ID: 15470
  Gene Symbol: SPTLC1
  Gene Name: serine palmitoyltransferase, long chain base subunit 1
  Uniprot ID: O15269
  ENSP ID: ENSP00000337635
MATATEQWVLVEMVQALYEAPAYHLILEGILILWIIRLLFSKTYKLQERSDLTVKEKEELIEEWQPEPLVPPVPKDHPALNYNIVSGPPSHKTVVNGKECINFASFNFLGLLDNPRVKAAALASLKKYGVGTCGPRGFYGTFE

SEQ ID NO: 77644 - protein, 562 aa, Homo sapiens
  Payload ID: 15471
  Gene Symbol: SPTLC2
  Gene Name: serine palmitoyltransferase, long chain base subunit 2
  Uniprot ID: O15270
  ENSP ID: ENSP00000216484
MRPEPGGCCCRRTVRANGCVANGEVRNGYVRSSAAAAAAAAAGQIHHVTQNGGLYKRPFNEAFEETPMLVAVLTYVGYGVLTLFGYLRDFLRYWRIEKCHHATEREEQKDFVSLYQDFENFYTRNLYMRIRDNWNRPICSVPGARVDIMERQSHDYNWSFKYTGNIIKGVINMGSYNYLGFARNTGSCQEAAAKVLEEYGAGVCSTRQEIGNLDKHEELEELVARFLGVEAAMAYGMGFATNSMNIPALVGKGCLILSDELNHASLVLGARLSGATIRIFKHNNMQSLEKLLKDAIVYGQPRTRRPWKKILILVEGIYSMEGSIVRLPEVIALKKKYKAYLYLDEAHSIGALGPTGRGVVEYFGLDPEDVDVMMGTFTKSFGASGGYIGGKKELIDYLRTHSHSAVYATSLSPPVVEQIITSMKCIMGQDGTSLGKECVQQLAENTRYFRRRLKEMGFIIYGNEDSPVVPLMLYMPAKIGAFGREMLKRNIGVVVVGFPATPIIESRARFCLSAAHTKEILDTALKEIDEVGDLLQLKYSRHRLVPLLDRPFDETTYEETED

SEQ ID NO: 77645 - protein, 40 aa, Homo sapiens
  Payload ID: 15471
  Gene Symbol: SPTLC2
  Gene Name: serine palmitoyltransferase, long chain base subunit 2
  ENSP ID: ENSP00000451029
HSAVYATSLSPPVVEQIITSMKCIMGQDGTSLGLFCFLSP

SEQ ID NO: 77646 - protein, 407 aa, Homo sapiens
  Payload ID: 15471
  Gene Symbol: SPTLC2
  Gene Name: serine palmitoyltransferase, long chain base subunit 2
  ENSP ID: ENSP00000452189
  MOD_RES (1)..(1): Any amino acid
XETPMLVAVLTYVGYGVLTLFGYLRDFLRYWRIEKCHHATEREEQKDFVSLYQDFENFYTRNLYMRIRDNWNRPICSVPGARVDIMERQSHDYNWSFKYTGNIIKGVINMGSYNYLGFARNTGSCQEAAAKVLEEYGAGVCSTRQEIGNLDKHEELEELVARFLGVEAAMAYGMGFATNSMNIPALVGKGCLILSDELNHASLVLGARLSGATIRIFKHNNMQSLEKLLKDAIVYGQPRTRRPWKKILILVEGIYSMEGSIVRLPEVIALKKKYKAYLYLDEAHSIGALGPTGRGVVEYFGLDPEDVDVMMGTFTKSFGASGGYIGGKKELIDYLRTHSHSAVYATSLSPPVVEQIITSMKCIMGQDGTSLGNGITIHEVVQTRNTYHRFSPLSPVFSHQCLWIMLP

SEQ ID NO: 77647 - protein, 552 aa, Homo sapiens
  Payload ID: 15472
  Gene Symbol: SPTLC3
  Gene Name: serine palmitoyltransferase, long chain base subunit 3
  Uniprot ID: Q9NUV7
  ENSP ID: ENSP00000381968
MANPGGGAVCNGKLHNHKKQSNGSQSRNCTKNGIVKEAQQNGKPHFYDKLIVESFEEAPLHVMVFTYMGYGIGTLFGYLRDFLRNWGIEKCNAAVERKEQKDFVPLYQDFENFYTRNLYMRIRDNWNRPICSAPGPLFDLMERVSDDYNWTFRFTGRVIKDVINMGSYNFLGLAAKYDESMRTIKDVLEVYGTGVASTRHEMGTLDKHKELEDLVAKFLNVEAAMVFGMGFATNSMNIPALVGKGCLILSDELNHTSLVLGARLSGATIRIFKHNNTQSLEKLLRDAVIYGQPRTRRAWKKILILVEGVYSMEGSIVHLPQIIALKKKYKAYLYIDEAHSIGAVGPTGRGVTEFFGLDPHEVDVLMGTFTKSFGASGGYIAGRKDLVDYLRVHSHSAVYASSMSPPIAEQIIRSLKLIMGLDGTTQGLQRVQQLAKNTRYFRQRLQEMGFIIYGNENASVVPLLLYMPGKVAAFARHMLEKKIGVVVVGFPATPLAEARARFCVSAAHTREMLDTVLEALDEMGDLLQLKYSRHKKSARPELYDETSFELED

SEQ ID NO: 77648 - protein, 139 aa, Homo sapiens
  Payload ID: 15472
  Gene Symbol: SPTLC3
  Gene Name: serine palmitoyltransferase, long chain base subunit 3
  ENSP ID: ENSP00000389749
MANPGGGAVCNGKLHNHKKQSNGSQSRNCTKNGIVKEAQQNGKPHFYDKLIVESFEEAPLHVMVFTYMGYGIGTLFGYLRDFLRNWGIEKCNAAVERKEQKDFVPLYQDFENFYTRNLYMRIRDNWNRPICSAPGPLFD

SEQ ID NO: 77649 - protein, 215 aa, Homo sapiens
  Payload ID: 15472
  Gene Symbol: SPTLC3
  Gene Name: serine palmitoyltransferase, long chain base subunit 3
  ENSP ID: ENSP00000409125
NCTKNGIVKEAQQNGKPHFYDKLIVESFEEAPLHVMVFTYMGYGIGTLFGYLRDFLRNWGIEKCNAAVERKEQKDFVPLYQDFENFYTRNLYMRIRDNWNRPICSAPGPLFDLMERVSDDYNWTFRFTGRVIKDVINMGSYNFLGLAAKYDESMRTIKDVLEVYGTGVASTRHEMGEFTSSWQNALCVGGVLQADSVPQGPPWSWKMGRHSSLLE

SEQ ID NO: 77650 - protein, 121 aa, Homo sapiens
  Payload ID: 15472
  Gene Symbol: SPTLC3
  Gene Name: serine palmitoyltransferase, long chain base subunit 3
  ENSP ID: ENSP00000409760
  MOD_RES (1)..(1): Any amino acid
XSPPIAEQIIRSLKLIMGLDGTTQGLQRVQQLAKNTRYFRQRLQEMGFIIYGNENASVVPLLLYMPGKVAAFARHMLEKKIGVVVVGFPATPLAEARARFCVSAAHTREMLDTVICCVMKI

SEQ ID NO: 77651 - protein, 71 aa, Homo sapiens
  Payload ID: 15473
  Gene Symbol: SPTSSA
  Gene Name: serine palmitoyltransferase, small subunit A
  Uniprot ID: Q969W0
  ENSP ID: ENSP00000298130
MAGMALARAWKQMSWFYYQYLLVTALYMLEPWERTVFNSMLVSIVGMALYTGYVFMPQHIMAILHYFEIVQ

SEQ ID NO: 77652 - protein, 76 aa, Homo sapiens
  Payload ID: 15474
  Gene Symbol: SPTSSB
  Gene Name: serine palmitoyltransferase, small subunit B
  Uniprot ID: Q8NFR3
  ENSP ID: ENSP00000352097
MDLRRVKEYFSWLYYQYQIISCCAVLEPWERSMFNTILLTIIAMVVYTAYVFIPIHIRLAWEFFSKICGYHSTISN

SEQ ID NO: 77653 - protein, 76 aa, Homo sapiens; identical to SEQ ID NO: 77652
  Payload ID: 15474
  Gene Symbol: SPTSSB
  Gene Name: serine palmitoyltransferase, small subunit B
  Uniprot ID: Q8NFR3
  ENSP ID: ENSP00000420115

SEQ ID NO: 77654 - protein, 76 aa, Homo sapiens; identical to SEQ ID NO: 77652
  Payload ID: 15474
  Gene Symbol: SPTSSB
  Gene Name: serine palmitoyltransferase, small subunit B
  Uniprot ID: Q8NFR3
  ENSP ID: ENSP00000480827

SEQ ID NO: 77655 - protein, 230 aa, Homo sapiens
  Payload ID: 15474
  Gene Symbol: SPTSSB
  Gene Name: serine palmitoyltransferase, small subunit B
  ENSP ID: ENSP00000483928
MDVGFQGRCSRWSRALRGRYSSAERKRRARQPREPREQAPRVSAPPGRLPAFFPQFALLPQSGPRLILCTCEWAHTSSPGTILSSISLGESTFLTINLLATAGKVAGCEWGGEGRFTRSEAPKLAASAKRLCFLRFLTNKWGGMLAWPPAAPARALGSLSSLMPSFRRSPAALTPGLLRPLAKVCSPMDAGRGLSLSALTQLRLKPQSSHLLPPVYPPAPLPPPKDVPLQ

SEQ ID NO: 77656 - protein, 79 aa, Homo sapiens
  Payload ID: 15475
  Gene Symbol: SPINK1
  Gene Name: serine peptidase inhibitor, Kazal type 1
  Uniprot ID: P00995
  ENSP ID: ENSP00000296695
MKVTGIFLLSALALLSLSGNTGADSLGREAKCYNELNGCTKIYDPVCGTDGNTYPNECVLCFENRKRQTSILIQKSGPC

SEQ ID NO: 77657 - protein, 65 aa, Homo sapiens
  Payload ID: 15475
  Gene Symbol: SPINK1
  Gene Name: serine peptidase inhibitor, Kazal type 1
  ENSP ID: ENSP00000427376
MKVTGIFLLSALALLSLSGNTGADSLGREAKCYNELNGCTKIYDPVCGTDGNTYPNECVLCFENR

SEQ ID NO: 77658 - protein, 94 aa, Homo sapiens
  Payload ID: 15476
  Gene Symbol: SPINK13
  Gene Name: serine peptidase inhibitor, Kazal type 13 (putative)
  Uniprot ID: Q1W4C9
  ENSP ID: ENSP00000381468
MAAFPHKIIFFLVCSTLTHVAFSGIFNKRDFTRWPKPRCKMYIPLDPDYNADCPNVTAPVCASNGHTFQNECFFCVEQREFHYRIKFEKYGKCD

SEQ ID NO: 77659 - protein, 94 aa, Homo sapiens; identical to SEQ ID NO: 77658
  Payload ID: 15476
  Gene Symbol: SPINK13
  Gene Name: serine peptidase inhibitor, Kazal type 13 (putative)
  Uniprot ID: Q1W4C9
  ENSP ID: ENSP00000421048

SEQ ID NO: 77660 - protein, 54 aa, Homo sapiens
  Payload ID: 15476
  Gene Symbol: SPINK13
  Gene Name: serine peptidase inhibitor, Kazal type 13 (putative)
  Uniprot ID: Q1W4C9
  ENSP ID: ENSP00000426279
MYIPLDPDYNADCPNVTAPVCASNGHTFQNECFFCVEQREFHYRIKFEKYGKCD

SEQ ID NO: 77661 - protein, 97 aa, Homo sapiens
  Payload ID: 15477
  Gene Symbol: SPINK14
  Gene Name: serine peptidase inhibitor, Kazal type 14 (putative)
  Uniprot ID: Q6IE38
  ENSP ID: ENSP00000349459
MAKSFPVFSLLSFILIHLVLSSVSGPRHWWPPRGIIKVKCPYEKVNLSWYNGTVNPCPGLYQPICGTNFITYDNPCILCVESLKSHGRIRFYHDGKC

SEQ ID NO: 77662 - protein, 47 aa, Homo sapiens
  Payload ID: 15477
  Gene Symbol: SPINK14
  Gene Name: serine peptidase inhibitor, Kazal type 14 (putative)
  ENSP ID: ENSP00000457038
MAKSFPVFSLLSFILIHLVLSSVSGPRHWWPPRGIIKEISWKNQVLP

SEQ ID NO: 77663 - protein, 84 aa, Homo sapiens
  Payload ID: 15478
  Gene Symbol: SPINK2
  Gene Name: serine peptidase inhibitor, Kazal type 2 (acrosin-trypsin inhibitor)
  Uniprot ID: P20155
  ENSP ID: ENSP00000248701
MALSVLRLALLLLAVTFAASLIPQFGLFSKYRTPNCSQYRLPGCPRHFNPVCGSDMSTYANECTLCMKIREGGHNIKIIRNGPC

SEQ ID NO: 77664 - protein, 119 aa, Homo sapiens
  Payload ID: 15478
  Gene Symbol: SPINK2
  Gene Name: serine peptidase inhibitor, Kazal type 2 (acrosin-trypsin inhibitor)
  ENSP ID: ENSP00000423858
MALSVLRLALLLLAVTFAGSARSGPGERGPPEKSGFGSQTGGGPCPAPGGLGDASLIPQFGLFSKYRTPNCSQYRLPGCPRHFNPVCGSDMSTYANECTLCMKIREGGHNIKIIRNGPC

SEQ ID NO: 77665 - protein, 134 aa, Homo sapiens
  Payload ID: 15478
  Gene Symbol: SPINK2
  Gene Name: serine peptidase inhibitor, Kazal type 2 (acrosin-trypsin inhibitor)
  ENSP ID: ENSP00000425961
MALSVLRLALLLLAVTFAGSARSGPGERGPPEKSGFGSQTGGGPCPAPGGLGDGTRAPVTGGSPEDLPASLIPQFGLFSKYRTPNCSQYRLPGCPRHFNPVCGSDMSTYANECTLCMKIREGGHNIKIIRNGPC

SEQ ID NO: 77666 - protein, 134 aa, Homo sapiens
  Payload ID: 15478
  Gene Symbol: SPINK2
  Gene Name: serine peptidase inhibitor, Kazal type 2 (acrosin-trypsin inhibitor)
  ENSP ID: ENSP00000477722
MALSVLRLALLLLAVTFAGSARSGPGERGPPEKSGFGSQTGGGPCPAPGGLGDGTRAPVTGGSPEDLPGKVVIILKSFEMDPADGAVYRKEDGETTFTGRLDKLHFPFFSFPVFLYMRFVNTHFLRAGMEDSHV

SEQ ID NO: 77667 - protein, 88 aa, Homo sapiens [sequence omitted]

SEQ ID NO: 77668 - protein, 103 aa, Homo sapiens [sequence omitted]

SEQ ID NO: 77669 - protein, 86 aa, Homo sapiens
  Payload ID: 15479
  Gene Symbol: SPINK4
  Gene Name: serine peptidase inhibitor, Kazal type 4
  Uniprot ID: O60575
  ENSP ID: ENSP00000369045
MAVRQWVIALALAALLVVDREVPVAAGKLPFSRMPICEHMVESPTCSQMSNLVCGTDGLTYTNECQLCLARIKTKQDIQIMKDGKC

SEQ ID NO: 77670 - protein, 109 aa, Homo sapiens
  Payload ID: 15479
  Gene Symbol: SPINK4
  Gene Name: serine peptidase inhibitor, Kazal type 4
  ENSP ID: ENSP00000369048
MILGIGSSPHLLWTLEGTHIWSLLGDASHTDRLPEAGAGKLLSEVPVAAGKLPFSRMPICEHMVESPTCSQMSNLVCGTDGLTYTNECQLCLARIKTKQDIQIMKDGKC

SEQ ID NO: 77671 - protein, 1064 aa, Homo sapiens
  Payload ID: 15480
  Gene Symbol: SPINK5
  Gene Name: serine peptidase inhibitor, Kazal type 5
  Uniprot ID: Q9NQ38
  ENSP ID: ENSP00000256084
MKIATVSVLLPLALCLIQDAASKNEDQEMCHEFQAFMKNGKLFCPQDKKFFQSLDGIMFINKCATCKMILEKEAKSQKRARHLARAPKATAPTELNCDDFKKGERDGDFICPDYYEAVCGTDGKTYDNRCALCAENAKTGSQIGVKSEGECKSSNPEQDVCSAFRPFVRDGRLGCTRENDPVLGPDGKTHGNKCAMCAELFLKEAENAKREGETRIRRNAEKDFCKEYEKQVRNGRLFCTRESDPVRGPDGRMHGNKCALCAEIFKQRFSEENSKTDQNLGKAEEKTKVKREIVKLCSQYQNQAKNGILFCTRENDPIRGPDGKMHGNLCSMCQAYFQAENEEKKKAEARARNKRESGKATSYAELCSEYRKLVRNGKLACTRENDPIQGPDGKVHGNTCSMCEVFFQAEEEEKKKKEGKSRNKRQSKSTASFEELCSEYRKSRKNGRLFCTRENDPIQGPDGKMHGNTCSMCEAFFQQEERARAKAKREAAKEICSEFRDQVRNGTLICTREHNPVRGPDGKMHGNKCAMCASVFKLEEEEKKNDKEEKGKVEAEKVKREAVQELCSEYRHYVRNGRLPCTRENDPIEGLDGKIHGNTCSMCEAFFQQEAKEKERAEPRAKVKREAEKETCDEFRRLLQNGKLFCTRENDPVRGPDGKTHGNKCAMCKAVFQKENEERKRKEEEDQRNAAGHGSSGGGGGNTQDECAEYREQMKNGRLSCTRESDPVRDADGKSYNNQCTMCKAKLEREAERKNEYSRSRSNGTGSESGKDTCDEFRSQMKNGKLICTRESDPVRGPDGKTHGNKCTMCKEKLEREAAEKKKKEDEDRSNTGERSNTGERSNDKEDLCREFRSMQRNGKLICTRENNPVRGPYGKMHINKCAMCQSIFDREANERKKKDEEKSSSKPSNNAKDECSEFRNYIRNNELICPRENDPVHGADGKFYTNKCYMCRAVFLTEALERAKLQEKPSHVRASQEEDSPDSFSSLDSEMCKDYRVLPRIGYLCPKDLKPVCGDDGQTYNNPCMLCHENLIRQTNTHIRSTGKCEESSTPGTTAASMPPSDE

SEQ ID NO: 77672 - protein, 1094 aa, Homo sapiens
  Payload ID: 15480
  Gene Symbol: SPINK5
  Gene Name: serine peptidase inhibitor, Kazal type 5
  Uniprot ID: Q9NQ38
  ENSP ID: ENSP00000352936
MKIATVSVLLPLALCLIQDAASKNEDQEMCHEFQAFMKNGKLFCPQDKKFFQSLDGIMFINKCATCKMILEKEAKSQKRARHLARAPKATAPTELNCDDFKKGERDGDFICPDYYEAVCGTDGKTYDNRCALCAENAKTGSQIGVKSEGECKSSNPEQDVCSAFRPFVRDGRLGCTRENDPVLGPDGKTHGNKCAMCAELFLKEAENAKREGETRIRRNAEKDFCKEYEKQVRNGRLFCTRESDPVRGPDGRMHGNKCALCAEIFKQRFSEENSKTDQNLGKAEEKTKVKREIVKLCSQYQNQAKNGILFCTRENDPIRGPDGKMHGNLCSMCQAYFQAENEEKKKAEARARNKRESGKATSYAELCSEYRKLVRNGKLACTRENDPIQGPDGKVHGNTCSMCEVFFQAEEEEKKKKEGKSRNKRQSKSTASFEELCSEYRKSRKNGRLFCTRENDPIQGPDGKMHGNTCSMCEAFFQQEERARAKAKREAAKEICSEFRDQVRNGTLICTREHNPVRGPDGKMHGNKCAMCASVFKLEEEEKKNDKEEKGKVEAEKVKREAVQELCSEYRHYVRNGRLPCTRENDPIEGLDGKIHGNTCSMCEAFFQQEAKEKERAEPRAKVKREAEKETCDEFRRLLQNGKLFCTRENDPVRGPDGKTHGNKCAMCKAVFQKENEERKRKEEEDQRNAAGHGSSGGGGGNTQDECAEYREQMKNGRLSCTRESDPVRDADGKSYNNQCTMCKAKLEREAERKNEYSRSRSNGTGSESGKDTCDEFRSQMKNGKLICTRESDPVRGPDGKTHGNKCTMCKEKLEREAAEKKKKEDEDRSNTGERSNTGERSNDKEDLCREFRSMQRNGKLICTRENNPVRGPYGKMHINKCAMCQSIFDREANERKKKDEEKSSSKPSNNAKDQCRQVQNEAEDAKFRQPGRSLASVARMSTDECSEFRNYIRNNELICPRENDPVHGADGKFYTNKCYMCRAVFLTEALERAKLQEKPSHVRASQEEDSPDSFSSLDSEMCKDYRVLPRIGYLCPKDLKPVCGDDGQTYNNPCMLCHENLIRQTNTHIRSTGKCEESSTPGTTAASMPPSDE

SEQ ID NO: 77673 - protein, 916 aa, Homo sapiens
  Payload ID: 15480
  Gene Symbol: SPINK5
  Gene Name: serine peptidase inhibitor, Kazal type 5
  Uniprot ID: Q9NQ38
  ENSP ID: ENSP00000381472
MKIATVSVLLPLALCLIQDAASKNEDQEMCHEFQAFMKNGKLFCPQDKKFFQSLDGIMFINKCATCKMILEKEAKSQKRARHLARAPKATAPTELNCDDFKKGERDGDFICPDYYEAVCGTDGKTYDNRCALCAENAKTGSQIGVKSEGECKSSNPEQDVCSAFRPFVRDGRLGCTRENDPVLGPDGKTHGNKCAMCAELFLKEAENAKREGETRIRRNAEKDFCKEYEKQVRNGRLFCTRESDPVRGPDGRMHGNKCALCAEIFKQRFSEENSKTDQNLGKAEEKTKVKREIVKLCSQYQNQAKNGILFCTRENDPIRGPDGKMHGNLCSMCQAYFQAENEEKKKAEARARNKRESGKATSYAELCSEYRKLVRNGKLACTRENDPIQGPDGKVHGNTCSMCEVFFQAEEEEKKKKEGKSRNKRQSKSTASFEELCSEYRKSRKNGRLFCTRENDPIQGPDGKMHGNTCSMCEAFFQQEERARAKAKREAAKEICSEFRDQVRNGTLICTREHNPVRGPDGKMHGNKCAMCASVFKLEEEEKKNDKEEKGKVEAEKVKREAVQELCSEYRHYVRNGRLPCTRENDPIEGLDGKIHGNTCSMCEAFFQQEAKEKERAEPRAKVKREAEKETCDEFRRLLQNGKLFCTRENDPVRGPDGKTHGNKCAMCKAVFQKENEERKRKEEEDQRNAAGHGSSGGGGGNTQDECAEYREQMKNGRLSCTRESDPVRDADGKSYNNQCTMCKAKLEREAERKNEYSRSRSNGTGSESGKDTCDEFRSQMKNGKLICTRESDPVRGPDGKTHGNKCTMCKEKLEREAAEKKKKEDEDRSNTGERSNTGERSNDKEDLCREFRSMQRNGKLICTRENNPVRGPYGKMHINKCAMCQSIFDREANERKKKDEEKSSSKPSNNAKVIY

SEQ ID NO: 77674 - protein, 869 aa, Homo sapiens
  Payload ID: 15480
  Gene Symbol: SPINK5
  Gene Name: serine peptidase inhibitor, Kazal type 5
  ENSP ID: ENSP00000421519
MKIATVSVLLPLALCLIQDAASKNEDQDKKFFQSLDGIMFINKCATCKMILEKEAKSQKRARHLARAPKATAPTELNCDDFKKGERDGDFICPDYYEAVCGTDGKTYDNRCALCAENAKTGSQIGVKSEGECKSSNPEQDVCSAFRPFVRDGRLGCTRENDPVLGPDGKTHGNKCAMCAELFLKEAENAKREGETRIRRNAEKDFCKEYEKQVRNGRLFCTRESDPVRGPDGRMHGNKCALCAEIFKQRFSEENSKTDQNLGKAEEKTKVKREIVKLCSQYQNQAKNGILFCTRENDPIRGPDGKMHGNLCSMCQAYFQAENEEKKKAEARARNKRESGKATSYAELCSEYRKLVRNGKLACTRENDPIQGPDGKVHGNTCSMCEVFFQAEEEEKKKKEGKSRNKRQSKSTASFEELCSEYRKSRKNGRLFCTRENDPIQGPDGKMHGNTCSMCEAFFQQEERARAKAKREAAKEICSEFRDQVRNGTLICTREHNPVRGPDGKMHGNKCAMCASVFKLEEEEKKNDKEEKGKVEAEKVKREAVQELCSEYRHYVRNGRLPCTRENDPIEGLDGKIHGNTCSMCEAFFQQEAKEKERAEPRAKVKREAEKETCDEFRRLLQNGKLFCTRENDPVRGPDGKTHGNKCAMCKAVFQKENEERKRKEEEDQRNAAGHGSSGGGGGNTQDECAEYREQMKNGRLSCTRESDPVRDADGKSYNNQCTMCKAKLEREAERKNEYSRSRSNGTGSESGKDTCDEFRSQMKNGKLICTRESDPVRGPDGKTHGNKCTMCKEKLEREAAEKKKKEDEDRSNTGERSNTGERSNDKEDLCREFRSMQRNGKLICTRENNPVRGPYGKMHINKCAMCQSI

SEQ ID NO: 77675 - protein, 201 aa, Homo sapiens
  Payload ID: 15480
  Gene Symbol: SPINK5
  Gene Name: serine peptidase inhibitor, Kazal type 5
  ENSP ID: ENSP00000427943
MKIATVSVLLPLALCLIQDAASKNEDQEMCHEFQAFMKNGKLFCPQDKKFFQSLDGIMFINKCATCKMILEKEAKSQKRARHLARAPKATAPTELNCDDFKKGERDGDFICPDYYEAVCGTDGKTYDNRCALCAENAKTGSQIGVKSEGECKSSNPEQFCEPVMVGEGEGRKDLIHVTLVFFQEIGSKLMARTVLCLSSGT

SEQ ID NO: 77676 - protein, 68 aa, Homo sapiens
  Payload ID: 15480
  Gene Symbol: SPINK5
  Gene Name: serine peptidase inhibitor, Kazal type 5
  ENSP ID: ENSP00000430264
MKIATVSVLLPLALCLIQDAASKNEDQDKKFFQSLDGIMFINKCATCKMILEKEAKSQKRARHLARAP

SEQ ID NO: 77677 - protein, 80 aa, Homo sapiens
  Payload ID: 15481
  Gene Symbol: SPINK6
  Gene Name: serine peptidase inhibitor, Kazal type 6
  Uniprot ID: Q6UWN8
  ENSP ID: ENSP00000324870
MKLSGMFLLLSLALFCFLTGVFSQGGQVDCGEFQDPKVYCTRESNPHCGSDGQTYGNKCAFCKAIVKSGGKISLKHPGKC

SEQ ID NO: 77678 - protein, 41 aa, Homo sapiens
  Payload ID: 15481
  Gene Symbol: SPINK6
  Gene Name: serine peptidase inhibitor, Kazal type 6
  ENSP ID: ENSP00000421119
MKLSGMFLLLSLALFCFLTGVFSQGGQVDCGEFQDPKVYCT

SEQ ID NO: 77679 - protein, 80 aa, Homo sapiens; identical to SEQ ID NO: 77677
  Payload ID: 15481
  Gene Symbol: SPINK6
  Gene Name: serine peptidase inhibitor, Kazal type 6
  Uniprot ID: Q6UWN8
  ENSP ID: ENSP00000481309

SEQ ID NO: 77680 - protein, 85 aa, Homo sapiens
  Payload ID: 15482
  Gene Symbol: SPINK7
  Gene Name: serine peptidase inhibitor, Kazal type 7 (putative)
  Uniprot ID: P58062
  ENSP ID: ENSP00000274565
MKITGGLLLLCTVVYFCSSSEAASLSPKKVDCSIYKKYPVVAIPCPITYLPVCGSDYITYGNECHLCTESLKSNGRVQFLHDGSC

SEQ ID NO: 77681 - protein, 59 aa, Homo sapiens
  Payload ID: 15482
  Gene Symbol: SPINK7
  Gene Name: serine peptidase inhibitor, Kazal type 7 (putative)
  ENSP ID: ENSP00000427887
MTQVDCSIYKKYPVVAIPCPITYLPVCGSDYITYGNECHLCTESLKSNGRVQFLHDGSC

SEQ ID NO: 77682 - protein, 97 aa, Homo sapiens
  Payload ID: 15483
  Gene Symbol: SPINK8
  Gene Name: serine peptidase inhibitor, Kazal type 8 (putative)
  Uniprot ID: P0C7L1
  ENSP ID: ENSP00000407497
MKGICSDAILVLATSMWMAFAIDFPLPMASERGQLDKTIVECLKNVNKCWFLSYIKPSEPICGSDQVTYSSDCHLCSKILFEGLNITKLYDGQCENS

SEQ ID NO: 77683 - protein, 86 aa, Homo sapiens
  Payload ID: 15484
  Gene Symbol: SPINK9
  Gene Name: serine peptidase inhibitor, Kazal type 9
  Uniprot ID: Q5DT21
  ENSP ID: ENSP00000367139
MRATAIVLLLALTLATMFSIECAKQTKQMVDCSHYKKLPPGQQRFCHHMYDPICGSDGKTYKNDCFFCSKVKKTDGTLKFVHFGKC

SEQ ID NO: 77684 - protein, 107 aa, Homo sapiens
  Payload ID: 15484
  Gene Symbol: SPINK9
  Gene Name: serine peptidase inhibitor, Kazal type 9
  ENSP ID: ENSP00000427240
MVFMNPSHHCFHYKTPPSSSGEHNEPRRLMGLTQPEHLQGIECAKQTKQMVDCSHYKKLPPGQQRFCHHMYDPICGSDGKTYKNDCFFCSKVKKTDGTLKFVHFGKC

SEQ ID NO: 77685 - protein, 529 aa, Homo sapiens
  Payload ID: 15485
  Gene Symbol: SPINT1
  Gene Name: serine peptidase inhibitor, Kunitz type 1
  Uniprot ID: O43278
  ENSP ID: ENSP00000342098
MAPARTMARARLAPAGIPAVALWLLCTLGLQGTQAGPPPAPPGLPAGADCLNSFTAGVPGFVLDTNASVSNGATFLESPTVRRGWDCVRACCTTQNCNLALVELQPDRGEDAIAACFLINCLYEQNFVCKFAPREGFINYLTREVYRSYRQLRTQGFGGSGIPKAWAGIDLKVQPQEPLVLKDVENTDWRLLRGDTDVRVERKDPNQVELWGLKEGTYLFQLTVTSSDHPEDTANVTVTVLSTKQTEDYCLASNKVGRCRGSFPRWYYDPTEQICKSFVYGGCLGNKNNYLREEECILACRGVQGGPLRGSSGAQATFPQGPSMERRHPVCSGTCQPTQFRCSNGCCIDSFLECDDTPNCPDASDEAACEKYTSGFDELQRIHFPSDKGHCVDLPDTGLCKESIPRWYYNPFSEHCARFTYGGCYGNKNNFEEEQQCLESCRGISKKDVFGLRREIPIPSTGSVEMAVAVFLVICIVVVVAILGYCFFKNQRKDFHGHHHHPPPTPASSTVSTTEDTEHLVYNHTTRPL

SEQ ID NO: 77686 - protein, 294 aa, Homo sapiens
  Payload ID: 15485
  Gene Symbol: SPINT1
  Gene Name: serine peptidase inhibitor, Kunitz type 1
  ENSP ID: ENSP00000454315
ELWGLKEGTYLFQLTVTSSDHPEDTANVTVTVLSTKQTEDYCLASNKVGRCRGSFPRWYYDPTEQICKSFVYGGCLGNKNNYLREEECILACRGVQVCSGTCQPTQFRCSNGCCIDSFLECDDTPNCPDASDEAACEKYTSGFDELQRIHFPSDKGHCVDLPDTGLCKESIPRWYYNPFSEHCARFTYGGCYGNKNNFEEEQQCLESCRGISKKDVFGLRREIPIPSTGSVEMAVAVFLVICIVVVVAILGYCFFKNQRKDFHGHHHHPPPTPASSTVSTTEDTEHLVYNHTTR

SEQ ID NO: 77687 - protein, 204 aa, Homo sapiens
  Payload ID: 15485
  Gene Symbol: SPINT1
  Gene Name: serine peptidase inhibitor, Kunitz type 1
  ENSP ID: ENSP00000455038
  MOD_RES (1)..(1): Any amino acid
XLGNKNNYLREEECILACRGVQGGPLRGSSGAQATFPQGPSMERRHPDTSGFDELQRIHFPSDKGHCVDLPDTGLCKESIPRWYYNPFSEHCARFTYGGCYGNKNNFEEEQQCLESCRGISKKDVFGLRREIPIPSTGSVEMAVAVFLVICIVVVVAILGYCFFKNQRKDFHGHHHHPPPTPASSTVSTTEDTEHLVYNHTTRP

SEQ ID NO: 77688 - protein, 240 aa, Homo sapiens
  Payload ID: 15485
  Gene Symbol: SPINT1
  Gene Name: serine peptidase inhibitor, Kunitz type 1
  ENSP ID: ENSP00000456015
  MOD_RES (1)..(1): Any amino acid
XVENTDWRLLRGDTDVRVERKDPNQVELWGLKEGTYLFQLTVTSSDHPEDTANVTVTVLSTKQTEDYCLASNKVGRCRGSFPRWYYDPTEQICKSFVYGGCLGNKNNYLREEECILACRGVQGPSMERRHPDTSGFDELQRIHFPSDKGHCVDLPDTGLCKESIPRWYYNPFSEHCARFTYGGCYGNKNNFEEEQQCLESCRGISKKDVFGLRREIPIPSTGSVEMAVAVFLVICIVVVV

SEQ ID NO: 77689 - protein, 313 aa, Homo sapiens
  Payload ID: 15485
  Gene Symbol: SPINT1
  Gene Name: serine peptidase inhibitor, Kunitz type 1
  ENSP ID: ENSP00000456769
  MOD_RES (1)..(1): Any amino acid
XEKAAEPQLSEHRVGSRDPSRAGSWDRNLGGPGPTQLTCAGHQHPRNPEARALKVTPLGRKAMAPARTMARARLAPAGIPAVALWLLCTLGLQGTQAGPPPAPPGLPAGADCLNSFTAGVPGFVLDTNASVSNGATFLESPTVRRGWDCVRACCTTQNCNLALVELQPDRGEDAIAACFLINCLYEQNFVCKFAPREGFINYLTREVYRSYRQLRTQGFGGSGIPKAWAGIDLKVQPQEPLVLKDVENTDWRLLRGDTDVRVELTVTSSDHPEDTANVTVTVLSTKQTEDYCLASNKVGRCRGSFPRWYYDPT

SEQ ID NO: 77690 - protein, 513 aa, Homo sapiens
  Payload ID: 15485
  Gene Symbol: SPINT1
  Gene Name: serine peptidase inhibitor, Kunitz type 1
  Uniprot ID: O43278
  ENSP ID: ENSP00000457076
MAPARTMARARLAPAGIPAVALWLLCTLGLQGTQAGPPPAPPGLPAGADCLNSFTAGVPGFVLDTNASVSNGATFLESPTVRRGWDCVRACCTTQNCNLALVELQPDRGEDAIAACFLINCLYEQNFVCKFAPREGFINYLTREVYRSYRQLRTQGFGGSGIPKAWAGIDLKVQPQEPLVLKDVENTDWRLLRGDTDVRVERKDPNQVELWGLKEGTYLFQLTVTSSDHPEDTANVTVTVLSTKQTEDYCLASNKVGRCRGSFPRWYYDPTEQICKSFVYGGCLGNKNNYLREEECILACRGVQGPSMERRHPVCSGTCQPTQFRCSNGCCIDSFLECDDTPNCPDASDEAACEKYTSGFDELQRIHFPSDKGHCVDLPDTGLCKESIPRWYYNPFSEHCARFTYGGCYGNKNNFEEEQQCLESCRGISKKDVFGLRREIPIPSTGSVEMAVAVFLVICIVVVVAILGYCFFKNQRKDFHGHHHHPPPTPASSTVSTTEDTEHLVYNHTTRPL

SEQ ID NO: 77691 - protein, 301 aa, Homo sapiens
  Payload ID: 15485
  Gene Symbol: SPINT1
  Gene Name: serine peptidase inhibitor, Kunitz type 1
  ENSP ID: ENSP00000457284
MAPARTMARARLAPAGIPAVALWLLCTLGLQGTQAGPPPAPPGLPAGADCLNSFTAGVPGFVLDTNASVSNGATFLESPTVRRGWDCVRACCTTQNCNLALVELQPDRGEDAIAACFLINCLYEQNFVCKFAPREGFINYLTREVYRSYRQLRTQGFGGSGIPKAWAGIDLKVQPQEPLVLKDVENTDWRLLRGDTDVRVERKDPNQVELWGLKEGTYLFQLTVTSSDHPEDTANVTVTVLSTKQTEDYCLASNKVGRCRGSFPRWYYDPTEQICKSFVYGGCLGNKNNYLREEECILACR

SEQ ID NO: 77692 - protein, 472 aa, Homo sapiens
  Payload ID: 15485
  Gene Symbol: SPINT1
  Gene Name: serine peptidase inhibitor, Kunitz type 1
  ENSP ID: ENSP00000458074
PPGLPAGADCLNSFTAGVPGFVLDTNASVSNGATFLESPTVRRGWDCVRACCTTQNCNLALVELQPDRGEDAIAACFLINCLYEQNFVCKFAPREGFINYLTREVYRSYRQLRTQGFGGSGIPKAWAGIDLKVQPQEPLVLKDVENTDWRLLRGDTDVRVERKDPNQVELWGLKEGTYLFQLTVTSSDHPEDTANVTVTVLSTKQTEDYCLASNKVGRCRGSFPRWYYDPTEQICKSFVYGGCLGNKNNYLREEECILACRGVQGGPLRGSSGAQATFPQVCSGTCQPTQFRCSNGCCIDSFLECDDTPNCPDASDEAACEKYTSGFDELQRIHFPSDKGHCVDLPDTGLCKESIPRWYYNPFSEHCARFTYGGCYGNKNNFEEEQQCLESCRGISKKDVFGLRREIPIPSTGSVEMAVAVFLVICIVVVVAILGYCFFKNQRKDFHGHHHHPPPTPASSTVSTTEDTEHLV

SEQ ID NO: 77693 - protein, 99 aa, Homo sapiens
  Payload ID: 15486
  Gene Symbol: SPINT4
  Gene Name: serine peptidase inhibitor, Kunitz type 4
  Uniprot ID: Q6UDR6
  ENSP ID: ENSP00000279058
MKSAKLGFLLRFFIFCSLNTLLLGGVNKIAEKICGDLKDPCKLDMNFGSCYEVHFRYFYNRTSKRCETFVFSGCNGNLNNFKLKIEREVACVAKYKPPR

SEQ ID NO: 77694 - protein, 252 aa, Homo sapiens
  Payload ID: 15487
  Gene Symbol: SPINT2
  Gene Name: serine peptidase inhibitor, Kunitz type, 2
  Uniprot ID: O43291
  ENSP ID: ENSP00000301244
MAQLCGLRRSRAFLALLGSLLLSGVLAADRERSIHDFCLVSKVVGRCRASMPRWWYNVTDGSCQLFVYGGCDGNSNNYLTKEECLKKCATVTENATGDLATSRNAADSSVPSAPRRQDSEDHSSDMFNYEEYCTANAVTGPCRASFPRWYFDVERNSCNNFIYGGCRGNKNSYRSEEACMLRCFRQQENPPLPLGSKVVVLAGLFVMVLILFLGASMVYLIRVARRNQERALRTVWSSGDDKEQLVKNTYVL

SEQ ID NO: 77695 - protein, 195 aa, Homo sapiens
  Payload ID: 15487
  Gene Symbol: SPINT2
  Gene Name: serine peptidase inhibitor, Kunitz type, 2
  Uniprot ID: O43291
  ENSP ID: ENSP00000389788
MAQLCGLRRSRAFLALLGSLLLSGVLAADRERSIHENATGDLATSRNAADSSVPSAPRRQDSEDHSSDMFNYEEYCTANAVTGPCRASFPRWYFDVERNSCNNFIYGGCRGNKNSYRSEEACMLRCFRQQENPPLPLGSKVVVLAGLFVMVLILFLGASMVYLIRVARRNQERALRTVWSSGDDKEQLVKNTYVL

SEQ ID NO: 77696 - protein, 52 aa, Homo sapiens
  Payload ID: 15487
  Gene Symbol: SPINT2
  Gene Name: serine peptidase inhibitor, Kunitz type, 2
  ENSP ID: ENSP00000465301
MPRWWYNVTDGSCQLFVYGGCDGNSNNYLTKEECLKKCATVTENATGDLATS

SEQ ID NO: 77697 - protein, 62 aa, Homo sapiens
  Payload ID: 15487
  Gene Symbol: SPINT2
  Gene Name: serine peptidase inhibitor, Kunitz type, 2
  ENSP ID: ENSP00000465561
MPRWWYNVTDGSCQLFVYGGCDGNSNNYLTKEECLKKCATVTENATGDLATSRNAADSSVPS

SEQ ID NO: 77698 - protein, 174 aa, Homo sapiens
  Payload ID: 15487
  Gene Symbol: SPINT2
  Gene Name: serine peptidase inhibitor, Kunitz type, 2
  ENSP ID: ENSP00000465721
MAQLCGLRRSRAFLALLGSLLLSGVLAADRERSIHDFCLVSKVVGRCRASMPRWWYNVTDGSCQLFVYGGCDGNSNNYLTKEECLKKCATVTAPRRQDSEDHSSDMFNYEEYCTANAVTGPCRASFPRWYFDVERNSCNNFIYGGCRGNKNSYRSEEACMLRCFRQQENPPLPL

SEQ ID NO: 77699 - protein, 202 aa, Homo sapiens
  Payload ID: 15487
  Gene Symbol: SPINT2
  Gene Name: serine peptidase inhibitor, Kunitz type, 2
  ENSP ID: ENSP00000466407
MPRWWYNVTDGSCQLFVYGGCDGNSNNYLTKEECLKKCATVTENATGDLATSRNAADSSVPSAPRRQDSEDHSSDMFNYEEYCTANAVTGPCRASFPRWYFDVERNSCNNFIYGGCRGNKNSYRSEEACMLRCFRQQENPPLPLGSKVVVLAGLFVMVLILFLGASMVYLIRVARRNQERALRTVWSSGDDKEQLVKNTYVL

SEQ ID NO: 77700 - protein, 106 aa, Homo sapiens
  Payload ID: 15487
  Gene Symbol: SPINT2
  Gene Name: serine peptidase inhibitor, Kunitz type, 2
  ENSP ID: ENSP00000468519
  MOD_RES (1)..(1): Any amino acid
XRGTPAITSSMEAAGAIRTATALRRPACSAASAVCSLPGQQENPPLPLGSKVVVLAGLFVMVLILFLGASMVYLIRVARRNQERALRTVWSSGDDKEQLVKNTYVL

SEQ ID NO: 77701 - protein, 130 aa, Homo sapiens
  Payload ID: 15487
  Gene Symbol: SPINT2
  Gene Name: serine peptidase inhibitor, Kunitz type, 2
  ENSP ID: ENSP00000468728
  MOD_RES (1)..(1): Any amino acid
XPRRQDSEDHSSDMFNYEEYCTANAVTGPCRASFPRWYFDVERNSCNNFIYGGCRGNKNSYRSEEACMLRCFRQQENPPLPLGSKGKWPLTLLLPSACLLPSLTELSPAQLWFTLSFTVNIILAESHVSA

SEQ ID NO: 77702 - protein, 89 aa, Homo sapiens
  Payload ID: 15488
  Gene Symbol: SPINT3
  Gene Name: serine peptidase inhibitor, Kunitz type, 3
  Uniprot ID: P49223
  ENSP ID: ENSP00000217428
MQLQASLSFLLILTLCLELRSELARDTIKDLLPNVCAFPMEKGPCQTYMTRWFFNFETGECELFAYGGCGGNSNNFLRKEKCEKFCKFT

SEQ ID NO: 77703 - protein, 340 aa, Homo sapiens
  Payload ID: 15489
  Gene Symbol: SRR
  Gene Name: serine racemase
  Uniprot ID: Q9GZT4
  ENSP ID: ENSP00000339435
MCAQYCISFADVEKAHINIRDSIHLTPVLTSSILNQLTGRNLFFKCELFQKTGSFKIRGALNAVRSLVPDALERKPKAVVTHSSGNHGQALTYAAKLEGIPAYIVVPQTAPDCKKLAIQAYGASIVYCEPSDESRENVAKRVTEETEGIMVHPNQEPAVIAGQGTIALEVLNQVPLVDALVVPVGGGGMLAGIAITVKALKPSVKVYAAEPSNADDCYQSKLKGKLMPNLYPPETIADGVKSSIGLNTWPIIRDLVDDIFTVTEDEIKCATQLVWERMKLLIEPTAGVGVAAVLSQHFQTVSPEVKNICIVLSGGNVDLTSSITWVKQAERPASYQSVSV

SEQ ID NO: 77704 - protein, 66 aa, Homo sapiens
  Payload ID: 15489
  Gene Symbol: SRR
  Gene Name: serine racemase
  ENSP ID: ENSP00000458814
MCAQYCISFADVEKAHINIRDSIHLTPVLTSSILNQLTGRNLFFKCELFQKTGSFKIRGALNAVRS

SEQ ID NO: 77705 - protein, 100 aa, Homo sapiens
  Payload ID: 15489
  Gene Symbol: SRR
  Gene Name: serine racemase
  ENSP ID: ENSP00000460581
MCAQYCISFADVEKAHINIRDSIHLTPVLTSSILNQLTGRNLFFKCELFQKTGSFKIRGALNAVRSLVPDALERKPKAVVTHSSGNHGQALTYAAKLEGI

SEQ ID NO: 77706 - protein, 150 aa, Homo sapiens
  Payload ID: 15489
  Gene Symbol: SRR
  Gene Name: serine racemase
  ENSP ID: ENSP00000461125
MCAQYCISFADVEKAHINIRDSIHLTPVLTSSILNQLTGRNLFFKCELFQKTGSFKIRGALNAVRSLVPDALERKPKAVVTHSSGNHGQALTYAAKLEGIPAYIVVPQTAPDCKKLAIQAYGASIVYCEPSDESKLKGKLMPNLYPPETI

SEQ ID NO: 77707 - protein, 78 aa, Homo sapiens
  Payload ID: 15489
  Gene Symbol: SRR
  Gene Name: serine racemase
  ENSP ID: ENSP00000461343
MVHPNQEPAVIAGQGTIALEVLNQVPLVDALVVPVGGGGMLAGIAITVKALKPSVKVYAAEPSNADDCYQSKLKGKLM

SEQ ID NO: 77708 - protein, 66 aa, Homo sapiens; identical to SEQ ID NO: 77704
  Payload ID: 15489
  Gene Symbol: SRR
  Gene Name: serine racemase
  ENSP ID: ENSP00000461482

SEQ ID NO: 77709 - protein, 93 aa, Homo sapiens
  Payload ID: 15489
  Gene Symbol: SRR
  Gene Name: serine racemase
  ENSP ID: ENSP00000461589
MCAQYCISFADVEKAHINIRDSIHLTPVLTSSILNQLTGRNLFFKCELFQKTGSFKIRGALNAVRSLVPDALERKPKAVVTHSSGNHGQALTY

SEQ ID NO: 77710 - protein, 114 aa, Homo sapiens
  Payload ID: 15489
  Gene Symbol: SRR
  Gene Name: serine racemase
  ENSP ID: ENSP00000476682
MPNLYPPETIADGVKSSIGLNTWPIIRDLVDDIFTVTEDEIKCATQLVWERMKLLIEPTAGVGVAAVLSQHFQTVSPEVKNICIVLSGGNVDLTSSITWVKQAERPASYQSVSV

SEQ ID NO: 77711 - protein, 545 aa, Homo sapiens
  Payload ID: 15490
  Gene Symbol: STK39
  Gene Name: serine threonine kinase 39
  Uniprot ID: Q9UEW8
  ENSP ID: ENSP00000348278
MAEPSGSPVHVQLPQQAAPVTAAAAAAPAAATAAPAPAAPAAPAPAPAPAAQAVGWPICRDAYELQEVIGSGATAVVQAALCKPRQERVAIKRINLEKCQTSMDELLKEIQAMSQCSHPNVVTYYTSFVVKDELWLVMKLLSGGSMLDIIKYIVNRGEHKNGVLEEAIIATILKEVLEGLDYLHRNGQIHRDLKAGNILLGEDGSVQIADFGVSAFLATGGDVTRNKVRKTFVGTPCWMAPEVMEQVRGYDFKADMWSFGITAIELATGAAPYHKYPPMKVLMLTLQNDPPTLETGVEDKEMMKKYGKSFRKLLSLCLQKDPSKRPTAAELLKCKFFQKAKNREYLIEKLLTRTPDIAQRAKKVRRVPGSSGHLHKTEDGDWEWSDDEMDEKSEEGKAAFSQEKSRRVKEENPEIAVSASTIPEQIQSLSVHDSQGPPNANEDYREASSCAVNLVLRLRNSRKELNDIRFEFTPGRDTADGVSQELFSAGLVDGHDVVIVAANLQKIVDDPKALKTLTFKLASGCDGSEIPDEVKLIGFAQLSVS

SEQ ID NO: 77712 - protein, 904 aa, Homo sapiens
  Payload ID: 15491
  Gene Symbol: SRRM1
  Gene Name: serine/arginine repetitive matrix 1
  Uniprot ID: Q8IYB3
  ENSP ID: ENSP00000326261
MDAGFFRGTSAEQDNRFSNKQKKLLKQLKFAECLEKKVDMSKVNLEVIKPWITKRVTEILGFEDDVVIEFIFNQLEVKNPDSKMMQINLTGFLNGKNAREFMGELWPLLLSAQENIAGIPSAFLELKKEEIKQRQIEQEKLASMKKQDEDKDKRDKEEKESSREKRERSRSPRRRKSRSPSPRRRSSPVRRERKRSHSRSPRHRTKSRSPSPAPEKKEKTPELPEPSVKVKEPSVQEATSTSDILKVPKPEPIPEPKEPSPEKNSKKEKEKEKTRPRSRSRSKSRSRTRSRSPSHTRPRRRHRSRSRSYSPRRRPSPRRRPSPRRRTPPRRMPPPPRHRRSRSPVRRRRRSSASLSGSSSSSSSSRSRSPPKKPPKRTSSPPRKTRRLSPSASPPRRRHRPSPPATPPPKTRHSPTPQQSNRTRKSRVSVSPGRTSGKVTKHKGTEKRESPSPAPKPRKVELSESEEDKGGKMAAADSVQQRRQYRRQNQQSSSDSGSSSSSEDERPKRSHVKNGEVGRRRRHSPSRSASPSPRKRQKETSPRGRRRRSPSPPPTRRRRSPSPAPPPRRRRTPTPPPRRRTPSPPPRRRSPSPRRYSPPIQRRYSPSPPPKRRTASPPPPPKRRASPSPPPKRRVSHSPPPKQRSSPVTKRRSPSLSSKHRKGSSPSRSTREARSPQPNKRHSPSPRPRAPQTSSSPPPVRRGASSSPQRRQSPSPSTRPIRRVSRTPEPKKIKKAASPSPQSVRRVSSSRSVSGSPEPAAKKPPAPPSPVQSQSPSTNWSPAVPVKKAKSPTPSPSPPRNSDQEGGGKKKKKKKDKKHKKDKKHKKHKKHKKEKAVAAAAAAAVTPAAIAAATTTLAQEEPVAAPEPKKETESEAEDNLDDLEKHLREKALRSMRKAQVSPQS

SEQ ID NO: 77713 - protein, 913 aa, Homo sapiens
  Payload ID: 15491
  Gene Symbol: SRRM1
  Gene Name: serine/arginine repetitive matrix 1
  ENSP ID: ENSP00000363510
MDAGFFRGTSAEQDNRFSNKQKKLLKQLKFAECLEKKVDMSKVNLEVIKPWITKRVTEILGFEDDVVIEFIFNQLEVKNPDSKMMQINLTGFLNGKNAREFMGELWPLLLSAQENIAGIPSAFLELKKEEIKQRQIEQEKLASMKKQDEDKDKRDKEEKESSREKRERSRSPRRRKSRSPSPRRRSSPVRRERKRSHSRSPRHRTKSRSPSPAPEKKEKTPELPEPSVKVKEPSVQEATSTSDILKVPKPEPIPEPKEPSPEKNSKKEKEKEKTRPRSRSRSKSRSRTRSRSPSHTRPRRRHRSRSRRRPSPRRRPSPRRRTPPRRMPPPPRHRRSRSPVRRRRRSSASLSGSSSSSSSSRSRSPPKKPPKRTSSPPRKTRRLSPSASPPRRRHRPSPPATPPPKTRHSPTPQQSNRTRKSRVSVSPGRTSGKVTKHKGTEKRESPSPAPKPRKVELSESEEDKGGKMAAADSVQQRRQYRRQNQQSSSDSGSSSSSEDERPKRSHVKNGEVGRRRRHSPSRSASPSPRKRQKETSPRMQMGKRWQSPVTKSGRRRRSPSPPPTRRRRSPSPAPPPRRRRTPTPPPRRRTPSPPPRRRSPSPRRYSPPIQRRYSPSPPPKRRTASPPPPPKRRASPSPPPKRRVSHSPPPKQRSSPVTKRRSPSLSSKHRKGSSPSRSTREARSPQPNKRHSPSPRPRAPQTSSSPPPVRRGASSSPQRRQSPSPSTRPIRRVSRTPEPKKIKKAASPSPQSVRRVSSSRSVSGSPEPAAKKPPAPPSPVQSQSPSTNWSPAVPVKKAKSPTPSPSPPRNSDQEGGGKKKKKKKDKKHKKDKKHKKHKKHKKEKAVAAAAAAAVTPAAIAAATTTLAQEEPVAAPEPKKETESEAEDNLDDLEKHLREKALRSMRKAQVSPQS

SEQ ID NO: 77714 - protein, 820 aa, Homo sapiens [sequence omitted]

SEQ ID NO: 77715 - protein, 101 aa, Homo sapiens
  Payload ID: 15491
  Gene Symbol: SRRM1
  Gene Name: serine/arginine repetitive matrix 1
  ENSP ID: ENSP00000469151
MSKVNLEVIKPWITKRVTEILGFEDDVVIEFIFNQLEVKNPDSKMMQINLTGFLNGKNAREFMGELWPLLLSAQENIAGIPSAFLELKKEEIKQRQIEQEK

SEQ ID NO: 77716 - protein, 681 aa, Homo sapiens
  Payload ID: 15491
  Gene Symbol: SRRM1
  Gene Name: serine/arginine repetitive matrix 1
  ENSP ID: ENSP00000471084
MSKVNLEVIKPWITKRVTEILGFEDDVVIEFIFNQLEVKNPDSKMMQINLTGFLNGKNAREFMGELWPLLLSAQENIAGIPSAFLELKKEEIKQRQIEQEKLASMKKQDEDKDKRDKEEKESSREKRERSRSPRRRKSRSPSPRRRSSPVRRERKRSHSRSPRHRTKSRSPSPAPEKKEKTPELPEPSVKVKEPSVQEATSTSDILKVPKPEPIPEPKEPSPEKNSKKEKEKEKTRPRSRSRSKSRSRTRSRSPSHTRPRRRHRSRSRSYSPRRRPSPRRRPSPRRRTPPRRMPPPPRHRRSRSPVRRRRRSSASLSGSSSSSSSSRSRSPPKKPPKRTSSPPRKTRRLSPSASPPRRRHRPSPPATPPPKTRHSPTPQQSNRTRKSRVSVSPGRTSVTKHKGTEKRESPSPAPKPRKVELSESEEDKGGKMAAADSVQQRRQYRRQNQQSSSDSGSSSSSEDERPKRSHVKNGEVGRRRRHSPSRSASPSPRKRQKETSPRMQMGKRWQSPVTKSGRRRRSPSPPPTRRRRSPSPAPPPRRRRTPTPPPRRRTPSPPPRRRSPSPRRYSPPIQRRYSPSPPPKRRTASPPPPPKRRASPSPPPKRRVSHSPPPKQRSSPVTKRRSPSLSSKHRKGSSPSRSTREARSPQPNKRHSPSPRPRAPQTSSSPPPVRRGASSSP

SEQ ID NO: 77717 - protein, 79 aa, Homo sapiens
  Payload ID: 15491
  Gene Symbol: SRRM1
  Gene Name: serine/arginine repetitive matrix 1
  ENSP ID: ENSP00000471819
MDAGFFRGTSAEQDNRFSNKQKKLLKQLKFAECLEKKVDMSKVNLEVIKPWITKRVTEILGFEDDVVIEFIFNQLEVKA

SEQ ID NO: 77718 - protein, 2752 aa, Homo sapiens
  Payload ID: 15492
  Gene Symbol: SRRM2
  Gene Name: serine/arginine repetitive matrix 2
  Uniprot ID: Q9UQ35
  ENSP ID: ENSP00000301740
MYNGIGLPTPRGSGTNGYVQRNLSLVRGRRGERPDYKGEEELRRLEAALVKRPNPDILDHERKRRVELRCLELEEMMEEQGYEEQQIQEKVATFRLMLLEKDVNPGGKEETPGQRPAVTETHQLAELNEKKNERLRAAFGISDSYVDGSSFDPQRRAREAKQPAPEPPKPYSLVRESSSSRSPTPKQKKKKKKKDRGRRSESSSPRRERKKSSKKKKHRSESESKKRKHRSPTPKSKRKSKDKKRKRSRSTTPAPKSRRAHRSTSADSASSSDTSRSRSRSAAAKTHTTALAGRSPSPASGRRGEGDAPFSEPGTTSTQRPSSPETATKQPSSPYEDKDKDKKEKSATRPSPSPERSSTGPEPPAPTPLLAERHGGSPQPLATTPLSQEPVNPPSEASPTRDRSPPKSPEKLPQSSSSESSPPSPQPTKVSRHASSSPESPKPAPAPGSHREISSSPTSKNRSHGRAKRDKSHSHTPSRRMGRSRSPATAKRGRSRSRTPTKRGHSRSRSPQWRRSRSAQRWGRSRSPQRRGRSRSPQRPGWSRSRNTQRRGRSRSARRGRSHSRSPATRGRSRSRTPARRGRSRSRTPARRRSRSRTPTRRRSRSRTPARRGRSRSRTPARRRSRTRSPVRRRSRSRSPARRSGRSRSRTPARRGRSRSRTPARRGRSRSRTPARRSGRSRSRTPARRGRSRSRTPRRGRSRSRSLVRRGRSHSRTPQRRGRSGSSSERKNKSRTSQRRSRSNSSPEMKKSRISSRRSRSLSSPRSKAKSRLSLRRSLSGSSPCPKQKSQTPPRRSRSGSSQPKAKSRTPPRRSRSSSSPPPKQKSKTPSRQSHSSSSPHPKVKSGTPPRQGSITSPQANEQSVTPQRRSCFESSPDPELKSRTPSRHSCSGSSPPRVKSSTPPRQSPSRSSSPQPKVKAIISPRQRSHSGSSSPSPSRVTSRTTPRRSRSVSPCSNVESRLLPRYSHSGSSSPDTKVKPETPPRQSHSGSISPYPKVKAQTPPGPSLSGSKSPCPQEKSKDSLVQSCPGSLSLCAGVKSSTPPGESYFGVSSLQLKGQSQTSPDHRSDTSSPEVRQSHSESPSLQSKSQTSPKGGRSRSSSPVTELASRSPIRQDRGEFSASPMLKSGMSPEQSRFQSDSSSYPTVDSNSLLGQSRLETAESKEKMALPPQEDATASPPRQKDKFSPFPVQDRPESSLVFKDTLRTPPRERSGAGSSPETKEQNSALPTSSQDEELMEVVEKSEEPAGQILSHLSSELKEMSTSNFESSPEVEERPAVSLTLDQSQSQASLEAVEVPSMASSWGGPHFSPEHKELSNSPLRENSFGSPLEFRNSGPLGTEMNTGFSSEVKEDLNGPFLNQLETDPSLDMKEQSTRSSGHSSSELSPDAVEKAGMSSNQSISSPVLDAVPRTPSRERSSSASSPEMKDGLPRTPSRRSRSGSSPGLRDGSGTPSRHSLSGSSPGMKDIPRTPSRGRSECDSSPEPKALPQTPRPRSRSPSSPELNNKCLTPQRERSGSESSVDQKTVARTPLGQRSRSGSSQELDVKPSASPQERSESDSSPDSKAKTRTPLRQRSRSGSSPEVDSKSRLSPRRSRSGSSPEVKDKPRAAPRAQSGSDSSPEPKAPAPRALPRRSRSGSSSKGRGPSPEGSSSTESSPEHPPKSRTARRGSRSSPEPKTKSRTPPRRRSSRSSPELTRKARLSRRSRSASSSPETRSRTPPRHRRSPSVSSPEPAEKSRSSRRRRSASSPRTKTTSRRGRSPSPKPRGLQRSRSRSRREKTRTTRRRDRSGSSQSTSRRRQRSRSRSRVTRRRRGGSGYHSRSPARQESSRTSSRRRRGRSRTPPTSRKRSRSRTSPAPWKRSRSRASPATHRRSRSRTPLISRRRSRSRTSPVSRRRSRSRTSVTRRRSRSRASPVSRRRSRSRTPPVTRRRSRSRTPTTRRRSRSRTPPVTRRRSRSRTPPVTRRRSRSRTSPITRRRSRSRTSPVTRRRSRSRTSPVTRRRSRSRTSPVTRRRSRSRTPPAIRRRSRSRTPLLPRKRSRSRSPLAIRRRSRSRTPRTARGKRSLTRSPPAIRRRSASGSSSDRSRSATPPATRNHSGSRTPPVALNSSRMSCFSRPSMSPTPLDRCRSPGMLEPLGSSRTPMSVLQQAGGSMMDGPGPRIPDHQRTSVPENHAQSRIALALTAISLGTARPPPSMSAAGLAARMSQVPAPVPLMSLRTAPAANLASRIPAASAAAMNLASARTPAIPTAVNLADSRTPAAAAAMNLASPRTAVAPSAVNLADPRTPTAPAVNLAGARTPAALAALSLTGSGTPPTAANYPSSSRTPQAPASANLVGPRSAHATAPVNIAGSRTAAALAPASLTSARMAPALSGANLTSPRVPLSAYERVSGRTSPPLLDRARSRTPPSAPSQSRMTSERAPSPSSRMGQAPSQSLLPPAQDQPRSPVPSAFSDQSRCLIAQTTPVAGSQSLSSGAVATTTSSAGDHNGMLSVPAPGVPHSDVGEPPASTGAQQPSALAALQPAKERRSSSSSSSSSSSSSSSSSSSSSSSSSGSSSSDSEGSSLPVQPEVALKRVPSPTPAPKEAVREGRPPEPTPAKRKRRSSSSSSSSSSSSSSSSSSSSSSSSSSSSSSSSSSSSSSSSSSPSPAKPGPQALPKPASPKKPPPGERRSRSPRKPIDSLRDSRSLSYSPVERRRPSPQPSPRDQQSSSSERGSRRGQRGDSRSPSHKRRRETPSPRPMRHRSSRSP

SEQ ID NO: 77719 - protein, 115 aa, Homo sapiens
  Payload ID: 15492
  Gene Symbol: SRRM2
  Gene Name: serine/arginine repetitive matrix 2
  ENSP ID: ENSP00000458230
MYNGIGLPTPRGSGTNGYVQRNLSLVRGRRGERPDYKGEEELRRLEAALVKRPNPDILDHERKRRVELRCLELEEMMEEQGYEEQQIQEKVATFRLMLLEKDVNPGGKEETPGQR

SEQ ID NO: 77720 - protein, 895 aa, Homo sapiens
  Payload ID: 15492
  Gene Symbol: SRRM2
  Gene Name: serine/arginine repetitive matrix 2
  ENSP ID: ENSP00000458647
MLLEKDVNPGGKEETPGQRPAVTETHQLAELNEKKNERLRAAFGISDSYVDGSSFDPQRRAREAKQPAPEPPKPYSLVRESSSSRSPTPKQKKKKKKKDRGRRSESSSPRRERKKSSKKKKHRSESESKKRKHRSPTPKSKRKSKDKKRKRSRSTTPAPKSRRAHRSTSADSASSSDTSRSRSRSAAAKTHTTALAGRSPSPASGRRGEGDAPFSEPGTTSTQRPSSPETATKQPSSPYEDKDKDKKEKSATRPSPSPERSSTGPEPPAPTPLLAERHGGSPQPLATTPLSQEPVNPPSEASPTRDRSPPKSPEKLPQSSSSESSPPSPQPTKVSRHASSSPESPKPAPAPGSHREISSSPTSKNRSHGRAKRDKSHSHTPSRRMGRSRSPATAKRGRSRSRTPTKRGHSRSRSPQWRRSRSAQRWGRSRSPQRRGRSRSPQRPGWSRSRNTQRRGRSRSARRGRSHSRSPATRGRSRSRTPARRGRSRSRTPARRRSRSRTPTRRRSRSRTPARRGRSRSRTPARRRSRTRSPVRRRSRSRSPARRSGRSRSRTPARRGRSRSRTPARRGRSRSRTPARRSGRSRSRTPARRGRSRSRTPRRGRSRSRSLVRRGRSHSRTPQRRGRSGSSSERKNKSRTSQRRSRSNSSPEMKKSRISSRRSRSLSSPRSKAKSRLSLRRSLSGSSPCPKQKSQTPPRRSRSGSSQPKAKSRTPPRRSRSSSSPPPKQKSKTPSRQSHSSSSPHPKVKSGTPPRQGSITSPQANEQSVTPQRRSCFESSPDPELKSRTPSRHSCSGSSPPRVKSSTPPRQSPSRSSSPQPKVKAIISPRQRSHSGSSSPSPSRVTSRTTPRRSRSVSPCSNVESRLLPRYSHSGSSSPDTKVKPETPPRQSHSG

SEQ ID NO: 77721 - protein, 94 aa, Homo sapiens
  Payload ID: 15492
  Gene Symbol: SRRM2
  Gene Name: serine/arginine repetitive matrix 2
  ENSP ID: ENSP00000458718
MLLEKDVNPGGKEETPGQRPAVTETHQLAELNEKKNERLRAAFGISDSYVDGSSFDPQRRAREAKQPAPEPPKPYSLVRESSSSRSPTPKQKKK

SEQ ID NO: 77722 - protein, 297 aa, Homo sapiens
  Payload ID: 15492
  Gene Symbol: SRRM2
  Gene Name: serine/arginine repetitive matrix 2
  ENSP ID: ENSP00000458870
MLLEKDVNPGGKEETPGQRPAVTETHQLAELNEKKNERLRAAFGISDSYVDGSSFDPQRRAREAKQPAPEPPKPYSLVRESSSSRSPTPKQKKKKKKKDRGRRSESSSPRRERKKSSKKKKHRSESESKKRKHRSPTPKSKRKSKDKKRKRSRSTTPAPKSRRAHRSTSADSASSSDTSRSRSRSAAAKTHTTALAGRSPSPASGRRGEGDAPFSEPGTTSTQRPSSPETATKQPSSPYEDKDKDKKEKSATRPSPSPERSSTGPEPPAPTPLLAERHGGSPQPLATTPLSQEPVNP

SEQ ID NO: 77723 - protein, 41 aa, Homo sapiens
  Payload ID: 15492
  Gene Symbol: SRRM2
  Gene Name: serine/arginine repetitive matrix 2
  ENSP ID: ENSP00000459157
QGVSLLPQQSRGRVLVCSPLNLGSPWMEGSLSLPFFFSLFL

SEQ ID NO: 77724 - protein, 184 aa, Homo sapiens
  Payload ID: 15492
  Gene Symbol: SRRM2
  Gene Name: serine/arginine repetitive matrix 2
  ENSP ID: ENSP00000460642
  MOD_RES (1)..(1): Any amino acid
XPPLLDRARSRTPPSAPSQSRMTSERAPSPSSRMGQAPSQSLLPPAQDQPRSPVPSAFSDQSRCLIAQTTPVAGSQSLSSGAVATTTSSAGDHNGMLSVPAPGVPHSDVGEPPASTGAQQPSALAALQPAKERRSSSSSSSSSSSSSSSSSSSSSSSSSGSSSSDSEGSSLPVQPEVALKRGQN

SEQ ID NO: 77725 - protein, 1018 aa, Homo sapiens
  Payload ID: 15492
  Gene Symbol: SRRM2
  Gene Name: serine/arginine repetitive matrix 2
  ENSP ID: ENSP00000461181
MYNGIGLPTPRGSGTNGYVQRNLSLVRGRRGERPDYKGEEELRRLEAALVKRPNPDILDHERKRRVELRCLELEEMMEEQGYEEQQIQEKVATFRLMLLEKDVNPGGKEETPGQRPAVTETHQLAELNEKKNERLRAAFGISDSYVDGSSFDPQRRAREAKQPAPEPPKPYSLVRESSSSRSPTPKQKKKKKKKDRGRRSESSSPRRERKKSSKKKKHRSESESKKRKHRSPTPKSKRKSKDKKRKRSRSTTPAPKSRRAHRSTSADSASSSDTSRSRSRSAAAKTHTTALAGRSPSPASGRRGEGDAPFSEPGTTSTQRPSSPETATKQPSSPYEDKDKDKKEKSATRPSPSPERSSTGPEPPAPTPLLAERHGGSPQPLATTPLSQEPVNPPSEASPTRDRSPPKSPEKLPQSSSSESSPPSPQPTKVSRHASSSPESPKPAPAPGSHREISSSPTSKNRSHGRAKRDKSHSHTPSRRMGRSRSPATAKRGRSRSRTPTKRGHSRSRSPQWRRSRSAQRWGRSRSPQRRGRSRSPQRPGWSRSRNTQRRGRSRSARRGRSHSRSPATRGRSRSRTPARRGRSRSRTPARRRSRSRTPTRRRSRSRTPARRGRSRSRTPARRRSRTRSPVRRRSRSRSPARRSGRSRSRTPARRGRSRSRTPARRGRSRSRTPARRSGRSRSRTPARRGRSRSRTPRRGRSRSRSLVRRGRSHSRTPQRRGRSGSSSERKNKSRTSQRRSRSNSSPEMKKSRISSRRSRSLSSPRSKAKSRLSLRRSLSGSSPCPKQKSQTPPRRSRSGSSQPKAKSRTPPRRSRSSSSPPPKQKSKTPSRQSHSSSSPHPKVKSGTPPRQGSITSPQANEQSVTPQRRSCFESSPDPELKSRTPSRHSCSGSSPPRVKSSTPPRQSPSRSSSPQPKVKAIISPRQRSHSGSSSPSPSRVTSRTTPRRSRSVSPCSNVESRLLPRYSHSGSSSPDTKVKPETPPRQSHSGSISPYPKVKAQTPPGPSLSGSKSPCPQ

SEQ ID NO: 77726 - protein, 78 aa, Homo sapiens
  Payload ID: 15492
  Gene Symbol: SRRM2
  Gene Name: serine/arginine repetitive matrix 2
  ENSP ID: ENSP00000461535
  MOD_RES (1)..(1): Any amino acid
XRSPRKPIDSLRDSRSLSYSPVERRRPSPQPSPRDQQSSSSERGSRRGQRGDSRSPSHKRRRETPSPRPMRHRSSRSP

SEQ ID NO: 77727 - protein, 251 aa, Homo sapiens
  Payload ID: 15492
  Gene Symbol: SRRM2
  Gene Name: serine/arginine repetitive matrix 2
  ENSP ID: ENSP00000484503
MLLEKDVNPGGKEETPGQRPAVTETHQLAELNEKKNERLRAAFGISDSYVDGSSFDPQRRAREAKQPAPEPPKPYSLVRESSSSRSPTPKQKKKKKKKDRGRRSESSSPRRERKKSSKKKKHRSESESKKRKHRSPTPKSKRKSKDKKRKRSRSTTPAPKSRRAHRSTSADSASSSDTSRSRSRSAAAKTHTTALAGRSPSPASGRRGEGDAPFSEPGTTSTQRPSSPETATKQPSSPYEDKDKDKKEVCS

SEQ ID NO: 77728 - protein, 311 aa, Homo sapiens
  Payload ID: 15492
  Gene Symbol: SRRM2
  Gene Name: serine/arginine repetitive matrix 2
  Uniprot ID: Q9UQ35
  ENSP ID: ENSP00000487247
MLLEKDVNPGGKEETPGQRPAVTETHQLAELNEKKNERLRAAFGISDSYVDGSSFDPQRRAREAKQPAPEPPKPYSLVRESSSSRSPTPKQKKKKKKKDRGRRSESSSPRRERKKSSKKKKHRSESESKKRKHRSPTPKSKRKSKDKKRKRSRSTTPAPKSRRAHRSTSADSASSSDTSRSRSRSAAAKTHTTALAGRSPSPASGRRGEGDAPFSEPGTTSTQRPSSPETATKQPSSPYEDKDKDKKEKSATRPSPSPERSSTGPEPPAPTPLLAERHGGSPQPLATTPLSQEPVNPSPQLFMFLKGILVF

SEQ ID NO: 77729 - protein, 653 aa, Homo sapiens
  Payload ID: 15493
  Gene Symbol: SRRM3
  Gene Name: serine/arginine repetitive matrix 3
  ENSP ID: ENSP00000480851
MSSTVNNGAASMQSTPDAANGFPQPSSSSGTWPRAEEELRAAEPGLVKRAHREILDHERKRRVELKCMELQEMMEEQGYSEEEIRQKVGTFRQMLMEKEGVLTREDRPGGHIVAETPRLTEGAEPGLEYAPFDDDDGPVDCDCPASCYRGHRGYRTKHWSSSSASPPPKKKKKKKGGHRRSRKKRRLESECSCGSSSPLRKKKKSVKKHRRDRSDSGSRRKRRHRSRSSKCKRKEKNKEKKRPHTESPGRRSHRHSSGSSHSPSLSSHYSDSRSPSRLSPKHRDEGRKTGSQRSSGSRSPSPSGGSGWGSPQRNGGSGQRSGAHGGRPGSAHSPPDKPSSPSPRVRDKAAAAAPTPPARGKESPSPRSAPSSQGRGGRAAGGAGRRRRRRRRRRRSRSSASAPRRRGRRRPRPAPPRGSSRSLSRARSSSDSGSGRGAPGPGPEPGSERGHGGHGKRAKERPPRARPASTSPSPGAHGRRGGPEGKSSSRSPGPHPRSWSSSRSPSKSRSRSAEKRPHSPSRSPSPKKPLSRDKDGEGRARHSEAEATRARRRSRSYSPIRKRRRDSPSFMEPRRITSARKRPIPYYRPSPSSSSSCLSSDYSTRSHSRSPSPGHSHGSYSSRSHGTRSRTRSPSRTPSPSYHSRSSSESGGF

SEQ ID NO: 77730 - protein, 109 aa, Homo sapiens
  Payload ID: 15493
  Gene Symbol: SRRM3
  Gene Name: serine/arginine repetitive matrix 3
  ENSP ID: ENSP00000483698
SGSSHSPSLSSHYSDSRSPSRLSPKHRDEGRKTGSQRSSGSRSPSPSGGSGWGSPQRNGGSGQRSGAHGGRPGSAHSPPDVRTLRFAEGSRAAGCAVRGRAGRQRGRGR

SEQ ID NO: 77731 - protein, 611 aa, Homo sapiens
  Payload ID: 15494
  Gene Symbol: SRRM4
  Gene Name: serine/arginine repetitive matrix 4
  Uniprot ID: A7MD48
  ENSP ID: ENSP00000267260
MASVQQGEKQLFEKFWRGTFKAVATPRPESIIVASITARKPLPRTEPQNNPVVPAQDGPSEKLGQHLATEPLGTNSWERDKTCRELGATRGHSASHDKDLTPPPSSRGKKKKKKSTRKKRRRSSSYSPSPVKKKKKKSSKKHKRRRSFSKKRRHSSSSPKSKRRDEKRHKKQSRSRPRKSHRHRHHRCPSRSQSSESRPSSCESRHRGRSPEEGQKSRRRHSRRCSKTLCKDSPEAQSSRPPSQPLQMLGYLSARGVITGSGSAADLFTKTASPLTTSRGRSQEYDSGNDTSSPPSTQTSSARSRGQEKGSPSGGLSKSRELNSGNTSDSGNSFTTSSPQNKGAMLENLSPTSRGRESRGFQSPCLECAEVKKSSLVPSTARSSPMKGCSRSSSYASTRSSSHSSRSPNPRASPRYTQSRSTSSEKRSYSRSPSYSSKSGKRSPPSRSSRSRRSPSYSRYSPSRERDPKYSEKDSQQRERERARRRRRSYSPMRKRRRDSPSHLEARRITSARKRPIPYYRPSPSSSGSLSSTSSWYSSSSSRSASRSYSRSRSRSRSRRRSRTRTSSSSSSRSPSPGSRSRSRSRSRSRSRSRSQSRSYSSADSYSSTRR

SEQ ID NO: 77732 - protein, 715 aa, Homo sapiens
  Payload ID: 15495
  Gene Symbol: SRRM5
  Gene Name: serine/arginine repetitive matrix 5
  Uniprot ID: B3KS81
  ENSP ID: ENSP00000414512
MSSPKRSSKPSMSLAPSGSSMPTADPKPPASLKSTKSATPNRSLVPTKPATSRNSVMSPSSSKSTKSTSTKRAPSNRPSSRSRVRSKARTPSRVSTDTRTSKASKASDVRCHQRRGTHSRGRTPGRRGSRSSKRSPSRASTPGRIRTHGARPGMASRVRTPTSQQKGSRGKSYGRPRTSNRERSDSQPRNLSKKSYRPPGGSGIGRSSELAVTPSTAKCQTPTGIPSKEKSDNPSPSSSRKVKSYGQMIIPSREKSYSPTEMSSRVKSYNQASTRSRPQSHSQSRSPRRSRSGSQKRTHSRVRSHSWKRNHSRARSRTRKGILSQMGRHSQSRSHSKGKSQNQSRTPRRGRSHNWSRNPSKERSHSHSRSSSKERDHRGSSSPRKESGRSQSGSPNKQRDHSRSRSPNKARDRSRSRSPYKARDRSRSRSPNKARDCSRSRSPYKARDRSRSRSPNKARDHSRSRSPNKARDRSRSRSPSKERDHSQLGSPSKERDHRRSRSPSKERQCRQSRSSSKERDHRRSRSPSKERQRRQSRSPNKERDRSQSRSPSEEREHRQSRSPSKERDRRRWRSPSKERERRQSRSSSEERDHSRSRSPNKQSGYSRPRASSKEKAHSRSRTPSKEGNHSQSRTSSKESDPSQSTVPRSPDWKRSPTRTSSLSQNRTPSKTSSHSPSTFPSGGQTLSQDDSQADATTSKATLPGERSSSSSSKLA

SEQ ID NO: 77733 - protein, 715 aa, Homo sapiens; identical to SEQ ID NO: 77732
  Payload ID: 15495
  Gene Symbol: SRRM5
  Gene Name: serine/arginine repetitive matrix 5
  Uniprot ID: B3KS81
  ENSP ID: ENSP00000476253

SEQ ID NO: 77734 - protein, 248 aa, Homo sapiens
  Payload ID: 15496
  Gene Symbol: SRSF1
  Gene Name: serine/arginine-rich splicing factor 1
  Uniprot ID: Q07955
  ENSP ID: ENSP00000258962
MSGGGVIRGPAGNNDCRIYVGNLPPDIRTKDIEDVFYKYGAIRDIDLKNRRGGPPFAFVEFEDPRDAEDAVYGRDGYDYDGYRLRVEFPRSGRGTGRGGGGGGGGGAPRGRYGPPSRRSENRVVVSGLPPSGSWQDLKDHMREAGDVCYADVYRDGTGVVEFVRKEDMTYAVRKLDNTKFRSHEGETAYIRVKVDGPRSPSYGRSRSRSRSRSRSRSRSNSRSRSYSPRRSRGSPRYSPRHSRSRSRT

SEQ ID NO: 77735 - protein, 201 aa, Homo sapiens
  Payload ID: 15496
  Gene Symbol: SRSF1
  Gene Name: serine/arginine-rich splicing factor 1
  Uniprot ID: Q07955
  ENSP ID: ENSP00000462215
MSGGGVIRGPAGNNDCRIYVGNLPPDIRTKDIEDVFYKYGAIRDIDLKNRRGGPPFAFVEFEDPRDAEDAVYGRDGYDYDGYRLRVEFPRSGRGTGRGGGGGGGGGAPRGRYGPPSRRSENRVVVSGLPPSGSWQDLKDHMREAGDVCYADVYRDGTGVVEFVRKEDMTYAVRKLDNTKFRSHEVGYTRILFFDQNWIQWS

SEQ ID NO: 77736 - protein, 143 aa, Homo sapiens
  Payload ID: 15496
  Gene Symbol: SRSF1
  Gene Name: serine/arginine-rich splicing factor 1
  ENSP ID: ENSP00000462616
  MOD_RES (1)..(1): Any amino acid
XAPRGRYGPPSRRSENRVVVSGLPPSGSWQDLKDHMREAGDVCYADVYRDGTGVVEFVRKEDMTYAVRKLDNTKFRSHEGETAYIRVKVDGPRSPSYGRSRSRSRSRSRSRSRSNSRSRSYSPRRSRGSPRYSPRHSRSRSRT

SEQ ID NO: 77737 - protein, 73 aa, Homo sapiens
  Payload ID: 15496
  Gene Symbol: SRSF1
  Gene Name: serine/arginine-rich splicing factor 1
  ENSP ID: ENSP00000462687
MSGGGVIRGPAGNNDCRIYVGNLPPDIRTKDIEDVFYKYGAIRDIDLKNRRGGPPFAFVEFEDPRDAEDAVHI

SEQ ID NO: 77738 - protein, 253 aa, Homo sapiens
  Payload ID: 15496
  Gene Symbol: SRSF1
  Gene Name: serine/arginine-rich splicing factor 1
  ENSP ID: ENSP00000463042
MSGGGVIRGPAGNNDCRIYVGNLPPDIRTKDIEDVFYKYGAIRDIDLKNRRGGPPFAFVEFEDPRDAEDAVYGRDGYDYDGYRLRVEFPRSGRGTGRGGGGGGGGGAPRGRYGPPSRRSENRVVVSGLPPSGSWQDLKDHMREAGDVCYADVYRDGTGVVEFVRKEDMTYAVRKLDNTKFRSHEGETAYIRVKVDGPRSPSYGRSRSRSRSRSRSRSRSNSRSRSYSPRRSRGSPRYSPRHSRSRSHISEEMD

SEQ ID NO: 77739 - protein, 201 aa, Homo sapiens; identical to SEQ ID NO: 77735
  Payload ID: 15496
  Gene Symbol: SRSF1
  Gene Name: serine/arginine-rich splicing factor 1
  Uniprot ID: Q07955
  ENSP ID: ENSP00000463223

SEQ ID NO: 77740 - protein, 65 aa, Homo sapiens
  Payload ID: 15496
  Gene Symbol: SRSF1
  Gene Name: serine/arginine-rich splicing factor 1
  ENSP ID: ENSP00000463917
MSGGGVIRGPAGNNDCRIYVGNLPPDIRTKDIEDVFYKYGAIRDIDLKNRRGGPPFAFVEFEDPR

SEQ ID NO: 77741 - protein, 183 aa, Homo sapiens
  Payload ID: 15497
  Gene Symbol: SRSF10
  Gene Name: serine/arginine-rich splicing factor 10
  Uniprot ID: O75494
  ENSP ID: ENSP00000342913
MSRYLRPPNTSLFVRNVADDTRSEDLRREFGRYGPIVDVYVPLDFYTRRPRGFAYVQFEDVRDAEDALHNLDRKWICGRQIEIQFAQGDRKTPNQMKAKEGRNVYSSSRYDDYDRYRRSRSRSYERRRSRSRSFDYNYRRSYSPRNSRPTGRPRRSRSHSDNDRPNCSWNTQYSSAYYTSRKI

SEQ ID NO: 77742 - protein, 261 aa, Homo sapiens
  Payload ID: 15497
  Gene Symbol: SRSF10
  Gene Name: serine/arginine-rich splicing factor 10
  Uniprot ID: O75494
  ENSP ID: ENSP00000344149
MSRYLRPPNTSLFVRNVADDTRSEDLRREFGRYGPIVDVYVPLDFYTRRPRGFAYVQFEDVRDAEDALHNLDRKWICGRQIEIQFAQGDRKTPNQMKAKEGRNVYSSSRYDDYDRYRRSRSRSYERRRSRSRSFDYNYRRSYSPRNRPTGRPRRSRSHSDNDRFKHRNRSFSRSKSNSRSRSKSQPKKEMKAKSRSRSASHTKTRGTSKTDSKTHYKSGSRYEKESRKKEPPRSKSQSRSQSRSRSKSRSRSWTSPKSSGH

SEQ ID NO: 77743 - protein, 173 aa, Homo sapiens
  Payload ID: 15497
  Gene Symbol: SRSF10
  Gene Name: serine/arginine-rich splicing factor 10
  Uniprot ID: O75494
  ENSP ID: ENSP00000363576
MSRYLRPPNTSLFVRNVADDTRSEDLRREFGRYGPIVDVYVPLDFYTRRPRGFAYVQFEDVRDAEDALHNLDRKWICGRQIEIQFAQGDRKTPNQMKAKEGRNVYSSSRYDDYDRYRRSRSRSYERRRSRSRSFDYNYRRSYSPRNSRPTGRPRRSRSHSDNDSQVSKKKNER

SEQ ID NO: 77744 - protein, 172 aa, Homo sapiens
  Payload ID: 15497
  Gene Symbol: SRSF10
  Gene Name: serine/arginine-rich splicing factor 10
  ENSP ID: ENSP00000363577
MSRYLRPPNTSLFVRNVADDTRSEDLRREFGRYGPIVDVYVPLDFYTRRPRGFAYVQFEDVRDAEDALHNLDRKWICGRQIEIQFAQGDRKTPNQMKAKEGRNVYSSSRYDDYDRYRRSRSRSYERRRSRSRSFDYNYRRSYSPRNRPTGRPRRSRSHSDNDSQVSKKKNER

SEQ ID NO: 77745 - protein, 182 aa, Homo sapiens
  Payload ID: 15497
  Gene Symbol: SRSF10
  Gene Name: serine/arginine-rich splicing factor 10
  Uniprot ID: O75494
  ENSP ID: ENSP00000388991
MSRYLRPPNTSLFVRNVADDTRSEDLRREFGRYGPIVDVYVPLDFYTRRPRGFAYVQFEDVRDAEDALHNLDRKWICGRQIEIQFAQGDRKTPNQMKAKEGRNVYSSSRYDDYDRYRRSRSRSYERRRSRSRSFDYNYRRSYSPRNRPTGRPRRSRSHSDNDRPNCSWNTQYSSAYYTSRKI

SEQ ID NO: 77746 - protein, 165 aa, Homo sapiens
  Payload ID: 15497
  Gene Symbol: SRSF10
  Gene Name: serine/arginine-rich splicing factor 10
  Uniprot ID: O75494
  ENSP ID: ENSP00000419813
MSRYLRPPNTSLFVRNVADDTRSEDLRREFGRYGPIVDVYVPLDFYTRRPRGFAYVQFEDVRDAEDALHNLDRKWICGRQIEIQFAQGDRKTPNQMKAKEGRNVYSSSRYDDYDRYRRSRSRSYERRRSRSRSFDYNYRRSYSPRKPNCSWNTQYSSAYYTSRKI

SEQ ID NO: 77747 - protein, 262 aa, Homo sapiens
  Payload ID: 15497
  Gene Symbol: SRSF10
  Gene Name: serine/arginine-rich splicing factor 10
  Uniprot ID: O75494
  ENSP ID: ENSP00000420195
MSRYLRPPNTSLFVRNVADDTRSEDLRREFGRYGPIVDVYVPLDFYTRRPRGFAYVQFEDVRDAEDALHNLDRKWICGRQIEIQFAQGDRKTPNQMKAKEGRNVYSSSRYDDYDRYRRSRSRSYERRRSRSRSFDYNYRRSYSPRNSRPTGRPRRSRSHSDNDRFKHRNRSFSRSKSNSRSRSKSQPKKEMKAKSRSRSASHTKTRGTSKTDSKTHYKSGSRYEKESRKKEPPRSKSQSRSQSRSRSKSRSRSWTSPKSSGH

SEQ ID NO: 77748 - protein, 69 aa, Homo sapiens
  Payload ID: 15497
  Gene Symbol: SRSF10
  Gene Name: serine/arginine-rich splicing factor 10
  ENSP ID: ENSP00000473291
MSRYLRPPNTSLFVRNVADDTRSEDLRREFGRYGPIVDVYVPLDFYTRRPRGFAYVQYPFFRWLISEGC

SEQ ID NO: 77749 - protein, 40 aa, Homo sapiens
  Payload ID: 15497
  Gene Symbol: SRSF10
  Gene Name: serine/arginine-rich splicing factor 10
  ENSP ID: ENSP00000473293
MSRYLRPPNTSLFVRNVADDTSTKSDESQGREECVQFFTL

SEQ ID NO: 77750 - protein, 424 aa, Homo sapiens
  Payload ID: 15498
  Gene Symbol: SRSF11
  Gene Name: serine/arginine-rich splicing factor 11
  ENSP ID: ENSP00000359987
MINNHRNQALYFSEHKYFQQTQVVYQGDIFWVFLCVFCLRKECVLMQGCFSAGVIPDEAKALSLLAPANAVAGLLPGGGLLPTPNPLTQIGAVPLAALGAPTLDPALAALGLPGANLNSQSLAADQLLKLMSTVDPKLNHVAAGLVSPSLKSDTSSKEIEEAMKRVREAQSLISAAIEPDKKEEKRRHSRSRSRSRRRRTPSSSRHRRSRSRSRRRSHSKSRSRRRSKSPRRRRSHSRERGRRSRSTSKTRDKKKEDKEKKRSKTPPKSYSTARRSRSASRERRRRRSRSGTRSPKKPRSPKRKLSRSPSPRRHKKEKKKDKDKERSRDERERSTSKKKKSKDKEKDRERKSESDKDVKQVTRDYDEEEQGYDSEKEKKEEKKPIETGSPKTKECSVEKGTGDSLRESKVNGDDHHEEDMDMSD

SEQ ID NO: 77751 - protein, 484 aa, Homo sapiens
  Payload ID: 15498
  Gene Symbol: SRSF11
  Gene Name: serine/arginine-rich splicing factor 11
  Uniprot ID: Q05519
  ENSP ID: ENSP00000359988
MSNTTVVPSTAGPGPSGGPGGGGGGGGGGGGTEVIQVTNVSPSASSEQMRTLFGFLGKIDELRLFPPDDSPLPVSSRVCFVKFHDPDSAVVAQHLTNTVFVDRALIVVPYAEGVIPDEAKALSLLAPANAVAGLLPGGGLLPTPNPLTQIGAVPLAALGAPTLDPALAALGLPGANLNSQSLAADQLLKLMSTVDPKLNHVAAGLVSPSLKSDTSSKEIEEAMKRVREAQSLISAAIEPDKKEEKRRHSRSRSRSRRRRTPSSSRHRRSRSRSRRRSHSKSRSRRRSKSPRRRRSHSRERGRRSRSTSKTRDKKKEDKEKKRSKTPPKSYSTARRSRSASRERRRRRSRSGTRSPKKPRSPKRKLSRSPSPRRHKKEKKKDKDKERSRDERERSTSKKKKSKDKEKDRERKSESDKDVKQVTRDYDEEEQGYDSEKEKKEEKKPIETGSPKTKECSVEKGTGDSLRESKVNGDDHHEEDMDMSD

SEQ ID NO: 77752 - protein, 483 aa, Homo sapiens
  Payload ID: 15498
  Gene Symbol: SRSF11
  Gene Name: serine/arginine-rich splicing factor 11
  Uniprot ID: Q05519
  ENSP ID: ENSP00000359989
MSNTTVVPSTAGPGPSGGPGGGGGGGGGGGGTEVIQVTNVSPSASSEQMRTLFGFLGKIDELRLFPPDDSPLPVSSRVCFVKFHDPDSAVVAQHLTNTVFVDRALIVVPYAEGVIPDEAKALSLLAPANAVAGLLPGGGLLPTPNPLTQIGAVPLAALGAPTLDPALAALGLPGANLNSQSLAADQLLKLMSTVDPKLNHVAAGLVSPSLKSDTSSKEIEEAMKRVREAQSLISAAIEPDKKEEKRRHSRSRSRSRRRRTPSSSRHRRSRSRSRRRSHSKSRSRRRSKSPRRRRSHSRERGRRSRSTSKTRDKKKEDKEKKRSKTPPKSYSTARRSRSASRERRRRRSRSGTRSPKKPRSPKRKLSRSPSPRRHKKEKKKDKDKERSRDERERSTSKKKKSKDKEKDRERKSESDKDVKVTRDYDEEEQGYDSEKEKKEEKKPIETGSPKTKECSVEKGTGDSLRESKVNGDDHHEEDMDMSD

SEQ ID NO: 77753 - protein, 389 aa, Homo sapiens [sequence omitted]

SEQ ID NO: 77754 - protein, 80 aa, Homo sapiens
  Payload ID: 15498
  Gene Symbol: SRSF11
  Gene Name: serine/arginine-rich splicing factor 11
  ENSP ID: ENSP00000474149
MSNTTVVPSTAGPGPSGGPGGGGGGGGGGGGTEVIQVTNVSPSASSEQMRTLFGFLGKIDELRLFPPDSMIQTQQLWHSI

SEQ ID NO: 77755 - protein, 128 aa, Homo sapiens
  Payload ID: 15498
  Gene Symbol: SRSF11
  Gene Name: serine/arginine-rich splicing factor 11
  ENSP ID: ENSP00000474372
MSNTTVVPSTAGPGPSGGPGGGGGGGGGGGGTEVIQVTNVSPSASSEQMRTLFGFLGKIDELRLFPPDDSPLPVSSRVCFVKFHDPDSAVVAQHLTNTVFVDRALIVVPYAEVKQPTRVVVHKTAFES

SEQ ID NO: 77756 - protein, 261 aa, Homo sapiens
  Payload ID: 15499
  Gene Symbol: SRSF12
  Gene Name: serine/arginine-rich splicing factor 12
  Uniprot ID: Q8WXF0
  ENSP ID: ENSP00000414302
MSRYTRPPNTSLFIRNVADATRPEDLRREFGRYGPIVDVYIPLDFYTRRPRGFAYVQFEDVRDAEDALYNLNRKWVCGRQIEIQFAQGDRKTPGQMKSKERHPCSPSDHRRSRSPSQRRTRSRSSSWGRNRRRSDSLKESRHRRFSYSQSKSRSKSLPRRSTSARQSRTPRRNFGSRGRSRSKSLQKRSKSIGKSQSSSPQKQTSSGTKSRSHGRHSDSIARSPCKSPKGYTNSETKVQTAKHSHFRSHSRSRSYRHKNSW

SEQ ID NO: 77757 - protein, 41 aa, Homo sapiens
  Payload ID: 15499
  Gene Symbol: SRSF12
  Gene Name: serine/arginine-rich splicing factor 12
  ENSP ID: ENSP00000427982
MSRYTRPPNTSLFIRNVADATRSKAVHSSWQAPPSLNQPVS

SEQ ID NO: 77758 - protein, 42 aa, Homo sapiens
  Payload ID: 15499
  Gene Symbol: SRSF12
  Gene Name: serine/arginine-rich splicing factor 12
  ENSP ID: ENSP00000430513
MSRYTRPPNTSLFIRNVADATRRSKAVHSSWQAPPSLNQPVS

SEQ ID NO: 77759 - protein, 133 aa, Homo sapiens
  Payload ID: 15500
  Gene Symbol: SRSF2
  Gene Name: serine/arginine-rich splicing factor 2
  ENSP ID: ENSP00000350877
MSYGRPPPDVEGMTSLKVDNLTYRTSPDTLRRVFEKYGRVGDVYIPRDRYTKESRGFAFVRFHDKRDAEDAMDAMDGAVLDGRELRVQMARYGRPPDSHHSRRGPPPRRYGGGGYGRRSRSRSRSRSRSRSRS

SEQ ID NO: 77760 - protein, 221 aa, Homo sapiens
  Payload ID: 15500
  Gene Symbol: SRSF2
  Gene Name: serine/arginine-rich splicing factor 2
  Uniprot ID: Q01130
  ENSP ID: ENSP00000353089
MSYGRPPPDVEGMTSLKVDNLTYRTSPDTLRRVFEKYGRVGDVYIPRDRYTKESRGFAFVRFHDKRDAEDAMDAMDGAVLDGRELRVQMARYGRPPDSHHSRRGPPPRRYGGGGYGRRSRSPRRRRRSRSRSRSRSRSRSRSRYSRSKSRSRTRSRSRSTSKSRSARRSKSKSSSVSRSRSRSRSRSRSRSPPPVSKRESKSRSRSKSPPKSPEEEGAVSS

SEQ ID NO: 77761 - protein, 221 aa, Homo sapiens; identical to SEQ ID NO: 77760
  Payload ID: 15500
  Gene Symbol: SRSF2
  Gene Name: serine/arginine-rich splicing factor 2
  Uniprot ID: Q01130
  ENSP ID: ENSP00000376276

SEQ ID NO: 77762 - protein, 221 aa, Homo sapiens; identical to SEQ ID NO: 77760
  Payload ID: 15500
  Gene Symbol: SRSF2
  Gene Name: serine/arginine-rich splicing factor 2
  Uniprot ID: Q01130
  ENSP ID: ENSP00000391278

SEQ ID NO: 77763 - protein, 209 aa, Homo sapiens
  Payload ID: 15500
  Gene Symbol: SRSF2
  Gene Name: serine/arginine-rich splicing factor 2
  Uniprot ID: Q01130
  ENSP ID: ENSP00000441780
MSYGRPPPDVEGMTSLKVDNLTYRTSPDTLRRVFEKYGRVGDVYIPRDRYTKESRGFAFVRFHDKRDAEDAMDAMDGAVLDGRELRVQMARYGRPPDSHHSRRGPPPRSPRRRRRSRSRSRSRSRSRSRSRYSRSKSRSRTRSRSRSTSKSRSARRSKSKSSSVSRSRSRSRSRSRSRSPPPVSKRESKSRSRSKSPPKSPEEEGAVSS

SEQ ID NO: 77764 - protein, 221 aa, Homo sapiens; identical to SEQ ID NO: 77760
  Payload ID: 15500
  Gene Symbol: SRSF2
  Gene Name: serine/arginine-rich splicing factor 2
  Uniprot ID: Q01130
  ENSP ID: ENSP00000462425

SEQ ID NO: 77765 - protein, 130 aa, Homo sapiens
  Payload ID: 15500
  Gene Symbol: SRSF2
  Gene Name: serine/arginine-rich splicing factor 2
  ENSP ID: ENSP00000463317
MSYGRPPPDVEGMTSLKVDNLTYRTSPDTLRRVFEKYGRVGDVYIPRDRYTKESRGFAFVRFHDKRDAEDAMDAMDGAVLDGRELRVQMARYGRPPDSHHSRRGPPPRSRSRSRSRSRSRSRSRYSRSKS

SEQ ID NO: 77766 - protein, 164 aa, Homo sapiens
  Payload ID: 15501
  Gene Symbol: SRSF3
  Gene Name: serine/arginine-rich splicing factor 3
  Uniprot ID: P84103
  ENSP ID: ENSP00000362820
MHRDSCPLDCKVYVGNLGNNGNKTELERAFGYYGPLRSVWVARNPPGFAFVEFEDPRDAADAVRELDGRTLCGCRVRVELSNGEKRSRNRGPPPSWGRRPRDDYRRRSPPPRRRSPRRRSFSRSRSRSLSRDRRRERSLSRERNHKPSRSFSRSRSRSRSNERK

SEQ ID NO: 77767 - protein, 124 aa, Homo sapiens
  Payload ID: 15501
  Gene Symbol: SRSF3
  Gene Name: serine/arginine-rich splicing factor 3
  Uniprot ID: P84103
  ENSP ID: ENSP00000436036
MHRDSCPLDCKVYVGNLGNNGNKTELERAFGYYGPLRSVWVARNPPGFAFVEFEDPRDAADAVRELDGRTLCGCRVRVELSNGEKRSRNRGPPPSWGRRPRDDYRRRSPPPRRRVTIMSLLTTL

SEQ ID NO: 77768 - protein, 164 aa, Homo sapiens; identical to SEQ ID NO: 77766
  Payload ID: 15501
  Gene Symbol: SRSF3
  Gene Name: serine/arginine-rich splicing factor 3
  Uniprot ID: P84103
  ENSP ID: ENSP00000482833

SEQ ID NO: 77769 - protein, 95 aa, Homo sapiens
  Payload ID: 15501
  Gene Symbol: SRSF3
  Gene Name: serine/arginine-rich splicing factor 3
  ENSP ID: ENSP00000484891
MHRDSCPLDCKVYVGNLGNNGNKTELERAFGYYGPLRSVWVARNPPGFAFVEFEDPRDAADAVRELDGRLECNGVILARCNLCLLGSSDSPASAA

SEQ ID NO: 77770 - protein, 494 aa, Homo sapiens
  Payload ID: 15502
  Gene Symbol: SRSF4
  Gene Name: serine/arginine-rich splicing factor 4
  Uniprot ID: Q08170
  ENSP ID: ENSP00000362900
MPRVYIGRLSYQARERDVERFFKGYGKILEVDLKNGYGFVEFDDLRDADDAVYELNGKDLCGERVIVEHARGPRRDGSYGSGRSGYGYRRSGRDKYGPPTRTEYRLIVENLSSRCSWQDLKDYMRQAGEVTYADAHKGRKNEGVIEFVSYSDMKRALEKLDGTEVNGRKIRLVEDKPGSRRRRSYSRSRSHSRSRSRSRHSRKSRSRSGSSKSSHSKSRSRSRSGSRSRSKSRSRSQSRSRSKKEKSRSPSKEKSRSRSHSAGKSRSKSKDQAEEKIQNNDNVGKPKSRSPSRHKSKSKSRSRSQERRVEEEKRGSVSRGRSQEKSLRQSRSRSRSKGGSRSRSRSRSKSKDKRKGRKRSREESRSRSRSRSKSERSRKRGSKRDSKAGSSKKKKKEDTDRSQSRSPSRSVSKEREHAKSESSQREGRGESENAGTNQETRSRSRSNSKSKPNLPSESRSRSKSASKTRSRSKSRSRSASRSPSRSRSRSHSRS

SEQ ID NO: 77771 - protein, 160 aa, Homo sapiens
  Payload ID: 15502
  Gene Symbol: SRSF4
  Gene Name: serine/arginine-rich splicing factor 4
  ENSP ID: ENSP00000473728
MPRVYIGRLSYQARERDVERFFKGYGKILEVDLKNGLLCSEPTHVFGRTRWLTLANGNQKTSESNLVVTYPQLRGASPCPKVGKDQVQTELWPTFADQESTLALIREPLVCGNCQFADVKRVPDWVMVSPEVAPQLCHSVSTATSLILTSHGEVRFLQGK

SEQ ID NO: 77772 - protein, 378 aa, Homo sapiens
  Payload ID: 15502
  Gene Symbol: SRSF4
  Gene Name: serine/arginine-rich splicing factor 4
  ENSP ID: ENSP00000485813
MPRVYIGRLSYQARERDVERFFKGYGKILEVDLKNGYGFVEFDDLRDADDAVYELNGKDLCGERVIVEHARGPRRDGSYGSGRSGYGYRRSGRDKYGPPTRTEYRLIVENLSSRCSWQDLKDYMRQAGEVTYADAHKGRKNEGVIEFVSYSDMKRALEKLDGTEVNGRKIRLVEDKPGSRRRRSYSRSRSHSRSGSRSRSKSRSRSQSRSRSKKEKSRSPSKEKSRSRSHSAGKSRSKSKDQAEEKIQNNDNVGKPKSRSPSRHKSKSKSRSRSQERRVEEEKRGSVSRGRSQEKSLRQSRSRSRSKGGSRSRSRSRSKSKDKRKGRKRSREESRSRSRSRSKSERSRKRGSKRDSKAGSSKKKKKEDTDRSQSRSPS

SEQ ID NO: 77773 - protein, 45 aa, Homo sapiens
  Payload ID: 15502
  Gene Symbol: SRSF4
  Gene Name: serine/arginine-rich splicing factor 4
  ENSP ID: ENSP00000487379
  MOD_RES (1)..(1): Any amino acid
XYELNGKDLCGERVIVEHARGPRRDGSYGSGRKSFEAKMTACSIC

SEQ ID NO: 77774 - protein, 272 aa, Homo sapiens
  Payload ID: 15503
  Gene Symbol: SRSF5
  Gene Name: serine/arginine-rich splicing factor 5
  Uniprot ID: Q13243
  ENSP ID: ENSP00000377892
MSGCRVFIGRLNPAAREKDVERFFKGYGRIRDIDLKRGFGFVEFEDPRDADDAVYELDGKELCSERVTIEHARARSRGGRGRGRYSDRFSSRRPRNDRRNAPPVRTENRLIVENLSSRVSWQDLKDFMRQAGEVTFADAHRPKLNEGVVEFASYGDLKNAIEKLSGKEINGRKIKLIEGSKRHSRSRSRSRSRTRSSSRSRSRSRSRSRKSYSRSRSRSRSRSRSKSRSVSRSPVPEKSQKRGSSSRSKSPASVDRQRSRSRSRSRSVDSGN

SEQ ID NO: 77775 - protein, 138 aa, Homo sapiens
  Payload ID: 15503
  Gene Symbol: SRSF5
  Gene Name: serine/arginine-rich splicing factor 5
  ENSP ID: ENSP00000450918
MSGCRVFIGRLNPAAREKDVERFFKGYGRIRDIDLKRGFGFVEFEDPRDADDAVYELDGKELCSERVTIEHARARSRGGRGRGRYSDRFSSRRPRNDRRNAPPVRTENRLIVENLSSRVSWQPVCVVGLMTRSACGLS

SEQ ID NO: 77776 - protein, 272 aa, Homo sapiens; identical to SEQ ID NO: 77774
  Payload ID: 15503
  Gene Symbol: SRSF5
  Gene Name: serine/arginine-rich splicing factor 5
  Uniprot ID: Q13243
  ENSP ID: ENSP00000451088

SEQ ID NO: 77777 - protein, 269 aa, Homo sapiens
  Payload ID: 15503
  Gene Symbol: SRSF5
  Gene Name: serine/arginine-rich splicing factor 5
  Uniprot ID: Q13243
  ENSP ID: ENSP00000451391
MSGCRVFIGRLNPAAREKDVERFFKGYGRIRDIDLKRGFGFVDPRDADDAVYELDGKELCSERVTIEHARARSRGGRGRGRYSDRFSSRRPRNDRRNAPPVRTENRLIVENLSSRVSWQDLKDFMRQAGEVTFADAHRPKLNEGVVEFASYGDLKNAIEKLSGKEINGRKIKLIEGSKRHSRSRSRSRSRTRSSSRSRSRSRSRSRKSYSRSRSRSRSRSRSKSRSVSRSPVPEKSQKRGSSSRSKSPASVDRQRSRSRSRSRSVDSGN

SEQ ID NO: 77778 - protein, 124 aa, Homo sapiens
  Payload ID: 15503
  Gene Symbol: SRSF5
  Gene Name: serine/arginine-rich splicing factor 5
  ENSP ID: ENSP00000452090
MSGCRVFIGRLNPAAREKDVERFFKGYGRIRDIDLKRGFGFVEFEDPRDADDAVYELDGKELCSERVTIEHARARSRGGRGRGRYSDRFSSRRPRNDRRNAPPVRTENRLIVENLSSRVSWQVC

SEQ ID NO: 77779 - protein, 272 aa, Homo sapiens; identical to SEQ ID NO: 77774
  Payload ID: 15503
  Gene Symbol: SRSF5
  Gene Name: serine/arginine-rich splicing factor 5
  Uniprot ID: Q13243
  ENSP ID: ENSP00000452123

SEQ ID NO: 77780 - protein, 99 aa, Homo sapiens
  Payload ID: 15503
  Gene Symbol: SRSF5
  Gene Name: serine/arginine-rich splicing factor 5
  ENSP ID: ENSP00000452400
MSGCRVFIGRLNPAAREKDVERFFKGYGRIRDIDLKRGFGFVEFEDPRDADDAVYELDGKELCSERVTIEHARARSRGGRGRGRYSDRFSSRRPRNDRR

SEQ ID NO: 77781 - protein, 138 aa, Homo sapiens; identical to SEQ ID NO: 77775
  Payload ID: 15503
  Gene Symbol: SRSF5
  Gene Name: serine/arginine-rich splicing factor 5
  ENSP ID: ENSP00000452449

SEQ ID NO: 77782 - protein, 138 aa, Homo sapiens; identical to SEQ ID NO: 77775
  Payload ID: 15503
  Gene Symbol: SRSF5
  Gene Name: serine/arginine-rich splicing factor 5
  ENSP ID: ENSP00000474409

SEQ ID NO: 77783 - protein, 344 aa, Homo sapiens
  Payload ID: 15504
  Gene Symbol: SRSF6
  Gene Name: serine/arginine-rich splicing factor 6
  Uniprot ID: Q13247
  ENSP ID: ENSP00000244020
MPRVYIGRLSYNVREKDIQRFFSGYGRLLEVDLKNGYGFVEFEDSRDADDAVYELNGKELCGERVIVEHARGPRRDRDGYSYGSRSGGGGYSSRRTSGRDKYGPPVRTEYRLIVENLSSRCSWQDLKDFMRQAGEVTYADAHKERTNEGVIEFRSYSDMKRALDKLDGTEINGRNIRLIEDKPRTSHRRSYSGSRSRSRSRRRSRSRSRRSSRSRSRSISKSRSRSRSRSKGRSRSRSKGRKSRSKSKSKPKSDRGSHSHSRSRSKDEYEKSRSRSRSRSPKENGKGDIKSKSRSRSQSRSNSPLPVPPSKARSVSPPPKRATSRSRSRSRSKSRSRSRSSSRD

SEQ ID NO: 77784 - protein, 135 aa, Homo sapiens
  Payload ID: 15504
  Gene Symbol: SRSF6
  Gene Name: serine/arginine-rich splicing factor 6
  Uniprot ID: Q13247
  ENSP ID: ENSP00000433544
MPRVYIGRLSYNVREKDIQRFFSGYGRLLEVDLKNGYGFVEFEDSRDADDAVYELNGKELCGERVIVEHARGPRRDRDGYSYGSRMTNGAEAVSTEAKMTAFPDWPWLFHTLCDPCPMTLWLTLPEAMTTAAFCH

SEQ ID NO: 77785 - protein, 238 aa, Homo sapiens
  Payload ID: 15505
  Gene Symbol: SRSF7
  Gene Name: serine/arginine-rich splicing factor 7
  Uniprot ID: Q16629
  ENSP ID: ENSP00000325905
MSRYGRYGGETKVYVGNLGTGAGKGELERAFSYYGPLRTVWIARNPPGFAFVEFEDPRDAEDAVRGLDGKVICGSRVRVELSTGMPRRSRFDRPPARRPFDPNDRCYECGEKGHYAYDCHRYSRRRRSRSRSRSHSRSRGRRYSRSRSRSRGRRSRSASPRRSRSISLRRSRSASLRRSRSGSIKGSRYFQSPSRSRSRSRSISRPRSSRSKSRSPSPKRSRSPSGSPRRSASPERMD

SEQ ID NO: 77786 - protein, 235 aa, Homo sapiens
  Payload ID: 15505
  Gene Symbol: SRSF7
  Gene Name: serine/arginine-rich splicing factor 7
  ENSP ID: ENSP00000386806
MSRYGRYGGETKVYVGNLGTGAGKGELERAFSYYGPLRTVWIARNPPGFAFVEFEDPRDAEDAVRGLDGKVICGSRVRVELSTGMPRRSRFDRPPARRPFDPNDRCYECGEKGHYAYDCHRYSRRRRSRSRSRSHSRSRGRRYSRSRSRSRGRRSRSASPRRSRSISLRRSRSASLRRSRSGSIKGSRSPSRSRSRSRSISRPRSSRSKSRSPSPKRSRSPSGSPRRSASPERMD

SEQ ID NO: 77787 - protein, 110 aa, Homo sapiens
  Payload ID: 15505
  Gene Symbol: SRSF7
  Gene Name: serine/arginine-rich splicing factor 7
  ENSP ID: ENSP00000392300
  MOD_RES (1)..(1): Any amino acid
XDCHRYSRRRRSRSRSRSHSRSRGRRYSRSRSRSRGRRSRSASPRRSRSISLRRSRSASLRRSRSGSIKGSRYFQSPSRSRSRSRSISRPRSSRSPSGSPRRSASPERMD

SEQ ID NO: 77788 - protein, 132 aa, Homo sapiens
  Payload ID: 15505
  Gene Symbol: SRSF7
  Gene Name: serine/arginine-rich splicing factor 7
  Uniprot ID: Q16629
  ENSP ID: ENSP00000398159
MSRYGRYGGETKVYVGNLGTGAGKGELERAFSYYGPLRTVWIARNPPGFAFVEFEDPRDAEDAVRGLDGKVICGSRVRVELSTGMPRRSRFDRPPARRPFDPNDRCYECGEKGHYAYDCHRYSRRRRSRYLF

SEQ ID NO: 77789 - protein, 137 aa, Homo sapiens
  Payload ID: 15505
  Gene Symbol: SRSF7
  Gene Name: serine/arginine-rich splicing factor 7
  ENSP ID: ENSP00000400246
MSRYGRYGGETKVYVGNLGTGAGKGELERAFSYYGPLRTVWIARNPPGFAFVEFEDPRDAEDAVRGLDGKVICGSRVRVELSTGMPRRSRFDRPPARRPFDPNDRCYECGEKGHYAYDCHRYSRRRRSRFLRLSQSP

SEQ ID NO: 77790 - protein, 70 aa, Homo sapiens
  Payload ID: 15505
  Gene Symbol: SRSF7
  Gene Name: serine/arginine-rich splicing factor 7
  ENSP ID: ENSP00000401202
RYSRSRSRSRGRRSRSASPRRSRSISLRRSRSASLRRSRSGSIKGSRYFHLLSSWDCHCVPQCPAEGSVP

SEQ ID NO: 77791 - protein, 226 aa, Homo sapiens
  Payload ID: 15505
  Gene Symbol: SRSF7
  Gene Name: serine/arginine-rich splicing factor 7
  Uniprot ID: Q16629
  ENSP ID: ENSP00000402264
MSRYGRYGGETKVYVGNLGTGAGKGELERAFSYYGPLRTVWIARNPPGFAFVEFEDPRDAEDAVRGLDGKVICGSRVRVELSTGMPRRSRFDRPPARRPFDPNDRCYECGEKGHYAYDCHRYSRRRRSRSRSRSHSRSRGRRYSRSRSRSRGRRSRSASPRRSRSISLRRSRSASLRRSRSGSIKGSRYFQSPSRSRSRSRSISRPRSSRSPSGSPRRSASPERMD

SEQ ID NO: 77792 - protein, 132 aa, Homo sapiens; identical to SEQ ID NO: 77788
  Payload ID: 15505
  Gene Symbol: SRSF7
  Gene Name: serine/arginine-rich splicing factor 7
  Uniprot ID: Q16629
  ENSP ID: ENSP00000402544

SEQ ID NO: 77793 - protein, 51 aa, Homo sapiens
  Payload ID: 15505
  Gene Symbol: SRSF7
  Gene Name: serine/arginine-rich splicing factor 7
  ENSP ID: ENSP00000408868
MPRRSRFDRPPARRPFDPNDRCYECGEKGHYAYDCHRYSRRRRSRAENLRR

SEQ ID NO: 77794 - protein, 137 aa, Homo sapiens; identical to SEQ ID NO: 77789
  Payload ID: 15505
  Gene Symbol: SRSF7
  Gene Name: serine/arginine-rich splicing factor 7
  ENSP ID: ENSP00000416516

SEQ ID NO: 77795 - protein, 282 aa, Homo sapiens
  Payload ID: 15506
  Gene Symbol: SRSF8
  Gene Name: serine/arginine-rich splicing factor 8
  Uniprot ID: Q9BRL6
  ENSP ID: ENSP00000480140
MSCGRPPPDVDGMITLKVDNLTYRTSPDSLRRVFEKYGRVGDVYIPREPHTKAPRGFAFVRFHDRRDAQDAEAAMDGAELDGRELRVQVARYGRRDLPRSRQGEPRGRSRGGGYGRRSRSYGRRSRSPRRRHRSRSRGPSCSRSRSRSRYRGSRYSRSPYSRSPYSRSRYSRSPYSRSRYRESRYGGSHYSSSGYSNSRYSRYHSSRSHSKSGSSTSSRSASTSKSSSARRSKSSSVSRSRSRSRSSSMTRSPPRVSKRKSKSRSRSKRPPKSPEEEGQMSS

SEQ ID NO: 77796 - protein, 221 aa, Homo sapiens
  Payload ID: 15507
  Gene Symbol: SRSF9
  Gene Name: serine/arginine-rich splicing factor 9
  Uniprot ID: Q13242
  ENSP ID: ENSP00000229390
MSGWADERGGEGDGRIYVGNLPTDVREKDLEDLFYKYGRIREIELKNRHGLVPFAFVRFEDPRDAEDAIYGRNGYDYGQCRLRVEFPRTYGGRGGWPRGGRNGPPTRRSDFRVLVSGLPPSGSWQDLKDHMREAGDVCYADVQKDGVGMVEYLRKEDMEYALRKLDDTKFRSHEGETSYIRVYPERSTSYGYSRSRSGSRGRDSPYQSRGSPHYFSPFRPY

SEQ ID NO: 77797 - protein, 109 aa, Homo sapiens
  Payload ID: 15507
  Gene Symbol: SRSF9
  Gene Name: serine/arginine-rich splicing factor 9
  ENSP ID: ENSP00000449030
  MOD_RES (1)..(1): Any amino acid
XGRIYVGNLPTDVREKDLEDLFYKYGRIREIELKNRHGLVPFAFVRFEDPRDAEDAIYGRNGLPPSGSWQDLKDHMREAGDVCYADVQKDGVGMVEYLRKEDMEYALRK

SEQ ID NO: 77798 - protein, 119 aa, Homo sapiens
  Payload ID: 15507
  Gene Symbol: SRSF9
  Gene Name: serine/arginine-rich splicing factor 9
  ENSP ID: ENSP00000474283
MSGWADERGGEGDGRIYVGNLPTDVREKDLEDLFYKYGRIREIELKNRHGLVPFAFVRFEDPRDAEDAIYGRNGYDYGQCRLRVEFPRTYGGRGGWPRGGRNGPPTRRSDFRVLVSENY

SEQ ID NO: 77799 - protein, 968 aa, Homo sapiens
  Payload ID: 15508
  Gene Symbol: STK10
  Gene Name: serine/threonine kinase 10
  Uniprot ID: O94804
  ENSP ID: ENSP00000176763
MAFANFRRILRLSTFEKRKSREYEHVRRDLDPNEVWEIVGELGDGAFGKVYKAKNKETGALAAAKVIETKSEEELEDYIVEIEILATCDHPYIVKLLGAYYHDGKLWIMIEFCPGGAVDAIMLELDRGLTEPQIQVVCRQMLEALNFLHSKRIIHRDLKAGNVLMTLEGDIRLADFGVSAKNLKTLQKRDSFIGTPYWMAPEVVMCETMKDTPYDYKADIWSLGITLIEMAQIEPPHHELNPMRVLLKIAKSDPPTLLTPSKWSVEFRDFLKIALDKNPETRPSAAQLLEHPFVSSITSNKALRELVAEAKAEVMEEIEDGRDEGEEEDAVDAASTLENHTQNSSEVSPPSLNADKPLEESPSTPLAPSQSQDSVNEPCSQPSGDRSLQTTSPPVVAPGNENGLAVPVPLRKSRPVSMDARIQVAQEKQVAEQGGDLSPAANRSQKASQSRPNSSALETLGGEKLANGSLEPPAQAAPGPSKRDSDCSSLCTSESMDYGTNLSTDLSLNKEMGSLSIKDPKLYKKTLKRTRKFVVDGVEVSITTSKIISEDEKKDEEMRFLRRQELRELRLLQKEEHRNQTQLSNKHELQLEQMHKRFEQEINAKKKFFDTELENLERQQKQQVEKMEQDHAVRRREEARRIRLEQDRDYTRFQEQLKLMKKEVKNEVEKLPRQQRKESMKQKMEEHTQKKQLLDRDFVAKQKEDLELAMKRLTTDNRREICDKERECLMKKQELLRDREAALWEMEEHQLQERHQLVKQQLKDQYFLQRHELLRKHEKEREQMQRYNQRMIEQLKVRQQQEKARLPKIQRSEGKTRMAMYKKSLHINGGGSAAEQREKIKQFSQQEEKRQKSERLQQQQKHENQMRDMLAQCESNMSELQQLQNEKCHLLVEHETQKLKALDESHNQNLKEWRDKLRPRKKALEEDLNQKKREQEMFFKLSEEAECPNPSTPSKAAKFFPYSSADAS

SEQ ID NO: 77800 - protein, 281 aa, Homo sapiens
  Payload ID: 15508
  Gene Symbol: STK10
  Gene Name: serine/threonine kinase 10
  ENSP ID: ENSP00000428806
  MOD_RES (1)..(1): Any amino acid
XLMKKQELLRDREAALWEMEEHQLQERHQLVKQQLKDQYFLQRHELLRKHEKEREQMQRYNQRMIEQLKVRQQQEKARLPKIQRSEGKTRMAMYKKSLHINGGGSAAEQREKIKQFSQQEEKRQKSERLQQQQKHENQMRDMLAQCESNMSELQQLQNEKCHLLVEHETQKLKALDESHNQNLKEWRDKLRPRKKMESRTVAQVGVQWRNLNSGSGRGSEPEEAGAGDVLQAERGGGVPKPLHPKQGRQVLPLQFCGCFLTTARGCGWQLGGPQGLLLHSL

SEQ ID NO: 77801 - protein, 433 aa, Homo sapiens
  Payload ID: 15509
  Gene Symbol: STK11
  Gene Name: serine/threonine kinase 11
  Uniprot ID: Q15831
  ENSP ID: ENSP00000324856
MEVVDPQQLGMFTEGELMSVGMDTFIHRIDSTEVIYQPRRKRAKLIGKYLMGDLLGEGSYGKVKEVLDSETLCRRAVKILKKKKLRRIPNGEANVKKEIQLLRRLRHKNVIQLVDVLYNEEKQKMYMVMEYCVCGMQEMLDSVPEKRFPVCQAHGYFCQLIDGLEYLHSQGIVHKDIKPGNLLLTTGGTLKISDLGVAEALHPFAADDTCRTSQGSPAFQPPEIANGLDTFSGFKVDIWSAGVTLYNITTGLYPFEGDNIYKLFENIGKGSYAIPGDCGPPLSDLLKGMLEYEPAKRFSIRQIRQHSWFRKKHPPAEAPVPIPPSPDTKDRWRSMTVVPYLEDLHGADEDEDLFDIEDDIIYTQDFTVPGQVPEEEASHNGQRRGLPKAVCMNGTEAAQLSTKSRAEGRAPNPARKACSASSKIRRLSACKQQ

SEQ ID NO: 77802 - protein, 101 aa, Homo sapiens
  Payload ID: 15509
  Gene Symbol: STK11
  Gene Name: serine/threonine kinase 11
  ENSP ID: ENSP00000466610
MEVVDPQQLGMFTEGELMSVGMDTFIHRIDSTEVIYQPRRKRAKLIGKYLMGDLLGEGSYGKVKEVLDSETLCRRAVKILKKKKLRRIPNGEANVKNSWPL

SEQ ID NO: 77803 - protein, 432 aa, Homo sapiens
  Payload ID: 15509
  Gene Symbol: STK11
  Gene Name: serine/threonine kinase 11
  ENSP ID: ENSP00000467240
MEVVDPQQLGMFTEGELMSVGMDTFIHRIDSTEVIYQPRRKRAKLIGKYLMGDLLGEGSYGKVKEVLDSETLCRRAVKILKKKKLRRIPNGEANVKKEIQLLRRLRHKNVIQLVDVLYNEEKQKMYMVMEYCVCGMQEMLDSVPEKRFPVCQAHGYFCQLIDGLEYLHSQGIVHKDIKPGNLLLTTGGTLKISDLGVAEALHPFAADDTCRTSQGSPAFQPPEIANGLDTFSGFKVDIWSAGVTLYNITTGLYPFEGDNIYKLFENIGKGSYAIPGDCGPPLSDLLKGMLEYEPAKRFSIRQIRQHSWFRKKHPPAEAPVPIPPSPDTKDRWRSMTVVPYLEDLHGADEDEDLFDIEDDIIYTQDFTVPGQVPEEEASHNGQRRGLPKAVCMNGTEAAQLSTKSRAEAGPPTLPARPAASSKIRRLSACKQQ

SEQ ID NO: 77804 - protein, 153 aa, Homo sapiens
  Payload ID: 15509
  Gene Symbol: STK11
  Gene Name: serine/threonine kinase 11
  ENSP ID: ENSP00000467912
MEVVDPQQLGMFTEGELMSVGMDTFIHRIDSTEVIYQPRRKRAKLIGKYLMGDLLGEGSYGKVKEVLDSETLCRRAVKILKKKKLRRIPNGEANVKKYFCQLIDGLEYLHSQGIVHKDIKPGNLLLTTGGTLKISDLGVAEALHPFAADDTCR

SEQ ID NO: 77805 - protein, 21 aa, Homo sapiens
  Payload ID: 15509
  Gene Symbol: STK11
  Gene Name: serine/threonine kinase 11
  ENSP ID: ENSP00000477641
MYMVMEYCVCGMQEMLDSVPE

SEQ ID NO: 77806 - protein, 1099 aa, Homo sapiens
  Payload ID: 15510
  Gene Symbol: STK11IP
  Gene Name: serine/threonine kinase 11 interacting protein
  Uniprot ID: Q8N1F8
  ENSP ID: ENSP00000295641
RFGSAPQRPVAMTTAQRDSLLWKLAGLLRESGDVVLSGCSTLSLLTPTLQQLNHVFELHLGPWGPGQTGFVALPSHPADSPVILQLQFLFDVLQKTLSLKLVHVAGPGPTGPIKIFPFKSLRHLELRGVPLHCLHGLRGIYSQLETLICSRSLQALEELLSACGGDFCSALPWLALLSANFSYNALTALDSSLRLLSALRFLNLSHNQVQDCQGFLMDLCELHHLDISYNRLHLVPRMGPSGAALGVLILRGNELRSLHGLEQLRNLRHLDLAYNLLEGHRELSPLWLLAELRKLYLEGNPLWFHPEHRAATAQYLSPRARDAATGFLLDGKVLSLTDFQTHTSLGLSPMGPPLPWPVGSTPETSGGPDLSDSLSSGGVVTQPLLHKVKSRVRVRRASISEPSDTDPEPRTLNPSPAGWFVQQHPELELMSSFRERFGRNWLQYRSHLEPSGNPLPATPTTSAPSAPPASSQGPDTAPRPSPPQEEARGPQESPQKMSEEVRAEPQEEEEEKEGKEEKEEGEMVEQGEEEAGEEEEEEQDQKEVEAELCRPLLVCPLEGPEGVRGRECFLRVTSAHLFEVELQAARTLERLELQSLEAAEIEPEAQAQRSPRPTGSDLLPGAPILSLRFSYICPDRQLRRYLVLEPDAHAAVQELLAVLTPVTNVAREQLGEARDLLLGRFQCLRCGHEFKPEEPRMGLDSEEGWRPLFQKTESPAVCPNCGSDHVVLLAVSRGTPNRERKQGEQSLAPSPSASPVCHPPGHGDHLDRAKNSPPQAPSTRDHGSWSLSPPPERCGLRSVDHRLRLFLDVEVFSDAQEEFQCCLKVPVALAGHTGEFMCLVVVSDRRLYLLKVTGEMREPPASWLQLTLAVPLQDLSGIELGLAGQSLRLEWAAGAGRCVLLPRDARHCRAFLEELLDVLQSLPPAWRNCVSATEEEVTPQHRLWPLLEKDSSLEARQFFYLRAFLVEGPSTCLVSLLLTPSTLFLLDEDAAGSPAEPSPPAASGEASEKVPPSGPGPAVRVREQQPLSSLSSVLLYRSAPEDLRLLFYDEVSRLESFWALRVVCQEQLTALLAWIREPWEELFSIGLRTVIQEALALDR

SEQ ID NO: 77807 - protein, 1088 aa, Homo sapiens
  Payload ID: 15510
  Gene Symbol: STK11IP
  Gene Name: serine/threonine kinase 11 interacting protein
  ENSP ID: ENSP00000389383
MTTAQRDSLLWKLAGLLRESGDVVLSGCSTLSLLTPTLQQLNHVFELHLGPWGPGQTGFVALPSHPADSPVILQLQFLFDVLQKTLSLKLVHVAGPGPTGPIKIFPFKSLRHLELRGVPLHCLHGLRGIYSQLETLICSRSLQALEELLSACGGDFCSALPWLALLSANFSYNALTALDSSLRLLSALRFLNLSHNQVQDCQGFLMDLCELHHLDISYNRLHLVPRMGPSGAALGVLILRGNELRSLHGLEQLRNLRHLDLAYNLLEGHRELSPLWLLAELRKLYLEGNPLWFHPEHRAATAQYLSPRARDAATGFLLDGKVLSLTDFQTHTSLGLSPMGPPLPWPVGSTPETSGGPDLSDSLSSGGVVTQPLLHKVKSRVRVRRASISEPSDTDPEPRTLNPSPAGWFVQQHPELELMSSFRERFGRNWLQYRSHLEPSGNPLPATPTTSAPSAPPASSQGPDTAPRPSPPQEEARGPQESPQKMSEEVRAEPQEEEEEKEGKEEKEEGEMVEQGEEEAGEEEEEEQDQKEVEAELCRPLLVCPLEGPEGVRGRECFLRVTSAHLFEVELQAARTLERLELQSLEAAEIEPEAQAQRSPRPTGSDLLPGAPILSLRFSYICPDRQLRRYLVLEPDAHAAVQELLAVLTPVTNVAREQLGEARDLLLGRFQCLRCGHEFKPEEPRMGLDSEEGWRPLFQKTESPAVCPNCGSDHVVLLAVSRGTPNRERKQGEQSLAPSPSASPVCHPPGHGDHLDRAKNSPPQAPSTRDHGSWSLSPPPERCGLRSVDHRLRLFLDVEVFSDAQEEFQCCLKVPVALAGHTGEFMCLVVVSDRRLYLLKVTGEMREPPASWLQLTLAVPLQDLSGIELGLAGQSLRLEWAAGAGRCVLLPRDARHCRAFLEELLDVLQSLPPAWRNCVSATEEEVTPQHRLWPLLEKDSSLEARQFFYLRAFLVEGPSTCLVSLLLTPSTLFLLDEDAAGSPAEPSPPAASGEASEKVPPSGPGPAVRVREQQPLSSLSSVLLYRSAPEDLRLLFYDEVSRLESFWALRVVCQEQLTALLAWIREPWEELFSIGLRTVIQEALALDR

SEQ ID NO: 77808 - protein, 110 aa, Homo sapiens
  Payload ID: 15510
  Gene Symbol: STK11IP
  Gene Name: serine/threonine kinase 11 interacting protein
  ENSP ID: ENSP00000394192
MTTAQRDSLLWKLAGLLRESGDVVLSGCSTLSLLTPTLQQLNHVFELHLGPWGPGQTGFVALPSHPADSPVILQLQFLFDVLQKTLSLKVLGVGKRQDVQGAQENDGSWG

SEQ ID NO: 77809 - protein, 199 aa, Homo sapiens
  Payload ID: 15510
  Gene Symbol: STK11IP
  Gene Name: serine/threonine kinase 11 interacting protein
  ENSP ID: ENSP00000403923
  MOD_RES (1)..(1): Any amino acid
XQCCLKVPVALAGHTGEFMCLVVVSDRRLYLLKVTGEMREPPASWLQLTLAVPLQDLSGIELGLAGQSLRLEWAAGAGRCVLLPRDARHCRAFLEELLDVLQSLPPAWRNCVSATEEEVTPQHRLWPLLEKDSSLEARQFFYLRAFLVEGEASVQLMLPWSLYPTLSQALAHAQHLYSALAATVSSWNLENLSLEGIAE

SEQ ID NO: 77810 - protein, 166 aa, Homo sapiens
  Payload ID: 15510
  Gene Symbol: STK11IP
  Gene Name: serine/threonine kinase 11 interacting protein
  ENSP ID: ENSP00000406371
  MOD_RES (1)..(1): Any amino acid
XEELLDVLQSLPPAWRNCVSATEEEVTPQHRLWPLLEKDSSLEARQFFYLRAFLVEGPSTCLVSLLLTPSTLFLLDEDAAGSPAEPSPPAASGEASEKVPPSGPGPAVRVREQQPLSSLSSVLLYRSAPEDLRLLFYDEVRKLRLGDVNQFAQSKVVEPGIESTVP

SEQ ID NO: 77811 - protein, 96 aa, Homo sapiens
  Payload ID: 15510
  Gene Symbol: STK11IP
  Gene Name: serine/threonine kinase 11 interacting protein
  ENSP ID: ENSP00000469777
  MOD_RES (1)..(1): Any amino acid
XICPDRQLRRYLVLEPDAHAAVQELLAVLTPVTNVAREQLGEARDLLLGRFQCLRCGHEFKPEEPRMGLDSEEGWRPLFQKTDQSALSLKKTLKKK

SEQ ID NO: 77812 - protein, 305 aa, Homo sapiens
  Payload ID: 15511
  Gene Symbol: STK16
  Gene Name: serine/threonine kinase 16
  Uniprot ID: O75716
  ENSP ID: ENSP00000379964
MGHALCVCSRGTVIIDNKRYLFIQKLGEGGFSYVDLVEGLHDGHFYALKRILCHEQQDREEAQREADMHRLFNHPNILRLVAYCLRERGAKHEAWLLLPFFKRGTLWNEIERLKDKGNFLTEDQILWLLLGICRGLEAIHAKGYAHRDLKPTNILLGDEGQPVLMDLGSMNQACIHVEGSRQALTLQDWAAQRCTISYRAPELFSVQSHCVIDERTDVWSLGCVLYAMMFGEGPYDMVFQKGDSVALAVQNQLSIPQSPRHSSALRQLLNSMMTVDPHQRPHIPLLLSQLEALQPPAPGQHTTQI

SEQ ID NO: 77813 - protein, 187 aa, Homo sapiens
  Payload ID: 15511
  Gene Symbol: STK16
  Gene Name: serine/threonine kinase 16
  ENSP ID: ENSP00000386309
MGHALCVCSRGTVIIDNKRYLFIQKLGEGDLKPTNILLGDEGQPVLMDLGSMNQACIHVEGSRQALTLQDWAAQRCTISYRAPELFSVQSHCVIDERTDVWSLGCVLYAMMFGEGPYDMVFQKGDSVALAVQNQLSIPQSPRHSSALRQLLNSMMTVDPHQRPHIPLLLSQLEALQPPAPGQHTTQI

SEQ ID NO: 77814 - protein, 273 aa, Homo sapiens
  Payload ID: 15511
  Gene Symbol: STK16
  Gene Name: serine/threonine kinase 16
  ENSP ID: ENSP00000386553
MGHALCVCSRGTVIIDNKRYLFIQKLGEGGFSYVDLVEGLHDGHFYALKRILCHEQQDREEAQREADMHRLFNHPNILRLVAYCLRERGAKHEAWLLLPFFKRGTLWNEIERLKDKGNFLTEDQILWLLLGICRGLEAIHAKGYAHRDLKPTNILLGDEGQPVLMDLGSMNQACIHVEGSRQALTLQSLGCVLYAMMFGEGPYDMVFQKGDSVALAVQNQLSIPQSPRHSSALRQLLNSMMTVDPHQRPHIPLLLSQLEALQPPAPGQHTTQI

SEQ ID NO: 77815 - protein, 305 aa, Homo sapiens; identical to SEQ ID NO: 77812
  Payload ID: 15511
  Gene Symbol: STK16
  Gene Name: serine/threonine kinase 16
  Uniprot ID: O75716
  ENSP ID: ENSP00000386928

SEQ ID NO: 77816 - protein, 350 aa, Homo sapiens
  Payload ID: 15511
  Gene Symbol: STK16
  Gene Name: serine/threonine kinase 16
  ENSP ID: ENSP00000387156
MGHALCVCSRGTVIIDNKRYLFIQKLGEGFLLEPHLGKVSAKWEGHPTPHQEISLGPSHVGDDHGPLLTPLAHSGFSYVDLVEGLHDGHFYALKRILCHEQQDREEAQREADMHRLFNHPNILRLVAYCLRERGAKHEAWLLLPFFKRGTLWNEIERLKDKGNFLTEDQILWLLLGICRGLEAIHAKGYAHRDLKPTNILLGDEGQPVLMDLGSMNQACIHVEGSRQALTLQDWAAQRCTISYRAPELFSVQSHCVIDERTDVWSLGCVLYAMMFGEGPYDMVFQKGDSVALAVQNQLSIPQSPRHSSALRQLLNSMMTVDPHQRPHIPLLLSQLEALQPPAPGQHTTQI

SEQ ID NO: 77817 - protein, 414 aa, Homo sapiens
  Payload ID: 15512
  Gene Symbol: STK17A
  Gene Name: serine/threonine kinase 17a
  Uniprot ID: Q9UEE5
  ENSP ID: ENSP00000319192
MIPLEKPGSGGSSPGATSGSGRAGRGLSGPCRPPPPPQARGLLTEIRAVVRTEPFQDGYSLCPGRELGRGKFAVVRKCIKKDSGKEFAAKFMRKRRKGQDCRMEIIHEIAVLELAQDNPWVINLHEVYETASEMILVLEYAAGGEIFDQCVADREEAFKEKDVQRLMRQILEGVHFLHTRDVVHLDLKPQNILLTSESPLGDIKIVDFGLSRILKNSEELREIMGTPEYVAPEILSYDPISMATDMWSIGVLTYVMLTGISPFLGNDKQETFLNISQMNLSYSEEEFDVLSESAVDFIRTLLVKKPEDRATAEECLKHPWLTQSSIQEPSFRMEKALEEANALQEGHSVPEINSDTDKSETKESIVTEELIVVTSYTLGQCRQSEKEKMEQKAISKRFKFEEPLLQEIPGEFIY

SEQ ID NO: 77818 - protein, 372 aa, Homo sapiens
  Payload ID: 15513
  Gene Symbol: STK17B
  Gene Name: serine/threonine kinase 17b
  Uniprot ID: O94768
  ENSP ID: ENSP00000263955
MSRRRFDCRSISGLLTTTPQIPIKMENFNNFYILTSKELGRGKFAVVRQCISKSTGQEYAAKFLKKRRRGQDCRAEILHEIAVLELAKSCPRVINLHEVYENTSEIILILEYAAGGEIFSLCLPELAEMVSENDVIRLIKQILEGVYYLHQNNIVHLDLKPQNILLSSIYPLGDIKIVDFGMSRKIGHACELREIMGTPEYLAPEILNYDPITTATDMWNIGIIAYMLLTHTSPFVGEDNQETYLNISQVNVDYSEETFSSVSQLATDFIQSLLVKNPEKRPTAEICLSHSWLQQWDFENLFHPEETSSSSQTQDHSVRSSEDKTSKSSCNGTCGDREDKENIPEDSSMVSKRFRFDDSLPNPHELVSDLLC

SEQ ID NO: 77819 - protein, 372 aa, Homo sapiens; identical to SEQ ID NO: 77818
  Payload ID: 15513
  Gene Symbol: STK17B
  Gene Name: serine/threonine kinase 17b
  Uniprot ID: O94768
  ENSP ID: ENSP00000386853

SEQ ID NO: 77820 - protein, 67 aa, Homo sapiens
  Payload ID: 15513
  Gene Symbol: STK17B
  Gene Name: serine/threonine kinase 17b
  ENSP ID: ENSP00000399755
MSRRRFDCRSISGLLTTTPQIPIKMENFNNFYILTSKELGRGKFAVVRQCISKSTGQEYAAKFLKKR

SEQ ID NO: 77821 - protein, 6 aa, Homo sapiens
  Payload ID: 15513
  Gene Symbol: STK17B
  Gene Name: serine/threonine kinase 17b
  ENSP ID: ENSP00000413289
MSRRRF

SEQ ID NO: 77822 - protein, 69 aa, Homo sapiens
  Payload ID: 15513
  Gene Symbol: STK17B
  Gene Name: serine/threonine kinase 17b
  ENSP ID: ENSP00000475843
KFAVVRQCISKSTGQEYAAKFLKKRRRGQDCRAEILHEIAVLELAKSCPRVINLHEVYENTSEIILILE

SEQ ID NO: 77823 - protein, 364 aa, Homo sapiens
  Payload ID: 15514
  Gene Symbol: STK19
  Gene Name: serine/threonine kinase 19
  Uniprot ID: P49842
  ENSP ID: ENSP00000364480
MQKWFSAFDDAIIQRQWRANPSRGGGGVSFTKEVDTNVATGAPPRRQRVPGRACPWREPIRGRRGARPGGGDAGGTPGETVRHCSAPEDPIFRFSSLHSYPFPGTIKSRDMSWKRHHLIPETFGVKRRRKRGPVESDPLRGEPGSARAAVSELMQLFPRGLFEDALPPIVLRSQVYSLVPDRTVADRQLKELQEQGEIRIVQLGFDLDAHGIIFTEDYRTRVLKACDGRPYAGAVQKFLASVLPACGDLSFQQDQMTQTFGFRDSEITHLVNAGVLTVRDAGSWWLAVPGAGRFIKYFVKGRQAVLSMVRKAKYRELLLSELLGRRAPVVVRLGLTYHVHDLIGAQLVDCISTTSGTLLRLPET

SEQ ID NO: 77824 - protein, 368 aa, Homo sapiens
  Payload ID: 15514
  Gene Symbol: STK19
  Gene Name: serine/threonine kinase 19
  Uniprot ID: P49842
  ENSP ID: ENSP00000364482
MQKWFSAFDDAIIQRQWRANPSRGGGGVSFTKEVDTNVATGAPPRRQRVPGRACPWREPIRGRRGARPGGGDAGGTPGETVRHCSAPEDPIFRFSSLHSYPFPGTIKSRDMSWKRHHLIPETFGVKRRRKRGPVESDPLRGEPGSARAAVSELMQLFPRGLFEDALPPIVLRSQVYSLVPDRTVADRQLKELQEQGEIRIVQLGFDLDAHGIIFTEDYRTRVCDCVLKACDGRPYAGAVQKFLASVLPACGDLSFQQDQMTQTFGFRDSEITHLVNAGVLTVRDAGSWWLAVPGAGRFIKYFVKGRQAVLSMVRKAKYRELLLSELLGRRAPVVVRLGLTYHVHDLIGAQLVDCISTTSGTLLRLPET

SEQ ID NO: 77825 - protein, 368 aa, Homo sapiens [sequence omitted]

SEQ ID NO: 77826 - protein, 364 aa, Homo sapiens
  Payload ID: 15514
  Gene Symbol: STK19
  Gene Name: serine/threonine kinase 19
  ENSP ID: ENSP00000372818
MQKWFSAFDDAIIQRQWRANPSRGGGGVSFTKEVDTNVATGAPPRRQRVPGRACPWREPIRGRRGARPGGGDAGGTPGETVRHCSAPEDPIFRFSSLHSYPFPGTIKSRDMSWKRHHLIPETFGVKRRRKRGPVESDPLRGEPGSARAAVSELMQLFPRGLFEDALPPIVLRSQVYSLVPDRTVADRQLKELQEQGEIRIVQLGFDLDAHGIIFTEDYRTRVLKACDGRPYAGAVQKFLASVLPACGDLSFQQDQMTQTFGFRDSEITHLVNAGVLTVRDAGSWWLAVPGAGRFIKYFVKGRQAVLGMVRKAKYRELLLSELLGRRAPVVVRLGLTYHVHDLIGAQLVDCISTTSGTLLRLPET

SEQ ID NO: 77827 - protein, 364 aa, Homo sapiens; identical to SEQ ID NO: 77823
  Payload ID: 15514
  Gene Symbol: STK19
  Gene Name: serine/threonine kinase 19
  Uniprot ID: P49842
  ENSP ID: ENSP00000389352

SEQ ID NO: 77828 - protein, 368 aa, Homo sapiens; identical to SEQ ID NO: 77824
  Payload ID: 15514
  Gene Symbol: STK19
  Gene Name: serine/threonine kinase 19
  Uniprot ID: P49842
  ENSP ID: ENSP00000391798

SEQ ID NO: 77829 - protein, 364 aa, Homo sapiens; identical to SEQ ID NO: 77823
  Payload ID: 15514
  Gene Symbol: STK19
  Gene Name: serine/threonine kinase 19
  Uniprot ID: P49842
  ENSP ID: ENSP00000393272

SEQ ID NO: 77830 - protein, 364 aa, Homo sapiens; identical to SEQ ID NO: 77823
  Payload ID: 15514
  Gene Symbol: STK19
  Gene Name: serine/threonine kinase 19
  Uniprot ID: P49842
  ENSP ID: ENSP00000395028

SEQ ID NO: 77831 - protein, 368 aa, Homo sapiens; identical to SEQ ID NO: 77824
  Payload ID: 15514
  Gene Symbol: STK19
  Gene Name: serine/threonine kinase 19
  Uniprot ID: P49842
  ENSP ID: ENSP00000395864

SEQ ID NO: 77832 - protein, 364 aa, Homo sapiens; identical to SEQ ID NO: 77823
  Payload ID: 15514
  Gene Symbol: STK19
  Gene Name: serine/threonine kinase 19
  Uniprot ID: P49842
  ENSP ID: ENSP00000399915

SEQ ID NO: 77833 - protein, 368 aa, Homo sapiens; identical to SEQ ID NO: 77824
  Payload ID: 15514
  Gene Symbol: STK19
  Gene Name: serine/threonine kinase 19
  Uniprot ID: P49842
  ENSP ID: ENSP00000403479

SEQ ID NO: 77834 - protein, 368 aa, Homo sapiens; identical to SEQ ID NO: 77824
  Payload ID: 15514
  Gene Symbol: STK19
  Gene Name: serine/threonine kinase 19
  Uniprot ID: P49842
  ENSP ID: ENSP00000413766

SEQ ID NO: 77835 - protein, 112 aa, Homo sapiens
  Payload ID: 15514
  Gene Symbol: STK19
  Gene Name: serine/threonine kinase 19
  ENSP ID: ENSP00000418350
MQKWFSAFDDAIIQRQWRANPSRGGGGVSFTKEVDTNVATGAPPRRQRVPGRACPWREPIRGRRGARPGGGDAGGTPGETVRHCSAPEDPIFRFSSLHSYPFPGTIKSRDMS

SEQ ID NO: 77836 - protein, 70 aa, Homo sapiens; identical to SEQ ID NO: 22459
  Payload ID: 15514
  Gene Symbol: STK19
  Gene Name: serine/threonine kinase 19
  ENSP ID: ENSP00000418866
  MOD_RES (1)..(1): Any amino acid

SEQ ID NO: 77837 - protein, 70 aa, Homo sapiens; identical to SEQ ID NO: 22459
  Payload ID: 15514
  Gene Symbol: STK19
  Gene Name: serine/threonine kinase 19
  ENSP ID: ENSP00000428007
  MOD_RES (1)..(1): Any amino acid

SEQ ID NO: 77838 - protein, 70 aa, Homo sapiens; identical to SEQ ID NO: 22459
  Payload ID: 15514
  Gene Symbol: STK19
  Gene Name: serine/threonine kinase 19
  ENSP ID: ENSP00000429285
  MOD_RES (1)..(1): Any amino acid

SEQ ID NO: 77839 - protein, 321 aa, Homo sapiens
  Payload ID: 15514
  Gene Symbol: STK19
  Gene Name: serine/threonine kinase 19
  ENSP ID: ENSP00000446620
MLVCASPPPLPALTGLRDDKLTLLSSSPGLGGTPGETVRHCSAPEDPIFRFSSLHSYPFPGTIKSRDMSWKRHHLIPETFGVKRRRKRGPVESDPLRGEPGSARAAVSELMQLFPRGLFEDALPPIVLRSQVYSLVPDRTVADRQLKELQEQGEIRIVQLGFDLDAHGIIFTEDYRTRVLKACDGRPYAGAVQKFLASVLPACGDLSFQQDQMTQTFGFRDSEITHLVNAGVLTVRDAGSWWLAVPGAGRFIKYFVKGRQAVLSMVRKAKYRELLLSELLGRRAPVVVRLGLTYHVHDLIGAQLVDCISTTSGTLLRLPET

SEQ ID NO: 77840 - protein, 321 aa, Homo sapiens; identical to SEQ ID NO: 77839
  Payload ID: 15514
  Gene Symbol: STK19
  Gene Name: serine/threonine kinase 19
  ENSP ID: ENSP00000446725

SEQ ID NO: 77841 - protein, 321 aa, Homo sapiens; identical to SEQ ID NO: 77839
  Payload ID: 15514
  Gene Symbol: STK19
  Gene Name: serine/threonine kinase 19
  ENSP ID: ENSP00000447097

SEQ ID NO: 77842 - protein, 321 aa, Homo sapiens
  Payload ID: 15514
  Gene Symbol: STK19
  Gene Name: serine/threonine kinase 19
  ENSP ID: ENSP00000448123
MLVCASPPPLPALTGLRDDKLTLLSSSPGLGGTPGETVRHCSAPEDPIFRFSSLHSYPFPGTIKSRDMSWKRHHLIPETFGVKRRRKRGPVESDPLRGEPGSARAAVSELMQLFPRGLFEDALPPIVLRSQVYSLVPDRTVADRQLKELQEQGEIRIVQLGFDLDAHGIIFTEDYRTRVLKACDGRPYAGAVQKFLASVLPACGDLSFQQDQMTQTFGFRDSEITHLVNAGVLTVRDAGSWWLAVPGAGRFIKYFVKGRQAVLGMVRKAKYRELLLSELLGRRAPVVVRLGLTYHVHDLIGAQLVDCISTTSGTLLRLPET

SEQ ID NO: 77843 - protein, 321 aa, Homo sapiens; identical to SEQ ID NO: 77839
  Payload ID: 15514
  Gene Symbol: STK19
  Gene Name: serine/threonine kinase 19
  ENSP ID: ENSP00000449149

SEQ ID NO: 77844 - protein, 70 aa, Homo sapiens; identical to SEQ ID NO: 22459
  Payload ID: 15514
  Gene Symbol: STK19
  Gene Name: serine/threonine kinase 19
  ENSP ID: ENSP00000454870
  MOD_RES (1)..(1): Any amino acid

SEQ ID NO: 77845 - protein, 67 aa, Homo sapiens
  Payload ID: 15514
  Gene Symbol: STK19
  Gene Name: serine/threonine kinase 19
  ENSP ID: ENSP00000476036
PGTIKSRDMSWKRHHLIPETFGVKRRRKRGPVESDPLRGEPEGASRAGGDQNRPAGLRLGCPWNYLH

SEQ ID NO: 77846 - protein, 443 aa, Homo sapiens
  Payload ID: 15515
  Gene Symbol: STK24
  Gene Name: serine/threonine kinase 24
  Uniprot ID: Q9Y6E0
  ENSP ID: ENSP00000365730
MDSRAQLWGLALNKRRATLPHPGGSTNLKADPEELFTKLEKIGKGSFGEVFKGIDNRTQKVVAIKIIDLEEAEDEIEDIQQEITVLSQCDSPYVTKYYGSYLKDTKLWIIMEYLGGGSALDLLEPGPLDETQIATILREILKGLDYLHSEKKIHRDIKAANVLLSEHGEVKLADFGVAGQLTDTQIKRNTFVGTPFWMAPEVIKQSAYDSKADIWSLGITAIELARGEPPHSELHPMKVLFLIPKNNPPTLEGNYSKPLKEFVEACLNKEPSFRPTAKELLKHKFILRNAKKTSYLTELIDRYKRWKAEQSHDDSSSEDSDAETDGQASGGSDSGDWIFTIREKDPKNLENGALQPSDLDRNKMKDIPKRPFSQCLSTIISPLFAELKEKSQACGGNLGSIEELRGAIYLAEEACPGISDTMVAQLVQRLQRYSLSGGGTSSH

SEQ ID NO: 77847 - protein, 209 aa, Homo sapiens
  Payload ID: 15515
  Gene Symbol: STK24
  Gene Name: serine/threonine kinase 24
  ENSP ID: ENSP00000365737
ADIWSLGITAIELARGEPPHSELHPMKVLFLIPKNNPPTLEGNYSKPLKEFVEACLNKEPSFRPTAKELLKHKFILRNAKKTSYLTELIDRYKRWKAEQSHDDSSSEDSDAETDGQASGGSDSGDWIFTIREKDPKNLENGALQPSDLDRNKLKEKSQACGGNLGSIEELRGAIYLAEEACPGISDTMVAQLVQRLQRYSLSGGGTSSH

SEQ ID NO: 77848 - protein, 412 aa, Homo sapiens
  Payload ID: 15515
  Gene Symbol: STK24
  Gene Name: serine/threonine kinase 24
  ENSP ID: ENSP00000380651
MAHSPVQSGLPGMQNLKADPEELFTKLEKIGKGSFGEVFKGIDNRTQKVVAIKIIDLEEAEDEIEDIQQEITVLSQCDSPYVTKYYGSYLKLEPGPLDETQIATILREILKGLDYLHSEKKIHRDIKAANVLLSEHGEVKLADFGVAGQLTDTQIKRNTFVGTPFWMAPEVIKQSAYDSKADIWSLGITAIELARGEPPHSELHPMKVLFLIPKNNPPTLEGNYSKPLKEFVEACLNKEPSFRPTAKELLKHKFILRNAKKTSYLTELIDRYKRWKAEQSHDDSSSEDSDAETDGQASGGSDSGDWIFTIREKDPKNLENGALQPSDLDRNKMKDIPKRPFSQCLSTIISPLFAELKEKSQACGGNLGSIEELRGAIYLAEEACPGISDTMVAQLVQRLQRYSLSGGGTSSH

SEQ ID NO: 77849 - protein, 369 aa, Homo sapiens
  Payload ID: 15515
  Gene Symbol: STK24
  Gene Name: serine/threonine kinase 24
  ENSP ID: ENSP00000402764
  MOD_RES (1)..(1): Any amino acid
XKYYGSYLKDTKLWIIMEYLGGGSALDLLEPGPLDETQIATILREILKGLDYLHSEKKIHRDIKAANVLLSEHGEVKLADFGVAGQLTDTQIKRNTFVGTPFWMAPEVIKQSAYDSKADIWSLGITAIELARGEPPHSELHPMKVLFLIPKNNPPTLEGNYSKPLKEFVEACLNKEPSFRPTAKELLKHKFILRNAKKTSYLTELIDRYKRWKAEQSHDDSSSEDSDAETDGQASGGSDSGDWIFTIREKDPKNLENGALQPSDLDRNKMKDIPKRPFSQCLSTIISPLFAELKEKSQACGGNLGSIEELRGAIYLAEEACPGISDTMVAQLVQRLQRSIHGNQAPPDCHLAQVQAFGGSGCVLGSRSV

SEQ ID NO: 77850 - protein, 142 aa, Homo sapiens
  Payload ID: 15515
  Gene Symbol: STK24
  Gene Name: serine/threonine kinase 24
  ENSP ID: ENSP00000402810
KKTSYLTELIDRYKRWKAEQSHDDSSSEDSDAETDGQASGGSDSGDWIFTIREKDPKNLENGALQPSDLDRNKMKDIPKRPFSQCLSTIISPLFAELKEKSQACGGNLGSIEELRGAIYLAEEACPGISDTMVAQLVQRLQR

SEQ ID NO: 77851 - protein, 431 aa, Homo sapiens
  Payload ID: 15515
  Gene Symbol: STK24
  Gene Name: serine/threonine kinase 24
  Uniprot ID: Q9Y6E0
  ENSP ID: ENSP00000442539
MAHSPVQSGLPGMQNLKADPEELFTKLEKIGKGSFGEVFKGIDNRTQKVVAIKIIDLEEAEDEIEDIQQEITVLSQCDSPYVTKYYGSYLKDTKLWIIMEYLGGGSALDLLEPGPLDETQIATILREILKGLDYLHSEKKIHRDIKAANVLLSEHGEVKLADFGVAGQLTDTQIKRNTFVGTPFWMAPEVIKQSAYDSKADIWSLGITAIELARGEPPHSELHPMKVLFLIPKNNPPTLEGNYSKPLKEFVEACLNKEPSFRPTAKELLKHKFILRNAKKTSYLTELIDRYKRWKAEQSHDDSSSEDSDAETDGQASGGSDSGDWIFTIREKDPKNLENGALQPSDLDRNKMKDIPKRPFSQCLSTIISPLFAELKEKSQACGGNLGSIEELRGAIYLAEEACPGISDTMVAQLVQRLQRYSLSGGGTSSH

SEQ ID NO: 77852 - protein, 426 aa, Homo sapiens
  Payload ID: 15516
  Gene Symbol: STK25
  Gene Name: serine/threonine kinase 25
  Uniprot ID: O00506
  ENSP ID: ENSP00000325748
MAHLRGFANQHSRVDPEELFTKLDRIGKGSFGEVYKGIDNHTKEVVAIKIIDLEEAEDEIEDIQQEITVLSQCDSPYITRYFGSYLKSTKLWIIMEYLGGGSALDLLKPGPLEETYIATILREILKGLDYLHSERKIHRDIKAANVLLSEQGDVKLADFGVAGQLTDTQIKRNTFVGTPFWMAPEVIKQSAYDFKADIWSLGITAIELAKGEPPNSDLHPMRVLFLIPKNSPPTLEGQHSKPFKEFVEACLNKDPRFRPTAKELLKHKFITRYTKKTSFLTELIDRYKRWKSEGHGEESSSEDSDIDGEAEDGEQGPIWTFPPTIRPSPHSKLHKGTALHSSQKPAEPVKRQPRSQCLSTLVRPVFGELKEKHKQSGGSVGALEELENAFSLAEESCPGISDKLMVHLVERVQRFSHNRNHLTSTR

SEQ ID NO: 77853 - protein, 426 aa, Homo sapiens; identical to SEQ ID NO: 77852
  Payload ID: 15516
  Gene Symbol: STK25
  Gene Name: serine/threonine kinase 25
  Uniprot ID: O00506
  ENSP ID: ENSP00000384162

SEQ ID NO: 77854 - protein, 349 aa, Homo sapiens
  Payload ID: 15516
  Gene Symbol: STK25
  Gene Name: serine/threonine kinase 25
  Uniprot ID: O00506
  ENSP ID: ENSP00000384444
MAHLRGFANQSTKLWIIMEYLGGGSALDLLKPGPLEETYIATILREILKGLDYLHSERKIHRDIKAANVLLSEQGDVKLADFGVAGQLTDTQIKRNTFVGTPFWMAPEVIKQSAYDFKADIWSLGITAIELAKGEPPNSDLHPMRVLFLIPKNSPPTLEGQHSKPFKEFVEACLNKDPRFRPTAKELLKHKFITRYTKKTSFLTELIDRYKRWKSEGHGEESSSEDSDIDGEAEDGEQGPIWTFPPTIRPSPHSKLHKGTALHSSQKPAEPVKRQPRSQCLSTLVRPVFGELKEKHKQSGGSVGALEELENAFSLAEESCPGISDKLMVHLVERVQRFSHNRNHLTSTR

SEQ ID NO: 77855 - protein, 349 aa, Homo sapiens; identical to SEQ ID NO: 77854
  Payload ID: 15516
  Gene Symbol: STK25
  Gene Name: serine/threonine kinase 25
  Uniprot ID: O00506
  ENSP ID: ENSP00000385541

SEQ ID NO: 77856 - protein, 426 aa, Homo sapiens; identical to SEQ ID NO: 77852
  Payload ID: 15516
  Gene Symbol: STK25
  Gene Name: serine/threonine kinase 25
  Uniprot ID: O00506
  ENSP ID: ENSP00000385687

SEQ ID NO: 77857 - protein, 148 aa, Homo sapiens
  Payload ID: 15516
  Gene Symbol: STK25
  Gene Name: serine/threonine kinase 25
  ENSP ID: ENSP00000395104
MEYLGGGSALDLLKPGPLEETYIATILREILKGLDYLHSERKIHRDIKAANVLLSEQGDVKLADFGVAGQLTDTQIKRNTFVGTPFWMAPEVIKQSAYDFKADIWSLGITAIELAKGEPPNSDLHPMRVLFLIPKNSPPTLEGQHSKP

SEQ ID NO: 77858 - protein, 177 aa, Homo sapiens
  Payload ID: 15516
  Gene Symbol: STK25
  Gene Name: serine/threonine kinase 25
  ENSP ID: ENSP00000399212
MEYLGGGSALDLLKPGPLEETYIATILREILKGLDYLHSERKIHRDIKAANVLLSEQGDVKLADFGVAGQLTDTQIKRNTFVGTPFWMAPEVIKQSAYDFKADIWSLGITAIELAKGEPPNSDLHPMRVLFLIPKNSPPTLEGQHSKPFKEFVEACLNKDPRFRPTAKELLKHKFIT

SEQ ID NO: 77859 - protein, 48 aa, Homo sapiens
  Payload ID: 15516
  Gene Symbol: STK25
  Gene Name: serine/threonine kinase 25
  ENSP ID: ENSP00000401114
MEYLGGGSALDLLKPGPLEETYIATILREILKGLDYLHSERKIHRDIK

SEQ ID NO: 77860 - protein, 163 aa, Homo sapiens
  Payload ID: 15516
  Gene Symbol: STK25
  Gene Name: serine/threonine kinase 25
  ENSP ID: ENSP00000403607
MEYLGGGSALDLLKPGPLEETYIATILREILKGLDYLHSERKIHRDIKAANVLLSEQGDVKLADFGVAGQLTDTQIKRNTFVGTPFWMAPEVIKQSAYDFKADIWSLGITAIELAKGEPPNSDLHPMRVLFLIPKNSPPTLEGQHSKPFKEFVEACLNKDPRF

SEQ ID NO: 77861 - protein, 58 aa, Homo sapiens
  Payload ID: 15516
  Gene Symbol: STK25
  Gene Name: serine/threonine kinase 25
  ENSP ID: ENSP00000403866
MEYLGGGSALDLLKPGPLEETYIATILREILKGLDYLHSERKIHRDIKGPAGGGCGSC

SEQ ID NO: 77862 - protein, 247 aa, Homo sapiens
  Payload ID: 15516
  Gene Symbol: STK25
  Gene Name: serine/threonine kinase 25
  ENSP ID: ENSP00000404469
  MOD_RES (1)..(1): Any amino acid
XILREILKGLDYLHSERKIHRDIKAANVLLSEQGDVKLADFGVAGQLTDTQIKRNTFVGTPFWMAPEVIKQSAYDFKADIWSLGITAIELAKGEPPNSDLHPMRVLFLIPKNSPPTLEGQHSKPFKEFVEACLNKDPRFRPTAKELLKHKFITRYTKKTSFLTELIDRYKRWKSEGHGEESSSEDSDILRSPSRGSRGPSACPRWSGPSSESSKRSTSRAAGAWVRWRSWRTPSAWPRSPAPASQTS

SEQ ID NO: 77863 - protein, 89 aa, Homo sapiens
  Payload ID: 15516
  Gene Symbol: STK25
  Gene Name: serine/threonine kinase 25
  ENSP ID: ENSP00000404552
MEPRGEFQSPRGLALKKGCAAACFKHSRVDPEELFTKLDRIGKGSFGEVYKGIDNHTKEVVAIKIIDLEEAEDEIEDIQQEITVLSQCD

SEQ ID NO: 77864 - protein, 79 aa, Homo sapiens
  Payload ID: 15516
  Gene Symbol: STK25
  Gene Name: serine/threonine kinase 25
  ENSP ID: ENSP00000404960
MEYLGGGSALDLLKPGPLEETYIATILREILKGLDYLHSERKIHRDIKAANVLLSEQGDVKLADFGVAGQLTDTQIKRN

SEQ ID NO: 77865 - protein, 19 aa, Homo sapiens
  Payload ID: 15516
  Gene Symbol: STK25
  Gene Name: serine/threonine kinase 25
  ENSP ID: ENSP00000406208
MEYLGGGSALDLLKPGPLE

SEQ ID NO: 77866 - protein, 151 aa, Homo sapiens
  Payload ID: 15516
  Gene Symbol: STK25
  Gene Name: serine/threonine kinase 25
  ENSP ID: ENSP00000412617
MAHLRGFANQHSRVDPEELFTKLDRIGKGSFGEVYKGIDNHTKEVVAIKIIDLEEAEDEIEDIQQEITVLSQCDSPYITRYFGSYLKSTKLWIIMEYLGGGSALDLLKPGPLEETYIATILREILKGLDYLHSERKIHRDIKAANVLLSEQ

SEQ ID NO: 77867 - protein, 115 aa, Homo sapiens
  Payload ID: 15516
  Gene Symbol: STK25
  Gene Name: serine/threonine kinase 25
  ENSP ID: ENSP00000414191
MAHLRGFANQHSRVDPEELFTKLDRIGKGSFGEVYKGIDNHTKEVVAIKIIDLEEAEDEIEDIQQEITVLSQCDSPYITRYFGSYLKVPVVGRRGPCWCCARLSSMSEGLSDMPE

SEQ ID NO: 77868 - protein, 161 aa, Homo sapiens
  Payload ID: 15516
  Gene Symbol: STK25
  Gene Name: serine/threonine kinase 25
  ENSP ID: ENSP00000417020
MAHLRGFANQLKPGPLEETYIATILREILKGLDYLHSERKIHRDIKAANVLLSEQGDVKLADFGVAGQLTDTQIKRNTFVGTPFWMAPEVIKQSAYDFKADIWSLGITAIELAKGEPPNSDLHPMRVLFLIPKNSPPTLEGQHSKPFKEFVEACLNKDPRF

SEQ ID NO: 77869 - protein, 332 aa, Homo sapiens
  Payload ID: 15516
  Gene Symbol: STK25
  Gene Name: serine/threonine kinase 25
  Uniprot ID: O00506
  ENSP ID: ENSP00000444886
MEYLGGGSALDLLKPGPLEETYIATILREILKGLDYLHSERKIHRDIKAANVLLSEQGDVKLADFGVAGQLTDTQIKRNTFVGTPFWMAPEVIKQSAYDFKADIWSLGITAIELAKGEPPNSDLHPMRVLFLIPKNSPPTLEGQHSKPFKEFVEACLNKDPRFRPTAKELLKHKFITRYTKKTSFLTELIDRYKRWKSEGHGEESSSEDSDIDGEAEDGEQGPIWTFPPTIRPSPHSKLHKGTALHSSQKPAEPVKRQPRSQCLSTLVRPVFGELKEKHKQSGGSVGALEELENAFSLAEESCPGISDKLMVHLVERVQRFSHNRNHLTSTR

SEQ ID NO: 77870 - protein, 332 aa, Homo sapiens; identical to SEQ ID NO: 77869
  Payload ID: 15516
  Gene Symbol: STK25
  Gene Name: serine/threonine kinase 25
  Uniprot ID: O00506
  ENSP ID: ENSP00000446008

SEQ ID NO: 77871 - protein, 491 aa, Homo sapiens
  Payload ID: 15517
  Gene Symbol: STK3
  Gene Name: serine/threonine kinase 3
  Uniprot ID: Q13188
  ENSP ID: ENSP00000390500
MEQPPAPKSKLKKLSEDSLTKQPEEVFDVLEKLGEGSYGSVFKAIHKESGQVVAIKQVPVESDLQEIIKEISIMQQCDSPYVVKYYGSYFKNTDLWIVMEYCGAGSVSDIIRLRNKTLIEDEIATILKSTLKGLEYLHFMRKIHRDIKAGNILLNTEGHAKLADFGVAGQLTDTMAKRNTVIGTPFWMAPEVIQEIGYNCVADIWSLGITSIEMAEGKPPYADIHPMRAIFMIPTNPPPTFRKPELWSDDFTDFVKKCLVKNPEQRATATQLLQHPFIKNAKPVSILRDLITEAMEIKAKRHEEQQRELEEEEENSDEDELDSHTMVKTSVESVGTMRATSTMSEGAQTMIEHNSTMLESDLGTMVINSEDEEEEDGTMKRNATSPQVQRPSFMDYFDKQDFKNKSHENCNQNMHEPFPMSKNVFPDNWKVPQDGDFDFLKNLSLEELQMRLKALDPMMEREIEELRQRYTAKRQPILDAMDAKKRRQQNF

SEQ ID NO: 77872 - protein, 228 aa, Homo sapiens
  Payload ID: 15517
  Gene Symbol: STK3
  Gene Name: serine/threonine kinase 3
  ENSP ID: ENSP00000428014
MEQPPAPKSKLKKLSEDSLTKQPEEVFDVLEKLGEGSYGSVFKAIHKESGQVVAIKQVPVESDLQEIIKEISIMQQCDSPYVVKYYGSYFKNTDLWIVMEYCGAGSVSDIIRLRNKTAIFMIPTNPPPTFRKPELWSDDFTDFVKKCLVKNPEQRATATQLLQHPFIKNAKPVSILRDLITEAMEIKAKRHEEQQRELEEEEENSDEDELDSHTMVKTSVESVGTMRA

SEQ ID NO: 77873 - protein, 168 aa, Homo sapiens
  Payload ID: 15517
  Gene Symbol: STK3
  Gene Name: serine/threonine kinase 3
  ENSP ID: ENSP00000428167
MEQPPAPKSKLKKLSEDSLTKQPEEVFDVLEKLGEGSYGSVFKAIHKESGQVVAIKQVPVESDLQEIIKEISIMQQCDSPYVVKYYGSYFKNTDLWIVMEYCGAGSVSDIIRLRNKTGFLTDTTEGSASCDLRMDLTLFHLGAEFLHYLLLYEADPLSCVFSLLVFSV

SEQ ID NO: 77874 - protein, 1 aa, Homo sapiens
  Payload ID: 15517
  Gene Symbol: STK3
  Gene Name: serine/threonine kinase 3
  ENSP ID: ENSP00000428295
M

SEQ ID NO: 77875 - protein, 82 aa, Homo sapiens
  Payload ID: 15517
  Gene Symbol: STK3
  Gene Name: serine/threonine kinase 3
  ENSP ID: ENSP00000429369
MEQPPAPKSKLKKLSEDSLTKQPEEVFDVLEKLGEGSYGSVFKAIHKESGQVVAIKQVPVESDLQEIIKEISIMQQCDRLFL

SEQ ID NO: 77876 - protein, 519 aa, Homo sapiens
  Payload ID: 15517
  Gene Symbol: STK3
  Gene Name: serine/threonine kinase 3
  Uniprot ID: Q13188
  ENSP ID: ENSP00000429744
MLQLMDSGITICLRNGAASVFKKKEWSTQGEENKQDSKLKKLSEDSLTKQPEEVFDVLEKLGEGSYGSVFKAIHKESGQVVAIKQVPVESDLQEIIKEISIMQQCDSPYVVKYYGSYFKNTDLWIVMEYCGAGSVSDIIRLRNKTLIEDEIATILKSTLKGLEYLHFMRKIHRDIKAGNILLNTEGHAKLADFGVAGQLTDTMAKRNTVIGTPFWMAPEVIQEIGYNCVADIWSLGITSIEMAEGKPPYADIHPMRAIFMIPTNPPPTFRKPELWSDDFTDFVKKCLVKNPEQRATATQLLQHPFIKNAKPVSILRDLITEAMEIKAKRHEEQQRELEEEEENSDEDELDSHTMVKTSVESVGTMRATSTMSEGAQTMIEHNSTMLESDLGTMVINSEDEEEEDGTMKRNATSPQVQRPSFMDYFDKQDFKNKSHENCNQNMHEPFPMSKNVFPDNWKVPQDGDFDFLKNLSLEELQMRLKALDPMMEREIEELRQRYTAKRQPILDAMDAKKRRQQNF

SEQ ID NO: 77877 - protein, 380 aa, Homo sapiens
  Payload ID: 15517
  Gene Symbol: STK3
  Gene Name: serine/threonine kinase 3
  ENSP ID: ENSP00000482260
MEQPPAPKSKLKKLSEDSLTKQPEEVFDVLEKLGEGSYGSVFKAIHKESGQVVAIKQVPVESDLQEIIKEISIMQQCDSPYVVKYYGSYFKNTDLWIVMEYCGAGSVSDIIRLRNKTAIFMIPTNPPPTFRKPELWSDDFTDFVKKCLVKNPEQRATATQLLQHPFIKNAKPVSILRDLITEAMEIKAKRHEEQQRELEEEEENSDEDELDSHTMVKTSVESVGTMRATSTMSEGAQTMIEHNSTMLESDLGTMVINSEDEEEEDGTMKRNATSPQVQRPSFMDYFDKQDFKNKSHENCNQNMHEPFPMSKNVFPDNWKVPQDGDFDFLKNLSLEELQMRLKALDPMMEREIEELRQRYTAKRQPILDAMDAKKRRQQNF

SEQ ID NO: 77878 - protein, 996 aa, Homo sapiens
  Payload ID: 15518
  Gene Symbol: STK31
  Gene Name: serine/threonine kinase 31
  Uniprot ID: Q9BXU1
  ENSP ID: ENSP00000346660
MDEDTHYDKVEDVVGSHIEDAVTFWAQSINRNKDIMKIGCSLSEVCPQASSVLGNLDPNKIYGGLFSEDQCWYRCKVLKIISVEKCLVRYIDYGNTEILNRSDIVEIPLELQFSSVAKKYKLWGLHIPSDQEVTQFDQGTTFLGSLIFEKEIKMRIKATSEDGTVIAQAEYGSVDIGEEVLKKGFAEKCRLASRTDICEEKKLDPGQLVLRNLKSPIPLWGHRSNQSTFSRPKGHLSEKMTLDLKDENDAGNLITFPKESLAVGDFNLGSNVSLEKIKQDQKLIEENEKLKTEKDALLESYKALELKVEQIAQELQQEKAAAVDLTNHLEYTLKTYIDTRMKNLAAKMEILKEMRHVDISVRFGKDLSDAIQVLDEGCFTTPASLNGLEIIWAEYSLAQENIKTCEYVSEGNILIAQRNEMQQKLYMSVEDFILEVDESSLNKRLKTLQDLSVSLEAVYGQAKEGANSDEILKKFYDWKCDKREEFTSVRSETDASLHRLVAWFQRTLKVFDLSVEGSLISEDAMDNIDEILEKTESSVCKELEIALVDQGDADKEIISNTYSQVLQKIHSEERLIATVQAKYKDSIEFKKQLIEYLNKSPSVDHLLSIKKTLKSLKALLRWKLVEKSNLEESDDPDGSQIEKIKEEITQLRNNVFQEIYHEREEYEMLTSLAQKWFPELPLLHPEIGLLKYMNSGGLLTMSLERDLLDAEPMKELSSKRPLVRSEVNGQIILLKGYSVDVDTEAKVIERAATYHRAWREAEGDSGLLPLIFLFLCKSDPMAYLMVPYYPRANLNAVQANMPLNSEETLKVMKGVAQGLHTLHKADIIHGSLHQNNVFALNREQGIVGDFDFTKSVSQRASVNMMVGDLSLMSPELKMGKPASPGSDLYAYGCLLLWLSVQNQEFEINKDGIPKVDQFHLDDKVKSLLCSLICYRSSMTAEQVLNAECFLMPKEQSVPNPEKDTEYTLYKKEEEIKTENLDKCMEKTRNGEANFDC

SEQ ID NO: 77879 - protein, 1019 aa, Homo sapiens
  Payload ID: 15518
  Gene Symbol: STK31
  Gene Name: serine/threonine kinase 31
  Uniprot ID: Q9BXU1
  ENSP ID: ENSP00000348132
MWVQGHSSRASATESVSFSGIVQMDEDTHYDKVEDVVGSHIEDAVTFWAQSINRNKDIMKIGCSLSEVCPQASSVLGNLDPNKIYGGLFSEDQCWYRCKVLKIISVEKCLVRYIDYGNTEILNRSDIVEIPLELQFSSVAKKYKLWGLHIPSDQEVTQFDQGTTFLGSLIFEKEIKMRIKATSEDGTVIAQAEYGSVDIGEEVLKKGFAEKCRLASRTDICEEKKLDPGQLVLRNLKSPIPLWGHRSNQSTFSRPKGHLSEKMTLDLKDENDAGNLITFPKESLAVGDFNLGSNVSLEKIKQDQKLIEENEKLKTEKDALLESYKALELKVEQIAQELQQEKAAAVDLTNHLEYTLKTYIDTRMKNLAAKMEILKEMRHVDISVRFGKDLSDAIQVLDEGCFTTPASLNGLEIIWAEYSLAQENIKTCEYVSEGNILIAQRNEMQQKLYMSVEDFILEVDESSLNKRLKTLQDLSVSLEAVYGQAKEGANSDEILKKFYDWKCDKREEFTSVRSETDASLHRLVAWFQRTLKVFDLSVEGSLISEDAMDNIDEILEKTESSVCKELEIALVDQGDADKEIISNTYSQVLQKIHSEERLIATVQAKYKDSIEFKKQLIEYLNKSPSVDHLLSIKKTLKSLKALLRWKLVEKSNLEESDDPDGSQIEKIKEEITQLRNNVFQEIYHEREEYEMLTSLAQKWFPELPLLHPEIGLLKYMNSGGLLTMSLERDLLDAEPMKELSSKRPLVRSEVNGQIILLKGYSVDVDTEAKVIERAATYHRAWREAEGDSGLLPLIFLFLCKSDPMAYLMVPYYPRANLNAVQANMPLNSEETLKVMKGVAQGLHTLHKADIIHGSLHQNNVFALNREQGIVGDFDFTKSVSQRASVNMMVGDLSLMSPELKMGKPASPGSDLYAYGCLLLWLSVQNQEFEINKDGIPKVDQFHLDDKVKSLLCSLICYRSSMTAEQVLNAECFLMPKEQSVPNPEKDTEYTLYKKEEEIKTENLDKCMEKTRNGEANFDC

SEQ ID NO: 77880 - protein, 159 aa, Homo sapiens
  Payload ID: 15518
  Gene Symbol: STK31
  Gene Name: serine/threonine kinase 31
  ENSP ID: ENSP00000389340
MDEDTHYDKVEDVVGSHIEDAVTFWAQSINRNKDIMKIGCSLSEVCPQASSVLGNLDPNKIYGGLFSEDQCWYRCKVLKIISVEKCLVRYIDYGNTEILNRSDIVEIPLELQFSSVAKKYKLWGLHIPSDQEVTQFDQGTTFLGSLIFEKEIKMRIKAT

SEQ ID NO: 77881 - protein, 93 aa, Homo sapiens
  Payload ID: 15518
  Gene Symbol: STK31
  Gene Name: serine/threonine kinase 31
  ENSP ID: ENSP00000398413
MDEDTHYDKVEDVVGSHIEDAVTFWAQSINRNKDIMKIGCSLSEVCPQASSVLGNLDPNKIYGGLFSEDQCWYRCKVLKIISVEKCLVRYIDY

SEQ ID NO: 77882 - protein, 996 aa, Homo sapiens
  Payload ID: 15518
  Gene Symbol: STK31
  Gene Name: serine/threonine kinase 31
  Uniprot ID: Q9BXU1
  ENSP ID: ENSP00000411852
MWVQGHSSRASATESVSFSGIVQMDEDTHYDKVEDVVGSHIEDAVTFWAQSINRNKDIMKIGCSLSEVCPQASSVLGNLDPNKIYGGLFSEDQCWYRCKVLKIISVEKCLVRYIDYGNTEILNRSDIVEIPLELQFSSVAKKYKLWGLHIPSDQEVTQFDQGTTFLGSLIFEKEIKMRIKATSEDGTVIAQAEYGSVDIGEEVLKKGFAEKCRLASRTDICEEKKLDPGQLVLRNLKSPIPLWGHRSNQSTFSRPKGHLSEKMTLDLKDENDAGNLITFPKESLAVGDFNLGSNVSLEKIKQDQKLIEENEKLKTEKDALLESYKALELKVEQIAQELQQEKAAAVDLTNHLEYTLKTYIDTRMKNLAAKMEILKEMRHVDISVRFGKDLSDAIQVLDEGCFTTPASLNGLEIIWAEYSLAQENIKTCEYVSEGNILIAQRNEMQQKLYMSVEDFILEVDESSLNKRLKTLQDLSVSLEAVYGQAKEGANSDEILKKFYDWKCDKREEFTSVRSETDASLHRLVAWFQRTLKVFDLSVEGSLISEDAMDNIDEILEKTESSVCKELEIALVDQGDADKEIISNTYSQVLQKIHSEERLIATVQAKYKDSIEFKKQLIEYLNKSPSVDHLLSIKKTLKSLKALLRWKLVEKSNLEESDDPDGSQIEKIKEEITQLRNNVFQEIYHEREEYEMLTSLAQKWFPELPLLHPEIGLLKYMNSGGLLTMSLERDLLDAEPMKELSSKRPLVRSEVNGQIILLKGYSVDVDTEAKVIERAATYHRAWREAEGDSGLLPLIFLFLCKSDPMAYLMVPYYPRANLNAVQANMPLNSEETLKVMKGVAQGLHTLHKADIIHGSLHQNNVFALNREQGIVGDFDFTKSVSQRASVNMMVGDLSLMSPELKMGKPASPGSDLYAYGCLLLWDDKVKSLLCSLICYRSSMTAEQVLNAECFLMPKEQSVPNPEKDTEYTLYKKEEEIKTENLDKCMEKTRNGEANFDC

SEQ ID NO: 77883 - protein, 140 aa, Homo sapiens
  Payload ID: 15518
  Gene Symbol: STK31
  Gene Name: serine/threonine kinase 31
  ENSP ID: ENSP00000414087
MDEDTHYDKVEDVVGSHIEDAVTFWAQASSVLGNLDPNKIYGGLFSEDQCWYRCKVLKIISVEKCLVRYIDYGNTEILNRSDIVEIPLELQFSSVAKKYKLWGLHIPSDQEVTQFDQGTTFLGSLIFEKEIKMRIKATSE

SEQ ID NO: 77884 - protein, 42 aa, Homo sapiens
  Payload ID: 15518
  Gene Symbol: STK31
  Gene Name: serine/threonine kinase 31
  ENSP ID: ENSP00000435974
MDEDTHYDKVEDVVGSHIEDAVTFWAQSINRNKDIMKIGCSL

SEQ ID NO: 77885 - protein, 396 aa, Homo sapiens
  Payload ID: 15519
  Gene Symbol: STK32A
  Gene Name: serine/threonine kinase 32A
  Uniprot ID: Q8WU08
  ENSP ID: ENSP00000381030
MGANTSRKPPVFDENEDVNFDHFEILRAIGKGSFGKVCIVQKNDTKKMYAMKYMNKQKCVERNEVRNVFKELQIMQGLEHPFLVNLWYSFQDEEDMFMVVDLLLGGDLRYHLQQNVHFKEETVKLFICELVMALDYLQNQRIIHRDMKPDNILLDEHGHVHITDFNIAAMLPRETQITTMAGTKPYMAPEMFSSRKGAGYSFAVDWWSLGVTAYELLRGRRPYHIRSSTSSKEIVHTFETTVVTYPSAWSQEMVSLLKKLLEPNPDQRFSQLSDVQNFPYMNDINWDAVFQKRLIPGFIPNKGRLNCDPTFELEEMILESKPLHKKKKRLAKKEKDMRKCDSSQTCLLQEHLDSVQKEFIIFNREKVNRDFNKRQPNLALEQTKDPQGEDGQNNNL

SEQ ID NO: 77886 - protein, 407 aa, Homo sapiens
  Payload ID: 15519
  Gene Symbol: STK32A
  Gene Name: serine/threonine kinase 32A
  ENSP ID: ENSP00000381535
MGANTSRKPPVFDENEDVNFDHFEILRAIGKGSFGKVCIVQKNDTKKMYAMKYMNKQKCVERNEVRNVFKELQIMQGLEHPFLVNLWYSFQDEEDMFMVVDLLLGGDLRYHLQQNVHFKEETVKLFICELVMALDYLQNQRIIHRDMKPDNILLDEHGHVHITDFNIAAMLPRETQITTMAGTKPYMAPEMFSSRKGAGYSFAVDWWSLGVTAYELLRGRRPYHIRSSTSSKEIVHTFETTVVTYPSAWSQEMVSLLKKLLEPNPDQRFSQLSDVQNFPYMNDINWDAVFQKRLIPGFIPNKGRLNCDPTFELEEMILESKPLHKKKKRLAKKEKDMRKCDSSQTCLLQEHLDSVQKEFIIFNREKVNRDFNKRQPNLALEQTKDPQVTNGQMDTGLSETFQTSKVS

SEQ ID NO: 77887 - protein, 166 aa, Homo sapiens
  Payload ID: 15519
  Gene Symbol: STK32A
  Gene Name: serine/threonine kinase 32A
  Uniprot ID: Q8WU08
  ENSP ID: ENSP00000487441
MGANTSRKPPVFDENEDVNFDHFEILRAIGKGSFGKVCIVQKNDTKKMYAMKYMNKQKCVERNEVRNVFKELQIMQGLEHPFLVNLWYSFQDEEDMFMVVDLLLGGDLRYHLQQNVHFKEETVKLFICELVMALDYLQNQRIIHRDMKPDNILLDEHDTWLSYKSH

SEQ ID NO: 77888 - protein, 414 aa, Homo sapiens
  Payload ID: 15520
  Gene Symbol: STK32B
  Gene Name: serine/threonine kinase 32B
  Uniprot ID: Q9NY57
  ENSP ID: ENSP00000282908
MGGNHSHKPPVFDENEEVNFDHFQILRAIGKGSFGKVCIVQKRDTKKMYAMKYMNKQKCIERDEVRNVFRELQIMQGLEHPFLVNLWYSFQDEEDMFMVVDLLLGGDLRYHLQQNVHFTEGTVKLYICELALALEYLQRYHIIHRDIKPDNILLDEHGHVHITDFNIATVVKGAERASSMAGTKPYMAPEVFQVYMDRGPGYSYPVDWWSLGITAYELLRGWRPYEIHSVTPIDEILNMFKVERVHYSSTWCKGMVALLRKLLTKDPESRVSSLHDIQSVPYLADMNWDAVFKKALMPGFVPNKGRLNCDPTFELEEMILESKPLHKKKKRLAKNRSRDGTKDSCPLNGHLQHCLETVREEFIIFNREKLRRQQGQGSQLLDTDSRGGGQAQSKLQDGCNNNLLTHTCTRGCSS

SEQ ID NO: 77889 - protein, 367 aa, Homo sapiens
  Payload ID: 15520
  Gene Symbol: STK32B
  Gene Name: serine/threonine kinase 32B
  Uniprot ID: Q9NY57
  ENSP ID: ENSP00000420984
MYAMKYMNKQKCIERDEVRNVFRELQIMQGLEHPFLVNLWYSFQDEEDMFMVVDLLLGGDLRYHLQQNVHFTEGTVKLYICELALALEYLQRYHIIHRDIKPDNILLDEHGHVHITDFNIATVVKGAERASSMAGTKPYMAPEVFQVYMDRGPGYSYPVDWWSLGITAYELLRGWRPYEIHSVTPIDEILNMFKVERVHYSSTWCKGMVALLRKLLTKDPESRVSSLHDIQSVPYLADMNWDAVFKKALMPGFVPNKGRLNCDPTFELEEMILESKPLHKKKKRLAKNRSRDGTKDSCPLNGHLQHCLETVREEFIIFNREKLRRQQGQGSQLLDTDSRGGGQAQSKLQDGCNNNLLTHTCTRGCSS

SEQ ID NO: 77890 - protein, 51 aa, Homo sapiens
  Payload ID: 15520
  Gene Symbol: STK32B
  Gene Name: serine/threonine kinase 32B
  ENSP ID: ENSP00000422820
MGGNHSHKPPVFDENEEVNFDHFQILRAIGKGSFGKDCQCRLFLENLSEES

SEQ ID NO: 77891 - protein, 337 aa, Homo sapiens
  Payload ID: 15520
  Gene Symbol: STK32B
  Gene Name: serine/threonine kinase 32B
  ENSP ID: ENSP00000423209
MYAMKYMNKQKCIERDEVRNVFRELQIMQGLEHPFLVNLWYSFQDEEDMFMVVDLLLGGDLRYHLQQNVHFTEGTVKLYICELALALEYLQRYHIIHRDIKPDNILLDEHAPEVFQVYMDRGPGYSYPVDWWSLGITAYELLRGWRPYEIHSVTPIDEILNMFKVERVHYSSTWCKGMVALLRKLLTKDPESRVSSLHDIQSVPYLADMNWDAVFKKALMPGFVPNKGRLNCDPTFELEEMILESKPLHKKKKRLAKNRSRDGTKDSCPLNGHLQHCLETVREEFIIFNREKLRRQQGQGSQLLDTDSRGGGQAQSKLQDGCNNNLLTHTCTRGCSS

SEQ ID NO: 77892 - protein, 486 aa, Homo sapiens
  Payload ID: 15521
  Gene Symbol: STK32C
  Gene Name: serine/threonine kinase 32C
  Uniprot ID: Q86UX6
  ENSP ID: ENSP00000298630
MRSGAERRGSSAAASPGSPPPGRARPAGSDAPSALPPPAAGQPRARDSGDVRSQPRPLFQWSKWKKRMGSSMSAATARRPVFDDKEDVNFDHFQILRAIGKGSFGKVCIVQKRDTEKMYAMKYMNKQQCIERDEVRNVFRELEILQEIEHVFLVNLWYSFQDEEDMFMVVDLLLGGDLRYHLQQNVQFSEDTVRLYICEMALALDYLRGQHIIHRDVKPDNILLDERGHAHLTDFNIATIIKDGERATALAGTKPYMAPEIFHSFVNGGTGYSFEVDWWSVGVMAYELLRGWRPYDIHSSNAVESLVQLFSTVSVQYVPTWSKEMVALLRKLLTVNPEHRLSSLQDVQAAPALAGVLWDHLSEKRVEPGFVPNKGRLHCDPTFELEEMILESRPLHKKKKRLAKNKSRDNSRDSSQSENDYLQDCLDAIQQDFVIFNREKLKRSQDLPREPLPAPESRDAAEPVEDEAERSALPMCGPICPSAGSG

SEQ ID NO: 77893 - protein, 146 aa, Homo sapiens
  Payload ID: 15521
  Gene Symbol: STK32C
  Gene Name: serine/threonine kinase 32C
  ENSP ID: ENSP00000357608
MLSAVWGAGGPGAGGAARGQPSRKELLLRHHLWSGPRCLSFPLGSLPASLLGLPGATSHRSCLSPNLASGLAARGTQTQSVLFGEVRLPLDGGVRGARKRSLLRAHPRTGILPGRCGMVWKDKKLQPSGCHEKAGGVFCGPSRGGV

SEQ ID NO: 77894 - protein, 239 aa, Homo sapiens
  Payload ID: 15521
  Gene Symbol: STK32C
  Gene Name: serine/threonine kinase 32C
  ENSP ID: ENSP00000357609
MLSAVWGAGGPGAGGAARGQPSRKELLLRHHLWSGPRCLSFPLGSLPASLLGLPGATSHRSCLSPNLASGLAARGTQTQSVLFGEVRLPLDGGVRGARKRMNFDHFQILRAIGKGSFGKVSPRVPRRPQASCRTALCPPGVHCAEAGHGEDVRHEVHEQAAVHRARRGPQRLPGAGDPAGDRARLPGEPLVLLPGRGGHVHGRGPATGRGPALPPAAERAVLRGHGEAVHLRDGTGSGL

SEQ ID NO: 77895 - protein, 369 aa, Homo sapiens
  Payload ID: 15521
  Gene Symbol: STK32C
  Gene Name: serine/threonine kinase 32C
  Uniprot ID: Q86UX6
  ENSP ID: ENSP00000357611
MYAMKYMNKQQCIERDEVRNVFRELEILQEIEHVFLVNLWYSFQDEEDMFMVVDLLLGGDLRYHLQQNVQFSEDTVRLYICEMALALDYLRGQHIIHRDVKPDNILLDERGHAHLTDFNIATIIKDGERATALAGTKPYMAPEIFHSFVNGGTGYSFEVDWWSVGVMAYELLRGWRPYDIHSSNAVESLVQLFSTVSVQYVPTWSKEMVALLRKLLTVNPEHRLSSLQDVQAAPALAGVLWDHLSEKRVEPGFVPNKGRLHCDPTFELEEMILESRPLHKKKKRLAKNKSRDNSRDSSQSENDYLQDCLDAIQQDFVIFNREKLKRSQDLPREPLPAPESRDAAEPVEDEAERSALPMCGPICPSAGSG

SEQ ID NO: 77896 - protein, 102 aa, Homo sapiens
  Payload ID: 15521
  Gene Symbol: STK32C
  Gene Name: serine/threonine kinase 32C
  ENSP ID: ENSP00000389112
MLSAVWGAGGPGAGGAARGQPSRKELLLRHHLWSGPRCLSFPLGSLPASLLGLPGATSHRSCLSPNLASGLAARGTQTQSVLFGEVRLPLDGGVRGARKRRS

SEQ ID NO: 77897 - protein, 514 aa, Homo sapiens
  Payload ID: 15522
  Gene Symbol: STK33
  Gene Name: serine/threonine kinase 33
  Uniprot ID: Q9BYT3
  ENSP ID: ENSP00000320754
MADSGLDKKSTKCPDCSSASQKDVLCVCSSKTRVPPVLVVEMSQTSSIGSAESLISLERKKEKNINRDITSRKDLPSRTSNVERKASQQQWGRGNFTEGKVPHIRIENGAAIEEIYTFGRILGKGSFGIVIEATDKETETKWAIKKVNKEKAGSSAVKLLEREVNILKSVKHEHIIHLEQVFETPKKMYLVMELCEDGELKEILDRKGHFSENETRWIIQSLASAIAYLHNNDIVHRDLKLENIMVKSSLIDDNNEINLNIKVTDFGLAVKKQSRSEAMLQATCGTPIYMAPEVISAHDYSQQCDIWSIGVVMYMLLRGEPPFLASSEEKLFELIRKGELHFENAVWNSISDCAKSVLKQLMKVDPAHRITAKELLDNQWLTGNKLSSVRPTNVLEMMKEWKNNPESVEENTTEEKNKPSTEEKLKSYQPWGNVPDANYTSDEEEEKQSTAYEKQFPATSKDNFDMCSSSFTSSKLLPAEIKGEMEKTPVTPSQGTATKYPAKSGALSRTKKKL

SEQ ID NO: 77898 - protein, 327 aa, Homo sapiens
  Payload ID: 15522
  Gene Symbol: STK33
  Gene Name: serine/threonine kinase 33
  ENSP ID: ENSP00000351743
MYLVMELCEDGELKEILDRKGHFSENETRWIIQSLASAIAYLHNNDIVHRDLKLENIMVKSSLIDDNNEINLNIKVTDFGLAVKKQSRSEAMLQATCGTPIYMAPEVISAHDYSQQCDIWSIGVVMYMLLRGEPPFLASSEEKLFELIRKGELHFENAVWNSISDCAKSVLKQLMKVDPAHRITAKELLDNQWLTGNKLSSVRPTNVLEMMKEWKNNPESVEENTTEEKNKPSTEEKLKSYQPWGNVPDANYTSDEEEEKQSTAYEKQFPATSKDNFDMCSSSFTSSKLLPAEIKGEMEKTPVTPSQGTATKYPAKSGALSRTKKKL

SEQ ID NO: 77899 - protein, 514 aa, Homo sapiens; identical to SEQ ID NO: 77897
  Payload ID: 15522
  Gene Symbol: STK33
  Gene Name: serine/threonine kinase 33
  Uniprot ID: Q9BYT3
  ENSP ID: ENSP00000379905

SEQ ID NO: 77900 - protein, 215 aa, Homo sapiens
  Payload ID: 15522
  Gene Symbol: STK33
  Gene Name: serine/threonine kinase 33
  ENSP ID: ENSP00000391362
MSQTSSIGSAESLISLERKKEKNINRDITSRKDLPSRTSNVERKASQQQWGRGNFTEGKVPHIRIENGAAIEEIYTFGRILGKGSFGIVIEATDKETETKWAIKKVNKEKAGSSAVKLLEREVNILKSVKHEHIIHLEQVFETPKKMYLVMELCEDGELKEILDRKGHFSENETRWIIQSLASAIAYLHNNDIVHRDLKLENIMVKSSLIDDNNE

SEQ ID NO: 77901 - protein, 63 aa, Homo sapiens
  Payload ID: 15522
  Gene Symbol: STK33
  Gene Name: serine/threonine kinase 33
  ENSP ID: ENSP00000397569
MADSGLDKKSTKCPDCSSASQKDVLCVCSSKTRVPPVLVVEMSQTSSIGSAESLISLERKKEK

SEQ ID NO: 77902 - protein, 37 aa, Homo sapiens
  Payload ID: 15522
  Gene Symbol: STK33
  Gene Name: serine/threonine kinase 33
  ENSP ID: ENSP00000397874
MADSGLDKKSTKCPDCSSASQKDVLCVCSSKTRVPPV

SEQ ID NO: 77903 - protein, 171 aa, Homo sapiens
  Payload ID: 15522
  Gene Symbol: STK33
  Gene Name: serine/threonine kinase 33
  ENSP ID: ENSP00000403599
MADSGLDKKSTKCPDCSSASQKDVLCVCSSKTRVPPVLVVEMSQTSSIGSAESLISLERKKEKNINRDITSRKDLPSRTSNVERKASQQQWGRGNFTEGKVPHIRIENGAAIEEIYTFGRILGKGSFGIVIEATDKETETKWAIKKVNKEKAGSSAVKLLEREVNILKSVK

SEQ ID NO: 77904 - protein, 191 aa, Homo sapiens
  Payload ID: 15522
  Gene Symbol: STK33
  Gene Name: serine/threonine kinase 33
  ENSP ID: ENSP00000411510
MSQTSSIGSAESLISLERKKEKNINRDITSRKDLPSRTSNVERKASQQQWGRGNFTEGKVPHIRIENGAAIEEIYTFGRILGKGSFGIVIEATDKETETKWAIKKVNKEKAGSSAVKLLEREVNILKSVKHEHIIHLEQVFETPKKMYLVMELCEDGELKEILDRKGHFSENETRWIIQSLASAIAYLHNN

SEQ ID NO: 77905 - protein, 203 aa, Homo sapiens
  Payload ID: 15522
  Gene Symbol: STK33
  Gene Name: serine/threonine kinase 33
  ENSP ID: ENSP00000415688
VKSSLIDDNNEINLNIKVTDFGLAVKKQSRSEAMLQATCGTPIYMAPEVISAHDYSQQCDIWSIGVVMYMLLRGEPPFLASSEEKLFELIRKGELHFENAVWNSISDCAKSVLKQLMKVDPAHRITAKELLDNQWLTSTAYEKQFPATSKDNFDMCSSSFTSSKLLPAEIKGEMEKTPVTPSQGTATKYPAKSGALSRTKKKL

SEQ ID NO: 77906 - protein, 514 aa, Homo sapiens; identical to SEQ ID NO: 77897
  Payload ID: 15522
  Gene Symbol: STK33
  Gene Name: serine/threonine kinase 33
  Uniprot ID: Q9BYT3
  ENSP ID: ENSP00000416750

SEQ ID NO: 77907 - protein, 29 aa, Homo sapiens
  Payload ID: 15522
  Gene Symbol: STK33
  Gene Name: serine/threonine kinase 33
  ENSP ID: ENSP00000432822
MADSGLDKKSTKCPDCSSASQKDVLCVCS

SEQ ID NO: 77908 - protein, 473 aa, Homo sapiens
  Payload ID: 15522
  Gene Symbol: STK33
  Gene Name: serine/threonine kinase 33
  ENSP ID: ENSP00000436418
MSQTSSIGSAESLISLERKKEKNINRDITSRKDLPSRTSNVERKASQQQWGRGNFTEGKVPHIRIENGAAIEEIYTFGRILGKGSFGIVIEATDKETETKWAIKKVNKEKAGSSAVKLLEREVNILKSVKHEHIIHLEQVFETPKKMYLVMELCEDGELKEILDRKGHFSENETRWIIQSLASAIAYLHNNDIVHRDLKLENIMVKSSLIDDNNEINLNIKVTDFGLAVKKQSRSEAMLQATCGTPIYMAPEVISAHDYSQQCDIWSIGVVMYMLLRGEPPFLASSEEKLFELIRKGELHFENAVWNSISDCAKSVLKQLMKVDPAHRITAKELLDNQWLTGNKLSSVRPTNVLEMMKEWKNNPESVEENTTEEKNKPSTEEKLKSYQPWGNVPDANYTSDEEEEKQSTAYEKQFPATSKDNFDMCSSSFTSSKLLPAEIKGEMEKTPVTPSQGTATKYPAKSGALSRTKKKL

SEQ ID NO: 77909 - protein, 211 aa, Homo sapiens
  Payload ID: 15522
  Gene Symbol: STK33
  Gene Name: serine/threonine kinase 33
  ENSP ID: ENSP00000436905
AESLISLERKKEKNINRDITSRKDLPSRTSNVERKASQQQWGRGNFTEGKVPHIRIENGAAIEAGSSAVKLLEREVNILKSVKHEHIIHLEQVFETPKKMYLVMELCEDGELKEILDRKGHFSENETRWIIQSLASAIAYLHNNDIVHRDLKLENIMVKSSLIDDNNEINLNIKVTDFGLAVKKQSRSEAMLQATCGTPIYMAPEVISAHD

SEQ ID NO: 77910 - protein, 534 aa, Homo sapiens [sequence omitted]

SEQ ID NO: 77911 - protein, 395 aa, Homo sapiens
  Payload ID: 15523
  Gene Symbol: STK35
  Gene Name: serine/threonine kinase 35
  ENSP ID: ENSP00000426612
GARRGTQSPERKRRSPVPRAPSTKLRPAAAARAMDPVAAEAPGEAFLARRRPEGGGGSARPRYSLLAEIGRGSYGVVYEAVAGRSGARVAVKKIRCDAPENVELALAEFWALTSLKRRHQNVVQFEECVLQRNGLAQRMSHGNKSSQLYLRLVETSLKGERILGYAEEPCYLWFVMEFCEGGDLNQYVLSRRPDPATNKSFMLQLTSAIAFLHKNHIVHRDLKPDNILITERSGTPILKVADFGLSKVCAGLAPRGKEGNQDNKNVNVNKYWLSSACGSDFYMAPEVWEGHYTAKADIFALGIIIWAMIERITFIDSETKKELLGTYIKQGTEIVPVGEALLENPKMELHIPQKRRTSMSEGIKQLLKDMLAANPQDRPDAFELETRMDQVTCAA

SEQ ID NO: 77912 - protein, 1315 aa, Homo sapiens
  Payload ID: 15524
  Gene Symbol: STK36
  Gene Name: serine/threonine kinase 36
  Uniprot ID: Q9NRP7
  ENSP ID: ENSP00000295709
MEKYHVLEMIGEGSFGRVYKGRRKYSAQVVALKFIPKLGRSEKELRNLQREIEIMRGLRHPNIVHMLDSFETDKEVVVVTDYAEGELFQILEDDGKLPEDQVQAIAAQLVSALYYLHSHRILHRDMKPQNILLAKGGGIKLCDFGFARAMSTNTMVLTSIKGTPLYMSPELVEERPYDHTADLWSVGCILYELAVGTPPFYATSIFQLVSLILKDPVRWPSTISPCFKNFLQGLLTKDPRQRLSWPDLLYHPFIAGHVTIITEPAGPDLGTPFTSRLPPELQVLKDEQAHRLAPKGNQSRILTQAYKRMAEEAMQKKHQNTGPALEQEDKTSKVAPGTAPLPRLGATPQESSLLAGILASELKSSWAKSGTGEVPSAPRENRTTPDCERAFPEERPEVLGQRSTDVVDLENEEPDSDNEWQHLLETTEPVPIQLKAPLTLLCNPDFCQRIQSQLHEAGGQILKGILEGASHILPAFRVLSSLLSSCSDSVALYSFCREAGLPGLLLSLLRHSQESNSLQQQSWYGTFLQDLMAVIQAYFACTFNLERSQTSDSLQVFQEAANLFLDLLGKLLAQPDDSEQTLRRDSLMCFTVLCEAMDGNSRAISKAFYSSLLTTQQVVLDGLLHGLTVPQLPVHTPQGAPQVSQPLREQSEDIPGAISSALAAICTAPVGLPDCWDAKEQVCWHLANQLTEDSSQLRPSLISGLQHPILCLHLLKVLYSCCLVSEGLCRLLGQEPLALESLFMLIQGKVKVVDWEESTEVTLYFLSLLVFRLQNLPCGMEKLGSDVATLFTHSHVVSLVSAAACLLGQLGQQGVTFDLQPMEWMAAATHALSAPAEVRLTPPGSCGFYDGLLILLLQLLTEQGKASLIRDMSSSEMWTVLWHRFSMVLRLPEEASAQEGELSLSSPPSPEPDWTLISPQGMAALLSLAMATFTQEPQLCLSCLSQHGSILMSILKHLLCPSFLNQLRQAPHGSEFLPVVVLSVCQLLCFPFALDMDADLLIGVLADLRDSEVAAHLLQVCCYHLPLMQVELPISLLTRLALMDPTSLNQFVNTVSASPRTIVSFLSVALLSDQPLLTSDLLSLLAHTARVLSPSHLSFIQELLAGSDESYRPLRSLLGHPENSVRAHTYRLLGHLLQHSMALRGALQSQSGLLSLLLLGLGDKDPVVRCSASFAVGNAAYQAGPLGPALAAAVPSMTQLLGDPQAGIRRNVASALGNLGPEGLGEELLQCEVPQRLLEMACGDPQPNVKEAALIALRSLQQEPGIHQVLVSLGASEKLSLLSLGNQSLPHSSPRPASAKHCRKLIHLLRPAHSM

SEQ ID NO: 77913 - protein, 1294 aa, Homo sapiens
  Payload ID: 15524
  Gene Symbol: STK36
  Gene Name: serine/threonine kinase 36
  Uniprot ID: Q9NRP7
  ENSP ID: ENSP00000375954
MEKYHVLEMIGEGSFGRVYKGRRKYSAQVVALKFIPKLGRSEKELRNLQREIEIMRGLRHPNIVHMLDSFETDKEVVVVTDYAEGELFQILEDDGKLPEDQVQAIAAQLVSALYYLHSHRILHRDMKPQNILLAKGGGIKLCDFGFARAMSTNTMVLTSIKGTPLYMSPELVEERPYDHTADLWSVGCILYELAVGTPPFYATSIFQLVSLILKDPVRWPSTISPCFKNFLQGLLTKDPRQRLSWPDLLYHPFIAGHVTIITEPAGPDLGTPFTSRLPPELQVLKDEQAHRLAPKGNQSRILTQAYKRMAEEAMQKKHQNTGPALEQEDKTSKVAPGTAPLPRLGATPQESSLLAGILASELKSSWAKSGTGEVPSAPRENRTTPDCERAFPEERPEVLGQRSTDVVDLENEEPDSDNEWQHLLETTEPVPIQLKAPLTLLCNPDFCQRIQSQLHEAGGQILKGILEGASHILPAFRVLSSLLSSCSDSVALYSFCREAGLPGLLLSLLRHSQESNSLQQQSWYGTFLQDLMAVIQAYFACTFNLERSQTSDSLQVFQEAANLFLDLLGKLLAQPDDSEQTLRRDSLMCFTVLCEAMDGNSRAISKAFYSSLLTTQQVVLDGLLHGLTVPQLPVHTPQGAPQVSQPLREQSEDIPGAISSALAAICTAPVGLPDCWDAKEQVCWHLANQLTEDSSQLRPSLISGLQHPILCLHLLKVLYSCCLVSEGLCRLLGQEPLALESLFMLIQGKVKVVDWEESTEVTLYFLSLLVFRLQNLPCGMEKLGSDVATLFTHSHVVSLVSAAACLLGQLGQQGVTFDLQPMEWMAAATHALSAPAELLTEQGKASLIRDMSSSEMWTVLWHRFSMVLRLPEEASAQEGELSLSSPPSPEPDWTLISPQGMAALLSLAMATFTQEPQLCLSCLSQHGSILMSILKHLLCPSFLNQLRQAPHGSEFLPVVVLSVCQLLCFPFALDMDADLLIGVLADLRDSEVAAHLLQVCCYHLPLMQVELPISLLTRLALMDPTSLNQFVNTVSASPRTIVSFLSVALLSDQPLLTSDLLSLLAHTARVLSPSHLSFIQELLAGSDESYRPLRSLLGHPENSVRAHTYRLLGHLLQHSMALRGALQSQSGLLSLLLLGLGDKDPVVRCSASFAVGNAAYQAGPLGPALAAAVPSMTQLLGDPQAGIRRNVASALGNLGPEGLGEELLQCEVPQRLLEMACGDPQPNVKEAALIALRSLQQEPGIHQVLVSLGASEKLSLLSLGNQSLPHSSPRPASAKHCRKLIHLLRPAHSM

SEQ ID NO: 77914 - protein, 1315 aa, Homo sapiens; identical to SEQ ID NO: 77912
  Payload ID: 15524
  Gene Symbol: STK36
  Gene Name: serine/threonine kinase 36
  Uniprot ID: Q9NRP7
  ENSP ID: ENSP00000394095

SEQ ID NO: 77915 - protein, 75 aa, Homo sapiens
  Payload ID: 15524
  Gene Symbol: STK36
  Gene Name: serine/threonine kinase 36
  ENSP ID: ENSP00000400055
MRGLRHPNIVHMLDSFETDKEVVVVTDYAEGELFQILEDDGKLPEDQVQAIAAQLVSALYYLHSHRILHRDMKPQ

SEQ ID NO: 77916 - protein, 278 aa, Homo sapiens
  Payload ID: 15524
  Gene Symbol: STK36
  Gene Name: serine/threonine kinase 36
  ENSP ID: ENSP00000403527
MEKYHVLEMIGEGSFGRVYKGRRKYSAQVVALKFIPKLGRSEKELRNLQREIEIMRGLRHPNIVHMLDSFETDKEVVVVTDYAEGELFQILEDDGKLPEDQVQAIAAQLVSALYYLHSHRILHRDMKPQNILLAKGGGIKLCDFGFARAMSTNTMVLTSIKGTPLYMSPELVEERPYDHTADLWSVGCILYELAVGTPPFYATSIFQLVSLILKDPVRWPSTISPCFKNFLQGLLTKDPRQRLSWPDLLYHPFIAGHVTIITEPAGPDLGTPFTSRLP

SEQ ID NO: 77917 - protein, 148 aa, Homo sapiens
  Payload ID: 15524
  Gene Symbol: STK36
  Gene Name: serine/threonine kinase 36
  ENSP ID: ENSP00000404719
  MOD_RES (1)..(1): Any amino acid
XRLTPPGSCGFYDGLLILLLQLLTEQGKASLIRDMSSSEMWTVLWHRFSMVLRLPEEASAQEGELSLSSPPSPEPDWTLISPQGMAALLSLAMATFTQEPQLCLSCLSQHGSILMSILKHLLCPSFLNQLRQASFASPLRWTWMLTSL

SEQ ID NO: 77918 - protein, 106 aa, Homo sapiens
  Payload ID: 15524
  Gene Symbol: STK36
  Gene Name: serine/threonine kinase 36
  ENSP ID: ENSP00000406184
  MOD_RES (1)..(1): Any amino acid
XGTGEVPSAPRENRTTPDCERAFPEERPEVLGQRSTDVVDLENEEPDSDNEWQHLLETTEPVPIQLKAPLTLLCNPDFCQRIQSQLHEAGGQVKGWRREGADGNGT

SEQ ID NO: 77919 - protein, 66 aa, Homo sapiens
  Payload ID: 15524
  Gene Symbol: STK36
  Gene Name: serine/threonine kinase 36
  ENSP ID: ENSP00000409688
  MOD_RES (1)..(1): Any amino acid
XENEEPDSDNEWQHLLETTEPVPIQLKAPLTLLCNPDFCQRIQSQLHEAGGQVKGWRREGADGNGT

SEQ ID NO: 77920 - protein, 465 aa, Homo sapiens
  Payload ID: 15525
  Gene Symbol: STK38
  Gene Name: serine/threonine kinase 38
  Uniprot ID: Q15208
  ENSP ID: ENSP00000229812
MAMTGSTPCSSMSNHTKERVTMTKVTLENFYSNLIAQHEEREMRQKKLEKVMEEEGLKDEEKRLRRSAHARKETEFLRLKRTRLGLEDFESLKVIGRGAFGEVRLVQKKDTGHVYAMKILRKADMLEKEQVGHIRAERDILVEADSLWVVKMFYSFQDKLNLYLIMEFLPGGDMMTLLMKKDTLTEEETQFYIAETVLAIDSIHQLGFIHRDIKPDNLLLDSKGHVKLSDFGLCTGLKKAHRTEFYRNLNHSLPSDFTFQNMNSKRKAETWKRNRRQLAFSTVGTPDYIAPEVFMQTGYNKLCDWWSLGVIMYEMLIGYPPFCSETPQETYKKVMNWKETLTFPPEVPISEKAKDLILRFCCEWEHRIGAPGVEEIKSNSFFEGVDWEHIRERPAAISIEIKSIDDTSNFDEFPESDILKPTVATSNHPETDYKNKDWVFINYTYKRFEGLTARGAIPSYMKAAK

SEQ ID NO: 77921 - protein, 464 aa, Homo sapiens
  Payload ID: 15526
  Gene Symbol: STK38L
  Gene Name: serine/threonine kinase 38 like
  Uniprot ID: Q9Y2H1
  ENSP ID: ENSP00000373684
MAMTAGTTTTFPMSNHTRERVTVAKLTLENFYSNLILQHEERETRQKKLEVAMEEEGLADEEKKLRRSQHARKETEFLRLKRTRLGLDDFESLKVIGRGAFGEVRLVQKKDTGHIYAMKILRKSDMLEKEQVAHIRAERDILVEADGAWVVKMFYSFQDKRNLYLIMEFLPGGDMMTLLMKKDTLTEEETQFYISETVLAIDAIHQLGFIHRDIKPDNLLLDAKGHVKLSDFGLCTGLKKAHRTEFYRNLTHNPPSDFSFQNMNSKRKAETWKKNRRQLAYSTVGTPDYIAPEVFMQTGYNKLCDWWSLGVIMYEMLIGYPPFCSETPQETYRKVMNWKETLVFPPEVPISEKAKDLILRFCIDSENRIGNSGVEEIKGHPFFEGVDWEHIRERPAAIPIEIKSIDDTSNFDDFPESDILQPVPNTTEPDYKSKDWVFLNYTYKRFEGLTQRGSIPTYMKAGKL

SEQ ID NO: 77922 - protein, 89 aa, Homo sapiens
  Payload ID: 15526
  Gene Symbol: STK38L
  Gene Name: serine/threonine kinase 38 like
  ENSP ID: ENSP00000385174
  MOD_RES (1)..(1): Any amino acid
XQKKLEVAMEEEGLADEEKKLRRSQHARKETEFLRLKRTRLGLDDFESLKVIGRGAFGEVRLVQKKDTGHIYAMKILRKSDMLEKEQVT

SEQ ID NO: 77923 - protein, 131 aa, Homo sapiens
  Payload ID: 15526
  Gene Symbol: STK38L
  Gene Name: serine/threonine kinase 38 like
  ENSP ID: ENSP00000437856
MAMTAGTTTTFPMSNHTRERVTVAKLTLENFYSNLILQHEERETRQKKLEVAMEEEGLADEEKKLRRSQHARKETEFLRLKRTRLGLDDFESLKVIGRGAFGEVRLVQKKDTGHIYAMKILRKSDMLEKEQ

SEQ ID NO: 77924 - protein, 213 aa, Homo sapiens
  Payload ID: 15526
  Gene Symbol: STK38L
  Gene Name: serine/threonine kinase 38 like
  ENSP ID: ENSP00000439457
MAMTAGTTTTFPMSNHTRERVTVAKLTLENFYSNLILQHEERETRQKKLEVAMEEEGLADEEVRLVQKKDTGHIYAMKILRKSDMLEKEQVAHIRAERDILVEADGAWVVKMFYSFQDKRNLYLIMEFLPGGDMMTLLMKKDTLTEEETQFYISETVLAIDAIHQLGFIHRDIKPDNLLLDAKGHVKLSDFGLCTGLKKAHRTEFYRNLTHNP

SEQ ID NO: 77925 - protein, 131 aa, Homo sapiens; identical to SEQ ID NO: 77923
  Payload ID: 15526
  Gene Symbol: STK38L
  Gene Name: serine/threonine kinase 38 like
  ENSP ID: ENSP00000440279

SEQ ID NO: 77926 - protein, 131 aa, Homo sapiens; identical to SEQ ID NO: 77923
  Payload ID: 15526
  Gene Symbol: STK38L
  Gene Name: serine/threonine kinase 38 like
  ENSP ID: ENSP00000442253

SEQ ID NO: 77927 - protein, 56 aa, Homo sapiens
  Payload ID: 15526
  Gene Symbol: STK38L
  Gene Name: serine/threonine kinase 38 like
  ENSP ID: ENSP00000443456
MAMTAGTTTTFPMSNHTRERVTVAKLTLENFYSNLILQHEERETRGENWKSFNKQH

SEQ ID NO: 77928 - protein, 94 aa, Homo sapiens
  Payload ID: 15526
  Gene Symbol: STK38L
  Gene Name: serine/threonine kinase 38 like
  ENSP ID: ENSP00000443838
MAMTAGTTTTFPMSNHTRERVTVAKLTLENFYSNLILQHEERETRQKKLEVAMEEEGLADEEKKLRRSQHARKETEFLRLKRTRLGLDDFESLK

SEQ ID NO: 77929 - protein, 87 aa, Homo sapiens
  Payload ID: 15526
  Gene Symbol: STK38L
  Gene Name: serine/threonine kinase 38 like
  ENSP ID: ENSP00000443961
YISETVLAIDAIHQLGFIHRDIKPDNLLLDAKGHVKLSDFGLCTGLKKAHRTEFYRNLTHNPPSDFYVYVFSFCGEHFSLVITIPYC

SEQ ID NO: 77930 - protein, 64 aa, Homo sapiens
  Payload ID: 15526
  Gene Symbol: STK38L
  Gene Name: serine/threonine kinase 38 like
  ENSP ID: ENSP00000445898
MAMTAGTTTTFPMSNHTRERVTVAKLTLENFYSNLILQHEERETRQKKLEVAMEEEGLADEEVM

SEQ ID NO: 77931 - protein, 462 aa, Homo sapiens
  Payload ID: 15527
  Gene Symbol: STK4
  Gene Name: serine/threonine kinase 4
  Uniprot ID: Q13043
  ENSP ID: ENSP00000361887
METVQLRNPPRRQLKKLDEDSLTKQPEEVFDVLEKLGEGSYGSVYKAIHKETGQIVAIKQVPVESDLQEIIKEISIMQQCDSPHVVKYYGSYFKNTDLWIVMEYCGAGSVSDIIRLRNKTLTEDEIATILQSTLKGLEYLHFMRKIHRDIKAGNILLNTEGHAKLADFGVAGQLTDTMAKRNTVIGTPFWMAPEVIQEIGYNCVADIWSLGITAIEMAEGKPPYADIHPMRAIFMIPTNPPPTFRKPELWSDNFTDFVKQCLVKSPEQRATATQLLQHPFVRSAKGVSILRDLINEAMDVKLKRQESQQREVDQDDEENSEEDEMDSGTMVRAVGDEMGTVRVASTMTDGANTMIEHDDTLPSQLGTMVINAEDEEEEGTMKRRDETMQPAKPSFLEYFEQKEKENQINSFGKSVPGPLKNSSDWKIPQDGDYEFKTSQEQQSGKDICIQNCQGNLLCRYAF

SEQ ID NO: 77932 - protein, 487 aa, Homo sapiens
  Payload ID: 15527
  Gene Symbol: STK4
  Gene Name: serine/threonine kinase 4
  Uniprot ID: Q13043
  ENSP ID: ENSP00000361892
METVQLRNPPRRQLKKLDEDSLTKQPEEVFDVLEKLGEGSYGSVYKAIHKETGQIVAIKQVPVESDLQEIIKEISIMQQCDSPHVVKYYGSYFKNTDLWIVMEYCGAGSVSDIIRLRNKTLTEDEIATILQSTLKGLEYLHFMRKIHRDIKAGNILLNTEGHAKLADFGVAGQLTDTMAKRNTVIGTPFWMAPEVIQEIGYNCVADIWSLGITAIEMAEGKPPYADIHPMRAIFMIPTNPPPTFRKPELWSDNFTDFVKQCLVKSPEQRATATQLLQHPFVRSAKGVSILRDLINEAMDVKLKRQESQQREVDQDDEENSEEDEMDSGTMVRAVGDEMGTVRVASTMTDGANTMIEHDDTLPSQLGTMVINAEDEEEEGTMKRRDETMQPAKPSFLEYFEQKEKENQINSFGKSVPGPLKNSSDWKIPQDGDYEFLKSWTVEDLQKRLLALDPMMEQEIEEIRQKYQSKRQPILDAIEAKKRRQQNF

SEQ ID NO: 77933 - protein, 432 aa, Homo sapiens
  Payload ID: 15527
  Gene Symbol: STK4
  Gene Name: serine/threonine kinase 4
  ENSP ID: ENSP00000443514
METVQLRNPPRRQLKKLDEDSLTKQPEEVFDVLEKLGEGSYGSVYKAIHKETGQIVAIKQVPVESDLQEIIKEISIMQQCDSPHVVKYYGSYFKNTDLWIVMEYCGAGSVSDIIRLRNKTDTMAKRNTVIGTPFWMAPEVIQEIGYNCVADIWSLGITAIEMAEGKPPYADIHPMRAIFMIPTNPPPTFRKPELWSDNFTDFVKQCLVKSPEQRATATQLLQHPFVRSAKGVSILRDLINEAMDVKLKRQESQQREVDQDDEENSEEDEMDSGTMVRAVGDEMGTVRVASTMTDGANTMIEHDDTLPSQLGTMVINAEDEEEEGTMKRRDETMQPAKPSFLEYFEQKEKENQINSFGKSVPGPLKNSSDWKIPQDGDYEFLKSWTVEDLQKRLLALDPMMEQEIEEIRQKYQSKRQPILDAIEAKKRRQQNF

SEQ ID NO: 77934 - protein, 155 aa, Homo sapiens
  Payload ID: 15527
  Gene Symbol: STK4
  Gene Name: serine/threonine kinase 4
  ENSP ID: ENSP00000479564
MQQCDSPHVVKYYGSYFKNTDLWIVMEYCGAGSVSDIIRLRNKTLTEDEIATILQSTLKGLEYLHFMRKIHRDIKAGNILLNTEGHAKLADFGVAGQLTDTMAKRNTVIGTPFWMAPEVIQEIGYNCVADIWSLGITAIEMAEGKPPYADIHPMR

SEQ ID NO: 77935 - protein, 64 aa, Homo sapiens
  Payload ID: 15527
  Gene Symbol: STK4
  Gene Name: serine/threonine kinase 4
  ENSP ID: ENSP00000482076
METVQLRNPPRRQLKKLDEDSLTKQPEEVFDVLEKLGEGWKNTLWNPARNQAEKGSKNDTPAVL

SEQ ID NO: 77936 - protein, 417 aa, Homo sapiens
  Payload ID: 15528
  Gene Symbol: STK40
  Gene Name: serine/threonine kinase 40
  Uniprot ID: Q8N2I9
  ENSP ID: ENSP00000352245
MKRRASDRGAGETSARAKALGSGISGNNAKRAGPFILGPRLGNSPVPSIVQCLARKDGTDDFYQLKILTLEERGDQGIESQEERQGKMLLHTEYSLLSLLHTQDGVVHHHGLFQDRTCEIVEDTESSRMVKKMKKRICLVLDCLCAHDFSDKTADLINLQHYVIKEKRLSERETVVIFYDVVRVVEALHQKNIVHRDLKLGNMVLNKRTHRITITNFCLGKHLVSEGDLLKDQRGSPAYISPDVLSGRPYRGKPSDMWALGVVLFTMLYGQFPFYDSIPQELFRKIKAAEYTIPEDGRVSENTVCLIRKLLVLDPQQRLAAADVLEALSAIIASWQSLSSLSGPLQVVPDIDDQMSNADSSQEVSWGGQMGHYPAPRDRLLGAGRARAEVAATRRPQSFLGLLPQPWGGKGRLQSSA

SEQ ID NO: 77937 - protein, 435 aa, Homo sapiens
  Payload ID: 15528
  Gene Symbol: STK40
  Gene Name: serine/threonine kinase 40
  Uniprot ID: Q8N2I9
  ENSP ID: ENSP00000362221
MKRRASDRGAGETSARAKALGSGISGNNAKRAGPFILGPRLGNSPVPSIVQCLARKDGTDDFYQLKILTLEERGDQGIESQEERQGKMLLHTEYSLLSLLHTQDGVVHHHGLFQDRTCEIVEDTESSRMVKKMKKRICLVLDCLCAHDFSDKTADLINLQHYVIKEKRLSERETVVIFYDVVRVVEALHQKNIVHRDLKLGNMVLNKRTHRITITNFCLGKHLVSEGDLLKDQRGSPAYISPDVLSGRPYRGKPSDMWALGVVLFTMLYGQFPFYDSIPQELFRKIKAAEYTIPEDGRVSENTVCLIRKLLVLDPQQRLAAADVLEALSAIIASWQSLSSLSGPLQVVPDIDDQMSNADSSQEAKVTEECSQYEFENYMRQQLLLAEEKSSIHDARSWVPKRQFGSAPPVRRLGHDAQPMTSLDTAILAQRYLRK

SEQ ID NO: 77938 - protein, 440 aa, Homo sapiens
  Payload ID: 15528
  Gene Symbol: STK40
  Gene Name: serine/threonine kinase 40
  Uniprot ID: Q8N2I9
  ENSP ID: ENSP00000362222
MKRRASDRGAGETSARAKALGSGISGNNAKRAGPFILALCAVGPRLGNSPVPSIVQCLARKDGTDDFYQLKILTLEERGDQGIESQEERQGKMLLHTEYSLLSLLHTQDGVVHHHGLFQDRTCEIVEDTESSRMVKKMKKRICLVLDCLCAHDFSDKTADLINLQHYVIKEKRLSERETVVIFYDVVRVVEALHQKNIVHRDLKLGNMVLNKRTHRITITNFCLGKHLVSEGDLLKDQRGSPAYISPDVLSGRPYRGKPSDMWALGVVLFTMLYGQFPFYDSIPQELFRKIKAAEYTIPEDGRVSENTVCLIRKLLVLDPQQRLAAADVLEALSAIIASWQSLSSLSGPLQVVPDIDDQMSNADSSQEAKVTEECSQYEFENYMRQQLLLAEEKSSIHDARSWVPKRQFGSAPPVRRLGHDAQPMTSLDTAILAQRYLRK

SEQ ID NO: 77939 - protein, 435 aa, Homo sapiens; identical to SEQ ID NO: 77937
  Payload ID: 15528
  Gene Symbol: STK40
  Gene Name: serine/threonine kinase 40
  Uniprot ID: Q8N2I9
  ENSP ID: ENSP00000362224

SEQ ID NO: 77940 - protein, 363 aa, Homo sapiens
  Payload ID: 15529
  Gene Symbol: STRAP
  Gene Name: serine/threonine kinase receptor associated protein
  Uniprot ID: Q9Y3F4
  ENSP ID: ENSP00000025399
MAMRQTPLTCSGHTRPVVDLAFSGITPYGYFLISACKGAGQHLPRLSGQHDGKPMLRQGDTGDWIGTFLGHKGAVWGATLNKDATKAATAAADFTAKVWDAVSGDELMTLAHKHIVKTVDFTQDSNYLLTGGQDKLLRIYDLNKPEAEPKEISGHTSGIKKALWCSEDKQILSADDKTVRLWDHATMTEVKSLNFNMSVSSMEYIPEGEILVITYGRSIAFHSAVSLDPIKSFEAPATINSASLHPEKEFLVAGGEDFKLYKYDYNSGEELESYKGHFGPIHCVRFSPDGELYASGSEDGTLRLWQTVVGKTYGLWKCVLPEEDSGELAKPKIGFPETTEEELEEIASENSDCIFPSAPDVKA

SEQ ID NO: 77941 - protein, 350 aa, Homo sapiens
  Payload ID: 15529
  Gene Symbol: STRAP
  Gene Name: serine/threonine kinase receptor associated protein
  Uniprot ID: Q9Y3F4
  ENSP ID: ENSP00000392270
MAMRQTPLTCSGHTRPVVDLAFSGITPYGYFLISACKDGKPMLRQGDTGDWIGTFLGHKGAVWGATLNKDATKAATAAADFTAKVWDAVSGDELMTLAHKHIVKTVDFTQDSNYLLTGGQDKLLRIYDLNKPEAEPKEISGHTSGIKKALWCSEDKQILSADDKTVRLWDHATMTEVKSLNFNMSVSSMEYIPEGEILVITYGRSIAFHSAVSLDPIKSFEAPATINSASLHPEKEFLVAGGEDFKLYKYDYNSGEELESYKGHFGPIHCVRFSPDGELYASGSEDGTLRLWQTVVGKTYGLWKCVLPEEDSGELAKPKIGFPETTEEELEEIASENSDCIFPSAPDVKA

SEQ ID NO: 77942 - protein, 46 aa, Homo sapiens
  Payload ID: 15529
  Gene Symbol: STRAP
  Gene Name: serine/threonine kinase receptor associated protein
  ENSP ID: ENSP00000445693
MRQTPLTCSGHTRPVVDLAFSGITPYGYFLISACKAKCGMLSQEMN

SEQ ID NO: 77943 - protein, 95 aa, Homo sapiens
  Payload ID: 15529
  Gene Symbol: STRAP
  Gene Name: serine/threonine kinase receptor associated protein
  ENSP ID: ENSP00000445814
  MOD_RES (1)..(1): Any amino acid
XKEFLVAGGEDFKLYKYDYNSGEELESYKGHFGPIHCVRFSPDGELYASGSEDGTLRLWQTVVGKTYGLWKCVLPEEIASENSDCIFPSAPDVKA

SEQ ID NO: 77944 - protein, 680 aa, Homo sapiens
  Payload ID: 15530
  Gene Symbol: STKLD1
  Gene Name: serine/threonine kinase-like domain containing 1
  Uniprot ID: Q8NE28
  ENSP ID: ENSP00000361025
MLGPGSNRRRPTQGERGPGSPGEPMEKYQVLYQLNPGALGVNLVVEEMETKVKHVIKQVECMDDHYASQALEELMPLLKLRHAHISVYQELFITWNGEISSLYLCLVMEFNELSFQEVIEDKRKAKKIIDSEWMQNVLGQVLDALEYLHHLDIIHRNLKPSNIILISSDHCKLQDLSSNVLMTDKAKWNIRAEEDPFRKSWMAPEALNFSFSQKSDIWSLGCIILDMTSCSFMDGTEAMHLRKSLRQSPGSLKAVLKTMEEKQIPDVETFRNLLPLMLQIDPSDRITIKDVVHITFLRGSFKSSCVSLTLHRQMVPASITDMLLEGNVASILEVMQKFSGWPEVQLRAMKRLLKMPADQLGLPWPPELVEVVVTTMELHDRVLDVQLCACSLLLHLLGQALVHHPEAKAPCNQAITSTLLSALQSHPEEEPLLVMVYSLLAITTTQESESLSEELQNAGLLEHILEHLNSSLESRDVCASGLGLLWALLLDGIIVNKAPLEKVPDLISQVLATYPADGEMAEASCGVFWLLSLLGCIKEQQFEQVVALLLQSIRLCQDRALLVNNAYRGLASLVKVSELAAFKVVVQEEGGSGLSLIKETYQLHRDDPEVVENVGMLLVHLASYEEILPELVSSSMKALLQEIKERFTSSLVSDSSAFSKPGLPPGGSPQLGCTTSGGLE

SEQ ID NO: 77945 - protein, 680 aa, Homo sapiens; identical to SEQ ID NO: 77944
  Payload ID: 15530
  Gene Symbol: STKLD1
  Gene Name: Serine/threonine kinase-like domain containing 1
  ENSP ID: ENSP00000486786

SEQ ID NO: 77946 - protein, 392 aa, Homo sapiens
  Payload ID: 15531
  Gene Symbol: STK26
  Gene Name: serine/threonine protein kinase 26
  ENSP ID: ENSP00000346755
MAHSPVAVQVPGMQNNIADPEELFTKLERIGKGSFGEVFKGIDNRTQQVVAIKIIDLEEAEDEIEDIQQEITVLSQCDSSYVTKYYGSYLKGSKLWIIMEYLGGGSALDLLRAGPFDEFQIATMLKEILKGLDYLHSEKKIHRDIKAANVLLSEQGDVKLADFGVAGQLTDTQIKRNTFVGTPFWMAPEVIQQSAYDSKADIWSLGITAIELAKGEPPNSDMHPMRVLFLIPKNNPPTLVGDFTKSFKEFIDACLNKDPSFRPTAKELLKHKFIVKNSKKTSYLTELIDRFKRWKAEGHSDDESDSEGSDSESTSRENNTHPEWSFTTVRKKPDPKKVQNGAQDENNASRNQAIEELEKSIAVAEAACPGITDKMVKKLIEKFQKCSADESP
